United States Patent Application Publication US 2020/0163878 A1 - sequence listing, part 51

SEQ ID NO: 192971 - RNA, 1701 nt, Artificial Sequence
  derived and/or modified CDS sequence (opt5) from hemagglutinin__InfluenzaA__ABE14464
augaagaccaucauugcccugagcuacauccucugccagguguucgcucaaaaacugcccggcaacgacaauuccacagccacgcuuugucuggggcaccaugcggucccuaacggaacccucguuaagacaauuaccaaugaucagaucgaggugacaaacgcuaccgaacuggugcagucuagcuccacaggcagaauuugcgacucuccgcaccggauccuugaugggaaaaauuguacccugaucgacgcccuccugggagauccccauugcgacggcuuucagaacaaggagugggaucuguucgucgaacgcagcaaagccuauuccaauuguuacccuuaugacgugcccgauuacgcuucucucagaagccugguugccuccagcgggacgcuugaguuuaccaacgaaggauucaauuggacaggcguggcucaagacggcaagucuuaugccugcaagcggggguccgucaacagcuuuuucucucgccugaauuggcuccacaaacuggaguacaaguauccugcgcuuaacgugaccaugcccaauaacgauaaauuugacaagcuguacauuuggggaguucaucacccuuccacagauagcgaccagaccucucucuacgugcaggccuccggcagagucacggugagcacaaaacggucccagcaaaccgugaucccgaauauugggucucgccccugggucagaggaaucagcucccggauuagcaucuauuggacaauuguuaagccuggcgacauccugcugaucaacucuaccgggaaccucauugcuccccgcggauacuucaagaucagaaauggcaaauccagcauuaugcggucugaugccccuaucgacaacuguaauagcgagugcauuacccccaacggcuccaucccgaaugauaagccuuuucagaacgugaaucgcaucacauauggggcuugucccagauacgugaaacagaacacgcugaagcuggccaccggaaugcggaaugucccugaaaaacagacacgcggcauuuucggggcgaucgccggauuuauugagaacggcugggaagggaugaucgacggaugguauggcuucagacaccaaaauucugagggcaccgggcaggcugccgaucuuaagagcacacaggcugccauugaccaaaucaacggaaaacucaaucggcugaucgagaagaccaacgaaaaguuucaucagauugagaaagaguucuccgaaguggaaggcagaauccaggaucuugagaaguacguugaggacacgaaaauugaucuguggagcuauaaugccgaacuccugguggcucuggagaaccagcacacaaucgaccucaccgauucugaaaugaacaagcuguucgagcgcacccggaaacaacuuagagaaaaugcggaggacauggggaacggaugcuuuaagauuuaccauaagugugacaaugccugcaucggcuccauucgcaacgggacauacgaucacgacgucuaucgggaugaggcucugaauaacagauuccagaucaaaggcguggaacucaagagcggauacaaagacuggauccuguggauuucuuuugccaucuccugcuuccuucuguguguugugcuccugggcuuuauuaugugggccugccagaaggggaauauccgcuguaacauuugcaucuga

SEQ ID NO: 192972 - RNA, 1701 nt, Artificial Sequence
  derived and/or modified CDS sequence (opt5) from hemagglutinin__InfluenzaA__ABE14840
augaagaccaucauugcccugagcuacauccucugccugguguucgcucagaaacuucccagaaacgacaauuccacagccacgcugugucucggccaccaugcggucccuaacgggacccugguuaagacaauuaccaaugaucaaaucgaggugacaaacgcuaccgaacuugugcagucuagcuccacaggacggauuugcgacucuccgcaccgcauccuggauggcaaaaauuguacccucaucgacgcccugcugggggauccccauugcgacggauuucagaacaaggagugggaucucuucgucgaaagaagcaaagccuauuccaauuguuacccuuaugacgugcccgauuacgcuucucugcggagccuuguugccuccagcggcacgcuggaguuuaccaacgaaggguucaauuggacaggaguggcucaggacggcaagucuuaugccugcaagcgcggcuccgucaacagcuuuuucucuagacucaauuggcugcacaaacuugaguacaaguauccugcgcugaacgugaccaugcccaauaacgauaaauuugacaagcucuacauuuggggaguucaucacccuuccacagauagcgaccaaaccucucuguacgugcaggccuccgggcgggucacggugagcacaaaacgcucccagcagaccgugaucccgaauauuggcucuagacccuggguccgggggaucagcucccgcauuagcaucuauuggacaauuguuaagccuggagacauccugcucaucucuuccaccggcaaccugauugcucccagaggguacuucaagauccggaacggaaaaagcucuauuaugcgcagcgaugccccuaucgacaauuguaacuccgagugcauuacccccaauggcucuaucccgaacgauaagccuuuucaaaaugugaacagaaucacauauggcgcuuguccccgguacgugaaacagaauacgcuuaagcuggccaccgggaugcgcaacgucccugaaaaacagacaagaggaauuuucggcgcgaucgccggguuuauugagaauggaugggaaggcaugguggacgggugguauggauuccggcaccagaacagcgagggcaccggccaagcugccgaucucaaguccacacaggcugccaucgaccagauuaaugggaaacugaacagacuuaucgagaagaccaaugaaaaguuucaucaaaucgagaaagaguucagcgaaguugaaggacgcauucaggaucuggagaaguacguggaggacacgaaaaucgaucucuggucuuauaacgccgaacugcuggucgcucucgagaaucagcacacaauugaccugaccgauuccgaaaugaacaaacuuuucgagcggaccagaaagcagcugcgcgaaaacgcggaggacaugggcaaugggugcuuuaagaucuaccauaagugugacaacgccugcauuggaagcauccggaauggcacauacgaucacgacguguauagagaugaggcucucaacaaucgcuuccaaauuaaagggguugaacugaagucuggcuacaaagacuggauccuuuggaucuccuuugccauuagcugcuuccugcucugugugguccugcugggauuuaucaugugggccugccagaagggcaacauucgguguuccaucugcauuuga

SEQ ID NO: 192973 - RNA, 1701 nt, Artificial Sequence
  derived and/or modified CDS sequence (opt5) from hemagglutinin__InfluenzaA__ABE15578
augaagaccaucauugcccugagcuacauccucugccugguguucgcucagaaacuucccggcaacgacaauuccacagccacgcugugucucgggcaccaugcggucccuaacggaacccugguuaagacaauuaccaaugaucaaaucgaggugacaaacgcuaccgaacuugugcagucuagcuccacaggcagaauuugcgacucuccgcaccggauccuggaugggaaaaauuguacccucaucgacgcccugcugggagauccccauugcgacggcuuucagaacaaggagugggaucucuucgucgaacgcagcaaagccuauuccaauuguuacccuuaugacgugcccgauuacgcuucucugagaagccuuguugccuccagcgggacgcuggaguuuaccaacgaaggauucaauuggacaggcguggcucaggacggcaagucuuaugccugcaagcggggguccgucaacagcuuuuucucucgccucaauuggcugcacaaacuugaguacaaguauccugcgcugaacgugaccaugcccaauaacgauaaauuugacaagcucuacauuuggggaguucaucacccuuccacagauagcgaccaaaccucucuguacgugcaggccuccggcagagucacggugagcacaaaacggucccagcagaccgugaucccgaauauugggucucgccccugggucagaggaaucagcucccggauuagcaucuauuggacaauuguuaagccuggcgacauccugcucaucaacucuaccgggaaccugauugcuccccgcggauacuucaagaucagaaauggcaaauccagcauuaugcggucugaugccccuaucgacaacuguaauagcgagugcauuacccccaacggcuccaucccgaaugauaagccuuuucaaaacgugaaucgcaucacauauggggcuugucccagauacgugaaacagaacacgcuuaagcuggccaccggaaugcggaaugucccugaaaaacagacacgcggcauuuucggggcgaucgccggauuuauugagaacggcugggaagggaugguggacggaugguauggcuucagacaccaaaauucugagggcaccgggcaggcugccgaucucaagagcacacaggcugccaucgaccagauuaacggaaaacugaaucggcuuaucgagaagaccaacgaaaaguuucaucaaaucgagaaagaguucuccgaaguugaaggccgcauucaggaucuggagaaguacguggaggacacgaaaaucgaucucuggagcuauaaugccgaacugcuggucgcucucgagaaccagcacacaauugaccugaccgauucugaaaugaacaagcuguucgagagaacccggaaacagcugagagaaaaugcggaggacauggggaacggaugcuuuaagaucuaccauaagugugacaaugccugcauuggcuccauccgcaacgggacauacgaucacgacguguaucgggaugaggcucucaauaacagauuccaaauuaaaggcguugaacuuaagagcggauacaaagacuggauccuuuggaucucuuuugccauuuccugcuuccugcucugugugguccugcugggcuuuaucaugugggccugccagaaggggaauauucgcuguagcaucugcauuuga

SEQ ID NO: 192974 - RNA, 1701 nt, Artificial Sequence
  derived and/or modified CDS sequence (opt5) from hemagglutinin__InfluenzaA__ABE26991
augaaggccaaacugcucgugcugcuuugcgcuuucaccgccacauacgcggacacgaucuguauuggcuaucacgcuaacaauagcaccgauacagucgacaccguucuggagaagaacgugacagugacccauuccgucaaucuccuggaagauucucacaacgggaaacuuugcagacugaagggaacagcuccccuccagcugggcaauuguagcguggccggguggauccugggaaacccugagugcgaaucccucuuuucuaaagagagcugguccuacauugccgaaaccccgaaucccgagaacggcacguguuauccuggguacuucgccgacuaugaggaacugcgggagcaacuuucuagcguuuccagcuuugaacgcuucgagaucuuucccaaggagucuuccuggccuaaucauaccgugacaaagggagucaccgcuagcugcucucacaacggcaaauccagcuucuacaagaaucugcucuggcugacagagaaaaacggccuuuaucccaaucugucuaaguccuacgugaacaauaaagaaaaggaaguucucgugcuguggggaguccaucacccuagcaacauuggggaucagagagccaucuaccacaccgagaacgcguauguguccguggucucuagccauuacucccggcgcuuuacgccggaaaucgccaagagacccaaaguucgggaccaggagggccgcauuaauuauuacuggacacugcucgagccuggggauaccaucauuuucgaagcuaacggaaaucugaucgcccccugguaugcuuuugcccuuagcagaggcuucgggucuggaauuaucacauccaacgcgagcaugggcgacugugaugccaagugccagaccccucaaggcgcuauuaauucuagccugcccuuucagaacgugcacccggugaccaucggggaguguccuaaauacguccgguccacaaagcuccgcauggugacgggacugagaaauauccccucuauucagagccggggccuuuucggggccaucgcuggauuuauugaaggcggguggaccggaaugaucgacggcugguauggcuaccaucaccagaacgagcaaggguccggauacgccgccgauaaaaagagcacacagaaugcuauugacggcaucaccaacaaaguuaauucugugaucgaaaagaugaacacacaguucaccgcggucgggaaggaguucaauaaacuggagcgcagaauggaaaaccucaauaagaaaguggaugacggauuucuggacauuuggacguauaacgccgagcugcucguucugcuugaaaacgagcggacacuggauuuccacgacuccaaugugaagaaccucuacgaaaaagucaagaaucagcugaagaacaaugcuaaagagaucggcaacgggugcuuugaguucuaucauaaguguaauaacgaaugcauggagagcgugaaaaauggcaccuacgauuauccuaaguacucugaagaguccacccuuaaacgcgagaagauugacggagucaagcuggaaagcaugggcguguaucaaauccucgccauuuacuccacaguugccucuagccuggugcugcucgucucccugggggcuaucucuuuuuggaugugcagcaacggaucccuucaguguagaaucugcauuuga

SEQ ID NO: 192975 - RNA, 1701 nt, Artificial Sequence
  derived and/or modified CDS sequence (opt5) from hemagglutinin__InfluenzaA__ABF47550
augaagaccaucauugcccugagcuacaucuucugccucguguuugcucagaaacugcccggcaacgacaauuccacagccacgcuuugucuggggcaccaugcggucccuaacggaacccucguuaagacaauuaccaaugaucaaaucgaggugacaaacgcuaccgaacuggugcagucuagcuccacaggcagaauuugcgacucuccgcaccggauccuugaugggaaaaauuguacccugaucgacgcccuccugggagauccccauugcgacggcuuccagaacgagaagugggaucuguuugucgaacgcagcaaagccuauuccaauuguuacccuuaugacgugcccgauuacgcuucucucagaagccugguugccuccagcgggacgcuugaguucauuaacgaagacuuuaauuggaccggagugacacagucuggcggcuccuaugcuugcaagcgggggagcgucaacucuuucuuuucccgccugaauuggcuccacgagagcgaguacaaguauccugcccugaacgugaccaugcccaauaacggaaaauucgauaaacuuuacaucuggggcguucaucacccuucuacagacagagaacaaaccaaucuguacgugcgggcguccgggcgcgucacggugagcacaaagagaucccagcagaccgugauuccgaacaucggaucucggcccuggguccgcggccucagcuccagaauuagcaucuauuggacaauuguuaagccuggggauauccugcugaucaacucuaccggaaaucucauugcuccccggggcuacuuuaaaauccgcaccggcaaguccagcauuaugagaucugacgccccuaucgggacauguagcuccgagugcauuacgcccaacggaucuaucccgaaugacaagccuuuccagaacgugaauaaaaucaccuauggcgccuguccccgguacgugaagcaaaacacacugaaacuugcuaccgggaugcgcaaugucccugaaaagcagacaagaggaauuuuuggcgccaucgcgggguucauugagaacggaugggagggcaugguggauggcugguauggguuucggcaccagaauagcgaaggaaccggccaggccgcugaccugaaauccacgcaagccgcuaucgaucagauuaacgggaagcucaauagacugaucgagaaaacaaacgaaaaguuccaucagaucgagaaggaguucagcgaaguugagggacgcauucaagaccuugaaaaauacguggaggauaccaagaucgaccuguggucuuauaaugccgaacuccuggucgcccuggagaaccagcacaccauugaucucacagacuccgaaaugaauaaacuguuugagaagacccggaaacagcuuagagagaacgcugaagauaugggcaacgggugcuucaagaucuaccauaagugugacaaugcgugcauuggcagcauccgcaacggaacauacgaucacgacguguaucgggacgaggcccugaauaacagauuucagauuaaaggcguugaacucaagucuggguacaaagauuggauccuguggaucuccuucgcuauuagcugcuuucuucugugugugguccuccugggauucaucaugugggccugccaaaagggcaauauucgcuguaacaucugcauuuga

SEQ ID NO: 192976 - RNA, 1698 nt, Artificial Sequence
  derived and/or modified CDS sequence (opt5) from hemagglutinin__InfluenzaA__ABF47561
augaaggccaaacugcucgugcugcuuugcaccuucacagcuacguacgccgacaccaucuguauuggcuaucacgcgaacaauagcacagauaccgucgacacaguucuggagaagaacgugaccgugacacauuccgucaaucuccuggaagauucucacaacgggaaacuuugccugcucaagggaaucgcuccccugcagcugggcaauuguagcguggccggguggauucucggaaacccugagugcgaacugcuuaucuccaaagagucuuggagcuacauuguugaaaccccgaaucccgagaacggcacguguuauccuggguacuuugccgacuaugaggaacugagagagcaacucuccucugugagcuccuucgaacgguuugagaucuuccccaagggaagcucuuggccuaaucauaccgucacaggcguguccgcuagcugcucucacaacggcaaguccagcuuuuaccgcaaucugcuuuggcugaccgggaaaaacggacucuaucccaagcugucuauguccuacguuaauaacaaagagaaggaagugcugguccucuggggcgugcaucacccuccgaauaucggggaucagagagcccuguaccacacagagaacgcuuaugugagcgucguuuccucucauuacagccggcgcuucacccccgaaauugccaaaagaccuaaggugcgggaccaggagggacgcaucaacuauuacuggacgcuucuggaacccggcgauacaauuaucuuugaggcgaaugggaaccucauugccccuugguaugcuuucgcccuguccagaggauuuggcagcggcaucauuaccucuaaugcucccaugggggagugugacgccaagugccagacaccgcaaggagcgaucaacuccagccuuccuuuccagaaugugcaccccgucaccaucggcgaauguccuaaauacgugcggucugccaagcugcgcaugguuaccgggcucagaaacauucccagcauccagucccggggacuguuuggcgcuauugccggguucaucgagggaggcuggacaggcaugguggaugggugguauggauaccaucaccagaaugaacaaggcucuggguacgcugccgaccagaaaagcacgcagaacgccauuaauggaaucaccaacaaggucaauuccgugaucgagaaaaugaacacacaguuuaccgcuguuggcaaggaguucaauaaacuggaacgcagaauggagaaccucaauaagaagguggaugacggguuccuggauauuuggacauauaacgcggaacuucugguccuccuggagaacgaacggacccuugacuuucacgacagcaaugugaaaaaccuguacgagaaggucaaaucucaacucaagaauaacgccaaagaaaucggcaauggaugcuucgaguuuuaucauaaguguaacaaugagugcauggaauccgugaagaacggcacguacgauuaucccaaauacagcgaggaaucuaagcugaaucgcgagaaaauugacgggguuaagcuggaguccaugggaguguaucagauccucgcuauuuacagcacagucgccuccucucuggugcuucugguuagccucggcgccaucuccuucuggaugugcucuaacgggagccugcaguguagaaucugcauuuga

SEQ ID NO: 192977 - RNA, 1698 nt, Artificial Sequence
  derived and/or modified CDS sequence (opt5) from hemagglutinin__InfluenzaA__ABF47572
augaaggccaaacugcucgugcugcuuugcaccuucacagcuacguacgccgacaccaucuguauuggcuaucacgcgaacaauagcacagauaccgucgacacaguucuggagaagaacgugaccgugacacauuccgucaaucuccuggaagauucucacaacgggaaacuuugccugcucaagggaaucgcuccccugcagcugggcaauuguagcguggccggguggauucucggaaacccugagugcgaacugcuuaucuccaaagagucuuggagcuacauuguugaaaccccgaaucccgagaacggcacguguuauccuggguacuuugccgacuaugaggaacugagagagcaacucuccucugugagcuccuucgaacgguuugagaucuuccccaagggaagcucuuggccuaaucauaccgucacaggcguguccgcuagcugcucucacaacggcaaguccagcuuuuaccgcaaucugcuuuggcugaccgggaaaaacggacucuaucccaaucugucuauguccuacguuaacaauaaggauaaagaggugcugguccucuggggcgugcaucacccuccgaacaucggggaccagagagcccuguaccacacagaaaacgcuuaugugagcgucguuuccucucauuacagccggcgcuucacccccgagauugccaagagaccuaaagugcgggaucaggaaggacgcaucaauuauuacuggacgcuucuggagcccggcgacacaauuaucuuugaagcgaacgggaaucucauugccccuugguaugcuuucgcccuguccagaggauuuggcagcggcaucauuaccucuaacgcucccaugggggagugugaugccaagugccagacaccgcaaggagcgaucaauuccagccuuccuuuccagaacgugcaccccgucaccaucggcgaguguccuaaguacgugcggucugccaaacugcgcaugguuaccgggcucagaaauauucccagcauccagucccggggacuguuuggcgcuauugccggguucaucgaaggaggcuggacaggcaugguggacgggugguauggauaccaucaccagaacgagcaaggcucuggguacgcugccgaucaaaagagcacgcagaaugccauuaacggaaucaccaauaaagucaacuccgugaucgaaaagaugaauacacaguuuaccgcuguuggcaaagaguucaacaagcuggaacgcagaauggagaaucucaacaaaaagguggacgauggguuccuggacauuuggacauauaacgcggagcuucugguccuccuggaaaaugagcggacccuugacuuucacgauagcaacgugaagaaucuguacgaaaaagucaagucucagcucaaaaacaaugccaaggagaucggcaacggaugcuucgaauuuuaucauaaauguaauaacgagugcauggaguccgugaagaauggcacguacgacuaucccaaguacagcgaagagucuaaacugaaccgcgaaaagauugaugggguuaaacuggaguccaugggaguguaucagauccucgcuauuuacagcacagucgccuccucucuggugcuucugguuagccucggcgccaucuccuucuggaugugcucuaaugggagccugcaguguagaaucugcauuuga

SEQ ID NO: 192978 - RNA, 1698 nt, Artificial Sequence; identical to SEQ ID NO: 192872
  derived and/or modified CDS sequence (opt5) from hemagglutinin__InfluenzaA__ABF47583

SEQ ID NO: 192979 - RNA, 1701 nt, Artificial Sequence
  derived and/or modified CDS sequence (opt5) from hemagglutinin__InfluenzaA__ABF47594
augaagaccaucauugcccugagcuacauccucugccugguguucgcucagaaacuucccggcaacgacaauuccacagccacgcugugucucgggcaccaugcggucccuaacggaacccugguuaagacaauuaccaaugaucaaaucgaggugacaaacgcuaccgaacuugugcagucuagcuccacaggcagaauuugcgacucuccgcaccggauccuggaugggaaaaauuguacccucaucgacgcccugcugggagauccccauugcgacggcuuucagaacaaggagugggaucucuucgucgaacgcagcaaagccuauuccaauuguuacccuuaugacgugcccgauuacgcuucucugagaagccuuguugccuccagcgggacgcuggaguuuaacaaugaaucuuucaacuggaccggaguggcucagaauggcacauccuaugccugcaagcggcgcagcgucaagucuuucuucuccagacucaacuggcugcacaaacuugaguacaaguauccugcgcaaaaugugaccaugcccaacaaugacaaauuugauaagcuguacauuuggggcguucaucacccuagcacagacucugaucagaccucccucuacgugcaggccagcgggcgggucacgguguccacaaaacgcucucagcaaaccgugaucccgaacauuggaagcagacccuggguccggggcguuuccagccgcaucucuauuuauuggacaaucgugaagccuggggacauucugcugaucaacuccaccggaaaucucaucgcucccagaggcuacuucaagauucggagcgggaaaucuagcaucaugcgcuccgacgccccuauuggaaacuguaauucugagugcaucacccccaacggcagcauuccgaaugauaagccuuuucagaacgugaauagaaucacauauggcgcuuguccccgguacgucaaacagaacacgcugaagcuggccaccgggaugcgcaaugugccugaaaaacagacaagaggaaucuucggcgcgauugccggguuuaucgagaacggaugggaaggcaugguugacgggugguauggauuccggcaccaaaauuccgagggcaccggccaggcugccgaucuuaagagcacacaggcugccauuaaccaaaucaaugggaaacucaacagacugauugagaagaccaaugaaaaguuucaucagaucgagaaagaauuuucugagguggaaggacgcauccaggaccuugagaaguacgucgaggauacgaaaauugaccugugguccuauaacgccgaacuccugguggcucuggagaaccagcacacaaucgaucucaccgacagcgaaaugaauaagcuguucgagcggaccagaaaacaacuucgcgaaaacgcggaggauaugggcaaugggugcuuuaagauuuaccauaagugugacaacgccugcaucggaucuauucggaauggcacauacgaucacgacguuuauagagacgaggcucugaacaaucgcuuccagaucaaagggguggaacucaaguccggcuacaaagauuggauucuguggaucagcuuugccaucuccugcuuccuucugugugucgugcuccugggauuuauuaugugggccugccagaagggcaacauccgguguaauauuugcaucuga

SEQ ID NO: 192980 - RNA, 1701 nt, Artificial Sequence
  derived and/or modified CDS sequence (opt5) from hemagglutinin__InfluenzaA__ABF47605
augaaggccaaacugcucgugcugcuuugcgcuuucaccgccacauacgcggacacgaucuguauuggcuaucacgcuaacaauagcaccgauacagucgacaccguucuggagaagaacgugacagugacccauuccgucaaucuccuggaagauucucacaacgggaaacuuugcagacugaagggaacagcuccccuccagcugggcaauuguagcguggccggguggauccugggaaacccugagugcgaaucccucuuuucuaaagagagcugguccuacauugccgaaaccccgaaucccgagaacggcacguguuauccuggguacuucgccgacuaugaggaacugcgggagcaacuuucuagcguuuccagcuuugaacgcuucgagaucuuucccaaggagucuuccuggccuaaucauaccgugacaaagggagucaccgcuagcugcucucacaacggcaaauccagcuucuacaagaaucugcucuggcugacagagaaaaacggccuuuaucccaaucugucuaaguccuacgugaacaauaaagaaaaggaaguucucgugcuguggggaguccaucacccuagcaacauuggggaucagagagccaucuaccacaccgagaacgcguauguguccguggucucuagccauuacucccggcgcuuuacgccggaaaucgccaagagacccaaaguucgggaccaggagggccgcauuaauuauuacuggacacugcucgagccuggggauaccaucauuuucgaagcuagcggaaaccugaucgcccccugguaugcuuuugcccuuucuagaggcuucggguccggaauuaucacaagcaaugcgucuaugggcgagugugacgccaagugccagaccccucaaggcgcuauuaacagcucccugcccuuucagaaugugcacccggugaccaucggggaauguccuaaauacguccggucuacaaagcuccgcauggugacgggacugagaaacauccccagcauucagucccggggccuuuucggggccaucgcuggauuuauugagggcggguggaccggaaugaucgauggcugguauggcuaccaucaccagaaugaacaagggagcggauacgccgccgacaaaaagucuacacagaacgcuauugauggcaucaccaauaaaguuaacuccgugaucgagaagaugaauacacaguucaccgcggucgggaaggaguucaacaaacuggaacgcagaauugagaaucucaacaagaaaguggacgauggauuucuggacaucuggacguauaaugccgaacugcucguucugcuugagaacgaacggacacuggacuuccacgauagcaacgugaagaaucucuacgagaaagucaagaaccagcugaagaauaacgcuaaagagauuggcaaugggugcuuugaguucuaucauaaguguaacaaugaaugcauggaaucugugaaaaacggcaccuacgacuauccuaaguacuccgaggagagcaaacuuaagcgcgaaaagaucgauggagucaaacuggaguccaugggcguguaucaaauucucgccaucuacucuaccguugccagcucccuggugcugcucgucucucugggggcuaucagcuuuuggaugugcuccaauggaagccuucaguguagaauuugcaucuga

SEQ ID NO: 192981 - RNA, 1701 nt, Artificial Sequence; identical to SEQ ID NO: 192965
  derived and/or modified CDS sequence (opt5) from hemagglutinin__InfluenzaA__ABF47616

SEQ ID NO: 192982 - RNA, 1701 nt, Artificial Sequence
  derived and/or modified CDS sequence (opt5) from hemagglutinin__InfluenzaA__ABF47627
augaaggccaaacugcucgugcugcuuugcgcuuucaccgccacauacgcggacacgaucuguauuggcuaucacgcuaacaauagcaccgauacagucgacaccguucuggagaagaacgugacagugacccauuccgucaaucuccuggaagauucucacaacgggaaacuuugcagacugaagggaacagcuccccuccagcugggcaauuguagcguggccggguggauccugggaaacccugagugcgaaucccucuuuucuaaagagagcugguccuacauugccgaaaccccgaaucccgagaacggcacguguuauccuggguacuucgccgacuaugaggaacugcgggagcaacuuucuagcguuuccagcuuugaacgcuucgagaucuuucccaaggagucuuccuggccuaaucauaccgugacaaagggagucaccgcuagcugcucucacaacggcaaauccagcuucuacaagaaucugcucuggcugacagagaaaaacggccuuuaucccaaucugucuaaguccuacgugaacaauaaagaaaaggaaguucucgugcuguggggaguccaucacccuagcaacauuggggaucagagagccaucuaccacaccgagaacgcguauguguccguggucucuagccauuacucccggcgcuuuacgccggaaaucgccaagagacccaaaguucgggaccaggagggccgcauuaauuauuacuggacacugcucgagccuggggauaccaucauuuucgaagcuaacggaaaucugaucgcccccugguaugcuuuugcccuuagcagaggcuucgggucuggaauuaucacauccaacgcgagcaugggcgacugugaugccaagugccagaccccucaaggcgcuauuaauucuagccugcccuuucagaacgugcacccggugaccaucggggaguguccuaaauacguccgguccacaaagcuccgcauggugacgggacugagaaauauccccucuauucagagccggggccuuuucggggccaucgcuggauuuauugaaggcggguggaccggaaugaucgacggcugguauggcuaccaucaccagaacgagcaaggguccggauacgccgccgauaaaaagagcacacagaaugcuauugacggcaucaccaacaaaguuaauucugugaucgaaaagaugaacacacaguucaccgcggucgggaaggaguucaauaaacuggagcgcagaauggaaaaccucaauaagaaaguggaugacggauuucuggacauuuggacguauaacgccgagcugcucguucugcuugaaaacgagcggacacuggauuuccacgacuccaaugugaagaaccucuacgaaaaagucaagaaucagcugaagaacaaugcuaaagagaucggcaacgggugcuuugaguucuaucauaaguguaauaacgaaugcauggagagcgugaaaaauggcaccuacgauuauccuaaguacucugaagaguccaaacuuaagcgcgagaagauugacggagucaaacuggaaagcaugggcguguaucaaauccucgccauuuacuccaccguugccucuagccuggugcugcucgucucccugggggcuaucucuuuuuggaugugcagcaacggaucccuucaguguagaaucugcauuuga

SEQ ID NO: 192983 - RNA, 1701 nt, Artificial Sequence
  derived and/or modified CDS sequence (opt5) from hemagglutinin__InfluenzaA__ABF47638
augaaggccaaacugcucgugcugcuuugcgcuuucaccgccacauacgcggacacgaucuguauuggcuaucacgcuaacaauagcaccgauacagucgacaccguucuggagaagaacgugacagugacccauuccgucaaucuccuggaagauucucacaacgggaaacuuugcagacugaagggaacagcuccccuccagcugggcaauuguagcguggccggguggauccugggaaacccugagugcgaaucccucuuuucuaaagagagcugguccuacauugccgaaaccccgaaucccgagaacggcacguguuauccuggguacuucgccgacuaugaggaacugcgggagcaacuuucuagcguuuccagcuuugaacgcuucgagaucuuucccaaggagucuuccuggccuaaucauaccgugacaaagggagucaccgcuagcugcucucacaacggcaaauccagcuucuacaagaaucugcucuggcugacagaaaagaacggccuuuaucccaaucugucuaaguccuacgugaacaauaaagagaaggaaguucucgugcuguggggaguccaucacccuagcaacauuggggaucagagagccaucuaccacaccgagaacgcguauguguccguggucucuagccauuacucccggcgcuuuacgccggaaaucacaaagagacccaaaguucgggaccaggagggccgcauuaauuauuacuggacccugcucgagccuggggauacaaucauuuucgaagccaacggaaaucugaucgcucccugguaugccuuugcucuuagcagaggcuucgggucuggaauuaucaccuccaacgccagcaugggcgagugugacgcgaagugccagaccccucaaggcgccauuaauucuagccugcccuuucagaacgugcacccggugacaaucggggaauguccuaaauacguccgguccacgaagcuccgcauggugaccggacugagaaauauccccucuauucagagccggggccuuuucggggcuaucgccggauuuauugagggcggguggacaggaaugaucgauggcugguauggcuaccaucaccagaacgaacaaggguccggauacgcugccgaccagaaaagcacccagaaugccauugauggcaucacaaacaagguuaauucugugaucgagaaaaugaacacccaguucacggcugucgggaaggaguucaauaagcuggaacgcagaauggagaaccucaauaaaaagguggacgauggauuucuggacauuuggacauauaacgcggaacugcucguucugcuugagaacgaacggacccuggacuuccacgauuccaaugugaaaaaccucuacgagaaggucaaaacccaacugaagaauaacgccaaggagaucggcaaugggugcuuugaguucuaucauaaauguaacaaugaaugcauggaaagcgugaagaacggcacauacgacuauccuaaauacucugaggaguccaaacuuaaucgcgagaaaauugauggagucaagcuggaaagcaugggcguguaucagauccucgcuauuuacuccaccguugccucuagccuggugcugcucgucucccugggggccaucucuuuuuggaugugcagcaacggaucccuucaguguagaaucugcauuuga

SEQ ID NO: 192984 - RNA, 1701 nt, Artificial Sequence; identical to SEQ ID NO: 192983
  derived and/or modified CDS sequence (opt5) from hemagglutinin__InfluenzaA__ABF47649

SEQ ID NO: 192985 - RNA, 1701 nt, Artificial Sequence
  derived and/or modified CDS sequence (opt5) from hemagglutinin__InfluenzaA__ABF47660
augaaggccaaacugcucgugcugcuuugcgcuuucaccgccacauacgcggacacgaucuguauuggcuaucacgcuaacaauagcaccgauacagucgacaccguucuggagaagaacgugacagugacccauuccgucaaucuccuggaagauucucacaacgggaaacuuugcagacugaagggaacagcuccccuccagcugggcaauuguagcguggccggguggauccugggaaacccugagugcgaaucccucuuuucuaaagagagcugguccuacauugccgaaaccccgaaucccgagaacggcacguguuauccuggguacuucgccgacuaugaggaacugcgggagcaacuuucuagcguuuccagcuuugaacgcuucgagaucuuucccaaggagucuuccuggccuaaucauaccgugacaaagggagucaccgcuagcugcucucacaacggcaaauccagcuucuacaagaaucugcucuggcugacagagaaaaacggccuuuaucccaaucugucuaaguccuacgugaacaauaaagaaaaggaaguucucgugcugugggggauucaucacccuagcaacaucggagaucagagagccaucuaccacaccgagaacgcguaugucuccguggugucuagccauuacucccggcgcuuuacgccggaaauugccaagagacccaaaguccgggaccaggagggccgcaucaauuauuacuggacacugcucgagccuggggauaccauuaucuucgaagcuaacggaaaucugauugcccccugguaugcuuuugcccuuagcagaggcuucgggucuggaaucauuacauccaacgcgagcaugggcgacugugaugccaagugccagaccccucaaggcgcuaucaauucuagccugcccuuucagaacguucacccggugaccaucggggaguguccuaaauacgugcgguccacaaagcuccgcauggucacgggacugagaaauauucccucuauccagagccggggccuuuucggggccauugcuggauuuaucgaaggcggguggaccggaaugauugacggcugguauggcuaccaucaccagaacgagcaaggguccggauacgccgccgauaaaaagagcacacagaaugcuaucgacggcaucaccaacaaaguuaauucugugauugaaaagaugaacacacaguucaccgcgguggggaaggaguucaauaaacuggagcgcagaauggaaaaccucaauaagaaagucgaugacggauuucuggacaucuggacguauaacgccgagcugcucgugcugcuugaaaacgagcggacacuggauuuccacgacuccaauguuaagaaccucuacgaaaaagugaagacccagcugaagaauaacgcuaaagagauuggcaaugggugcuuugaguucuaucauaaguguaacaaugaaugcauggagagcgucaaaaacggcaccuacgauuauccuaaguacucugaagaguccaaacuuaagcgcgagaagaucgacggagugaaacuggaaagcaugggcgucuaucaaauucucgccaucuacuccacaguggccucuagccugguucugcucgugucccugggggcuaucucuuuuuggaugugcagcaauggaucccuucaguguagaauuugcaucuga

SEQ ID NO: 192986 - RNA, 1698 nt, Artificial Sequence
  derived and/or modified CDS sequence (opt5) from hemagglutinin__InfluenzaA__ABF47671
augaaggccaaacugcucgugcugcuuugcaccuucacagcuacguacgccgacaccaucuguauuggcuaucacgcgaacaauagcacagauaccgucgacacaguucuggagaagaacgugaccgugacacauuccgucaaucuccuggaagauucucacaacgggaaacuuugccugcucaagggaaucgcuccccugcagcugggcaauuguagcguggccggguggauucucggaaacccugagugcgaacugcuuaucuccaaagagucuuggagcuacauuguugaaaccccgaaucccgagaacggcacguguuauccuggguacuuugccgacuaugaggaacugagagagcaacucuccucugugagcuccuucgaacgguuugagaucuuccccaagggaagcucuuggccuaaucauaccgucacaggcguguccgcuagcugcucucacaacggcaaguccagcuuuuaccgcaaucugcuuuggcugaccgggaaaaacggacucuaucccaaucugucuauguccuacguuaacaauaaggagaaagaagugcugguccucuggggcgugcaucacccuccgaacaucggggaucagagagcccuguaccacacagagaacgcuuucgugagcgucguuuccucucauuauagccggcgcuuuacccccgaaauugccaagagaccuaaagugcgggaccaggagggacgcaucaauuacuauuggacgcuucuggaacccggcgauacaauuaucuucgaggcgaacgggaaucucauugccccuugguacgcuuuugcccuguccagaggauucggcagcggcaucauuaccucuaacgcucccauggacgagugugaugccaagugccagacaccgcaaggggcgaucaauuccagccuuccuuuucagaacgugcaccccgucaccaucggagaauguccuaaguaugugcggucugccaaacugcgcaugguuaccggccucagaaauauucccagcauccagucccgggggcuguucggagcuauugccggcuuuaucgaagggggauggacaggcaugguggacggcugguacggguaucaucaccagaacgaacaaggaucuggcuacgcugccgaucaaaagagcacgcagaaugccauuaacgggaucaccaauaaagucaacuccgugaucgagaagaugaauacacaguucaccgcuguuggaaaagaguucaacaagcuggagcgcagaauggagaaucucaacaaaaagguggacgauggcuuucuggacauuuggacauacaacgcggaacuucugguccuccuggagaaugaacggacccuugacuuccacgauagcaacgugaagaaucuguaugagaaagucaagucucagcucaaaaacaaugccaaggaaaucgggaacggcugcuuugaguucuaccauaaauguaauaacgagugcauggaauccgugaagaauggaacguaugacuaccccaaguauagcgaggaaucuaaacugaaccgcgagaagauugauggcguuaaacuggaguccauggggguguaccagauccucgcuauuuauagcacagucgccuccucucuggugcuucugguuagccucggagccaucuccuuuuggaugugcucuaauggcagccugcaguguagaaucugcauuuga

SEQ ID NO: 192987 - RNA, 1701 nt, Artificial Sequence
  derived and/or modified CDS sequence (opt5) from hemagglutinin__InfluenzaA__ABF47693
augaaggccaaacugcucgugcugcuuugcgcucugagcgccaccgacgcggauacaaucuguauuggcuaccacgcuaacaauuccacggacaccgucgauacaguucucgagaagaacgugaccgugacacauucugucaaucugcuugaagacagccacaacgggaaacugugcagacucaagggaaucgccccgcugcagcugggcaaauguaauauugccggguggauccucggaaacccugagugcgaaucccuguucucuaaaaagagcugguccuauauugcugagacccccaauucugaaaacggcacauguuaccccggguauuuugccgauuacgaggagcuucgggaacaacugagcuccgugagcucuuucgagcgcuuugaaaucuucccuaaggagagauccuggcccaagcauaauguuacccggggagugacggcuagcugcucucacaaaggcaaguccagcuuuuaucgcaaccuccuguggcuuaccgagaaaaauggcucuuacccuaaccuguccaagagcuaugucaauaacaaggaaaaagaggugcucguucuguggggagugcaucaccccuccaauaucgaagaccagaagacaauuuacagaaaagagaacgccuacgucucuguggugagcuccaacuauaaucggcgcuucaccccugaaaucgcggagagaccgaagguccgggggcaggccggccgcauuaacuacuauuggacacugcucgagcccggggauaccaucauuuuugaagcuaauggaaaccugaucgccccuuggcacgcuuucgcccuuaauagaggcuuugggagcggaauuaucacgucuaacgcguccauggacgagugugauacaaaaugccagacaccccaaggcgccaucaauagcucucugccuuuccagaacauucaucccguuaccaucggcgaauguccgaaguacgugcggagcaccaaacuccgcauggugaccgggcugagaaauauuccuuccauccagucucggggacuuuuuggcgcuauugccggguucaucgagggaggcuggacagggaugaucgacggaugguauggcuaccaccaucagaacgaacaaggcagcggguaugcugccgaucagaaguccacgcagaaugccauuaacggaaucaccaauaaggucaacagcgugauugagaaaaugaauacacaguuuaccgcuguuggcaaggaguucaacaaacuggaaaagcgcauggagaaccucaauaaaaagguggacgauggguuccuggacaucuggacauacaacgcggaacugcucguccugcuugagaaugaaagaacccuggacuuucacgauucuaacgugaagaaucucuacgagaaaguuaagucccaacugaaaaacaaugccaaggagauuggaaacggcugcuucgaauuuuaucacaaauguaauaacgagugcauggaaagcgugaagaaugggacguacgacuaucccaaguacucugaggaguccaaacuuaaccgggaaaagaucgauggcgucaaacuggagagcaugggaguguaucagauccucgcuauuuacuccacagucgccucuagccuggugcugcucguuucccugggcgccaucucuuucuggaugugcagcaaugggucccuucaguguagaauuugcaucuga

SEQ ID NO: 192988 - RNA, 1701 nt, Artificial Sequence; identical to SEQ ID NO: 192987
  derived and/or modified CDS sequence (opt5) from hemagglutinin__InfluenzaA__ABF47704

SEQ ID NO: 192989 - RNA, 1701 nt, Artificial Sequence
  derived and/or modified CDS sequence (opt5) from hemagglutinin__InfluenzaA__ABF47715
augaaggccaaacugcucgugcugcuuugcgcucugagcgccaccgacgcggauacaaucuguauuggcuaccacgcuaacaauuccacggacaccgucgauacaguucucgagaagaacgugaccgugacacauucugucaaucugcuugaagacagccacaacgggaaacugugcagacucaagggaaucgcuccccugcagcugggcaaauguuccauugccggguggauccucggaaauccugagugcgaaucucuguucagcaagaaguccuggucuuauauugccgagaccccgaacagcgaaaauggcacauguuaccccggguauuuugccgauuacgaggagcuucgggaacaacuguccagcgugucuuccuucgagcgcuuugaaaucuucccuaaagagagaagcuggcccaagcauaacguuacccggggagugacggcuucuugcucccacaaaggcaagagcucuuuuuaucgcaaucuccuguggcuuaccgagaaaaacggcuccuacccuaaucugagcaaguccuaugucaacaauaaggaaaaagaggugcucguucuguggggagugcaucaccccucuaacaucgaagaccagaagacaauuuacagaaaagagaaugccuacgucagcgugguguccagcaacuauaaccggcgcuucaccccugaaaucgcggagagaccgaagguccgggggcaggccggccgcauuaauuacuauuggacacugcucgagcccggggauaccaucauuuuugaagcuaacggaaaucugaucgccccuuggcacgcuuucgcccuuaacagaggcuuugggucuggaauuaucacguccaaugcgagcauggacgagugugauacaaaaugccagacaccccaaggcgccaucaacucuagccugccuuuccagaauauucaucccguuaccaucggcgaauguccgaaguacgugcgguccaccaaacuccgcauggugaccgggcugagaaacauuccuucuauccagagccggggacuuuuuggcgcuauugccggguucaucgagggaggcuggacagggaugaucgacggaugguauggcuaccaccaucagaaugaacaaggcuccggguaugcugccgaucaaaagagcacgcagaacgccauuaauggaaucaccaacaaggucaauucugugauugagaaaaugaacacacaguuuaccgcuguuggcaaggaguucaauaaacuggaaaagcgcauggagaaccucaacaaaaagguggacgauggguuccuggacaucuggacauacaaugcggaacugcucguccugcuugagaacgaaagaacccuggacuuucacgauuccaaugugaagaaccucuacgagaaaguuaagagccagcugaaaaauaacgccaaggagauuggaaauggcugcuucgaauuuuaucacaaauguaacaaugagugcauggaaucugugaagaacgggacguacgacuaucccaaguacuccgaggagagcaaacuuaaucgggaaaagaucgauggcgucaaacuggaguccaugggaguguaucagauccucgcuauuuacucuacagucgccagcucccuggugcugcucguuucucugggcgccaucagcuucuggaugugcuccaacgggagccuucaguguagaauuugcaucuga

SEQ ID NO: 192990 - RNA, 1701 nt, Artificial Sequence; identical to SEQ ID NO: 192987
  derived and/or modified CDS sequence (opt5) from hemagglutinin__InfluenzaA__ABF47726

SEQ ID NO: 192991 - RNA, 1701 nt, Artificial Sequence; identical to SEQ ID NO: 192987
  derived and/or modified CDS sequence (opt5) from hemagglutinin__InfluenzaA__ABF47737

SEQ ID NO: 192992 - RNA, 1701 nt, Artificial Sequence
  derived and/or modified CDS sequence (opt5) from hemagglutinin__InfluenzaA__ABF47748
augaaggccaaacugcucgugcugcuuugcgcucugagcgccaccgacgcggauacaaucuguauuggcuaccacgcuaacaauuccacggacaccgucgauacaguucucgagaagaacgugaccgugacacauucugucaaucugcuugaagacagccacaacgggaaacugugcagacucaagggaaucgcuccccugcagcugggcaaauguuccauugccggguggauccucggaaauccugagugcgaaucucuguucagcaagaaguccuggucuuauauugccgagaccccgaacagcgaaaauggcacauguuaccccggguauuuugccgauuacgaggagcuucgggaacaacuguccagcgugucuuccuucgagcgcuuugaaaucuucccuaaagagagcucuuggcccaagcauaacguuaccagaggagugacggcuuccugcagccacaaaggcaagucuuccuuuuaucggaaucuccuguggcuuaccgagaaaaacggcagcuacccuaaucuguccaagucuuaugucaacaauaaggaaaaagaggugcucguucuguggggagugcaucaccccagcaacaucgaagaccagaagacaauuuaccgcaaagagaaugccuacgucuccguggugagcucucacuauaacagacgguucaccccugaaaucgcgaagcgcccgaaagucagagaucaggaggggcggauuaacuacuauuggacacugcucgagcccggcgacaccaucauuuuugaagccaaugggaaccugaucgcuccuugguacgccuucgcucuuucccgcggauuuggcagcgggauuaucacgucuaaugccagcauggaugagugugacgcgaagugccagacaccccaaggagccaucaacuccucucugccuuuccagaauguucaucccgugaccauuggcgaauguccgaaauaugugagaagcacaaagcuccggauggucaccggccugcgcaacaucccuuccauucagagcagagggcuuuuuggagcuaucgccggcuucauugaagggggauggaccggcaugaucgaugggugguacggauaucaccaucagaaugaacaaggcucuggcuacgcugccgaccagaaguccacacagaacgccaucaaugggauuacgaacaaagugaauagcguuaucgagaagaugaacacccaguuuacagcugugggaaaagaguucaauaagcuggaaaaacggauggagaaccucaauaagaaggucgaugacggcuuccuggacauuuggaccuacaacgcggaacugcucgugcugcuugagaacgaacgcacacuggauuuucacgacucuaauguuaaaaaccucuaugagaaggugaaaucccaacugaagaauaacgccaaagagaucgggaauggaugcuucgaauuuuaccacaaguguaacaaugagugcauggaaagcgucaagaacggcaccuaugauuaccccaaauauuccgaggagucuaaacuuaauagagagaagauugacggggugaagcuggagagcaugggcgucuaccagauccucgcuaucuauuccacgguggccucuagccugguucugcucgugucccugggagccauuagcuucuggaugugcucuaacggcucccuucagugucggaucugcauuuga

SEQ ID NO: 192993 - RNA, 1701 nt, Artificial Sequence
  derived and/or modified CDS sequence (opt5) from hemagglutinin__InfluenzaA__ABF47770
augaaggccaaacugcucgugcugcuuugcgcucugagcgccaccgacgcggauacaaucuguauuggcuaccacgcuaacaauuccacggacaccgucgauacaguucucgagaagaacgugaccgugacacauucugucaaucugcuugaagacaaccacaaugggaaacugugcaagcucaaaggaaucgccccgcugcagcugggcaaguguagcauugccggguggauccucggaaacccugagugcgaaucccuguucucuaagaaaagcugguccuauauugcugagacccccaauucugaaaacggcacauguuaccccggguauuuugccgauuacgaggagcuuagagaacaacugagcuccgugagcucuuucgagcgguuugaaaucuucccuaaggaguccagcuggcccaaacauaauguuaccaagggagugacggcuucuugcucccacaaaggcaagagcucuuuuuaucgcaaccuccuguggcuuaccgagaagaauggcuccuacccuaaccugagcaaauccuaugucaauaacaaggaaaaagaggugcucguucuguggggagugcaucaccccucuaauaucgaagaccagaagacaauuuacagaaaagagaacgccuacgucagcgugguguccagccacuauaaccggcgcuucaccccugaaaucgcgaagagaccgaaaguccggaaucaggaggggcgcauuaacuacuauuggacacugcucgagcccggcgauaccaucauuuuugaagccaaugggaaccugaucgcuccuugguacgccuucgcucuuucuagaggauuuggcuccgggauuaucacgagcaaugccucuauggacgagugugaugcgaagugccagacaccccaaggagccaucaacagcucccugccuuuccagaauguucaucccgugaccauuggcgaauguccgaaguaugugcggucuacaaaacuccgcauggucaccggccugagaaacaucccuagcauucagucccgggggcuuuuuggagcuaucgccggcuucauugaagggggauggaccggcaugaucgacgggugguacggauaucaccaucagaaugaacaaggcagcggcuacgcugccgaucagaagucuacacagaacgccaucaaugggauuacgaacaaaguuaauuccaucauugagaagaugaacacccaguuuacagcugugggaaaagaguucaauaagcuggaaaagcgcauggagaaccucaacaaaaagguggacgauggcuuccuggacaucuggaccuacaaugcggaacugcucguccugcuugagaacgaaagaacacuggacuuucacgauagcaaugugaaaaaccucuaugagaagguuaaaucucaacugaagaauaacgccaaggagauugggaauggaugcuucgaauuuuaccacaaauguaacaaugagugcauggaauccgugaagaacggcaccuaugacuaccccaaauauagcgaggaguccaaacuuaaucgggagaagaucgauggggucaagcuggagucuaugggcguguaccagauccucgcuauuuauagcacggucgccuccucucuggugcugcucguuagccugggagccaucuccuucuggaugugcagcaacggcucucuucagugucgcauuugcaucuga

SEQ ID NO: 192994 - RNA, 1701 nt, Artificial Sequence; identical to SEQ ID NO: 192993
  derived and/or modified CDS sequence (opt5) from hemagglutinin__InfluenzaA__ABF47781

SEQ ID NO: 192995 - RNA, 1701 nt, Artificial Sequence; identical to SEQ ID NO: 192993
  derived and/or modified CDS sequence (opt5) from hemagglutinin__InfluenzaA__ABF47792

SEQ ID NO: 192996 - RNA, 1701 nt, Artificial Sequence; identical to SEQ ID NO: 192993
  derived and/or modified CDS sequence (opt5) from hemagglutinin__InfluenzaA__ABF47803

SEQ ID NO: 192997 - RNA, 1701 nt, Artificial Sequence; identical to SEQ ID NO: 192993
  derived and/or modified CDS sequence (opt5) from hemagglutinin__InfluenzaA__ABF47814

SEQ ID NO: 192998 - RNA, 1701 nt, Artificial Sequence; identical to SEQ ID NO: 192993
  derived and/or modified CDS sequence (opt5) from hemagglutinin__InfluenzaA__ABF47825

SEQ ID NO: 192999 - RNA, 1701 nt, Artificial Sequence; identical to SEQ ID NO: 192993
  derived and/or modified CDS sequence (opt5) from hemagglutinin__InfluenzaA__ABF47836

SEQ ID NO: 193000 - RNA, 1701 nt, Artificial Sequence; identical to SEQ ID NO: 192993
  derived and/or modified CDS sequence (opt5) from hemagglutinin__InfluenzaA__ABF47847

SEQ ID NO: 193001 - RNA, 1701 nt, Artificial Sequence
  derived and/or modified CDS sequence (opt5) from hemagglutinin__InfluenzaA__ABF47858
augaagaccaucauugcccugagcuacauccucugccugguguucgcucagaaacuucccggcaacgacaaugggacagccacgcugugucucggacaccaugcggucccuaacggcacccugguuaagacaauuaccaaugaucaaaucgaggugacaaacgcuaccgaacuugugcaguccucuagcacagggagaauuugcgacuccccgcaccggauccuggauggcaaaaauuguacccucaucgacgcccugcugggagauccccauugcgacggguuucagaacaaggagugggaucucuucgucgaacgcucuaaagccuauagcaauuguuacccuuaugacgugcccgauuacgcuucccugagaucucuuguugccagcuccggaacgcuggaguuuauuaacgaagacuucaauuggaccggcguggcucaggauggcaagagcuaugccugcaagcgggggucugucaacuccuuuuucagccgccucaauuggcugcacaaacuugaguacaaguauccugcgcugaacgugacaaugcccaauaacggaaaauuugacaagcucuacaucuggggcguucaucacccuucuaccgauuccgaccaaacaagccuguacgugagagccucugggcgggucaccguguccacgaaacgcagccagcagacagugauuccgaauaucggauucagacccuggguccggggccuguccucucgcauuagcaucuauuggaccauuguuaagccuggggacauccuccugaucaacuccacaggaaaccuuauugcucccagaggcuacuuuaagauccggaauggcaaaagcucuauuaugcgcuccgaugccccuaucgggaacuguagcucugagugcauuacccccaauggaagcaucccgaacgacaagccuuuccagaaugugaacagaaucaccuauggcgcuuguccccgguacgugaaacaaaauacacugaagcucgccacggggaugcgcaacgucccugaaaaacagaccagaggaauuuuuggcgcgaucgccggguucauugagaauggaugggaaggcaugguggauggcugguauggguuucggcaccagaacuccgagggaacaggccaggcugccgaccugaagucuacccaagcugccaucgaucagauuaaugggaaacuuaacagacugaucgagaagacaaaugaaaaguuccaucagaucgagaaagaguucagcgaaguugaaggacgcauucaagaccucgagaaguacguggaggauaccaaaaucgaccugugguccuauaacgccggccugcucgucgcucuggaaaaucagcacacgauugaucuuacagacagcgagaugaacaagcuguuugaacggaccagaaaacagcuccgcgagaacgcggaagauauggggaauggcugcuucaagaucuaccauaagugugacaacgccugcauuggaucuauccggaauggcaccuacgaccacgauguguauagagacgaggcucugaacaaucgcuuucagauuaaagggguugagcuuaaguccggauacaaagauuggauccuguggaucagcuucgccauuucuugcuuucuccugugugugguccugcucggcuucaucaugugggccugccaaaaggggaacauucgguguaauaucugcauuuga

SEQ ID NO: 193002 - RNA, 1698 nt, Artificial Sequence; identical to SEQ ID NO: 192814
  derived and/or modified CDS sequence (opt5) from hemagglutinin__InfluenzaA__ABF47869

SEQ ID NO: 193003 - RNA, 1698 nt, Artificial Sequence; identical to SEQ ID NO: 192814
  derived and/or modified CDS sequence (opt5) from hemagglutinin__InfluenzaA__ABF47880

SEQ ID NO: 193004 - RNA, 1698 nt, Artificial Sequence
  derived and/or modified CDS sequence (opt5) from hemagglutinin__InfluenzaA__ABF47891
augaaggugaaacugcucguccugcuuugcaccuucacagccacguacgcugacaccaucuguauuggcuaucacgccaacaauagcacagauaccguugacacagugcuggagaagaacgugaccgucacacauuccgugaaucuccuggaagauucucacaacgggaaacuuugccugcucaagggaaucgcgccccugcagcugggcaauuguagcguugcuggguggauucucggaaacccugagugcgaacugcuuaucuccaaagagucuuggagcuacauuguggaaaccccgaaucccgagaacggcacguguuauccuggguacuuugccgacuaugaggaacugagagagcaacucuccucugucagcuccuucgaacgguuugagaucuuccccaaggagagcucuuggccuaaucauaccgugacaggaguuuccgccagcugcucucacaacggcaaguccagcuuuuaccgcaaucugcuuuggcugacccggaaaaacggccucuaucccaaucugucuaaguccuacgcuaacaauaaagaaaaggaggugcugguccucuggggagugcaucacccuccgaacaucggggaucagagagcccuguaccacacagaaaacgcuuaugugagcgucguuuccucucauuacagccgcagauucacccccgagauugccaaacggccuaaggugcgcgaccaggaaggcagaaucaauuauuacuggacgcuucuggagcccggggauacaauuaucuuugaggcgaacggaaaucucauugccccucgguaugcuuucgcccugucccgcggcuuugggagcggaaucauuaccucuaacgcucccauggacgaaugugaugccaagugccagacaccgcaaggcgcgaucaauuccagccuuccuuuccagaacgugcaccccgucaccaucggcgaguguccuaaauacgugagaucugccaagcugcggaugguuaccgggcuccgcaauauucccagcauccaguccagaggacuguuuggcgcuauugccggguucaucgaaggaggcuggacagggaugguggacggaugguauggcuaccaucaccagaacgagcaaggcucuggguacgcugccgaucagaaaagcacgcagaaugccauuaacggaaucaccaauaaggucaacuccgugaucgaaaagaugaauacacaguuuaccgcuguuggcaaagaguucaacaaacuggagcggcgcauggaaaaucucaacaagaagguggacgauggguuccuggacauuuggacauauaacgcggagcuucugguccuccuggaaaaugagagaacccuugacuuucacgauagcaacgugaaaaaucuguacgaaaaggucaaaucucaacucaagaacaaugccaaagagaucggaaacggcugcuucgaguuuuaucauaaguguaauaacgaaugcauggaguccgugaagaaugggacguacgacuaucccaaauacagcgaagagucuaagcugaaccgggagaaaauugauggcguuaagcuggaauccaugggaguguaucagauccucgcuauuuacagcacagucgccuccucucuggugcuucugguuagccucggcgccaucuccuucuggaugugcucuaaugggagccugcaguguagaaucugcauuuga

SEQ ID NO: 193005 - RNA, 1701 nt, Artificial Sequence
  derived and/or modified CDS sequence (opt5) from hemagglutinin__InfluenzaA__ABF47902
augaagaccaucauugcccugagcuacauccucugccugguguucgcucagaaacuucccggcaacgacaauuccacagccacgcugugucucgggcaccaugcggucccuaacggaacccugguuaagacaauuaccaaugaucaaaucgaggugacaaacgcuaccgaacuugugcagucuagcuccacaggcgggauuugcgacucuccgcaccagauccuggauggagagaauuguacccucaucgacgcccugcugggcgauccccauugcgacggguuucagaacaaagaaugggaucucuucgucgagagaagcaaggccuauuccaauuguuacccuuaugacgugcccgauuacgcuucucugcggagccuuguugccuccagcggaacgcuggaauuuaacaaugagucuuucaacuggaccggcguggcucaaaauggcacauccagcgccugcaaacgcagaucuaacaaguccuuuuucagccggcucaauuggcugcaccagcuuaaguauaaauacccugcgcugaacgucaccaugcccaauaacgagaaguuugacaaacucuauauuuggggagugcaucacccuucuacagauuccgaccagaucagccuguacgcccaggcuccggggcgcguuaccguguccacgaagagaucucaacagacagucauucccaacaucggcagccggccuugggugcgcgggguguccagcagaauuucuaucuacuggaccauugucaaauccggagauauccugcucaucaauuguacaggcaaccugauugcuccccggggguauuucaagauccgcagcggaaagucuagcauuaugagauccgacgccucuaucggcaaaugcaauagcgaauguauuaccccuaacggcuccauccccaaugacaagccguuucagaacguuaaucggaucaccuacggggccugcccucgcuaugugaaacagaacacacuuaagcuggcgacgggaaugagaaaugugcccgagaaacaaacccggggcauuuucggggccaucgcuggauuuauugaaaacggcugggaggggauggucgauggaugguacggcuuccgccaccagaauagcgagggcacagggcaggccgcugaccucaagucuacccaagccgccaucaaccagauuaauggaaaacugaacagacuuaucgaaaagacaaaugagaaguuucaucagaucgaaaaagaguucuccgaaguggagggccggauucaggaucuggagaaguauguugaagacaccaaaaucgaucucuggagcuacaacgcugagcugcugguggcgcucgaaaaccaacacacgauugaccugacagauucugagaugaauaaacuuuucgaaagaaccaagaagcagcugcgcgagaacgccgaggacauggggaauggauguuuuaagaucuaucauaaaugcgauaacgcuugcauuggcuccauccggaaugggaccuacgaccacgaugucuacagagacgaagcccucaacaaucgcuuccagauuaagggcguggagcugaaaagcggauauaaggacuggauccuuuggaucuccuuugccauuucuuguuuccugcucugcguugugcugcugggcuuuaucaugugggcuugucagaaagggaacauucggugcaauaucuguauuuga

SEQ ID NO: 193006 - RNA, 1698 nt, Artificial Sequence
  derived and/or modified CDS sequence (opt5) from hemagglutinin__InfluenzaA__ABF47955
augaaggccaaacugcucgugcugcuuuacgcuuucgucgccaccgacgcggauacaaucugcauuggcuaucacgcuaacaauagcacggacaccguugauacaaucuuugagaagaacguggccgugacccauuccgucaaucugcucgaagacagacacaacgggaaacuguguaaacuuaagggaauugcuccccugcagcucggcaagugcaauaucacaggguggcugcugggaaacccugagugugauucucuccugccggcccggagcugguccuacauuguggaaacccccaauucugagaacggcgccugcuauccuggggacuucaucgauuacgaagaacuucgcgagcaacugagcuccguuucuagccucgaaagauuugagaucuuccccaaggaauccagcuggccuaaucauacauuuaacggagugaccgucucuuguucccaccggggcaaaagcucuuucuaucgcaaucugcuuuggcugacgaagaaaggcgacuccuaccccaagcucaccaacagcuaugugaauaacaaagggaaggagguucuggugcuguggggaguccaucacccuucuuccagcgaugagcagcagucccucuacucuaauggcaacgcuuacgugagcguggccuccagcaacuauaauagacgguuuacaccggaaauugcggcccgccccaaggucaaagaccagcacgggagaaugaacuacuauuggacccugcuugagccuggagauacaaucauuuucgaagcuaccggcaaucugaucgcccccugguacgcuuuugcccucucucggggguucgaguccggaauuaucacgagcaacgcgucuaugcaugaaugcaauacaaagugucaaaccccucagggcagcauuaacuccaaucugcccuuucagaacauccacccgguuacaaucggcgagugcccuaaauaugugcgcucuaccaagcugagaauggugaccgggcuucggaauauucccagcauccaguaccgcggacucuucggcgccauugcuggguuuaucgagggaggcuggacagggaugauugacggaugguauggcuaccaucaccaaaacgaacagggcuccggguacgccgcugaucagaaaagcacgcagaaugccaucaacagaaucaccaauaaggucaacucugugauugagaaaaugaauacacaauucaccgccguuggaaaggaguucaacaaccuggagaagcggauggaaaaucugaacaaaaagguggacgacggcuuucucgauaucuggacauauaaugcugagcugcuuguccugcucgagaacgaacgcacccuggacuuccacgaucuuaaugugaaaaaccuguacgagaagguuaaaucccagcucaagaauaacgcgaaggaaauugggaauggauguuuugaguucuaucauaaaugcgacaacgaauguauggagagcgugagaaauggcacguacgauuauccuaaguacucugaggaauccaaacugaaccgggagaagaucgacggggucaaacuggaaagcaugggcguguaucagauucucgccaucuacuccacagucgcuucuagccuggugcuucugguuucccucggagccaucucuuuuuggaugugcagcaauggcucccugcaaugcagaauuuguaucuga

SEQ ID NO: 193007 - RNA, 1698 nt, Artificial Sequence
  derived and/or modified CDS sequence (opt5) from hemagglutinin__InfluenzaA__ABF60576
augaagaccacaaucauucugauccuccugacgcacgccguggacagccagaaccccauuuccggcaauaacaccgcuacacuuugccuggggcaucacgccgucgcgaauggaacccucguuaaaacaaucaccgaugaccaaauugaggugacaaacgcuaccgaacuggugcagucuacgagcaucggcaagaucuguaauaacccuuacagaguccuugaugggcggaauugcacccugauugacgccaugcucggagauccgcauugugacguguuccaguaugagaacugggaucuguuuaucgaacgcuccucugccuucagcaauugcuaccccuaugacauuccugauuacgcuucccugagaucuaucguugccagcuccggcacacucgaguuuaccgcugaaggguucacauggaccggagugacgcagaacggcggcagcggggccugucggcgcggaucugcggacuccuuuuucagcagacugaauuggcuuacaaaaucuggcaacuccuaucccacccugaaugucacaaugccuaacaaugauaacuuugacaagcucuacauuugggggauccaccaucccagcaccaacaaugagcaaaccaaacuguaugugcaggagcuuggacggguuacagugucuacgaagcgcucccagcagaccauuaucccuaacaucggcagcagaccggggguccggggacaagccggccgcauuuccaucuacuggacaauugugaagcccggcgauauccugaugauuaauucuaacgggaaucucguggcuccuagaggauacuucaaaaugcggaccggcaagagcuccaucaugcgcagcgacgcccccaucgacacaugcuggucugaauguauuaccccuaacggguccauccccaaugauaaaccguuucagaacgucaauaagguuacguauggaaaaugcccuaaguacauuaagcagaacacacugaaacuggcuaccggcaugagaaaugugcccgagaagcagauccgggggauuuucggagccaucgcgggcuuuaucgaaaacggcugggaggggaugguggacggaugguauggcuuccgcuaccaaaauagcgaggggaccggacaggccgcugaucucaaaucuacacaggccgcuauugaccaaaucaacggcaagcugaauagagucauugaacggaccaacgagaaauuucaccagaucgaaaaggaguucagcgaaguggaggggcgcauucaggaucuugagaaauauguugaagacacaaagaucgaucugugguccuacaacgccgagcuccugguggcccuugaaaaucagcacacgauugaccugaccgaugcugagaugaacaaacucuucgaaaagacaagacggcaacugagagagaaugcggaggacaugggcggaggcuguuuuaagaucuaucauaaaugcgauaacgccuguaucgggucuauucgcaauggaaccuacgaccacuacaucuaucgggacgaagcucugaacaauagauuccagauuaagggcgucgagcucaaaagcggguacaaggauuggauccuguggauuuccuuugccaucagcugcuuccuuaucugcgugguucugcucggauuuauuaugugggccugugaaaagggcaacauccgcugcaauauuuguaucuga

SEQ ID NO: 193008 - RNA, 1701 nt, Artificial Sequence
  derived and/or modified CDS sequence (opt5) from hemagglutinin__InfluenzaA__ABF60577
augaagaccaucauugugcugagcuacuucuuuugccucgcccugucccaggacuauucugagagcaacaauuccacagcuacgcuuugucugggccaccaugccguccccaacgggaccaucguuaaaacaauuaccgaugaccaaaucgaagugacaaaugcgaccgagcucgugcagucuagcuccacaggaaagauuugcaacaauccucacagaauccuggauggccgggacuguacccuuaucgaugcucugcucggggacccgcauugcgaugucuuccaggacgaaacgugggaucuguacguggagcgcucuagcgccuuuuccaacuguuaucccuacgacguuccugauuaugccagccugagaucucucguggcuuccagcggaacccuggaguucauuacagaaggcuuuaccuggacaggggucacccagaauggaggcucuaacgccugcaaacggggccccgcuuccggguucuuuagccgccuuaauuggcugacgaagucuggauccacauacccugugcucaacguuaccaugcccaaugacgauaacuucgacaaacuguauguguggggcguccaccauccuagcacaaaucaagagcagaccgaccuuuacgugcaggccuccgggagagugaccgucucuacacggcgcagccagcaaacgaucauuccgaacaucggauccagacccuggguucggggccagagcgggcgcauuucuaucuacuggaccauugugaagccuggagaugugcuggucaucaauuccaacggcaaccucaucgcgcccagaggcuauuuuaagauucggacagggaaaagcucuaucaugcgcagcgacgccccuauugauaccuguaucuccgaaugcauuacacccaauggaucuaucccgaacgacaagccuuuccagaaugugaacaaaaucaccuacggcgcuugucccaaguauguuaaacagagcacgcugaagcuggccacagggaugagaaaugugccugagaagaaaacccggggacucuuugucgcuauugccggcuucaucgaaaacgggugggagggaaugauugauugcugguacggcuuucgccaccaaaauuccgagggcaccgggcaggcggccgaccuuaagagcacacaggcugccaucgaucaaauuaacggaaaacugaauagagugaucgaaaagaccaacgagaaauuccaccagaucgaaaaggaguucucugaaguugagggccggauucaggaccuggagaauuauguggaagauacaaaaaucgaccucugguccuacaacgcugagcugcuugucgcccuggaaaaucagcauacgauugaucucaccgacagcgagaugaacaagcuguuugaaagaacacgccggcaacugagagagaaugccgaggacauggggucuggauguuucaagaucuaucacaaaugcgauaacgcuugcauugaauccauccgcaacggcaccuacgaccaugauauuuaccgggacgaggcgcucaauaacagauuucagaucaaggggguggaacugaaaagcggcuauaaggauuggauccuuuggauuuccuucgccacaucuuguuuucugcucugcgucgugcugggaggcuucaucaugugggcuugucagcgcgggaauauucggugcaacaucuguauuuga

SEQ ID NO: 193009 - RNA, 1701 nt, Artificial Sequence
  derived and/or modified CDS sequence (opt5) from hemagglutinin__InfluenzaA__ABF60578
augaagaccaucauugugcugagcugcuucuuuugucucgccuucucccaggaccugucugagaacaauaacaauacagcuacgcuuugccugggccaccaugccguccccaacgggaccaucguuaaaacaauuaccgaugaccaaaucgaagugacaaaugcgaccgagcucgugcagagcuccucuacaggaaagauuuguaacaauccucacagaauccuggauggccgggacugcacccuuaucgaugcucugcucggggacccgcauugugaugucuuucaggacgaaacgugggaucuguacguggagcgcagcaaauccuucucuaacugcuaucccuacgacguuccugauuaugccagccugagaucccucguggccagcucuggaacccuggaauuuauuacagaggcuuucaccuggacaggcgucacccagaaugggggauccggcgccuguaagcggggccccgggaacggauuuuucagccgccuuaauuggcugacgaaaucuggcuccgcuuacccugugcucaacguuacaaugcccaauaacgacaauuuugauaagcuguauguguggggaguccaccauccuagcaccaaccaagagcagacaaaccuuuacgugcaggccucugggagagugaccgucuccacccggcgcagccagcaaacaaucauuccgaauaucggcuccagacccuggguucgggggcagucucgcagaauuagcaucuauuggacgauugugaagccuggagacauccuggugaucaacuccaauggcaaccucauugcgccccggggcuacuucaaaaugcgcaccgggaaguccucuaucaugagauccgacgccccuauugauacaugcaucagcgaauguauuacccccaauggaucuaucccgaacgacaaaccuuuucagaaugucaacaagaucacauacggcgcuugccccaaauauauuaagcagagcacccugaagcuggccacggggaugcggaaugugccugagaaacaaacacgcggacucuucggcgcuaucgccggguuuauugaaaacggaugggagggcaugaucgauggcugguacggguucagacaccagaauagcgagggaaccggccaggcggccgaccugaagucuacccaagcugccauugaucagaucaacgggaaacuuaaucggguuaucgaaaagacaaacgagaaauuccaccagauugaaaaggaguuuagcgaaguggagggaagaauccaggaccuggagaaauaugucgaagauaccaagauugaccucugguccuacaaugcugaugugcugguugcccuugagaaccaacauacaaucgaccugacggauagcgaaaugaacaaacucuucgagaagacccgccggcagcugagagaaaaugccgaggacaugggcaacggguguuuuaagauuuaucacaaaugcgacaaugcuugcaucgagucuauucgcaacggcacauacgaucaugacaucuaucgggaugaagcgcugaauaacagauuccagaucaagggauguggcgugaaauccggguacaaggacuggauucucuggaucagcuuugccauuucuugcuuccugcuuugugucgugcugcucggauuuaucaugugggcuugccagcgcggcaauauucgguguaacaucugcaucuga

SEQ ID NO: 193010 - RNA, 1701 nt, Artificial Sequence
  derived and/or modified CDS sequence (opt5) from hemagglutinin__InfluenzaA__ABF60579
augaagacccugaucgcccucagcuacauuuucugccuggugcuuggccaggaccugcccgggaacggaaauuccacagcuacgcucugucugggccaccaugccgucccuaacgggacccuuguuaaaacaaucaccgaugaccaaauugaggugacaaaugcgaccgaacuggugcagaacuuuucuauggauaagaucugcaauaacccgcaccggauucucgacggagcuaauuguacacugaucgaugcccugcucggcgacccccauugcgaugacuuccagaacgagaaaugggaucuguuugucgaaagaagcaaggccuucuccaauuguuauccuuacgacgugcccgauuauaccucucuucgcagccugaucgcuuccucugggacgcucgaguuuauuaacgaagacuucaauuggaccggaguuacacagaacggcggcagcaaugccugcaaaagagggccugauuccagcuuuuucucucggcugaacuggcuuuacaaguccggaaauaccuaucccaugcugaacgugacaaugccuaacagcgacaauuuugacaagcucuacaucuggggcguccaccauccgucuaccgcucgcgagcaaacgaaccuguaugugcaggccuccgggaaaguuacagugagcaccaagagaucucagcagacaauuauccccaauauuggaucccggccuuggguccgcggccugagcuccagaaucucuauuuacuggaccaucgugaaacccggggauauccucgugauuaacagcaauggaaaccugaucgcgccucggggcuacuucaagaugcacaccggccgcuccagcauuaugagaucugacgcccccaucgauacauguuccagcgagugcauuacgccgaaugggucuaucccuaacgacaaacccuuucaaaaugucaacaagaucaccuauggagcuuguccuaaguacguuaaacagaauacacuuaagcuggccaccggcaugcggaacauucccgaaaaacagacacgcgggaucuucggagcuauugccggcuuuaucgagaaugggugggaaggaaugguggauggcugguauggcuucagacaccagaacagcgaggggaccggacaagcggccgaccucaaguccacgcaggcugccauugaucagaucaauggcaaacugaaccgggugaucgagaagacaaacgaaaaauuccaucaaauugagaaggaauuuucuggggucgagggacgcauccaggaccuugaaaaguacguggaggauaccaaaauugaccuguggagcuauaaugcugagcuccugguugcccuggaaaaccagcacaccaucgaucucacagacuccgagaugaauaagcuguucgagaaaaccagacggcagcuuagagaaaacgccgaagacaugggcaaugggugcuuuaagauuuaccauaaaugugauaacgcuugcaucgagagcauucgcaauggcacauaugaccacaacgaguaccgggaugaagcgcugaauaacagauuccaaaucaagggaguggagcucaagucuggcuacaaagacuggauccuguggauuuccuuugccaucagcugcuuccuucugugugucgugcuccugggguuuauuaugugggcuugccagaagggaaauauccgcuguaacauuugcaucuga

SEQ ID NO: 193011 - RNA, 1701 nt, Artificial Sequence
  derived and/or modified CDS sequence (opt5) from hemagglutinin__InfluenzaA__ABF60580
augaagaccaucauugcccugagcuacaucuucugccucgcuuuugcccaggaccugcccggcaacgauaauuccacagcgacgcuuugucuggggcaccaugcugugccuaacggaacccucgucaaaacaauuaccaaugaccaaaucgagguuacaaacgccaccgaacuggugcagucuagcuccacaggcaagauuugcgauaauccgcacagaauccuugacgggaucaacuguacccugauugaugcccuccugggagacccccauugcgauggcuuccagaaugagaaaugggaccuguuuguggaacggucuaaggcuuucagcaacuguuauccuuacgauguccccgacuaugccucccuccgcucucugguggcuagcuccgggacgcuugaguuuaucaaugaaggauucaacuggaccggcguuacacagaauggcgggagcucugccugcaaaagaggaccugauaacggcuuuuucucccggcugaauuggcucuacaagagcgggucuaccuaucccgugcaaaacgucacaaugccuaauaacgacaacuccgauaagcuguacauuuggggagugcaccauccgagcaccgacaaagagcagacggaccuuuauguucaggcgucuggcaaggugacagucuccaccaaacgcauccagcaaacagugauucccaauguggggagcagaccuuggguccggggacuguccucucgcguuagcaucuacuggaccauugugaagcccggcgaugugcucgucaucaacuccaauggcaaccugaucgccccuagaggguacuauaaaaugcggaccggaaagagcucuauuaugcgcuccgacgcucccaucggcacauguagcucugagugcauuacgccgaaugggagcaucccuaacgauaagcccuuucagaaugugaacaaaauuaccuacggagccuguccuaaguauguuaaacagaauacacugaagcucgcuaccggcaugagaaacgugcccgaaaaacagacacgggggaucuucggagccaucgcgggcuuuauugagaauggcugggaagggaugaucgacggaugguacggcuuccgccaccaaaacuccgaggggaccggacaggccgcugaucugaagucuacgcaggccgcuauugaccaaaucaauggcaaacuuaacagagucauugagaagacaaaugaaaaguuucaccagaucgagaaagaguucagcgaaguggaagggcggauccaggaucuggagaaguauguugaggacaccaaaauugaucucugguccuacaacgccgaagugcuggucgcccuugagaaccagcauaccaucgaccugacagauagcgaaaugaauaaacucuucgagaagacccgcagacaacugcgggaaaacgcugaggacaugggcaauggaugcuuuaagauuuaucacaagugugacaacgcgugcaucggcucuauuagaaaugggacauacgaucaugacguguaccgcgaugaggcccugaacaaucgguuccagaucaaaggagucgaacucaaguccggcuauaaagacuggauucuguggaucagcuuugcuaucucuugcuuccuucugugugugguucuccugggguuuauuaugugggccugccagaagggaaacaucagauguaauauuugcaucuga

SEQ ID NO: 193012 - RNA, 1701 nt, Artificial Sequence
  derived and/or modified CDS sequence (opt5) from hemagglutinin__InfluenzaA__ABF60581
augaagaccaucauugugcugagcuacuucuuuugccucgcccugucccaggacuauucugagagcaacaauuccacagcuacgcuuugucugggccaccaugccguccccaacgggaccaucguuaaaacaauuaccgaugaccaaaucgaagugacaaaugcgaccgagcucgugcagucuagcuccacaggaaagauuugcaacaauccucacagaauccuggauggccgggacuguacccuuaucgaugcucugcucggggacccgcauugcgaugucuuccaggacgaaacgugggaucuguacguggagcgcucuagcgccuuuuccaacuguuaucccuacgacguuccugauuaugacagccugagaucucucguggccuccagcggaacccuggaguucauuacagaaggcuuuaccuggacaggggucacccagaauggaggcucuaacgcuugcaaacggggccccgccuccggguucuuuagccgccuuaauuggcugacgaagucuggauccacauacccugugcucaacguuaccaugcccaauaacgauaauuucgacaaacuguauguguggggcguccaccauccuagcacaaaccaagagcagaccaaucuuuacgugcaggcuuccgggagagugaccgucucuacacggcgcagccagcaaacgaucauuccgaacaucggauccagacccuggguucggggccagagcgggcgcauuucuaucuacuggaccauugugaagccuggagacgugcuggucaucaacuccaauggcaaccucaucgcccccagaggcuauuuuaagaugcggacagggaaaagcucuauuaugcgcagcgaugcgccuaucgacaccuguauuuccgaaugcaucacacccaauggaucuauuccgaacgauaugccuuuccagaaugugaacaagaucaccuacggcgccugucccaaauauguuaagcaggggacgcugaaacuggcuacaggaaugagaaaugugccugagaagcaaacccggggccucuuuggggccaucgcuggauucauugaaaacggcugggagggcaugaucgacgggugguacggauuucgccaccagaauagcgagggcaccgggcaggccgcggaucugaaguccacacaagccgcuauugaccagaucaacggaaaacuuaauagagucauugaaaagaccaacgagaaauuccaccagaucgaaaaggaguucagcgaaguggagggccggauccaggaucuggagaaauauguugaagacacaaagauugaucucuggucugacaaugccgagcugcuuguggcucuggaaaaccaacauacgaucgaucucaccgacuccgagaugaauaaacuguuugaaaagacaagacgccagcugcgggagaacgccgaggucauggggaacggcugcuucaagauuuaccacaaaugugacaaugccugcaucgaaagcauuagaaacggaaccuaugaucaugacaucuaccgcgaugaggcucucaauaaccgguuucagauuaagggcguggaacugaaaucuggguacaaggacuggauccuuuggaucuccuucgcgauuagcugcuuucugcucugugucgugcugcuuggauucaucaugugggccugccagagaggcaauauucgcuguaacaucugcauuuga

SEQ ID NO: 193013 - RNA, 1701 nt, Artificial Sequence; identical to SEQ ID NO: 192812
  derived and/or modified CDS sequence (opt5) from hemagglutinin__InfluenzaA__ABF82651

SEQ ID NO: 193014 - RNA, 1698 nt, Artificial Sequence; identical to SEQ ID NO: 192872
  derived and/or modified CDS sequence (opt5) from hemagglutinin__InfluenzaA__ABF82662

SEQ ID NO: 193015 - RNA, 1698 nt, Artificial Sequence
  derived and/or modified CDS sequence (opt5) from hemagglutinin__InfluenzaA__ABF82673
augaaggccaaacugcucgugcugcuuugcaccuucacagcuacguacgccgacaccaucuguauuggcuaucacgcgaacaauagcacagauaccgucgacacaguucuggagaagaacgugaccgugacacauuccgucaaucuccuggaagauucucacaacgggaaacuuugccugcucaagggaaucgcuccccugcagcugggcaauuguagcguggccggguggauucucggaaacccugagugcgaacugcuuaucuccaaaggcucuuggagcuacauuguugagaccccgaaucccgaaaacgggacguguuauccuggauacuuugccgacuaugaggagcugagagaacaacucuccucugugagcuccuucgagcgguuugaaaucuuccccaagggcagcucuuggccuaaucauaccgucacaggcguguccgcuagcugcucucacaacgggaaguccagcuuuuaccgcaaucugcuuuggcugaccgggaaaaacggccucuaucccaaucugucuauguccuacguuaacaauaaggagaaagaggugcugguccucuggggagugcaucacccuccgaacaucggagaucagagagcccuguaccacacagaaaacgcuuaugugagcgucguuuccucucauuacagccggcgcuucacccccgagauugccaagagaccuaaagugcgggaccaggaaggccgcaucaauuauuacuggacgcuucuggagcccggggauacaauuaucuuugaagcgaacggaaaucucauugccccuugguaugcuuucgcccuguccagaggcuuuggcagcgggaucauuaccucuaacgcucccaugggagagugugacgccaagugccagacaccgcaaggcgcgaucaauuccagccuuccuuuccagaacgugcaccccgucaccaucggggaguguccuaaguacgugcggucugccaaacugcgcaugguuaccggacucagaaauauucccagcauccagucccggggccuguuuggggcuauugccggauucaucgaaggcggcuggacagggaugguggauggaugguauggcuaccaucaccagaacgagcaagggucuggauacgcugccgaccaaaagagcacgcagaaugccauuaacggcaucaccaauaaagucaacuccgugaucgaaaagaugaauacacaguuuaccgcuguugggaaagaguucaacaagcuggaacgcagaauggagaaucucaacaaaaagguggaugacggcuuccuggauauuuggacauauaacgcggagcuucugguccuccuggaaaaugagcggacccuugacuuucacgacagcaacgugaagaaucuguacgaaaaagucaagucucagcucaaaaacaaugccaaggagaucggaaacggcugcuucgaauuuuaucauaaauguaauaacgagugcauggaguccgugaagaaugggacguacgauuaucccaaguacagcgaagagucuaaacugaaccgcgaaaagauugacggaguuaaacuggaguccaugggcguguaucagauccucgcuauuuacagcacagucgccuccucucuggugcuucugguuagccucggggccaucuccuucuggaugugcucuaauggaagccugcaguguagaaucugcauuuga

SEQ ID NO: 193016 - RNA, 1698 nt, Artificial Sequence; identical to SEQ ID NO: 192913
  derived and/or modified CDS sequence (opt5) from hemagglutinin__InfluenzaA__ABF82684

SEQ ID NO: 193017 - RNA, 1701 nt, Artificial Sequence; identical to SEQ ID NO: 192879
  derived and/or modified CDS sequence (opt5) from hemagglutinin__InfluenzaA__ABF82695

SEQ ID NO: 193018 - RNA, 1701 nt, Artificial Sequence; identical to SEQ ID NO: 192855
  derived and/or modified CDS sequence (opt5) from hemagglutinin__InfluenzaA__ABF82706

SEQ ID NO: 193019 - RNA, 1698 nt, Artificial Sequence; identical to SEQ ID NO: 192371
  derived and/or modified CDS sequence (opt5) from hemagglutinin__InfluenzaA__ABF82819

SEQ ID NO: 193020 - RNA, 1698 nt, Artificial Sequence; identical to SEQ ID NO: 192872
  derived and/or modified CDS sequence (opt5) from hemagglutinin__InfluenzaA__ABF82830

SEQ ID NO: 193021 - RNA, 1698 nt, Artificial Sequence; identical to SEQ ID NO: 192872
  derived and/or modified CDS sequence (opt5) from hemagglutinin__InfluenzaA__ABF82841

SEQ ID NO: 193022 - RNA, 1698 nt, Artificial Sequence; identical to SEQ ID NO: 192872
  derived and/or modified CDS sequence (opt5) from hemagglutinin__InfluenzaA__ABF82852

SEQ ID NO: 193023 - RNA, 1698 nt, Artificial Sequence
  derived and/or modified CDS sequence (opt5) from hemagglutinin__InfluenzaA__ABF82863
augaaggccaaacugcucgugcugcuuugcaccuucacagcuacguacgccgacaccaucuguauuggcuaucacgcgaacaauagcacagauaccgucgacacaguucuggagaagaacgugaccgugacacauuccgucaaucuccuggaagauucucacaacgggaaacuuugccugcucaagggaaucgcuccccugcagcugggcaauuguagcguggccggguggauucucggaaacccugagugcgaacugcuuaucuccaaagagucuuggagcuacauuguugaaaccccgaaucccgagaacggcacguguuauccuggguacuuugccgacuaugaggaacugagagagcaacucuccucugugagcuccuucgaacgguuugagaucuuccccaagggaagcucuuggccuaaucauaccgucacaggcguguccgcuagcugcucucacaacggcaaguccagcuuuuaccgcaaucugcuuuggcugaccgggaaaaacggacucuaucccaaucugucuauguucuacguuaacaauaaggagaaagaagugcugguccucuggggcgugcaucacccuccgaacaucggggaucagagagcccuguaccacacagagaacgcuuauguguccgucguuagcucccauuacucucggcgcuuuacccccgaaauugccaagagaccuaaagugcgggaccaggagggacgcaucaauuauuacuggacgcuucuggaacccggcgauacaauuaucuucgaggcgaacgggaaucucauugccccuugguaugcuuuugcccugagcagaggauucggcuccggcaucauuaccagcaacgcucccaugggggagugugacgccaagugccagacaccgcaaggagcgaucaauucuucccuuccuuuucagaacgugcaccccgucaccaucggcgaauguccuaaguacgugcggagcgccaaacugcgcaugguuaccgggcucagaaauauucccucuauccagagccggggacuguucggcgcuauugccggguuuaucgagggaggcuggacaggcaugguggaugggugguauggauaccaucaccagaacgaacaaggcuccggguacgcugccgaccagaagucuacgcagaaugccauuaacggaaucaccaauaaagucaacagcgugaucgagaagaugaauacacaguucaccgcuguuggcaaagaguucaacaagcuggaacgcagaauggagaaucucaacaaaaagguggaugacggguuucuggauauuuggacauauaacgcggaacuucugguccuccuggagaaugaacggacccuugacuuccacgacuccaacgugaagaaucuguacgagaaagucaagagccaacucaaaaacaaugccaaggaaaucggcaacggaugcuuugaguucuaucauaaauguaauaacgagugcauggaaucugugaagaauggcacguacgauuaucccaaguacuccgaggaaagcaaacugaaccgcgagaagauugacgggguuaaacuggagucuaugggaguguaucagauccucgcuauuuacuccacagucgccagcucccuggugcuucugguuucucucggcgccaucagcuuuuggaugugcuccaaugggucucugcaguguagaaucugcauuuga

SEQ ID NO: 193024 - RNA, 1698 nt, Artificial Sequence
  derived and/or modified CDS sequence (opt5) from hemagglutinin__InfluenzaA__ABF82874
augaaggccaaacugcucgugcugcuuugcaccuucacagcuacguacgccgacaccaucuguauuggcuaucacgcgaacaauagcacagauaccgucgacacaguucuggagaagaacgugaccgugacacauuccgucaaucuccuggaagauucucacaacgggaaacuuugccugcucaagggaaucgcuccccugcagcugggcaauuguagcguggccggguggauucucggaaacccugagugcgaacugcuuaucuccaaagagucuuggagcuacauuguugaaaccccgaaucccgagaacggcacguguuauccuggguacuuugccgacuaugaggaacugagagagcaacucuccucugugagcuccuucgaacgguuugagaucuuccccaagggaagcucuuggccuaaucauaccgucacaggcguguccgcuagcugcucucacaacggcaaguccagcuuuuaccgcaaucugcuuuggcugaccgggaaaaacggacucuaucccaaucugucuauguccuacguuaacaauaaggagaaagaagugcugguccucuggggcgugcaucacccuccgaacaucggggaucagagagcccuguaccacacagagaacgcuuaugugagcgucguuuccucucauuacagccggcgcuucacccccgaaauugccaagagaccuaaagugcgggaccaggagggacgcaucaauuauuacuggacgcuucuggaacccggcgauacaauuaucuuugaggcgaacgggaaucucauugccccuugguaugcuuucgcccuguccagaggauuuggcagcggcaucauuaccucuaacgcucccaugggggagugugacgccaagugccagacaccgcaaggagcgaucaauuccagccuuccuuuccagaacgugcaccccgucaccaucggcgaauguccuaaguacgugcggucugccaaacugcgcaugguuaccgggcucagaaauauucccagcauccagucccggggacuguuuggcgcuauugccggguucaucgagggaggcuggacaggcaugguggaugggugguauggauaccaucaccagaacgaacaaggcucuggguacgcugccgaccaaaagagcacgcagaaugccauuaacggaaucaccaauaaagucaacuccgugaucgagaagaugaauacacaguuuaccgcuguuggcaaagaguucaacaagcuggaacgcagaauggagaaucucauuaaaaagguggaugacggguuccuggauaucuggacauauaacgcggaacuucugguccuccuggagaacgaacggacccuugacuuucacgacagcaaugugaagaaccuguacgagaaagucaagucucagcucaaaaauaacgccaaggaaauuggcaauggaugcuucgaguuuuaucauaaauguaacaaugagugcauggaauccgugaagaacggcacguacgauuaucccaaguacagcgaggaaucuaaacugaaucgcgagaagaucgacgggguuaaacuggaguccaugggaguguaucagauucucgcuaucuacagcacagucgccuccucucuggugcuucugguuagccucggcgccaucuccuucuggaugugcucuaacgggagccugcaguguagaauuugcaucuga

SEQ ID NO: 193025 - RNA, 1698 nt, Artificial Sequence; identical to SEQ ID NO: 192872
  derived and/or modified CDS sequence (opt5) from hemagglutinin__InfluenzaA__ABF82885

SEQ ID NO: 193026 - RNA, 1698 nt, Artificial Sequence; identical to SEQ ID NO: 192872
  derived and/or modified CDS sequence (opt5) from hemagglutinin__InfluenzaA__ABF82896

SEQ ID NO: 193027 - RNA, 1698 nt, Artificial Sequence; identical to SEQ ID NO: 192872
  derived and/or modified CDS sequence (opt5) from hemagglutinin__InfluenzaA__ABF82907

SEQ ID NO: 193028 - RNA, 1698 nt, Artificial Sequence; identical to SEQ ID NO: 192916
  derived and/or modified CDS sequence (opt5) from hemagglutinin__InfluenzaA__ABF82929

SEQ ID NO: 193029 - RNA, 1698 nt, Artificial Sequence; identical to SEQ ID NO: 192872
  derived and/or modified CDS sequence (opt5) from hemagglutinin__InfluenzaA__ABF82940

SEQ ID NO: 193030 - RNA, 1701 nt, Artificial Sequence
  derived and/or modified CDS sequence (opt5) from hemagglutinin__InfluenzaA__ABF83447
augaagaccaucauugcccugagcuacaucuucugccucgcucugggccaggaccuucccgggaacgauaauaacacagccacgcugugucucggacaccaugcggugccuaauggcacccuggucaaaacaauuaccgacgaucaaaucgagguuacaaacgcuaccgaacuugugcaguccucuagcacagggaagauuugcaauaacccgcacagaauccuggacggaaucgauuguacccucauugacgcccugcugggcgauccccauugcgacguguuucagaaugagacgugggaucucuucgucgaacgguccaaagccuuuucuaacuguuauccuuacgacgugcccgauuaugcuagccugcgcucccuuguugccucuagcgggacccuggaguucaucacagaaggauuuaccuggacaggcgugacccagaauggcggguccaacgcuugcaagagaggaccuggcagcggguucuuuucucggcucaauuggcugacgaaauccggaagcacauaccccguccuuaacgugaccaugccuaauaacgacaauuucgauaagcuguauauuuggggcguucaccauccgucuacaaaccaagagcagaccucccucuacgugcaggccagcgggggagucaccgugucuacacgcagaucccagcaaacgaucauucccaacaucggcagccggccuugggugcgcggccuguccucuagaauuagcaucuauuggaccaucgucaagcccggggacguucuggugauuaauuccaacggaaaucucaucgcgccucggggcuacuuuaaaaugcgcacaggaaagagcucuauuaugagauccgacgcccccaucgauaccuguauuagcgagugcaucacaccgaacgggucuaucccuaaugacaaacccuuccagaacgugaauaagauuaccuacggcgcuuguccuaaauaugucaagcagaacacgcugaaacuugccacagggaugcggaaugugcccgaaaagcagacccgcggacuguuuggcgcuaucgccggcuucauugagaacgggugggaaggaaugaucgauggcugguacggguuuagacaccaaaauagcgagggaaccggccaggcggccgaccucaaguccacacaggcugccauugaucaaaucaacgggaaacugaaucggguuaucgagaagaccaacgaaaaauuccaccagauugagaaggaguucucugaaguggaaggccgcauccaggaccuugagaaauaugucgaggauacaaagauugaccuguggagcuacaaugcugaacuccugguggcccuggagaaccagcauacgaucgaucucaccgacuccgaaaugaacaagcuguuugagaaaacaagacggcaacuuagagaaaaugccgaggauaugggaaacggcugcuucaagauuuaucacaaaugugacaaugcuugcaucgagagcauucgcaacgggaccuacgaccaugauguuuaucgggacgaagcgcugaauaacagauuucagaucaagggaguggagcucaaaucuggcuacaaggauuggauccuguggauuuccuucgccaucagcugcuuucuucugugugucgugcuccugggguucauuaugugggcuugccagcgcggaaauauccgguguaacauuugcaucuga

SEQ ID NO: 193031 - RNA, 1644 nt, Artificial Sequence
  derived and/or modified CDS sequence (opt5) from hemagglutinin__InfluenzaA__ABG20468
auggagaagaucgugcugcuccuggccauugucagccuuguuaaauccgaccagaucugcauuggcuaccacgcuaacaauucuaccgaacaaguggauacaaucauggagaagaacgugacggucacccaugcccaggacauucuggagaaaacacacaaugggaagcucugugaucuggacggagugaaaccccuuauccugagagauugcagcguugcgggcgagaagaucaacccugcuaaugaccucuguuauccggggaacuucaaugauuacgaggaacugaagcaucugcucucccggauuaaccacuuugagaaaauccagauuauccccaagucuagcugguccgaccaugaagccucuagcggaguguccagcgccugcccuuaucagggcagaucuuccuucuuucgcaaugucguguggcugauuaaaaagaacaaugcuuaccccaccaucaaacggagcuauaacaauacaaaccaagaggaucuucugguucucugggggauucaccacccuaaugacgccgcugaacagacccgccuguaccagaaccccacaaccuauaucucugugggaacguccacccuuaaccagagacuggucccuaagaucgccacacggagcaaggugaauggccaaucuggccgcauggaguucuuuuggaccauucucaaaccgaacgaugcgaucaauuucgaguccaacgggaauuuuauugcccccgaaaacgcuuacaagaucgugaaaaagggagacagcacaauuaugaaauccgagcuggaauacggcaauuguaacaccaagugcgagacgccuaucggggccaucaauucuagcaugcccuuccauaacauucacccucugacaaucggagaaugucccaaauaugucaaguccaauagacucguucuggcuaccggccuucggaacagcccgcagggggagcgcagacggaagaaacgcggacuguuuggcgccauugcgggcuucaucgaagggggauggcagggcaugguggaugggugguacggauaucaucacucuaaugaacagggcuccggguacgccgcugacaaggagagcacacaaaaagccauugacggagugaccaacaaggucaauucuaucaucgauaaaaugaacacccaguuugaagcugugggcagagaguucaacaaucucgaacggcgcauugagaaccugaauaagaagauggaggacggcuuucuugauguuuggacauauaacgccgaacugcucgugcugauggagaaugaaagaacgcuggacuuccacgauagcaacgucaaaaaucucuacgacaaggugcggcugcagcuuagagauaacgccaaagagcuggggaauggaugcuucgaauuuuaucaucgcugugacaacgagugcauggaguccguucggaauggcaccuacgauuacccucaauauucugaagaggcuagacucaagcgcgaagagaucagcggggugaaacuggaguccauuggaacauaccagauccuuagcauuuauucuaccgucgcguccagccuggcccucgcuaucaugguggccggccugucucuguggauguguuccaacgggagccuccagugccggauuugcaucuga

SEQ ID NO: 193032 - RNA, 1707 nt, Artificial Sequence
  derived and/or modified CDS sequence (opt5) from hemagglutinin__InfluenzaA__ABG20472
auggagaagaucgugcugcuccuggccauugucagccuuguuaaauccgaccagaucugcauuggcuaccacgcuaacaauucuaccgaacaaguggauacaaucauggagaagaacgugacggucacccaugcccaggacauucuggaaaaagcgcacaaugggaagcucugugaucuggacggagugaaaccccuuauccugagagauugcagcguugcuggcuggcuccuggggaacccuaugugugacgaguuccugaaugugccggaaugguccuauaucgucgagaagauuaaccccgccaaugaucucugcuacccuggaaacuuuaaugacuaugaggaacugaagcaucuucugucucggaucaaccacuucgagaaaauucagaucauucccaagagcuccuggucugaucaugaagccagcuccggcgugagcucugcuuguccuuaccaggggcgcuccagcuuuuucagaaauguuguguggcucaucaaaaaggacaacgccuaucccacaauuaaacggucuuacaauaacaccaaucaagaggaucugcuuguccuguggggaauccaccacccuaacgacgcugccgagcagacacgccucuaucagaacccgaccacauacaucuccgugggcaccagcacgcugaaucagagacuggugcccaagauugcgacccggucuaaggucaacggccaauccgggcgcauggaauuuuucuggacaauccucaaaccuaaugaugccauuaacuuugagagcaauggaaacuucaucgcucccgaaaaugccuacaagauuguuaaaaagggcgacuccaccaucaugaaaucugagcuggaauaugggaacugcaauacaaagugucagaccccuaucggagcuauuaacagcuccaugcccuuucauaauauccacccgcuuacgauuggcgagugcccuaaauacgugaagucuaacagacuggugcucgccacagggcugcggaauagcccccagggagagcgcagacggaagaaacgcggccuuuucggcgcgaucgccggguuuauugaaggaggcuggcaggggauggucgacggaugguauggcuaccaucacuccaacgagcaagggagcggauaugcugccgauaaggaaucuacccagaaagcuaucgacggcgugacaaauaagguuaacagcaucauugauaaaaugaacacccaguucgaggccgugggcagagaauuuaauaaccuggagcggcgcaucgagaaucucaacaagaagauggaagacggguuccuggaugucuggaccuacaaugccgagcugcucgugcugauggaaaacgagagaacacuugacuuccacgauuccaauguuaaaaaccuguaugacaaggugcggcuccaacugagagauaaugcuaaagaacuuggaaacggcuguuuugaguucuaccaucgcugcgacaaugaguguauggaaucuguccggaacgggacguacgauuauccucaguacagcgaggaagcgagacugaagcgcgaggagauuuccggagugaaacucgaaagcaucggcaccuaucagauucugucuaucuacuccacagucgccagcucucuggcucucgccauuaugguggccgggcugucccuuuggaugugcagcaauggcucccugcagugccggaucuguaucuga

SEQ ID NO: 193033 - RNA, 1707 nt, Artificial Sequence
  derived and/or modified CDS sequence (opt5) from hemagglutinin__InfluenzaA__ABG20478
auggagaagaucgugcuccuguucgccauugucagccugguuaaauccgaccagaucugcauuggcuaccacgcuaacaauucuaccgaacaaguggauacaaucauggagaagaacgugacggucacccaugcccaggacauucuugaaaagacacacaaugggaagcugugugaucucgacggagugaaaccccugauccuuagagauugcagcguugcgggcuggcugcucgggaacccuaugugugacgaguuucugaaugugccggaaugguccuauaucgucgagaagauuaaccccgcuaaugaucugugcuacccuggaaacuucaaugacuaugaggaacucaagcaucugcuuucucggaucaaccacuuugagaaaauucagaucauucccaagagcuccuggucugaucaugaagccagcuccggcgugagcucugccuguccuuaccaggggcgcuccagcuucuuuagaaauguuguguggcugaucaaaaaggacaacgcuuaucccaccauuaaacggucuuacaauaacacaaaucaagaggaucuccugguccuuuggggaauccaccacccuaacgacgccgcugagcagacccgccuguaucagaacccgacaaccuacaucuccgugggcacgagcacccucaaucagagacuggugcccaagauugccacacggucuaaggucaacggccaauccgggcgcauggaguucuuuuggaccauccugaaaccuaaugaugcgauuaacuucgaaagcaauggaaacuuuaucgcccccgaaaaugcuuacaagauuguuaaaaagggcgacuccacaaucaugaaaucugagcucgaauaugggaacugcaauaccaagugucagacgccuaucggagccauuaacagcuccaugcccuuccauaauauccacccgcugacaauuggcgagugcccuaaauacgugaaaagcaacagacuugugcuggcuaccgggcuccgcaauucuccccagggagagcggagacggaagaaacgcggccuguuuggcgccaucgcgggguucauugaaggaggcuggcaggggauggucgacggaugguauggcuaccaucacuccaacgagcaagggagcggauaugccgcugauaaggaaucuacacagaaagccaucgacggcgugaccaauaagguuaacagcaucauugauaaaaugaacacccaguuugaggcugugggcagagaguucaauaaccuugaacggcgcaucgagaaucugaacaagaagauggaagacggguuccucgaugucuggacauacaaugccgagcugcuggugcucauggaaaacgagagaacgcuggacuuucacgauuccaauguuaaaaaccuuuaugacaaggugcggcugcaacucagagauaaugccaaagaacugggaaacggcuguuucgaguuuuaccaucgcugcgacaaugaguguauggaaucuguccggaacgggaccuacgauuauccucaguacagcgaggaagcuagacuuaagcgcgaggagauuuccggagugaaacuggaaagcaucggcacauaucagauucucucuaucuacuccaccgucgcgagcucucuggcccuggcuauuaugguggccgggcucucccuguggaugugcagcaauggcucccuucagugccggaucuguaucuga

SEQ ID NO: 193034 - RNA, 1701 nt, Artificial Sequence; identical to SEQ ID NO: 192855
  derived and/or modified CDS sequence (opt5) from hemagglutinin__InfluenzaA__ABG26758

SEQ ID NO: 193035 - RNA, 1701 nt, Artificial Sequence
  derived and/or modified CDS sequence (opt5) from hemagglutinin__InfluenzaA__ABG26769
augaagaccaucauugcccugagcuacauccucugccugguguucgcucagaaacuucccggcaacgacaauuccacagccacgcugugucucgggcaccaugcggucccuaacggaacccugguuaagacaauuaccaaugaucaaaucgaggugacaaacgcuaccgaacuugugcagaauagcagcacaggcagaauuugcgacuccccgcaccggauccuggaugggaaaaacuguacccucaucgacgcccugcugggagauccccauugcgacggcuuucagaauaaggagugggaucucuucgucgaacgcucuaaagccuauagcaacuguuacccuuaugacgugcccgauuacgcuucccugagaucucuuguugccagcuccgggacgcuggaguuuaauaacgaaucuuucaauuggaccggaguggcucagaacggcacaucuuaugccugcaagcggcgcuccgucaagagcuuuuucucuagacucaauuggcugcacaaacuugaguacaaguauccugcgcugaacgugaccaugcccaauaacgacaaauuugauaagcucuacauuuggggcguucaucacccuuccacagacagcgaucaaaccucucuguacgugcaggccuccgggcgggucacggugagcacaaaacgcucccagcagaccgugaucccgaacauuggaucuggccccugggucagagggguuagcucccggaucagcauuuauuggacaaucgugaagccuggagacauucugcucaucaauucuaccggcaaccugaucgcuccccgcggguacuucaagauuagauccggaaaaagcucuaucaugcggagcgacgccccuauuggcaauuguaacuccgagugcaucacccccaauggcucuauuccgaacgauaagccuuuucaaaaugugaaccgcaucacauauggggcuugucccagauacgucaaacagaauacgcuuaagcuggccaccggaaugcggaacgugccugaaaaacagacacgcggcaucuucggggcgauugccggauuuaucgagaauggcugggaagggaugguugacggaugguauggcuucagacaccagaacagcgagggcaccgggcaagcugccgaucucaaguccacacaggcugccauuaaucagaucaacggaaaacugaaucggcuuauugagaagaccaacgaaaaguuucaucaaaucgagaaagaguucagcgaaguggaaggcagaauccaggaccuggagaaguacgucgaggauacgaaaauugaccucuggucuuauaacgccgaacugcugguggcucucgagaaucagcacacaaucgaucugaccgacuccgaaaugaacaaacuuuucgagcgcacccggaagcagcugagagaaaaugcggaggauauggggaacggaugcuuucgcauuuaccauaagugugacaaugccugcaucggcagcauucggaacgggacauacgaucacgacguuuauagagacgaggcucucaauaaccgcuuccaaaucaagggcguggaacugaaaucuggauacaaggauuggauucuuuggaucuccuuugccaucagcugcuuccugcucugugucgugcugcugggcuuuauuaugugggccugccagaaagggaauauccgguguaacauuugcaucuga

SEQ ID NO: 193036 - RNA, 1701 nt, Artificial Sequence; identical to SEQ ID NO: 192983
  derived and/or modified CDS sequence (opt5) from hemagglutinin__InfluenzaA__ABG26780

SEQ ID NO: 193037 - RNA, 1701 nt, Artificial Sequence
  derived and/or modified CDS sequence (opt5) from hemagglutinin__InfluenzaA__ABG26791
augaaggccaaacugcucgugcugcuuugcgcuuucaccgccacauacgcggacacgaucuguauuggcuaucacgcuaacaauagcaccgauacagucgacaccguucuggagaagaacgugacagugacccauuccgucaaucuccuggaagauucucacaacgggaaacuuugcagacugaagggaacagcuccccuccagcugggcaauuguagcguggccggguggauccugggaaacccugagugcgaaucccucuuuucuaaagagagcugguccuacauugccgaaaccccgaaucccgagaacggcacguguuauccuggguacuucgccgacuaugaggaacugaaggagcaacuuucuagcguuuccagcuuugaacgguucgagaucuuucccaaggagucuuccuggccuaaucauaccgugacaaaaggagucaccgcuagcugcucucacaacggcaaguccagcuucuacaaaaaucugcucuggcugacagaaaagaacggccuuuaucccaaucugucuaaauccuacgugaacaauaaggagaaggaaguucucgugcuguggggaguccaucacccuagcaacauuggggaucagcgcgccaucuaccacaccgagaacgcguauguguccguggucucuagccauuacuccagacgguuuacgccggaaaucgccaaacgccccaagguuagagaccaggagggccggauuaauuauuacuggacacugcucgagccuggggauaccaucauuuucgaagcuaacggaaaucugaucgcccccugguaugcuuuugcccuuagccgcggcuucgggucuggaauuaucacauccaacgcgagcaugggcgagugugacgccaaaugccagaccccucaaggcgcuauuaauucuagccugcccuuucagaacgugcacccggugaccaucggggaauguccuaaguacgucagauccacaaaacuccggauggugacgggacugcgcaauauccccucuauucagagcagaggccuuuucggggccaucgcuggauuuauugagggcggguggaccggaaugaucgauggcugguauggcuaccaucaccagaacgaacaaggguccggauacgccgccgacaagaaaagcacacagaaugcuauugauggcaucaccaacaagguuaauucugugaucgagaagaugaacacacaguucaccgcggucgggaaagaguucaauaagcuggaacggcgcauggagaaccucaauaaaaagguggacgauggauuucuggacauuuggacguauaacgccgaacugcucguucugcuugagaacgaaagaacacuggacuuccacgauuccaaugugaaaaaccucuacgagaaggucaagaaucagcugaaaaacaaugcuaaggagaucggcaacgggugcuuugaguucuaucauaaauguaauaacgaaugcauggaaagcgugaagaauggcaccuacgacuauccuaaauacucugaggaguccaaacuuaagcgggaaaagauugauggagucaagcuggagagcaugggcguguaucaaauccucgccauuuacuccaccguugccucuagccuggugcugcucgucucccugggggcuaucucuuuuuggaugugcagcaacggaucccuucagugucgcaucugcauuuga

SEQ ID NO: 193038 - RNA, 1701 nt, Artificial Sequence
  derived and/or modified CDS sequence (opt5) from hemagglutinin__InfluenzaA__ABG26802
augaagaccaucauugcccugagcuacaucuccugccucguguucgcucagaaacugcccggcaacgacaauucuacagccacgcuuugucuggggcaccaugcggucccuaacggaacccucguuaagacaauuaccaaugaucaaaucgaggugacaaacgcuaccgaacuggugcagagcuccucuacaggcagaauuugcgacagcccgcaccggauccuugaugggaaaaauuguacccugaucgacgcccuccugggagauccccauugcgacggcuuucagaacgagaagugggaucuguucgucgaacgcuccaaagccuuuucuaauuguuauccuuacgacgugcccgauuaugcuagccucagaucccugguugccagcucugggacgcuugaguucauuaacgaaggauuuaauuggaccggcgugacacaguccggcgggagcuacgcuugcaagcggggaucugucaacuccuucuuuagccgccugaauuggcucuaugagucugaguccaaguacccugcccugaacgugaccaugcccaauaacggcaaauucgacaagcuguauaucuggggaguucaccauccuagcacagauaaagaacaaaccaaucuguacgugagagcguccgggcgggucacggugucuacaaagcgcagccagcagaccgugauuccgaacaucggccccagaccuuggguccgggggcucuccagccgcauuucuaucuacuggacaauuguuaaacccggagacauccugcugaucaacuccaccggcaaucucauugccccuagaggcuauuuuaagauccggaccgggaaguccucuauuaugcgcagcgaugcucccaucggaacauguuccucuggcugcauuacgccgaacgggagcaucccuaaugacaaacccuuccagaacgugaauaagaucaccuacggagccuguccuagauaugugaaacaaaacacacugaaacuugcuaccggcaugcggaauguccccgagaaacagacacgcgggauuuuuggagccaucgcgggcuucauugaaaacggcugggaggggaugguggacggaugguacggcuuuagacaccagaauagcgaggggaccggacaggccgcugaucuuaagagcacgcaagccgcuaucgaccagauuaacggcaaacucaaucggcugaucgaaaagacaaacgagaaguuccaccagaucgaaaaagaguucucugaaguugaggggcgcauucaagaucuugagaaguauguggaagacaccaaaaucgaucugugguccuacaaugccgagcuccuggucgcccuggaaaaccagcauaccauugacaugacagauagcgagaugaauaagcucuuugaaaagaccagaaagcagcugcgggagaacgcugaggacaugggcaacggaugcuucaagaucuaucacaaaugugauaaugcgugcauuggcucuaucagaaacgggacauacgaccaugauguguaccgcgacgaagcccuuaauaaccgguuucagauuaagggaguugagcugaaauccggcuauaaggacuggauccucuggaucagcuucgcuauuuccugcuuucugcuuugugugguccugcucggguucaucaugugggccugccaaaaaggaaauauuagauguaacaucugcauuuga

SEQ ID NO: 193039 - RNA, 1701 nt, Artificial Sequence; identical to SEQ ID NO: 192987
  derived and/or modified CDS sequence (opt5) from hemagglutinin__InfluenzaA__ABG26813

SEQ ID NO: 193040 - RNA, 1701 nt, Artificial Sequence
  derived and/or modified CDS sequence (opt5) from hemagglutinin__InfluenzaA__ABG26824
augaaggccaaacugcucgugcugcuuugcgcucugagcgccaccgacgcggauacaaucuguauuggcuaccacgcuaacaauuccacggacaccgucgauacaguucucgagaagaacgugaccgugacacauucugucaaucugcuugaagacaaccacaaugggaaacugugcaagcucaaaggaaucgccccgcugcagcugggcaaguguagcauugccggguggauccucggaaacccugagugcgaaucccuguucucuaagaaaagcugguccuauauugcugagacccccaauucugaaaacggcacauguuaccccggguauuuugccgauuacgaggagcuuagagaacaacugagcuccgugagcucuuucgagcgguuugaaaucuucccuaaggaguccagcuggcccaaacauaauguuaccaagggagugacggcuucuugcucccacaaaggcaagagcucuuuuuaucgcaaccuccuguggcuuaccgagaagaauggcuccuacccuaaccugagcaaauccuaugucaauaacaaggaaaaagaggugcucguucuguggggagugcaucaccccucuaauaucgaagaccagaagacaauuuacagaaaagagaacgccuacgucagcgugguguccagccacuauaaccggcgcuucaccccugaaaucgcgaagagaccgaaaguccggaaucaggaggggcgcauuaacuacuauuggacacugcucgagcccggcgauaccaucauuuuugaagccaaugggaaccugaucgcuccuugguacgccuucgcucuuucuagaggauuuggcuccgggauuaucacgagcaaugccucuauggacgagugugaugcgaagugccagacaccccaaggagccaucaacagcucccugccuuuccagaauguucaucccgugaccauuggcgaauguccgaaguaugugcggucuacaaaacuccgcauggucaccggccugagaaacaucccuagcauucagucccgggggcuuuuuggagcuaucgccggcuucauugaagggggauggaccggcaugaucgacgggugguacggauaucaccaucagaaugaacaaggcagcggcuacgcugccgaucagaagucuacacagaacgccaucaaugggauuacgaacaaaguuaauuccaucauugagaagaugaacacccaguuuacagcugugggaaaagaguucaauaagcuggaaaagcgcauggagaaccucaacaaaaagguggacgauggcuuccuggacaucuggaccuacaaugcggaacugcucguccugcuugagaacgaaagaacacuggacuuucacgauagcaaugugaaaaaccucuaugagaagguuaaaucucaacugaagaauaacgccaaggagauugggaauggaugcuucgaauuuuaccacaaauguaacaaugagugcauggaauccgugaagaacggcaccuaugacuaccccaaauauagcgaggaguccaaacuuaaucgggagaagaucgauggggucaagcuggagucuaugggcguguaccagauccucgcuauuuauagcacggucgccuccucucuggugcugcucguuagccugggagccaucuccuucuggaugugcagcaacggcucucuucaguguaagauuugcaucuga

SEQ ID NO: 193041 - RNA, 1701 nt, Artificial Sequence; identical to SEQ ID NO: 192993
  derived and/or modified CDS sequence (opt5) from hemagglutinin__InfluenzaA__ABG26835

SEQ ID NO: 193042 - RNA, 1701 nt, Artificial Sequence
  derived and/or modified CDS sequence (opt5) from hemagglutinin__InfluenzaA__ABG26890
augaagaccaucauugcccugagcuacauccucugccugguguucgcucagaaacuucccggcaacgacaauuccacagccacgcugugucucgggcaccaugcggucccuaacggaacccugguuaagacaauuaccaaugaucaaaucgaggugacaaacgcuaccgaacuugugcaaaauucuccgacaggcagaauuugcgacagcccccaccggauccuggaugggaaaaacuguacccucaucgacgcccugcugggagauccucauugcgacggcuuucagaauaaggagugggaucucuucgucgaacgcuccaaagccuauucuaacuguuaccccuaugacgugccugauuacgcuagccugagaucccuuguugccucuagcgggacgcuggaguuuaccaaugaaaacuucaauuggacaggaguggcucaggacggcaaguccuaugccugcaagcggggcagcgucaacucuuucuucucccgccucaauuggcugcacaaacuugaguacaaguaucccgcgcugaacgugaccaugccuaauaacgggaaauuugauaagcucuacauuuggggaguucaucacccgagcacagacucugaucagaccucccuguacgugagagccagcggcaaagucacggugucuacaaagcggucccagcagaccgugauccccgacauuggguaucgcccuugggucagaggacugagcucccggaucucuauuuacuggacaaucguuaagcccggcgacauucuccugaucaacagcaccgggaaucuuaucgcuccucgcggauauuucaaaauuagaaacggcaaguccagcaucaugcggucugaugcccccauuggcaauuguuccagcgagugcaucaccccgaacgggucuauuccuaaugacaaacccuuucagaacgugaaucgcaucacauacggagcuuguccuagauaugugaagcaaaacacgcugaaacucgccaccggcaugcggaauguccccgaaaagcagacacgcgggaucuucggagcgauugccggcuuuaucgagaacgggugggaaggaaugguggauggcugguacggcuucagacaccagaauagcgaggggaccggacaggcugccgaccugaaauccacacaagcugccauugaucagaucaacggcaaacuuaaucggcugguugagaagaccaacgaaaaguuucaucagauugagaaggaauuuucugagguggaagggagaauccaagaccucgagaaauaugucgaggauacgaagaucgaccuguggagcuacaaugccgaacugcucguggcucuggagaaccagcacacaauugaucuuaccgacuccgaaaugaacaaacuguucgagcgcacccggaagcagcucagagaaaaugcggaggauaugggaaacggcugcuuuaagaucuaccauaaaugugacaaugccugcauugggagcauccgcaacggcacauaugaccacgauguuuaccgggacgaggcucugaauaacagauuccagauuaagggaguggaacuuaaaucuggcuauaaggauuggauccuguggauuuccuuugccaucagcugcuuccuccugugugucgugcugcucggguuuaucaugugggccugccaaaaaggaaauauucgcuguaacaucugcauuuga

SEQ ID NO: 193043 - RNA, 1701 nt, Artificial Sequence
  derived and/or modified CDS sequence (opt5) from hemagglutinin__InfluenzaA__ABG26901
augaagaccaucauugcccugagcuacauccucugccugguguucgcucagaaacuucccggcaacgacaauuccacagccacgcugugucucgggcaccaugcggucccuaacggaacccugguuaagacaauuaccaaugaucaaaucgaggugacaaacgcuaccgaacuugugcaaaauucuccgacaggcagaauuugcgacagcccccaccggauccuggaugggaaaaacuguacccucaucgacgcccugcugggagauccucauugcgacggcuuucagaauaaggagugggaucucuucgucgaacgcuccaaagccuauucuaacuguuaccccuaugacgugccugauuacgcuagccugagaucccuuguugccucuagcgggacgcuggaguuuaccaaugaaaacuucaauuggacaggaguggcucaggacggcaaguccuauagcugcaagcggggcucugucaacuccuuuuucagccgccucaauuggcugcacaaaucugaguacaaguaucccgcccuuaacgugaccaugccuaauaacgggaaauuugauaagcuguacauuuggggaguucaucacccguccacagacagcgaucagaccucucucuacgugagagcguccggcaaagucacggugagcacaaagcggucccagcagaccgugauccccgacauuggguaucgcccuugggucagaggacugucuagccggaucuccauuuacuggacaaucguuaagcccggcgacauucugcucaucaacagcaccgggaaucugaucgccccucgcggauauuucaaaauuagaaacggcaagucuuccaucaugcggagcgaugcucccauuggcaauuguucuagcgagugcaucaccccgaacggguccauuccuaaugacaaacccuuucagaacgugaaucgcaucacauacggagccuguccuagauaugugaagcaaaacacgcuuaaacuggcuaccggcaugcggaauguccccgaaaagcagacacgcgggaucuucggagccauugcgggcuuuaucgagaacgggugggaaggaaugguggauggcugguacggcuucagacaccaaaauucugaggggaccggacaggccgcugaccucaaaagcacacaggccgcuauugaucagaucaacggcaagcugaaucggcuuguugagaagaccaacgaaaaauuucaucagauugagaaggaguucuccgaaguggaagggagaauccaagaccuggagaaauaugucgaggauacgaagaucgaccucuggagcuacaaugccgaacugcugguggcccucgagaaccagcacacaauugaucugaccgacucugaaaugaacaaacuuuucgagcgcacccggaagcagcugagagaaaaugcugaggauaugggaaacggcugcuuuaagaucuaccauaaaugugacaaugcgugcauuggguccauccgcaacggcacauaugaccacgauguuuaccgggacgaggcccucaauaacagauuccagauuaagggaguggaacugaaaagcggcuauaaggauuggauccuuuggauuucuuuugcuaucuccugcuuccugcucugugucgugcugcugggguuuaucaugugggccugccaaaaaggaaauauucgcuguaacaucugcauuuga

SEQ ID NO: 193044 - RNA, 1701 nt, Artificial Sequence
  derived and/or modified CDS sequence (opt5) from hemagglutinin__InfluenzaA__ABG26912
augaagaccaucauugcccugagcuacauccucugccugguguucgcucagaaacuucccggcaacgacaauuccacagccacgcugugucucgggcaccaugcggucccuaacggaacccugguuaagacaauuaccaaugaucaaaucgaggugacaaacgcuaccgaacuugugcagucuagcuccacaggcagaauuugcgacucuccgcaccggauccuggaugggaaaaauuguacccucaucgacgcccugcugggagauccccauugcgacggcuuucagaacaaggagugggaucucuucgucgaacgcagcaaagccuauuccaauuguuacccuuaugacgugcccgauuacgcuucucugagaagccuuguugccuccagcgggacgcuggaguuuaccaaggaaggauucaacuggacaggcguggcucaggacggcaagucuuaugccugcaaacggggguccgucaauagcuuuuucucucgccucaacuggcugcacaaacuugaguacaaguauccugcgcugaaugugaccaugcccaacaaugauaaguuugacaaacucuacauuuggggaguucaucacccuuccacagauagcgaccaaaccucucuguacgugcaggccuccggcagagucacggugagcacaaagcggucccagcagaccgugaucccgaacauugggucucgccccugggucagaggaaucagcucccggauuagcaucuauuggacaauuguuaagccuggcgacauccugcucaucaauucuaccgggaaccugauugcuccccgcggauacuucaaaaucagaaacggcaaguccagcauuaugcggucugaugccccuaucagcaauuguaacuccgagugcauuacccccaauggcucuaucccgaacgacaaaccuuuucaaaaugugaaccgcaucacauauggggcuugucccagauacgugaagcagaauacgcuuaaacuggccaccggaaugcggaacgucccugaaaagcagacacgcggcauuuucggggcgaucgccggauuuauugagaauggcugggaagggaugguggauggaugguauggcuucagacaccagaacagcgagggcaccgggcaagcugccgaccucaaauccacacaggcugccaucgaucagauuaauggaaagcugaaccggcuuaucgagaagaccaaugaaaaauuucaucaaaucgagaaggaguucagcgaaguugaaggccgcauucaggaccuggagaaauacguggaggauacgaagaucgaccucuggucuuauaacgccgaacugcuggucgcucucgagaaucagcacacaauugaucugaccgacuccgaaaugaacaaacuuuucgagagaacccggaagcagcugagagaaaacgcggaggauauggggaauggaugcuuuaagaucuaccauaaaugugacaacgccugcauuggcagcauccgcaaugggacauacgaccacgauguguaucgggacgaggcucucaacaauagauuccaaauuaagggcguugaacugaaaucuggauacaaggauuggauccuuuggaucuccuuugccauuagcugcuuccugcucugugugguccugcugggcuuuaucaugugggccugccagaaagggaacauucgcuguaauaucugcauuuga

SEQ ID NO: 193045 - RNA, 1698 nt, Artificial Sequence
  derived and/or modified CDS sequence (opt5) from hemagglutinin__InfluenzaA__ABG26945
augaaggccaaacugcucgugcugcuuugcaccuucacagcuacguacgccgacaccaucuguauuggcuaucacgcgaacaauagcacagauaccgucgacacaguucuggagaagaacgugaccgugacacauuccgucaaucuccuggaagauucucacaacgggaaacuuugccugcucaagggaaucgcuccccugcagcugggcaauuguagcguggccggguggauucucggaaacccugagugcgaacugcuuaucuccaaagagucuuggagcuacauuguugaaaccccgaaucccgagaacggcacguguuauccuggguacuuugccgacuaugaggaacugagagagcaacucuccucugugagcuccuucgaacgguuugagaucuuccccaagggaagcucuuggccuaaucauaccgucacaggcguguccgcuagcugcucucacaacggcaaguccagcuuuuaccgcaaucugcuuuggcugaccgggaaaaacggacucuaucccaaucugucuauguccuacguuaacaauaaggagaaagaagugcugguccucuggggcgugcaucacccuccgaacaucgggaaccagagagcccuguaccacacagagaaugcuuaugugagcgucguuuccucucauuacagccggcgcuucacccccgaaauugccaagagaccuaaagugcgggaucaggagggacgcaucaacuauuacuggacgcuucuggaacccggcgacacaauuaucuuugaggcguccgggaaucucauugccccuugguaugcuuucgcccugagcagaggauuuggcucuggcaucauuaccuccaacgcucccaugggggagugugaugccaagugccagacaccgcaaggagcgaucaauagcucucuuccuuuccagaacgugcaccccgucaccaucggcgaauguccuaaguacgugcggagcgccaaacugcgcaugguuaccgggcucagaaauauucccuccauccagucucggggacuguuuggcgcuauugccggguucaucgagggaggcuggacaggcaugguggacgggugguauggauaccaucaccagaacgaacaaggcagcggguacgcugccgaucagaaguccacgcagaaugccauuaacggaaucaccaauaaagucaacagcgugaucgagaagaugaauacacaguuuaccgcuguuggcaaagaguucaacaagcuggaacgcagaauggagaaucucaacaaaaagguggacgauggguuccuggacauuuggacauauaacgcggaacuucugguccuccuggagaaugaacggacccuugauuuucacgacucuaacgugaagaaucuguacgagaaagucaagucccaacucaaaaacaaugccaaggaaaucggcaacggaugcuucgaguuuuaucauaaauguaauaacgagugcauggaaagcgugaagaauggcacguacgacuaucccaaguacucugaggaauccaaacugaaccgcgagaagauugaugggguuaaacuggagagcaugggaguguaucagauccucgcuauuuacuccacagucgccucuagccuggugcuucugguuucccucggcgccaucucuuucuggaugugcagcaaugggucccugcaguguagaaucugcauuuga

SEQ ID NO: 193046 - RNA, 1701 nt, Artificial Sequence
  derived and/or modified CDS sequence (opt5) from hemagglutinin__InfluenzaA__ABG26956
augaagaccaucauugcccugagcuacauccucugccugguguucgcucagaaacuucccggcaacgacaauagaacagccacgcugugucucgggcaccaugcggucccuaacggaacccugguuaagacaauuaccaaugaucaaaucgaggugacaaacgcuaccgaacuugugcaguccucuagcacaggccggauuugcgacuccccgcaccagauccuggauggggagaauuguacccucaucgacgcccugcugggagauccccauugcgacggcuuucagaacaaagaaugggaucucuucgucgagcgcucuaaggccuauagcaauuguuacccuuaugacgugcccgauuacguuucccugagaucucuuguggcuagcuccgggacgcuggaauuuaacaaugagagcuucaacuggaccggagucgcccaaaauggcacaucuuccgcuugcaaacggcgcagcgacaaguccuuuuucucuaagcucaacuggcugcaccagcuuaaauauaaguacccugcccugaaugugaccaugcccaacaaugagaaauuugauaagcucuauauuuggggcguucaucacccugggacagacagcgaucagaucucucuguacgcgcaggccuccggaagagugaccgucagcacgaaacggucccaacagacagugauuccgaacaucggcucucgccccugggugagaggggucagcucccggauuagcaucuacuggaccauuguuaagccuggagacauccugcucaucaacucuacaggcaaucugauugcuccccgcggguauuucaagaucagauccggaaaaagcucuauuaugcggagcgacgccccuaucggcaaguguaacuccgaaugcauuacccccaauggcucuaucccgaacgauaaaccuuuucagaaugugaaccgcaucaccuacggggcuugucccagauaugugaagcagaauacacuuaaacuggccacgggaaugcggaacgucccugagaagcaaacccgcggcauuuucggggcgaucgccggauuuauugaaaauggcugggaggggaugauggacggaugguacggcuucagacaccagaacagcgagggcacagggcaggcugccgaucucaaauccacccaagcugccaucaaucagauuaacggaaagcugaaucggcuuaucgaaaagacaaacgagaaauuucaucagaucgaaaaggaguucagcgaaguggagggccgcauucaggaccuggagaaauauguugaagauaccaagaucgaccucuggucuuacaaugccgagcugcugguggcucucgaaaaccaacacacgauugaucugacagacuccgagaugaacaaacuuuucgaaagaaccaagaagcagcugcgggagaaugcggaggauauggggaacggaugcuuuaaaaucuaucauaagugugacaaugccugcauuggcagcaucagaaacgggaccuacgaucacgacgucuaccgcgacgaagcucucaauaaccgguuccagauuaaaggcguggagcugaagucuggauauaaagauuggguucuuuggaucuccuuugccaucagcugcuuccugcucuguauugugcugcugggcuuuaucaugugggccugccagaaggggaauauuagauguaacaucugcauuuga

SEQ ID NO: 193047 - RNA, 1698 nt, Artificial Sequence
  derived and/or modified CDS sequence (opt5) from hemagglutinin__InfluenzaA__ABG37120
augaaggccaaacugcucgugcugcuuugcaccuucacagcuacguacgccgacaccaucuguauuggcuaucacgcgaacaauagcacagauaccgucgacacaguucuggagaagaacgugaccgugacacauuccgucaaucuccuggaagauucucacaacgggaaacuuugccugcucaagggaaucgcuccccugcagcugggcaauuguagcguggccggguggauucucggaaacccugagugcgaacugcuuaucuccaaagagucuuggagcuacauuguugaaaccccgaaucccgagaacggcacguguuauccuggguacuuugccgacuaugaggaacugagagagcaacucuccucugugagcuccuucgaacgguuugagaucuuccccaagggaagcucuuggccuaaucauaccgucacaggcguguccgcuagcugcucucacaacggcgaguccagcuuuuaccgcaaucugcuuuggcugaccgggaagaacggacucuaucccaaucugucuauguccuacguuaacaauaaagaaaaggaggugcugguccucuggggcgugcaucacccuccgaacaucgggaaccagagagcccuguaccacacagaaaaugcuuaugugagcgucguuuccucucauuacagccggcgcuucacccccgagauugccaaaagaccuaaggugcgggaucaggaaggacgcaucaacuauuacuggacgcuucuggagcccggcgacacaauuaucuuugaggcgaaugggaaccucauugccccuugguaugcuuucgcccuguccagaggauuuggcagcggcaucauuaccucuaaugcucccaugggggaaugugaugccaaaugccagacaccgcaaggagcgaucaacuccagccuuccuuuccagaaugugcaccccgucaccaucggcgaguguccuaaguacgugcggucugccaagcugcgcaugguuaccgggcucagaaacauucccagcauccagucccggggacuguuuggcgcuauugccggguucaucgaaggaggcuggacaggcaugguggacgggugguauggauaccaucaccagaaugagcaaggcucuggguacgcugccgaucagaaaagcacgcagaacgccauuaauggaaucaccaacaaggucaauuccgugaucgaaaagaugaacacacaguuuaccgcuguuggcaaagaguucaauaaacuggagcgcagaauggaaaaccucaacaagaaaguggacgauggguuccuggacauuuggacauauaaugcggagcuucugguccuccuggaaaacgagcggacccuugauuuucacgacagcaaugugaagaaccuguacgaaaaggucaaaucucaacucaagaauaacgccaaagagaucggcaauggaugcuucgaguuuuaucauaaguguaacaaugaaugcauggaguccgugaaaaacggcacguacgacuaucccaaguacagcgaagagucuaagcugaaucgcgagaaaauugaugggguuaagcuggaauccaugggaguguaucagauccucgcuauuuacagcacagucgccuccucucuggugcuucugguuagccucggcgccaucuccuucuggaugugcucuaacgggagccugcaguguagaaucugcauuuga

SEQ ID NO: 193048 - RNA, 1701 nt, Artificial Sequence
  derived and/or modified CDS sequence (opt5) from hemagglutinin__InfluenzaA__ABG37131
augaagaccaucauugcccugagcuacaucuccugccucguguucgcucagaaacugcccggcaacgacaauucuacagccacgcuuugucuggggcaccaugcggucccuaacggaacccucguuaagacaauuaccaaugaucaaaucgaggugacaaacgcuaccgaacuggugcagagcuccucuacaggcagaauuugcgacgggccgcaccagauccuugauggaaagaauuguacccugaucgacgcccuccugggcgauccccauugcgacggguuucagaacaaggagugggaucuguucgucgaacggagcaaagccuauuccaauuguuacccuuaugacgugcccgauuacgcuucucuccgcagccugguugccuccagcggaacgcuugaguuuaccaacgaaucuuucaauuggacaggcguggcucaaaacggcaccuccuaugccugcaagagagggagcgucaagucuuucuucucccggcugaauuggcuccacaaacuggaguacaaguauccugcgcuuaacgugacaaugcccaauaacgacaaauuugauaagcuguacauuuggggaguucaucacccuagcaccgacucugaucagacgucccucuacgugcagagcuccggccgcgucacagugucuaccaaaagaagccagcaaacagugaccccgaauaucgggucccggcccuggguccgcggaauuagcucuagaaucuccauuuauuggaccaucguuaagccuggcgacauucugcugaucaacagcacagggaaccucaucgcuccccggggauacuucaagauucgcagaggcaaaucuagcaucaugcgguccgacgccccuauugauaauuguaacucugagugcaucacgcccaauggcagcauuccgaacgacaagccuuuucagaaugugaaccgcaucaccuauggggccugucccagauacgugaaacagaauacacugaaacuugcuaccggaaugcggaacgucccugaaaaacagacacgcggcaucuucggggccauugcgggauuuaucgagaauggcugggaagggaugguggauggaugguauggcuucagacaccaaaacuccgagggcaccgggcaggccgcugaccucaagagcacgcaggccgcuauuaaucaaaucaacggaaaacugaaucggcugauugagaagacaaacgaaaaguuucaucagaucgagaaagaauuuucugagguugaaggcagaauccaggaucuugagaaguacguggaggacaccaaaauugaucugugguccuauaaugccgaacuccuggucgcccuggagaaccagcacaccaucgaccucacagauagcgaaaugaacaagcuguucgagcgcacccggaaacaacuuagagaaaaugcugaggacauggggaacggaugcuuuaagauuuaccauaagugugauaaugcgugcaucggcucuauucgcaacgggacauacgaccacgacguguaucgggaugaggcccugaauaacagauuccagaucaaaggcguugaacucaaguccggauacaaagacuggauucuguggaucagcuuugcuaucuccugcuuccuucugugugugguccuccugggcuuuauuaugugggccugccagaaggggaauauccgcuguaacauuugcaucuga

SEQ ID NO: 193049 - RNA, 1701 nt, Artificial Sequence; identical to SEQ ID NO: 192855
  derived and/or modified CDS sequence (opt5) from hemagglutinin__InfluenzaA__ABG37142

SEQ ID NO: 193050 - RNA, 1701 nt, Artificial Sequence
  derived and/or modified CDS sequence (opt5) from hemagglutinin__InfluenzaA__ABG37164
augaagaccaucauugcccugagcuacauccucugccugguguucgcucagaaacuucccggcaacgacaauuccacagccacgcugugucucgggcaccaugcggucccuaacggaacccugguuaagacaauuaccaaugaucaaaucgaggugacaaacgcuaccgaacuugugcagucuagcuccacaggcagaauuugcgacucuccgcaccggauccuggaugggaaaaauuguacccucaucgacgcccugcugggagauccccauugcgacgauuuucagaacaaggagugggaccucuucgucgaacgcagcaaagccuauuccaauuguuacccuuaugaugugcccgacuacgcuucucugagaagccuuguugccuccagcggcacgcuggaguuuaccaaggaaggguucaacuggacaggaguggcucaggauggcaagucuuaugccugcaaacggggcuccgucaauagcuuuuucucucgccucaacuggcugcacaaacuugaguacaaguauccugcgcugaaugugaccaugcccaacaaugacaaguuugauaaacucuacauuuggggaguucaucacccuuccacagacagcgaccaaaccucucuguacgugcaggccuccgggagagucacggugagcacaaagcggucccagcagaccgugaucccgaacauuggcucucgccccugggucagagggaucagcucccggauuagcaucuauuggacaauuguuaagccuggagauauccugcucaucaauucuaccggcaaccugauugcuccccgcggguacuucaaaaucagaaacggaaaguccagcauuaugcggucugacgccccuaucggcaauuguaacagcgagugcauuacccccaauggcuccaucccgaacgauaaaccuuuucaaaaugugaaccgcaucacauauggggcuugucccagauacgugaagcagaauacgcuuaaacuggccaccggaaugcggaacgucccugaaaagcagacacgcggcauuuucggggcgaucgccggauuuauugagaauggcugggaagggaugguggacggaugguauggcuucagacaccagaacucugagggcaccgggcaagcugccgaucucaaaagcacacaggcugccaucgaccagauuaauggaaagcugaaccggcuuaucgagaagaccaaugaaaaauuucaucaaaucgagaaggaguucuccgaaguugaaggccgcauucaggaucuggagaaauacguggaggacacgaagaucgaucucuggagcuauaacgccgaacugcuggucgcucucgagaaucagcacacaauugaccugaccgauucugaaaugaacaaacuuuucgagagaacccggaagcagcugagagaaaacgcggaggacauggggaauggaugcuuuaagaucuaccauaaaugugacaacgccugcauuggcuccauccgcaaugggacauacgaucacgacguguaucgggaugaggcucucaacaauagauuccaaauuaagggcguugaacugaaaagcggauacaaggacuggauccuuuggaucucuuuugccauuuccugcuuccugcucugugugguccugcugggcuuuaucaugugggccugccagaaagggaacauucgcuguaauaucugcauuuga

SEQ ID NO: 193051 - RNA, 1701 nt, Artificial Sequence
  derived and/or modified CDS sequence (opt5) from hemagglutinin__InfluenzaA__ABG37175
augaagaccaucauugcccugagcuacauccucugccagguguucgcuaaaaagcugcccggcaacgacaauuccacagccacgcuuugucuggggcaccaugcggucccuaacggaacccucguuaaaacaauuaccaaugaucaaaucgaggugacaaacgcuaccgaacuggugcagucuagcuccacaggcagaauuugcgacucuccgcaccggauccuugaugggaagaauuguacccugaucgacgcccuccugggagauccccauugcgacggcuuucagaacaaagagugggaucuguucgucgaacgcagcaaggccuauuccaauuguuacccuuaugacgugcccgauuacgcuucucucagaagccugguugccuccagcgggacgcuugaguuuaccaacgaaggauucaauuggacaggcguggcucaggacggcaagucuuauuccugcaaacgggggagcgucaacucuuucuucucccgccugaauuggcuccacaagcuggaguacaaauauccugcccuuaacgugaccaugcccaauaacgauaaguuugacaaacuguacauuuggggaguucaucacccuagcacagauucugaccaaaccucccucuacgugcaggcgagcggcagagucacgguguccacaaagcggucucagcagaccgugaucccgaauauugggagccgccccugggucagaggaaucuccagccggauuucuaucuauuggacaauuguuaagccuggcgacauccugcugaucaacuccaccgggaaccucauugcccccagaggauacuucaaaaucagaaauggcaagagcucuauuaugcggagcgaugcuccuaucgacaacuguaauuccgagugcauuacccccaacggcucuaucccgaaugauaaaccuuuucaaaacgugaaucgcaucacauauggggccugucccagauacgugaagcagaacacgcugaaacuugcuaccggaaugcggaaugucccugaaaagcagacacgcggcauuuucggggccaucgcgggauuuauugagaacggcugggaagggaugguggacggaugguauggcuucagacaccagaauagcgagggcaccgggcaagccgcugaucugaaauccacacaggccgcuaucgaccagauuaacggaaagcucaaucggcugaucgagaagaccaacgaaaaauuucaucaaaucgagaaggaauuuagcgagguugaaggccgcauucaggaucuugagaaauacguggaggacacgaagaucgaucuguggucuuauaaugccgaacuccuggucgcccuggagaaccagcacacaauugaccucaccgauuccgaaaugaacaaacuguucgagcgcacccggaagcagcuuagagaaaaugcugaggacauggggaacggaugcuuuaagaucuaccauaaaugugacaaugcgugcauuggcagcauccgcaacgggacauacgaucacgacguguaucgggaugaggcccugaauaacagauuccaaauuaagggcguugaacucaaaucuggauacaaggacuggauccuguggaucuccuuugcuauuagcugcuuccuucugugugugguccuccugggcuuuaucaugugggccugccagaaagggaauauucgcuguaacaucugcauuuga

SEQ ID NO: 193052 - RNA, 1701 nt, Artificial Sequence
  derived and/or modified CDS sequence (opt5) from hemagglutinin__InfluenzaA__ABG37186
augaagaccaucauugcccugagcuacauccucugccagguguucgcucaaaaacugcccggcaacgacaauuccacagccacgcuuugucuggggcaccaugcggucccuaacggaacccucguuaagacaauuaccaaugaucagaucgaggugacaaacgcuaccgaacuggugcagucuagcuccacaggcagaauuugcgacucuccgcaccggauccuugaugggaaaaauuguacccugaucgacgcccuccugggagauccccauugcgacggcuuucagaacaaggagugggaucuguucgucgaacgcagcaaagccuauuccaauuguuacccuuaugacgugcccgauuacgcuucucucagaagccugguugccuccagcgggacgcuugaguuuaccaacgaaggauucaauuggacaggcguggcucaagacggcaagucuuaugccugcaagcggggguccgucaacagcuuuuucucucgccugaauuggcuccacaaacuggaguacaaguauccugcgcuuaacgugaccaugcccaauaacgauaaauuugacaagcuguacauuuggggaguucaucacccuuccacagauagcgaccagaccucucucuacgugcaggccuccggcagagucacggugagcacaaaacggucccagcaaaccgugaucccgaauauugggucucgccccugggucagaggaaucagcucccggauuagcaucuauuggacaauuguuaagccuggcgacauccugcugaucucuuccaccgggaaccucauugcuccccgcggauacuucaagaucagaaacggcaaaagcucuauuaugcggagcgaugccccuaucgacaauuguaacuccgagugcauuacccccaauggcucuaucccgaacgauaagccuuuucagaaugugaaccgcgugacauauggggcuugucccagauacgucaaacagaauacgcugaaacuugccaccggaaugcggaacgugccugaaaagcagacacgcggcaucuucggggcgauugccggauuuaucgagaauggcugggaagggaugguugacggaugguauggcuucagacaccaaaacagcgagggcaccgggcaggcugccgaucugaaguccacacaggcugccauugaccaaaucaauggaaaacucaaccggcugauugagaagaccaaugaaaaguuucaucagaucgagaaagaguucagcgaaguggaaggcagaauccaggaucuugagaaguacgucgaggacacgaaaauugaucuguggucuuauaacgccgaacuccugguggcucuggagaaucagcacacaaucgaccucaccgauuccgaaaugaacaagcuguucgagcgcacccggaaacaacuuagagaaaacgcggaggacauggggaauggaugcuuuaagauuuaccauaagugugacaacgccugcaucggcagcauucgcaaugggacauacgaucacgacguuuauaaagaugaggcucugaacaaucgguuccagaucaagggcgugguccucaaaucuggauacaaggacuggauucuguggaucuccuuugccaucagcugcuuccuucugugugugguccuccugggcuuuauuaugugggccugccagaaagggaacaucagauguaauauuugcaucuga

SEQ ID NO: 193053 - RNA, 1701 nt, Artificial Sequence
  derived and/or modified CDS sequence (opt5) from hemagglutinin__InfluenzaA__ABG37197
augaagaccaucauugcccugagcuacauccucugccagguguucgcucaaaaacugcccggcaacgacaauuccacagccacgcuuugucuggggcaccaugcggucccuaacggaacccucguuaagacaauuaccaaugaucagaucgaggugacaaacgcuaccgaacuggugcagucuagcuccacaggcagaauuugcgacucuccgcaccggauccuugaugggaaaaauuguacccugaucgacgcccuccugggagauccccauugcgacggcuuucagaacaaggagugggaucuguucgucgaacgcagcaaagccuauuccaauuguuacccuuaugacgugcccgauuacgcuucucucagaagccugguugccuccagcgggacgcuugaguuuaccaacgaaggauucaauuggaacggcguggcucaagacggcaagucuuaugccugcaagcggggguccgucaagagcuuuuucucucgccugaauuggcuccacaaacuggaguacaaauauccugcgcuuaacgugacaaugcccaauaacgauaaguuugacaaacuguacauuuggggaguucaucacccuuccaccgauagcgaccagacaucucucuacgugcaggccuccggcagagucaccgugagcacgaagcggucccagcaaacagugaucccgaauauugggucucgccccugggucagaggaaucagcucccggauuagcaucuauuggaccauuguuaagccuggcgacauccugcugaucaacucuacagggaaccucauugcuccccgcggauacuucaaaaucagaaauggcaaguccagcauuaugcggucugaugccccuaucgacaacuguaauagcgagugcauuacccccaacggcuccaucccgaaugauaaaccuuuucagaacgugaaucgcaucaccuauggggcuugucccagauacgugaagcagaacacacugaaacuugccacgggaaugcggaaugucccugaaaagcagacccgcggcauuuucggggcgaucgccggauuuauugagaacggcugggaagggaugguggacggaugguauggcuucagacaccaaaauucugagggcacagggcaggcugccgaucugaaaagcacccaggcugccaucgaccaaauuaacggaaagcucaaucggcugaucgagaagacaaacgaaaaauuucaucagaucgagaaggaguucuccgaaguugaaggccgcauucaggaucuugagaaauacguggaggacaccaagaucgaucuguggagcuauaaugccgaacuccuggucgcucuggagaaccagcacacgauugaccucacagauucugaaaugaacaaacuguucgagagaacccggaagcaacuuagagaaaaugcggaggacauggggaacggaugcuuuaagaucuaccauaaaugugacaaugccugcauuggcuccauccgcaacgggaccuacgaucacgacguguaucgggaugaggcucugaauaacagauuccagauuaagggcguugaacucaaaagcggauacaaggacuggauccuguggaucucuuuugccauuuccugcuuccuucugugugugguccuccugggcuuuaucaugugggccugccagaaagggaauauucgcuguaacaucugcauuuga

SEQ ID NO: 193054 - RNA, 1701 nt, Artificial Sequence
  derived and/or modified CDS sequence (opt5) from hemagglutinin__InfluenzaA__ABG37208
augaagaccaucauugcccugagcuacaucuccugccucguguucgcucagaaacugcccggcaacgacaauucuacagccacgcuuugucuggggcaccaugcggucccuaacggaacccucguuaagacaauuaccaaugaucaaaucgaggugacaaacgcuaccgaacuggugcagagcuccucuacaggcagaauuugcgacagcccgcaccggauccuugaugggaaaaauuguacccugaucgacgcccuccugggagauccccauugcgacggcuuucagaacgagaagugggaucuguucgucgaacgcuccaaagccuuuucuaauuguuauccuuacgacgugcccgauuaugcuagccucagaucccugguugccagcucugggacgcuugaguucauuaacgaaggauuuaauuggaccggcgugacacaguccggcgggagcuacgcuugcaagcggggaucugucaacuccuucuuuagccgccugaauuggcucuauaagucugaguccaaauacccugcccugaacgugaccaugcccaauaacggcaaguucgacaaacuuuauaucuggggaguucaccauccuagcacagauaaggagcaaaccaaucuguacgugagagcguccgggcgggucacggugucuacaaaacgcagccagcagaccgugauuccgaacaucggccccagaccuuggguccgggggcucuccagccgcauuucuaucuacuggacaauuguuaagcccggagacauccugcugaucaacuccaccggcaaucucauugccccuagaggcuauuuuaagauccggaccgggaaaagcucuauuaugcgcagcgaugcucccaucggaacauguuccucuggcugcauuacgccgaacgggagcaucccuaaugacaagcccuuccagaacgugaauaaaaucaccuacggagccuguccuagauaugugaagcaaaacacacugaaacuugcuaccggcaugcggaauguccccgaaaagcagacacgcgggauuuuuggagccaucgcgggcuucauugagaacggcugggaagggaugguggacggaugguacggcuuuagacaccaaaauuccgaggggaccggacaggccgcugaucugaaaagcacgcaggccgcuaucgaccagauuaacggcaagcucaaucggcugaucgagaagacaaacgaaaaauuccaccagaucgagaaggaguucucugaaguugaagggcgcauucaagaucuugagaaauauguggaggacaccaagaucgaucugugguccuacaaugccgaacuccuggucgcccuggagaaccagcauaccauugacaugacagauagcgaaaugaauaaacucuuugagaagaccagaaagcagcugcgggaaaacgcugaggacaugggcaacggaugcuucaaaaucuaucacaagugugauaaugcgugcauuggcucuaucagaaacgggacauacgaccaugauguguaccgcgacgaggcccuuaauaaccgguuucagauuaaaggaguugaacugaaguccggcuauaaagacuggauccucuggaucagcuucgcuauuuccugcuuucugcuuugugugguccugcucggguucaucaugugggccugccaaaagggaaauauuagauguaacaucugcauuuga

SEQ ID NO: 193055 - RNA, 1701 nt, Artificial Sequence
  derived and/or modified CDS sequence (opt5) from hemagglutinin__InfluenzaA__ABG37230
augaagaccaucauugcccugagcuacauccucugccugguguucgcucagaaacuucccggcaacgacaauuccacagccacgcugugucucgggcaccaugcggucccuaacggaacccugguuaagacaauuaccaaugaucaaaucgaggugacaaacgcuaccgaacuugugcagucuagcuccacaggcagaauuugcgacucuccgcaccggauccuggaugggaaaaauuguacccucaucgacgcccugcugggagauccccauugcgacggcuuucagaacaaggagugggaucucuucgucgaacgcagcaaagccuauuccaauuguuacccuuaugacgugcccgauuacgcuucucugagaagccuuguugccuccagcgggacgcuggaguuuauuaacgaagacuucaauuggaccggaguggcucaggauggcaagucuuaugccugcaagcggggcuccgucaacagcuuuuucucucgccucaauuggcugcaccaauccaaauacaaguauccugagcuuaacgugacaaugcccaauaacgggaaauuugacaagcuguacaucuggggaguucaucacccuagcaccgauucugaccagacaucccucuacgcgagagccagcggccgggugaccgucuccacgaaacgcucucagcagacagugauuccgaauaucggguucagacccugggugcggggacugagcucccgcauuagcaucuauuggaccauugucaagccuggcgacauccugcucaucaacucuacagggaaccugauugcucccagaggauacuuuaagauccggaauggcaaauccagcauuaugcgcucugaugccccuaucggcaacuguagcuccgagugcauuacccccaaugggucuaucccgaacgacaagccuuuccaaaauguuaacagaaucaccuauggagcuuguccccgguacgugaaacagaauacacuuaagcuggccacgggcaugcgcaacgugccugaaaaacagaccagagggauuuuuggagcgaucgccggcuucauugagaaugggugggaaggaauggucgauggcugguauggcuuucggcaccagaacagcgaggggacaggacaagcugccgaccucaaguccacccaggcugccaucgaucagauuaauggcaaacugaacagacuuaucgagaagacaaaugaaaaguuccaucaaaucgagaaagaguucagcgaaguggaagggcgcauucaggaccuggagaaguacguugaggauaccaaaaucgaccucuggucuuauaacgccggacugcugguggcucucgaaaaucagcacacgauugaucugacagacuccgagaugaacaaacuuuuugaacggaccagaaagcagcugcgcgagaacgcggaagauaugggcaaugggugcuucaagaucuaccauaagugugacaacgccugcauuggcagcauccggaauggaaccuacgaccacgaugucuauagagacgaggcucucaacaaucgcuuucaaauuaaaggcguggagcugaagucuggguacaaagauuggauccuuuggaucuccuucgccauuagcugcuuucugcucuguguugugcugcugggauucaucaugugggccugccagaagggcaacauucgguguaauaucugcauuuga

SEQ ID NO: 193056 - RNA, 1701 nt, Artificial Sequence
  derived and/or modified CDS sequence (opt5) from hemagglutinin__InfluenzaA__ABG37241
augaagaccaucauugcccugagcuacauccucugccugguguucgcucagaaacuucccggcaacgacaauuccacagccacgcugugucucgggcaccaugcggucccuaacggaacccugguuaagacaauuaccaaugaucaaaucgaggugacaaacgcuaccgaacuugugcagucuagcccgacaggcagaauuugcgacucuccccaccggauccuggaugggaaaaauuguacccucaucgacgcccugcugggagauccucauugcgacggcuuucagaacaaggagugggaucucuucgucgaacgcuccaaagccuauagcaauuguuaccccuaugacgugccugauuacgcuucccugagaucucuuguugccagcuccgggacgcuggaguuuaccaacgaaaauuucaacuggacaggaguggcucaggacggcaagagcuaugccugcaagcggggcucugucaauuccuuuuucagccgccucaacuggcugcacaaacuugaguacaaguaucccgcgcugaaugugaccaugccuaacaaugggaaauuugauaagcucuacauuuggggaguucaucacccgucuacagacuccgaucaaaccagccuguacgugagagccucuggcaaagucacgguguccacaaagcggagccagcagaccgugauccccgacauuggguaucgcccuugggucagaggacuguccucucggaucagcauuuacuggacaaucguuaagcccggcgacauucuccugaucaacuccaccgggaaccuuaucgcuccucgcggauauuucaaaauuagaaauggcaagagcucuaucaugcgguccgaugcccccauuggcaacuguagcucugagugcaucaccccgaaugggagcauuccuaacgacaaacccuuucagaaugugaaccgcaucacauacggagcuuguccuagauaugugaagcaaaauacgcugaaacucgccaccggcaugcggaacguccccgaaaagcagacacgcgggaucuucggagcgauugccggcuuuaucgagaaugggugggaaggaaugguggauggcugguacggcuucagacaccagaacuccgaggggaccggacaggcugccgaccugaaaucuacacaagcugccauugaucagaucaauggcaaacuuaaccggcugguugagaagaccaaugaaaaguuucaucagauugagaaggaguucagcgaaguggaagggagaauccaagaccucgagaaauaugucgaggauacgaagaucgaccugugguccuacaacgccgaacugcucguggcucuggagaaucagcacacaauugaucuuaccgacagcgaaaugaacaaacuguucgagcgcacccggaagcagcucagagaaaacgcggaggauaugggaaauggcugcuuuaagaucuaccauaaaugugacaacgccugcauugggucuauccgcaauggcacauaugaccacgauguuuaccgggacgaggcucugaacaauagauuccagauuaagggaguggaacuuaaauccggcuauaaggauuggauccuguggauuagcuuugccaucucuugcuuccuccugugugucgugcugcucggguuuaucaugugggccugccaaaaaggaaacauucgcuguaauaucugcauuuga

SEQ ID NO: 193057 - RNA, 1701 nt, Artificial Sequence
  derived and/or modified CDS sequence (opt5) from hemagglutinin__InfluenzaA__ABG37252
augaagaccaucauugcccugagcuacauccucugccugguguucgcucagaaacuuacaggcaacgacaauuccacggccacccugugucucgggcaccaugcgguccccaacggaacacugguuaagaccauuacaaaugaucaaaucgaggugaccaacgcuacagaacuugugcagucuagcccuaccggcagaauuugcgacuccccgcaccggauccuggaugggaaaaauuguacgcucaucgacgcccugcugggagauccccauugcgacggcuuucagaacaaggagugggaucucuucgucgaacgcucuaaagccuauagcaauuguuacccuuaugacgugcccgauuacgcuucccugagaucucuuguugccagcuccgggacccuggaguuuacaaacgaaaauuucaacuggaccggaguggcucaggacggcaagagcuaugccugcaagcggggcucugucaauuccuuuuucagccgccucaacuggcugcacaaacuugaguacaaguauccugcgcugaaugugacaaugcccaacaaugggaaauuugauaagcucuacauuuggggaguucaucacccuucuaccgacuccgaucaaacgagccuguacgugagagccucuggcaaagucacaguguccaccaagcggagccagcagacagugaucccggacauuggguaucgccccugggucagaggacuguccucucggaucagcauuuacuggaccaucguuaagccuggcgacauucuccugaucaacuccaccgggaaccuuaucgcuccccgcggauauuucaaaauuagaaauggcaagagcucuaucaugcgguccgaugccccuauuggcaacuguagcucugagugcaucacacccaaugggagcauuccgaacgacaaaccuuuucagaaugugaaccgcaucacguacggagcuugucccagauaugugaagcaaaauacccugaaacucgccacaggcaugcggaacgucccugaaaagcagacccgcgggaucuucggagcgauugccggcuuuaucgagaaugggugggaaggaaugguggauggcugguacggcuucagacaccagaacuccgaggggacaggacaggcugccgaccugaaaucuacccaagcugccauugaucagaucaauggcaaacuuaaccggcugguugagaagacgaaugaaaaguuucaucagauugagaaggaguucagcgaaguggaagggagaauccaagaccucgagaaauaugucgaggauacaaagaucgaccugugguccuacaacgccgaacugcucguggcucuggagaaucagcacaccauugaucuuaccgacagcgaaaugaacaaacuguucgagcgcacacggaagcagcucagagaaaacgcggaggauaugggaaauggcugcuuuaagaucuaccauaaaugugacaacgccugcauugggucuauccgcaauggcaccuaugaccacgauguuuaccgggacgaggcucugaacaauagauuccagauuaagggaguggaacuuaaauccggcuauaaggauuggauccuguggauuagcuuugccaucucuugcuuccuccugugugucgugcugcucggguuuaucaugugggccugccaaaaaggaaacauucgcuguaauaucugcauuuga

SEQ ID NO: 193058 - RNA, 1701 nt, Artificial Sequence
  derived and/or modified CDS sequence (opt5) from hemagglutinin__InfluenzaA__ABG37263
augaagaccaucauugcccugagcuacauccucugccugguguucgcucagaaacuucccggcaacgacaauuccacagccacgcugugucucgggcaccaugcggucccuaacggaacccugguuaagacaauuaccaaugaucaaaucgaggugacaaacgcuaccgaacuugugcagucuagcuccacaggcagaauuugcgacucuccgcaccggauccuggaugggaaaaauuguacccucaucgacgcccugcugggagauccccauugcgacggcuuucagaacaaggagugggaucucuucgucgaacgcagcaaagccuauuccaauuguuacccuuaugacgugcccgauuacgcuucucugagaagccuuguugccuccagcgggacgcuggaguuuaccaaggaaggauucaacuggacaggcguggcucaggacggcaagucuuaugccugcaaacggggguccgucaauagcuuuuucucucgccucaacuggcugcacaaacuugaguacaaguauccugcgcugaaugugaccaugcccaacaaugauaaguuugacaaacucuacauuuggggaguucaucacccuuccacagauagcgaccaaaccucucuguacgugcaggccuccggcagagucacggugagcacaaagcggucccagcagaccgugaucccgaacauugggucucgccccugggucagaggaaucagcucccggauuagcaucuauuggacaauuguuaagccuggcgacauccugcucaucaauucuaccgggaaccugauugcuccccgcggauacuucaaaaucagaaacggcaaguccagcauuaugcggucugaugccccuaucggcaauuguaacagcgagugcauuacccccaauggguccaucccgaacgacaaaccuuuucaaaaugugaaccgcaucacauauggagcuugucccagauacgugaagcagaauacgcuuaaacuggccaccggcaugcggaacgucccugaaaagcagacacgcgggauuuucggagcgaucgccggcuuuauugagaaugggugggaaggaaugguggauggcugguauggcuucagacaccagaacucugaggggaccggacaagcugccgaccucaaaagcacacaggcugccaucgaucagauuaauggcaagcugaaccggcuuaucgagaagaccaaugaaaaauuucaucaaaucgagaaggaguucuccgaaguugaagggcgcauucaggaccuggagaaauacguggaggauacgaagaucgaccucuggagcuauaacgccgaacugcuggucgcucucgagaaucagcacacaauugaucugaccgacucugaaaugaacaaacuuuucgagagaacccggaagcagcugagagaaaacgcggaggauaugggaaauggcugcuuuaagaucuaccauaaaugugacaacacaugcauuggguccauccgcaauggcaccuacgaccacgauguguaucgggacgaggcccucaacaauagauuccaaauuaagggaguugaacugaaaagcggcuacaaggauuggauccuuuggaucucuuuugcuauuuccugcuuccugcucugugugguccugcugggguuuaucaugugggccugccagaaaggaaacauucgcuguaauaucugcauuuga

SEQ ID NO: 193059 - RNA, 1701 nt, Artificial Sequence
  derived and/or modified CDS sequence (opt5) from hemagglutinin__InfluenzaA__ABG37274
augaagaccaucauugcccugagcuacauccucugccugguguucgcucagaaacuucccggcaacgacaauuccacagccacgcugugucucgggcaccaugcggucccuaacggaacccugguuaagacaauuaccaaugaucaaaucgaggugacaaacgcuaccgaacuugugcagucuagcccgacaggcagaauuugcgacucuccccaccggauccuggaugggaaaaauuguacccucaucgacgcccugcugggagauccucauugcgacggcuuucagaacaaggagugggaucucuucgucgaacgcuccaaagccuauagcaauuguuaccccuaugacgugccugauuacgcuucccugagaucucuuguugccagcuccgggacgcuggaguuuaccaacgaaaauuucaacuggacaggaguggcucaggacggcaagagcuaugccugcaagcggggcucugucaauuccuuuuucagccgccucaacuggcugcacaaacuugaguacaaguaucccgcgcugaaugugaccaugccuaacaaugggaaauuugauaagcucuacauuuggggaguucaucacccgucuacagacuccgaucaaaucagccuguacgugagagccucuggcaaagucaccguguccacgaagcggagccagcagacagugauucccgacaucggguaucgcccuugggucagaggacuguccucucggauuagcaucuacuggaccauuguuaagcccggcgacauccuccugaucuccagcacagggaaccuuauugcuccucgcggauauuucaaaaucagaaacggcaagucuuccauuaugcggagcgaugcccccaucggcaauuguucuagcgagugcauuaccccgaacggguccaucccuaaugacaaacccuuucagaacgugaaucgcaucaccuacggagcuuguccuagauaugugaagcaaaacacacugaaacucgccacgggcaugcggaauguccccgaaaagcagacccgcgggauuuucggagcgaucgccggcuuuauugagaacgggugggaaggaaugguggauggcugguacggcuucagacaccaaaauucugaggggacaggacaggcugccgaccugaaaagcacccaggcugccaucgaucagauuaacggcaaacuuaaucggcugguugagaagacaaacgaaaaguuucaucagaucgagaaggaguucuccgaaguggaagggagaauccaagaccucgagaaauaugucgaggauaccaagauugaccuguggagcuacaaugccgaacugcucguggcucuggagaaccagcacacgaucgaucuuacagacucugaaaugaauaaacuguucgagcgcacccggaagcagcucagagaaaacgcggaggauaugggaaacggcugcuuuaagauuuaccauaaaugugacaaugccugcaucggguccauucgcaacggcaccuaugaccacgauguuuaccgggacgaggcucugaauaacagauuccagaucaagggaguggaacuuaaaagcggcuauaaggauuggauucuguggaucucuuuugccaucuccugcuuccuccugugugucgugcugcucggguuuauuaugugggccugccaaaaaggaaauauccgcuguaacauuugcaucuga

SEQ ID NO: 193060 - RNA, 1701 nt, Artificial Sequence
  derived and/or modified CDS sequence (opt5) from hemagglutinin__InfluenzaA__ABG37285
augaagaccaucauugcccugagcuacauccucugccugguguucgcucagaaacuucccggcaacgacaauuccacagccacgcugugucucgggcaccaugcggucccuaacggaacccugguuaagacaauuaccaaugaucaaaucgaggugacaaacgcuaccgaacuugugcagucuagcccgacaggcagaauuugcgacucuccccaccggauccuggaugggaaaaauuguacccucaucgacgcccugcugggagauccucauugcgacggcuuucagaacaaggagugggaucucuucgucgaacgcuccaaagccuauagcaauuguuaccccuaugacgugccugauuacgcuucccugagaucucuuguugccagcuccgggacgcuggaguuuaccaacgaaaauuucaacuggacaggaguggcucaggacggcaagagcuaugccugcaagcggggcucugucaauuccuuuuucagccgccucaacuggcugcacaaacuugauuacaaguaucccgcgcugaaugugaccaugccuaacaaugggaaauuugacaagcucuacauuuggggaguucaucacccgucuacagauuccgaccaaaccagccuguacgugagagccucuggcaaagucacgguguccacaaagcggagccagcagaccgugauccccgacauuggguaucgcccuugggucagaggacuguccucucggaucagcauuuacuggacaaucguuaagcccggcgauauucuccugaucaacuccaccgggaaccuuaucgcuccucgcggauauuucaaaauuagaaauggcaagagcucuaucaugcgguccgacgcccccauuggcaacuguagcucugagugcaucaccccgaaugggagcauuccuaacgauaaacccuuucagaaugugaaccgcaucacauacggagcuuguccuagauaugugaagcaaaauacgcugaaacucgccaccggcaugcggaacguccccgagaagcagacacgcgggaucuucggagcgauugccggcuuuaucgaaaaugggugggagggaaugguggacggcugguacggcuucagacaccagaacuccgaagggaccggacaggcugccgaucugaaaucuacacaagcugccauugaccagaucaauggcaaacuuaaccggcugguugagaagaccaaugagaaguuucaucagauugaaaaggaguucagcgaaguggaggggagaauccaagaucucgaaaaauaugucgaggacacgaagaucgaucugugguccuacaacgccgagcugcucguggcucuggaaaaucagcacacaauugaccuuaccgauagcgagaugaacaaacuguucgaacgcacccggaagcagcucagagagaacgcggaagacaugggaaauggcugcuuuaagaucuaccauaaaugugacaacgccugcauugggucuauccgcaauggcacauaugaucacgacguuuaccgggaugaggcucugaacaauagauuccagauuaagggaguggagcuuaaauccggcuauaaggacuggauccuguggauuagcuuugccaucucuugcuuccuccuguguuuuguccugcucggguucaucaugugggccugccaaaaaggaaacauucgcuguaauaucugcauuuga

SEQ ID NO: 193061 - RNA, 1701 nt, Artificial Sequence
  derived and/or modified CDS sequence (opt5) from hemagglutinin__InfluenzaA__ABG37296
augaagaccaucauugcccugagcuacauccucugccugguguucgcucagaaacuucccggcaacgacaauuccacagccacgcugugucucgggcaccaugcggucccuaacggaacccugguuaagacaauuaccaaugaucaaaucgaggugacaaacgcuaccgaacuugugcagucuagcuccacaggcagaauuugcgacucuccgcaccggauccuggaugggaaaaauuguacccucaucgacgcccugcugggagauccccauugcgacggcuuucagaacaaggagugggaucucuucgucgaacgcagcaaagccuauuccaauuguuacccuuaugacgugcccgauuacgcuucucugagaagccuuguugccuccagcgggacgcuggaguuuaccaaggaaggauucaacuggacaggcguggcucaggacggcaagucuuaugccugcaaacggggguccgucaauagcuuuuucucucgccucaacuggcugcacaaacuugaguacaaguauccugcgcugaaugugaccaugcccaacaaugauaaguuugacaaacucuacauuuggggaguucaucacccuuccacagauagcgaccaaaccucucuguacgugcaggccuccggcagagucacggugagcacaaagcggucccagcagaccgugaucccgaacauugggucucgccccugggucagaggaaucagcucccggauuagcaucuauuggacaauuguuaagccuggcgacauccugcucaucaauucuaccgggaaccugauugcuccccgcggauacuucaaaaucagaaacggcaaguccagcauuaugcggucugaugccccuaucggcaauuguaacagcgagugcauuacccccaauggguccaucccgaacgacaaaccuuuucaaaaugugaaccgcaucacauauggagcuugucccagauacgugaagcagaauacgcuuaaacuggccaccggcaugcggaacgucccugaaaagcagacacgcgggauuuucggagcgaucgccggcuuuauugagaaugggugggaaggaaugguggauggcugguauggcuucagacaccagaacucugaggggaccggacaagcugccgaccucaaaagcacacaggcugccaucgaucagauuaauggcaagcugaaccggcuuaucgagaagaccaaugaaaaauuucaucaaaucgagaaggaguucuccgaaguugaagggcgcauucaggaccuggagaaauacguggaggauacgaagaucgaccucuggagcuauaacgccgaacugcuggucgcucucgagaaucagcacacaauugaucugaccgacucugaaaugaacaaacuuuucgagagaacccggaagcagcugagagaaaacgcggaggauaugggaaauggcugcuuuaagaucuaccauaaaugugacaacgccugcauuggguccauccgcaauggcacauacgaccacgauguguaucgggacgaggcucucaacaauagauuccaaauuaagggaguugaacugaaaagcggcuacaaggauuggauccuuuggaucucuuuugccauuuccugcuuccugcucugugugguccugcugggguuuaucaugugggccugccagaaaggaaacauucgcuguaauaucugcauuuga

SEQ ID NO: 193062 - RNA, 1701 nt, Artificial Sequence; identical to SEQ ID NO: 193056
  derived and/or modified CDS sequence (opt5) from hemagglutinin__InfluenzaA__ABG37307

SEQ ID NO: 193063 - RNA, 1701 nt, Artificial Sequence; identical to SEQ ID NO: 193061
  derived and/or modified CDS sequence (opt5) from hemagglutinin__InfluenzaA__ABG37318

SEQ ID NO: 193064 - RNA, 1701 nt, Artificial Sequence
  derived and/or modified CDS sequence (opt5) from hemagglutinin__InfluenzaA__ABG37329
augaagaccaucauugcccugagcuacauccucugccugguguucgcucagaaacuucccgagaacgacaauuccacagccacgcugugucucggccaccaugcggucccuaacgggacccugguuaagacaauuaccaaugaucaaaucgaagugacaaacgcuaccgagcuugugcagucuagcccgacaggaagaauuugcgacucuccccaccggauccuggauggcaaaaauuguacccucaucgacgcccugcugggggauccucauugcgacggauuucagaacaaggaaugggaucucuucgucgagcgcuccaaagccuauagcaauuguuaccccuaugacgugccugauuacgcuucccugagaucucuuguugccagcuccggcacgcuggaauuuaccaacgagaauuucaacuggacagggguggcucaggacggaaagagcuaugccugcaagcggggcucugucaauuccuuuuucagccgccucaacuggcugcacaaacuugaguacaaguaucccgcgcugaaugugaccaugccuaacaauggcaaauuugauaagcucuacauuuggggaguucaucacccgucuacagacuccgaucaaaccagccuguacgugagagccucugggaaagucacgguguccacaaagcggagccagcagaccgugauccccgacauuggcuaucgcccuugggucagagggcuguccucucggaucagcauuuacuggacaaucguuaagcccggagacauucuccugaucaacuccaccggcaaccuuaucgcuccucgcggguauuucaaaauuagaaauggaaagagcucuaucaugcgguccgaugcccccauuggcaacuguagcucugaaugcaucaccccgaauggcagcauuccuaacgacaaacccuuucagaaugugaaccgcaucacauacggggcuuguccuagauaugugaagcaaaauacgcugaaacucgccaccggaaugcggaacguccccgagaagcagacacgcggcaucuucggggcgauugccggauuuaucgaaaauggcugggaggggaugguggauggaugguacggcuucagacaccagaacuccgagggcaccgggcaggcugccgaccugaaaucuacacaagcugccauugaucagaucaauggaaaacuuaaccggcugguugaaaagaccaaugagaaguuucaucagauugaaaaggaguucagcgaaguggagggcagaauccaagaccucgagaaauaugucgaagauacgaagaucgaccugugguccuacaacgccgagcugcucguggcucuggaaaaucagcacacaauugaucuuaccgacagcgagaugaacaaacuguucgaacgcacccggaagcagcucagagagaacgcggaggauauggggaauggaugcuuuaagaucuaccauaaaugugacaacgccugcauuggcucuauccgcaaugggacauaugaccacgauguuuaccgggacgaagcucugaacaauagauuccagauuaagggcguggagcuuaaauccggauauaaggauuggauccuguggauuagcuuugccaucucuugcuuccuccugugugucgugcugcucggcuuuaucaugugggccugccaaaaagggaacauucgcuguaauaucugcauuuga

SEQ ID NO: 193065 - RNA, 1701 nt, Artificial Sequence
  derived and/or modified CDS sequence (opt5) from hemagglutinin__InfluenzaA__ABG37340
augaagaccaucauugcccugagcuacauccucugccugguguucgcucagaaacuucccggcaacgacaauuccacagccacgcugugucucgggcaccaugcggucccuaacggaacccugguuaagacaauuaccaaugaucaaaucgaggugacaaacgcuaccgaacuugugcagucuuuuccgacaggcagaauuugcgacagcccccaccggauccuggaugggaaaaauuguacccucaucgacgcccugcugggagauccucauugcgacggcuuccagaacaaggagugggaucucuuugucgaacgcuccaaagccuauucuaauuguuaccccuaugacgugccugauuacgcuagccugagaucccuuguugccucuagcgggacgcuggaguucaccaacgaaaauuuuaacuggacaggaguggcucaggacggcaaguccuauagcugcaagcggggcucugucaauuccuucuuuagccgccucaacuggcugcacaaacuugaguacaaguaucccgcccugaaugugaccaugccuaacaaugggaaauucgauaagcucuacauuuggggaguucaucacccgucuacagacuccgaucaaaccagccuguacgugagagcgucuggcaaagucacgguguccacaaagcggagccagcagaccgugauccccgacauuggguaucgcccuugggucagaggacuguccucucggaucagcauuuacuggacaaucguuaagcccggcgacauucuccugaucaacuccaccgggaaccuuaucgccccucgcggauauuuuaaaauuagaaauggcaagagcucuaucaugcgguccgaugcucccauuggcaacuguagcucugagugcaucaccccgaaugggagcauuccuaacgacaaacccuuccagaaugugaaccgcaucacauacggagccuguccuagauaugugaagcaaaauacgcugaaacucgcuaccggcaugcggaacguccccgaaaagcagacacgcgggaucuuuggagccauugcgggcuucaucgagaaugggugggaaggaaugguggauggcugguacggcuuuagacaccagaacuccgaggggaccggacaggccgcugaccugaaaucuacacaagccgcuauugaucagaucaauggcaaacuuaaccggcugguugagaagaccaaugaaaaguuccaucagauugagaaggaguucagcgaaguggaagggagaauccaagaccucgagaaauaugucgaggauacgaagaucgaccugugguccuacaacgccgaacugcucguggcccuggagaaucagcacacaauugaucuuaccgacagcgaaaugaacaaacuguuugagcgcacccggaagcagcucagagaaaacgcugaggauaugggaaauggcugcuucaagaucuaccauaaaugugacaacgcgugcauugggucuauccgcaauggcacauaugaccacgauguuuaccgggacgaggcccugaacaauagauuucagauuaagggaguggaacuuaaauccggcuauaaggauuggauccuguggauuagcuucgcuaucucuugcuuucuccugugugucgugcugcucggguucaucaugugggccugccaaaaaggaaacauucgcuguaauaucugcauuuga

SEQ ID NO: 193066 - RNA, 1701 nt, Artificial Sequence
  derived and/or modified CDS sequence (opt5) from hemagglutinin__InfluenzaA__ABG37351
augaagaccaucauugcccugagcuacauccucugccugguguucgcucagaaacuucccggcaacgacaauuccacagccacgcugugucucgggcaccaugcggucccuaacggaacccugguuaagacaauuaccaaugaucaaaucgaggugacaaacgcuaccgaacuugugcagucuagcuccacaggcagaauuugcgacucuccgcaccggauccuggaugggaaaaauuguacccucaucgacgcccugcugggagauccccauugcgacggcuuucagaacaaggagugggaucucuucgucgaacgcagcaaagccuauuccaauuguuacccuuaugacgugcccgauuacgcuucucugagaagccuuguugccuccagcgggacgcuggaguuuauuaacgaagacuucaauuggaccggaguggcucaggauggcaagucuuaugccugcaagcggggcuccgucaacagcuuuuucucucgccucaauuggcugcacaaacuugaguacaaguauccugcgcugaacgugacaaugcccaauaacgggaaauuugacaagcucuacaucuggggaguucaucacccuuccaccgauagcgaccaaacaucucuguacgugagagccuccggccgggucaccgugagcacgaaacgcucccagcagacagugauuccgaauaucggguucagacccuggguccggggacugucuagccgcauuuccaucuauuggaccauuguuaagccuggcgacauccuccugaucgauagcacagggaaccuuauugcucccagaggauacuuuaagauccggaacggcaaaucuuccauuaugcgcagcgacgccccuaucggcaauuguucuagcgagugcauuacccccaacggguccaucccgaaugauaagccuuuccagaacgugaauagaaucaccuauggagcuuguccccgguacgugaaacaaaacacacugaagcucgccacgggcaugcgcaaugucccugaaaaacagaccagagggauuuuuggagcgaucgccggcuucauugagaacgggugggaaggaaugguggacggcugguauggcuuucggcaccagaauagcgaggggacaggacaggcugccgaucugaagucuacccaagcugccaucgaccagauuaacggcaaacuuaauagacugaucgagaagacaaacgaaaaguuccaucagaucgagaaagaguucuccgaaguugaagggcgcauucaagaucucgagaaguacguggaggacaccaaaaucgaucuguggagcuauaaugccggacugcucgucgcucuggaaaaccagcacacgauugaccuuacagauucugagaugaauaagcuguuugaacggaccagaaaacagcuccgcgagaacgcggaagacaugggcaacgggugcuucaagaucuaccauaagugugacaaugccugcauuggcuccauccggaacggaaccuacgaucacgacguguauagagaugaggcucugaauaaccgcuuucagauuaaaggcguugagcuuaagagcggguacaaagacuggauccuguggaucucuuucgccauuuccugcuuucuccugugugugguccugcucggauucaucaugugggccugccaaaagggcaauauucgguguaacaucugcauuuga

SEQ ID NO: 193067 - RNA, 1698 nt, Artificial Sequence
  derived and/or modified CDS sequence (opt5) from hemagglutinin__InfluenzaA__ABG37362
augaaggugaaacugcucguccugcuuugcaccuucacagccacguacgcugacaccaucuguauuggcuaucacgccaacaauagcacagauaccguugacacagugcuggagaagaacgugaccgucacacauuccgugaaucuccuggaagauucucacaacgggaaacuuugccugcucaagggaaucgcgccccugcagcugggcaauuguagcguugcuggguggauucucggaaacccugagugcgaacugcuuaucuccaaagagucuuggagcuacauuguggaaaccccgaaucccgagaacggcacguguuauccuggguacuuugccgacuaugaggaacugagagagcaacucuccucugucagcuccuucgaacgguuugagaucuuccccaaggagagcucuuggccuaaucauaccgugacaggaguuuccgccagcugcucucacaacggcaaguccagcuuuuaccgcaaucugcuuuggcugaccggcaaaaacgggcucuaucccaaucugucuaaguccuacgcuaacaauaaagaaaaggaggugcugguccucuggggagugcaucacccuccgaacaucggcaaccagagagcccuguaccacacagaaaaugcuuaugugagcgucguuuccucucauuacagccggcgcuucacccccgagauugccaaaagaccuaaggugcgggaucaggaagggcgcaucaacuauuacuggacgcuucuggagcccggagacacaauuaucuuugaggcgaauggcaaccucauugccccuugguaugcuuucgcccuguccagaggguuuggaagcggcaucauuaccucuaaugcucccauggaugaaugugacgccaagugccagacaccgcaaggcgcgaucaacuccagccuuccuuuccagaaugugcaccccgucaccaucggggaguguccuaaauacgugcggucugccaagcugcgcaugguuaccggacucagaaacauucccagcauccagucccggggccuguuuggggcuauugccggauucaucgaaggcggguggacaggaaugguggauggcugguauggcuaccaucaccagaaugagcaagggucuggauacgcugccgaccagaaaagcacgcagaacgccauuaauggcaucaccaacaaggucaauuccgugaucgaaaagaugaacacacaguuuaccgcuguugggaaagaguucaauaaacuggagcgcagaauggaaaaccucaacaagaagguggaugacggauuccuggauauuuggacauauaaugcggagcuucugguccuccuggaaaacgagcggacccuugacuuucacgacagcaaugugaaaaaccuguacgaaaaggucaaaucucaacucaagaauaacgccaaagagaucggcaaugggugcuucgaguuuuaucauaaguguaacaaugaaugcauggaguccgugaagaacggcacguacgauuaucccaaauacagcgaagagucuaagcugaaucgcgagaaaauugacggaguuaagcuggaauccaugggcguguaucagauccucgcuauuuacagcacagucgccuccucucuggugcuucugguuagccucggggccaucuccuucuggaugugcucuaacggaagccugcaguguagaaucugcauuuga

SEQ ID NO: 193068 - RNA, 1698 nt, Artificial Sequence; identical to SEQ ID NO: 192872
  derived and/or modified CDS sequence (opt5) from hemagglutinin__InfluenzaA__ABG37384

SEQ ID NO: 193069 - RNA, 1698 nt, Artificial Sequence; identical to SEQ ID NO: 192942
  derived and/or modified CDS sequence (opt5) from hemagglutinin__InfluenzaA__ABG37395

SEQ ID NO: 193070 - RNA, 1701 nt, Artificial Sequence; identical to SEQ ID NO: 192849
  derived and/or modified CDS sequence (opt5) from hemagglutinin__InfluenzaA__ABG37406

SEQ ID NO: 193071 - RNA, 1701 nt, Artificial Sequence
  derived and/or modified CDS sequence (opt5) from hemagglutinin__InfluenzaA__ABG37428
augaagaccaucauugcccugagcuacauccucugccugguguucgcucagaaacuucccggcaacgacaauuccacagccacgcugugucucgggcaccaugcggucccuaacggaacccugguuaagacaauuaccaaugaucaaaucgaggugacaaacgcuaccgaacuugugcagucuagcuccacaggcagaauuugcgacucuccgcaccagauccuggauggggagaauuguacccucaucgacgcccugcugggagauccccauugcgacggcuuucagaacaaagaaugggaucucuucgucgagcggagcaaggccuauuccaauuguuacccuuaugacgugcccgauuacguuucucugcgcagccuuguggcuuccagcgggacgcuggaauuuaacaaugagucuuucaacuggaccggagucgcccaaaauggcacauccagcgcuugcaaaagacggucugacaaguccuuuuucagccgccucaacuggcugcaccagcuuaaguauaaauacccugcccugaaugugaccaugcccaacaaugagaaguuugauaaacucuauauuuggggcguucaucacccugggacagacucugaucagaucucccuguacgcgcaggccagcggaagagugaccgucuccacgaagcggucucaacagacagugauuccgaacaucggcagccgccccugggugagaggggucuccagccggauuucuaucuacuggaccauuguuaaaccuggagacauccugcucaucaacuccacaggcaaucugauugcuccccgcggguauuucaagaucagaagcggaaagucuagcauuaugcgguccgacgccccuaucggcaaauguaacucugaaugcauuacccccaauggcagcaucccgaacgauaagccuuuucagaaugugaaccgcaucaccuacggggcuugucccagauaugugaaacagaauacacuuaagcuggccacgggaaugcggaacgucccugagaaacaaacccgcggcauuuucggggcgaucgccggauuuauugaaaauggcugggaggggaugauggacggaugguacggcuucagacaccagaacuccgagggcacagggcaggcugccgaucucaagagcacccaagcugccaucaaucagauuaacggaaaacugaaucggcuuaucgaaaagacaaacgagaagucucaucagaucgaaaaagaguuuuccgaaguggagggccgcauucaggaccuggagaaguauguugaagauaccaaaaucgaccucuggagcuacaaugccgagcugcugguggcucucgaaaaccaacacacgauugaucugacagacucugagaugaacaaacuuuucgaaagaaccaagaagcagcugcgggagaaugcggaggauauggggaacggaugcuucaagaucuaucauaaaugugacaaugccugcauuggcuccaucagaaacgggaccuacgaucacgacgucuaccgcgacgaagcucucaauaaccgguuucagauuaagggcguggagcugaaaagcggauauaaggauuggguucuuuggaucuccuucgccaucucuugcuuucugcucuguauugugcugcugggcuucaucaugugggccugccagaaagggaauauuagauguaacaucugcauuuga

SEQ ID NO: 193072 - RNA, 1701 nt, Artificial Sequence; identical to SEQ ID NO: 192634
  derived and/or modified CDS sequence (opt5) from hemagglutinin__InfluenzaA__ABG37439

SEQ ID NO: 193073 - RNA, 1701 nt, Artificial Sequence; identical to SEQ ID NO: 192712
  derived and/or modified CDS sequence (opt5) from hemagglutinin__InfluenzaA__ABG37461

SEQ ID NO: 193074 - RNA, 1701 nt, Artificial Sequence
  derived and/or modified CDS sequence (opt5) from hemagglutinin__InfluenzaA__ABG37472
augaagaccaucauugcccugagcuacauccucugccugguguucgcucagaaacuucccggcaacgacaauuccacagccacgcugugucucgggcaccaugcggucccuaacggaacccugguuaagacaauuaccaaugaucaaaucgaggugacaaacgcuaccgaacuugugcagucuagcuccacaggcagaauuugcgacucuccgcaccagguccuggauggggagaauuguacccucaucgacgcccugcugggagauccccauugcgacggcuuucagaacaaagaaugggaucucuucguggagcggagcaaggccuauuccaauuguuacccuuaugacguucccgauuacgugucucugcgcagccuugucgcuuccagcgggacgcuggaauuuaacaaugagucuuucaacuggaccggaguggcccaaaauggcacauccagcgcuugcaaaagacggucugacaaguccuuuuucagccgccucaacuggcugcaccagcuuaaguauaaauacccugcccugaauguuaccaugcccaacaaugagaaguuugauaaacucuauaucuggggcgugcaucacccugggacagacucugaucagauuucccuguacgcgcaggccagcggaagagucaccguguccacgaagcggucucaacagacagugaucccgaacauuggcagccgccccugggucagagggguuuccagccggaucucuauuuacuggaccaucgugaaaccuggagacauucugcucaucaacuccacaggcaaucugaucgcuccccgcggguauuucaagauuagaagcggaaagucuagcaucaugcgguccgacgccccuauuggcaaauguaacucugaaugcaucacccccaauggcagcauuccgaacgauaagccuuuucagaaugugaaccgcaucaccuacgggcccuguccuagauaugucaaacagaauacacuuaagcuggcuacgggaaugcggaacgugcccgagaaacaaacccgcggcaucuucggggccauugcgggauuuaucgaaaauggcugggaggggaugauggacggaugguacggcuucagacaccagaacuccgagggcacagggcaggccgcugaucucaagagcacccaagccgcuauuaaucagaucaacggaaaacugaaucggcuuauugaaaagacaaacgagaaguuucaucagaucgaaaaagaguucucugaaguugagggcagaauccaggaccuggagaaguauguggaagauaccaaaauugaccucugguccuacaaugccgagcugcuggucgcccucgaaaaccaacacacgaucgaucugacagacagcgagaugaacaaacuuuucgaacgcaccaagaagcagcugcgggagaaugcugaggauauggggaacggaugcuuuaagauuuaucauaaaugugacaaugcgugcaucggcucuauuagaaacgggaccuacgaucacgacguguaccgcgacgaagcccucaauaaccgguuccagaucaagggcguugagcugaaauccggauauaaggauuggauucuuuggaucagcuuugcuaucuccugcuuccugcucuguauugugcugcugggcuuuaucaugugggccugccagaaagggaauauuagauguaacaucugcauuuga

SEQ ID NO: 193075 - RNA, 1701 nt, Artificial Sequence; identical to SEQ ID NO: 192634
  derived and/or modified CDS sequence (opt5) from hemagglutinin__InfluenzaA__ABG37483

SEQ ID NO: 193076 - RNA, 1701 nt, Artificial Sequence; identical to SEQ ID NO: 192712
  derived and/or modified CDS sequence (opt5) from hemagglutinin__InfluenzaA__ABG37494

SEQ ID NO: 193077 - RNA, 1701 nt, Artificial Sequence
  derived and/or modified CDS sequence (opt5) from hemagglutinin__InfluenzaA__ABG37505
augaagaccaucauugcccugagcuacauccucugccugguguucgcucagaaacuucccggcaacgacaauuccauggccacacugugucucgggcaccaugcggucccuaacggaacgcugguuaagaccauuacaaaugaucaaaucgaggugaccaacgcuacagaacuugugcagucuagcuccaccggcagaauuugcgacucuccgcaccagauccuggauggggagaauuguacacucaucgacgcccugcugggagauccccauugcgacggcuuucagaacaaagaaugggaucucuucgucgagcggagcaaggccuauuccaauuguuacccuuaugacgugcccgauuacguuucucugcgcagccuuguggcuuccagcgggacccuggaauuuaacaaugagucuuucaacuggacgggagucgcccaaaauggcaccuccagcgcuugcaaaagacggucugacaaguccuuuuucagccgccucaacuggcugcaccagcuuaaguauaaauacccugcccugaaugugacaaugcccaacaaugagaaguuugauaaacucuauauuuggggcguucaucacccugggaccgacucugaucagaucucccuguacgcgcaggccagcggaagagugacagucuccaccaagcggucucaacagacggugauuccgaacaucggcagccgccccugggugagaggggucuccagccggauuucuaucuacuggacaauuguuaaaccuggagacauccugcucaucaacuccaccggcaaucugauugcuccccgcggguauuucaagaucagaagcggaaagucuagcauuaugcgguccgacgccccuaucgauaaauguaacucugaaugcauuacacccaauggcagcaucccgaacgacaagccuuuucagaaugugaaccgcaucaccuacggccuuugucccagauaugugaaacagaauacccugaagcucgcuacagggaugcggaacgucccugagaaacaaacgcgcggaauuuucggcgccaucgcgggguuuauugaaaauggaugggagggcaugauggaugggugguacggauucagacaccagaacuccgagggcaccggccaggccgcugaccugaaaagcacacaagccgcuaucaaucagauuaacgggaaacuuaaucggcugaucgaaaagaccaacgagaaguuucaucagaucgaaaaagaguucucugaaguggagggacgcauucaggaucucgagaaguauguugaagacacaaaaaucgaucugugguccuacaaugccgagcugcucguggcccuggaaaaccaacacaccauugaccuuacggauagcgagaugaacaagcuguucgaaagaacaaagaagcagcuccgggagaaugcugaggacaugggcaacgggugcuuuaagaucuaucauaaaugugauaaugcgugcauuggaucuaucagaaacggcaccuacgaccacgacgucuaccgcgaugaagcccugaauaaccgguuccagauuaaggggguggagcuuaaauccggcuauaaggacuggauccuguggaucagcuuugcuauuuccugcuuccuccuguguaucguucugcucggauuuauuaugugggccugccagaaaggcaauaucagauguaacauuugcaucuga

SEQ ID NO: 193078 - RNA, 1701 nt, Artificial Sequence; identical to SEQ ID NO: 192588
  derived and/or modified CDS sequence (opt5) from hemagglutinin__InfluenzaA__ABG37516

SEQ ID NO: 193079 - RNA, 1701 nt, Artificial Sequence; identical to SEQ ID NO: 192588
  derived and/or modified CDS sequence (opt5) from hemagglutinin__InfluenzaA__ABG37527

SEQ ID NO: 193080 - RNA, 1701 nt, Artificial Sequence; identical to SEQ ID NO: 192588
  derived and/or modified CDS sequence (opt5) from hemagglutinin__InfluenzaA__ABG37538

SEQ ID NO: 193081 - RNA, 1701 nt, Artificial Sequence; identical to SEQ ID NO: 192588
  derived and/or modified CDS sequence (opt5) from hemagglutinin__InfluenzaA__ABG37549

SEQ ID NO: 193082 - RNA, 1701 nt, Artificial Sequence; identical to SEQ ID NO: 192588
  derived and/or modified CDS sequence (opt5) from hemagglutinin__InfluenzaA__ABG37560

SEQ ID NO: 193083 - RNA, 1701 nt, Artificial Sequence; identical to SEQ ID NO: 192588
  derived and/or modified CDS sequence (opt5) from hemagglutinin__InfluenzaA__ABG37571

SEQ ID NO: 193084 - RNA, 1701 nt, Artificial Sequence
  derived and/or modified CDS sequence (opt5) from hemagglutinin__InfluenzaA__ABG37582
augaagaccaucauugcccugagcuacauccucugccugguguucgcucagaaacuucccggcaacgacaauuccacagccacgcugugucucgggcaccaugcggucccuaacggaaccauuguuaagacaaucaccaaugaucaaauugaggugacaaacgcuaccgaacuggugcagaucucuagcacaggcgggaucugcgacuccccgcaccagauucuugauggagagaauuguacccugaucgacgcccuccugggcgauccccagugcgacggguuucaaaacaaaaagugggaucuguucgucgaaagaucuaaagccuauagcaauuguuacccuuaugacgugcccgaucaugcuucccuccggucucugguugccagcuccggaacgcuugaguuuaacaaugaaucuuucgacuggaccggcgugacacagaacggcaccucuuccgcuugcaagcgcagaagcaauaagagcuuuuucucccggcugaacuggcucacacaccugaaauacaaguauccugcccuuaaugucaccaugcccaacaaugagaaauuugauaagcuguacauuuggggagugcaucacccugggacggacagcgaucagaucucucucuaugcgcaggccuccggccgcauuacaguuagcaccaaaagaucccaacagacagugaucccgaacauugggucucggccccgcgucagagacgugagcucccggaucagcaucuacuggaccauugugaagccuggagacauccugcugauuaacucuaccggcaaucucaucgcuccccgcggguacuucaagauuagauccggaaaaagcucuaucaugcggagcgaugccccuaucggcaaguguaacuccgagugcauuacacccaauggcucuaucccgaacgacaaaccuuuucagaaugucaaccgcauuacguauggggcuugucccagauacguuaagcagaauacccugaaacuugccacaggaaugcggaacgugccugaaaagcaaacccgcggcaucuucggggcgauugccggauuuaucgagaauggcugggaagggaugguggauggaugguauggcuucagacaccagaacagcgagggcacagggcaggcugccgaccugaaauccacccaagcugccaucaaucagauuaacggaaagcucaaucggcugaucggcaagacgaacgagaaauuucaucagauugaaaaggaguucagcgaagucgaggggagaauccaggaucuugaaaaauacguggaggacacaaagauugaucuguggucuuauaaugccgagcuccugguugcucuggaaaaccaacacaccaucgaccucaccgauuccgagaugaacaaacuguucgaacgcacaaagaagcagcuucgggagaaugcggaagacaugggaaacggcugcuuuaaaauuuaccauaagugugauaaugccugcaucgggagcaucagaaacggcaccuaugaccacgacguguaccgcgaugaggcucugaauaaccgguuccagauuaaaggagucgagcucaagucuggcuacaaagacuggauccuguggauuuccuuugccaucagcugcuuccuucuguguguggcccuccugggguuuauuaugugggcuugccagaagggaaauaucagauguaacaucugcauuuga

SEQ ID NO: 193085 - RNA, 1701 nt, Artificial Sequence; identical to SEQ ID NO: 192588
  derived and/or modified CDS sequence (opt5) from hemagglutinin__InfluenzaA__ABG37604

SEQ ID NO: 193086 - RNA, 1701 nt, Artificial Sequence; identical to SEQ ID NO: 192588
  derived and/or modified CDS sequence (opt5) from hemagglutinin__InfluenzaA__ABG37615

SEQ ID NO: 193087 - RNA, 1698 nt, Artificial Sequence; identical to SEQ ID NO: 192814
  derived and/or modified CDS sequence (opt5) from hemagglutinin__InfluenzaA__ABG47807

SEQ ID NO: 193088 - RNA, 1698 nt, Artificial Sequence; identical to SEQ ID NO: 192813
  derived and/or modified CDS sequence (opt5) from hemagglutinin__InfluenzaA__ABG47818

SEQ ID NO: 193089 - RNA, 1701 nt, Artificial Sequence
  derived and/or modified CDS sequence (opt5) from hemagglutinin__InfluenzaA__ABG47829
augaaggccaaacugcucgugcugcuuugcgcuuucaccgccacauacgcggacacgaucuguauuggcuaucacgcuaacaauagcaccgauacagucgacaccguucuggagaagaacgugacagugacccauuccgucaaucuccuggaagauucucacaacgggaaacuuugcagacugaagggaacagcuccccuccagcugggcaauuguagcguggccggguggauccugggaaacccugagugcgaaucccucuuuucuaaagagagcugguccuacauugccgaaaccccgaaucccgagaacggcacguguuauccuggguacuucgccgacuaugaggaacugcgggagcaacuuucuagcguuuccagcuuugaacgcuucgagaucuuucccaaggagucuuccuggccuaaucauaccgugacaaagggagucaccgcuagcugcucucacaacggcaaauccagcuucuacaagaaucugcucuggcugacagaaaagaacggccuuuaucccaaucugucuaaguccuacgugaacaauaaagagaaggaaguucucgugcuguggggaguccaucacccuagcaacauuggggaucagagagccaucuaccacaccgagaacgcguauguguccguggucucuagccauuacucccggcgcuuuacgccggaaaucacaaagagacccaaaguucggaaucaggagggccgcauuaacuauuacuggacccugcucgagccuggggacacaaucauuuucgaagccaauggaaaccugaucgcucccugguaugccuuugcucuuagcagaggcuucgggucuggaauuaucaccuccaaugccagcaugggcgagugugaugcgaagugccagaccccucaaggcgccauuaacucuagccugcccuuucagaaugugcacccggugacaaucggggaauguccuaaauacguccgguccacgaagcuccgcauggugaccggacugagaaacauccccucuauucagagccggggccuuuucggggcuaucgccggauuuauugagggcggguggacaggaaugaucgacggcugguauggcuaccaucaccagaaugaacaaggguccggauacgcugccgaucagaaaagcacccagaacgccauugacggcaucacaaauaagguuaacucugugaucgagaaaaugaauacccaguucacggcugucgggaaggaguucaacaagcuggaacgcagaauggagaaucucaacaaaaagguggaugacggauuucuggauauuuggacauauaacgcggaacugcucguucugcuugagaaugaacggacccuggacuuccacgacuccaacgugaaaaaucucuacgagaaggucaaaacccaacugaagaacaaugccaaggagaucggcaacgggugcuuugaguucuaucauaaauguaauaacgaaugcauggaaagcgugaagaauggcacauacgauuauccuaaauacucugaggaguccaaacuuaaccgcgagaaaauugacggagucaagcuggaaagcaugggcguguaucagauccucgcuauuuacuccaccguugccucuagccuggugcugcucgucucccugggggccaucucuuuuuggaugugcagcaauggaucccuucaguguagaaucugcauuuga

SEQ ID NO: 193090 - RNA, 1701 nt, Artificial Sequence
  derived and/or modified CDS sequence (opt5) from hemagglutinin__InfluenzaA__ABG47840
augaaggugaaacugcucguccugcuuugcgccuucaccgcuacauacgccgacacgaucuguauuggcuaucacgcgaacaauagcaccgauacaguugacaccgugcuggagaagaacgugacagucacccauuccgugaaucuccuggaagauucucacaacgggaaacuuugcagacugaagggaacagcuccccuccagcugggcaauuguagcguugccggguggauccugggaaacccugagugcgaaucccucuuuucuaaagagagcugguccuacauugccgaaaccccgaaucccgagaacggcacguguuauccuggguacuucgcugacuaugaggaacugcgggagcaacuuucuagcguguccagcuuugaacgcuucgagaucuuucccaaggagucuuccuggccuaaucauaccgucacaaagggagugaccgccagcugcucucacaacggcaaauccagcuucuacaagaaucugcucuggcugacagaaaagaacggccuuuaucccaaucugucuaaguccuacguuaacaauaaagagaaggaagugcucguccuguggggagugcaucacccuagcaacauuggggaucagagagcuaucuaccacaccgagaacgccuauguguccgucguuucuagccauuacucccggcgcuuuacgccggaaaucgcgaagagacccaaagugcgggaccaggagggccgcauuaauuauuacuggacacugcucgagccuggggauaccaucauuuucgaagccaacggaaaucugaucgcucccugguaugccuuugcucuuagcagaggcuucgggucuggaauuaucacauccaacgccagcaugucugagugugacgcgaagugccagaccccucaaggcgccauuaauagcucccugcccuuucagaacgugcacccggucaccaucggcgaauguccuaaauacgugcggucuacaaagcuccgcaugguuacggggcugagaaauauccccagcauucagucccggggacuuuucggcgcuaucgccggguuuauugagggaggcuggaccgggaugaucgauggaugguauggcuaccaucaccagaacgaacaaggcagcggguacgcugccgaccagaaaucuacacagaaugccauugauggaaucaccaacaaggucaauuccgugaucgagaaaaugaacacacaguucaccgcugugggcaaggaguucaauaagcuggaacgcagaauggagaaccucaauaaaaagguugacgauggguuucuggacauuuggacguauaacgcggaacugcucgugcugcuugagaacgaacggacacuggacuuccacgauagcaaugucaaaaaccucuacgagaaggugaaaaaucaacugaagaacaaugccaaggagaucggaaacggcugcuuugaguucuaucauaaauguaauaacgaaugcauggaaucugucaagaaugggaccuacgacuauccuaaauacuccgaggagagcaaacuuaaccgcgagaaaauugauggcgugaagcuggaauccaugggaguuuaucagauccucgcuauuuacucuaccguggccagcucccugguccugcucgugucucugggcgccaucagcuuuuggaugugcuccaaugggagccuucaguguagaaucugcauuuga

SEQ ID NO: 193091 - RNA, 1701 nt, Artificial Sequence
  derived and/or modified CDS sequence (opt5) from hemagglutinin__InfluenzaA__ABG47851
augaagaccaucauugcccugagcuacauccucugccugguguucgcucagaaacuucccggcaacgacaauuccacagccacgcugugucucgggcaccaugcggucccuaacggaacccugguuaagacaauuaccaaugaucaaaucgaggugacaaacgcuaccgaacuugugcagucuagcuccacaggcagaauuugcgacucuccgcaccggauccuggaugggaaaaauuguacccucaucgacgcccugcugggagauccccauugcgacggcuuucagaacaaggagugggaucucuucgucgaacgcagcaaagccuauuccaauuguuacccuuaugacgugcccgauuacgcuucucugagaagccuuguugccuccagcgggacgcuggaguuuaccaacgaaggauucaauuggacaggcguggcucaggacggcaagucuuaugccugcaagcggggguccgucaacagcuuuuucucucgccucaauuggcugcacaaacuugaguacaaguauccugcgcugaacgugaccaugcccaauaacgauaaauuugacaagcucuacauuuggggaguucaucacccuuccacagauagcgaccaaaccucucuguacgugcaggccuccggcagagucacggugagcacaaaacggucccagcagaccgugaucccgaauauugggucucgccccugggucagaggaaucagcucccggauuagcaucuauuggacaauuguuaagccuggcgacauccugcucaucaacucuaccgggaaccugauugcuccccgcggauacuucaagaucagaaauggcaaauccagcauuaugcggucugaugccccuaucgacaacuguaauagcgagugcauuacccccaacggcuccaucccgaaugauaagccuuuucaaaacgugaaucgcaucacauauggggcuugucccagauacgugaaacagaacacgcuuaagcuggccaccggaaugcggaaugucccugaaaaacagacacgcggcauuuucggggcgaucgccggauuuauugagaacggcugggaagggaugguggacggaugguauggcuucagacaccaaaauucugagggcaccgggcaggcugccgaucucaagagcacacaggcugccaucgaccagauuaacggaaaacugaaucggcuuaucgagaagaccaacgaaaaguuucaucaaaucgagaaagaguucuccgaaguugaaggccgcauucaggaucuggagaaguacguggaggacacgaaaaucgaucucuggagcuauaaugccgaacugcuggucgcucucgagaaccagcacacaauugaccugaccgauucugaaaugaacaagcuguucgagagaacccggaaacagcugagagaaaaugcggaggacauggggaacggaugcuuuaagaucuaccauaagugugacaaugccugcauuggcuccauccgcaacgggacauacaaucacgauguguaucgggacgaggcucucaacaauagauuccaaauuaaaggcguugaacuuaagagcggauacaaagauuggauccuuuggaucucuuuugccauuuccugcuuccugcucugugugguccugcugggcuuuaucaugugggccugccagaaggggaacauucgcuguagcaucugcauuuga

SEQ ID NO: 193092 - RNA, 1701 nt, Artificial Sequence
  derived and/or modified CDS sequence (opt5) from hemagglutinin__InfluenzaA__ABG47862
augagaaccaucauugcccugagcuacauccucugccugguguucgcucagaaacuucccggcaacgacaauuccacagccacgcugugucucgggcaccaugcggucccuaacggaacccugguuaagacaauuaccaaugaucaaaucgaggugacaaacgcuaccgaacuugugcagucuagcuccacaggccggauuugcaauucuccgcaccgcauccuggacgggaagaacuguacccucaucgaugcccugcugggagacccccauugcgauggcuuucagaauaaagagugggaccucuucgucgaaagaagcaaggccuauuccaacuguuacccuuaugaugugcccgacuacgcuucucugcggagccuuauugccuccagcgggacgcuggaguuuaccaaugaaggauucaacuggacaggcguugcucaggauggcaccucuuaugccugcaaacgcggguccgucaagagcuuuuucucuagacucaauuggcugcacaaacuugaguacaaguauccugcgcugaacgugacaaugcccaauaacgacaaguuugauaaacucuacaucuggggagugcaucacccuuccaccgacagcgaucaaacgucucuguacguucaggccuccggccgggugacagucagcaccaagcgcucccagcagacagugauuccgaauaucgggucuagacccugggugcggggagucagcucccgcauuagcaucuauuggaccauuguuaaaccuggcgacauccugcucaucaacucuaccgggaaccugauugcucccagaggauacuucaagauccgguccggcaagagcucuauuaugcgcagcgacgccccuaucggcaauuguaacuccgagugcauuacacccaaugggucuaucccgaacgauaaaccuuuucaaaaugugaacagaaucacguauggagcuuguccccgguacgugaagcagaauacccuuaaacuggccacaggcaugcgcaacgucccugaaaagcagaccagagggauuuucggagcgaucgccggcuuuauugagaaugggugggaaggaaugguggacggcugguauggcuuccggcaccagaacagcgaggggacaggacaagcugccgaucucaaauccacccaggcugccaucaaucagauuaacggcaagcugaauagacuuaucgagaaaacgaacgaaaaguuucaucaaaucgagaaggaguucagcgaaguugaagggcgcauucaggaccuggagaaauacguggaggauacaaagaucgaccucuggucuuauaaugccgaacugcuggucgcucucgagaaccagcacaccauugaucugaccgacuccgaaaugaacaaacuuuucgagcggacaagaaagcagcugcgcgaaaaugcggaggauaugggaaacggcugcuuuaaaaucuaccauaagugugacaaugccugcauugggagcauccggaacggcaccuacgaucacgacguguauagagacgaggcucucaauaaccgcuuccaaauuaagggaguugaacugaaaucuggcuacaaggauuggauccuuuggaucuccuuugccauuagcugcuuccugcucugugugguccugcugggguuuaucaugugggccugccagaaaggaaauauucgguguaacaucugcauuuga

SEQ ID NO: 193093 - RNA, 1701 nt, Artificial Sequence; identical to SEQ ID NO: 193056
  derived and/or modified CDS sequence (opt5) from hemagglutinin__InfluenzaA__ABG47873

SEQ ID NO: 193094 - RNA, 1701 nt, Artificial Sequence; identical to SEQ ID NO: 193061
  derived and/or modified CDS sequence (opt5) from hemagglutinin__InfluenzaA__ABG47895

SEQ ID NO: 193095 - RNA, 1701 nt, Artificial Sequence; identical to SEQ ID NO: 193056
  derived and/or modified CDS sequence (opt5) from hemagglutinin__InfluenzaA__ABG47906

SEQ ID NO: 193096 - RNA, 1701 nt, Artificial Sequence
  derived and/or modified CDS sequence (opt5) from hemagglutinin__InfluenzaA__ABG47917
augaagaccaucauugcccugagcuacauccucugccugguguucgcucagaaacuucccggcaacgacaauuccacagccacgcugugucucgggcaccaugcggucccuaacggaacccugguuaagacaauuaccaaugaucaaaucgaggugacaaacgcuaccgaacuugugcagucuagcuccacaggcagaauuugcgacucuccgcaccggauccuggaugggaaaaauuguacccucaucgacgcccugcugggagauccccauugcgacggcuuucagaacaaggagugggaucucuucgucgaacgcagcaaagccuauuccaauuguuacccuuaugacgugcccgauuacgcuucucugagaagccuuguugccuccagcgggacgcuggaguuuauuaacgaagacuucaauuggaccggaguggcucaggauggcaagucuuaugccugcaagcggggcuccgucaacagcuuuuucucucgccucaauuggcugcacaaacuugaguacaaguauccugcgcugaacgugacaaugcccaauaacgggaaauuugacaagcucuacaucuggggaguucaucacccuuccaccgauagcgaccaaacaucucuguacgugagagccuccggccgggucaccgugagcacgaaacgcucccagcagacagugauuccgaauaucggguucagacccuggguccggggacugucuagccgcauuuccaucuauuggaccauuguuaagccuggcgacauccuccugaucaacagcacagggaaccuuauugcucccagaggauacuuuaagauccggaauggcaaaucuuccauuaugcgcagcgaugccccuaucggcaacuguucuagcgagugcauuacccccaauggguccaucccgaacgacaagccuuuccagaaugugaacagaaucaccuauggagcuuguccccgguacgugaaacaaaauacacugaagcucgccacgggcaugcgcaacgucccugaaaaacagaccagagggauuuuuggagcgaucgccggcuucauugagaaugggugggaaggaaugguggauggcugguauggcuuucggcaccagaacucugaggggacaggacaggcugccgaccuuaagagcacccaagcugccaucgaucagauuaauggcaaacugaacagacugaucgagaagacaaaugaaaaguuccaucagaucgagaaagaguucuccgaaguugaagggcgcauucaagaccucgagaaguacguggaggauaccaaaaucgaccuguggagcuauaacgccggacugcucgucgcucuggaaaaucagcacacgauugaucuuacagacucugagaugaacaagcuguuugaacggaccagaaaacagcuccgcgagaacgcggaagauaugggcaaugggugcuucaagaucuaccauaagugugacaacgccugcauuggcuccauccggaauggaaccuacgaccacgauguguauagagacgaggcucugaacaaucgcuuucagauuaaaggcguugagcuuaagagcggguacaaagauuggauccuguggaucucuuucgccauuuccugcuuucuccugugugugguccugcucggauucaucaugugggccugccaaaagggcaacauucgguguaauaucugcauuuga

SEQ ID NO: 193097 - RNA, 1701 nt, Artificial Sequence; identical to SEQ ID NO: 193096
  derived and/or modified CDS sequence (opt5) from hemagglutinin__InfluenzaA__ABG47928

SEQ ID NO: 193098 - RNA, 1701 nt, Artificial Sequence
  derived and/or modified CDS sequence (opt5) from hemagglutinin__InfluenzaA__ABG47939
augaagaccaucauugcccugagcuacauccucugccugguguucgcucagaaacuucccggcaacgacaauuccacagccacgcugugucucgggcaccaugcggucccuaacggaacccugguuaagacaauuaccaaugaucaaaucgaggugacaaacgcuaccgaacuugugcagucuagcuccacaggcagaauuugcgacucuccguaucggauccuggaugggaaaaauuguacccucaucgacgcccugcugggagauccccacugcgacggcuuucagaacaaggagugggaucucuucgucgaacgcagcaaagccuacuccaauuguuauccuuacgacgugcccgauuaugcuucucugagaagccuuguugccuccagcgggacgcuggaguuuauuaacgaagacuucaauuggaccggaguggcucaggauggcaagucuuacgccugcaagcggggcuccgucaacagcuuuuucucucgccucaauuggcugcauaaacuugaguauaaguacccugcgcugaacgugacaaugcccaauaacgggaaauuugacaagcucuacaucuggggaguucaccauccuuccaccgauagcgaccaaacaucucuguaugugagagccuccggccgggucaccgugagcacgaaacgcucccagcagacagugauuccgaauaucggguucagacccuggguccggggacugucuagccgcauuuccaucuacuggaccauuguuaagccuggcgacauccuccugaucaacagcacagggaaccuuauugcucccagaggauauuuuaagauccggaauggcaaaucuuccauuaugcgcagcgaugccccuaucggcaacuguucuagcgagugcauuacccccaauggguccaucccgaacgacaagccuuuccagaaugugaacagaaucaccuacggagcuuguccccgguaugugaaacaaaauacacugaagcucgccacgggcaugcgcaacgucccugaaaaacagaccagagggauuuuuggagcgaucgccggcuucauugagaaugggugggaaggaaugguggauggcugguacggcuuucggcaccagaacucugaggggacaggacaggcugccgaccuuaagagcacccaagcugccaucgaucagauuaauggcaaacugaacagacugaucgagaagacaaaugaaaaguuccaccagaucgagaaagaguucuccgaaguugaagggcgcauucaagaccucgagaaguauguggaggauaccaaaaucgaccuguggagcuacaacgccggacugcucgucgcucuggaaaaucagcauacgauugaucuuacagacucugagaugaacaagcuguuugaacggaccagaaaacagcuccgcgagaacgcggaagauaugggcaaugggugcuucaagaucuaccacaagugugacaacgccugcauuggcuccauccggaauggaaccuaugaccaugauguguacagagacgaggcucugaacaaucgcuuucagauuaaaggcguugagcuuaagagcggguauaaagauuggauccuguggaucucuuucgccauuuccugcuuucuccugugugugguccugcucggauucaucaugugggccugccaaaagggcaacauucgguguaauaucugcauuuga

SEQ ID NO: 193099 - RNA, 1701 nt, Artificial Sequence
  derived and/or modified CDS sequence (opt5) from hemagglutinin__InfluenzaA__ABG47950
augaagaccaucauugcccugagcuacauccucugccugguguucgcucagaaacuucccggcaacgacaauuccacagccacgcugugucucgggcaccaugcggucccuaacggaacccugguuaagacaauuaccaaugaucaaaucgaggugacaaacgcuaccgaacuugugcagucuagcuccacaggcagaauuugcgacucuccgcaccggauccuggaugggaaaaauuguacccucaucgacgcccugcugggagauccccauugcgacggcuuucagaacaaggagugggaucucuucgucgaacgcagcaaagccuauuccaauuguuacccuuaugacgugcccgauuacgcuucucugagaagccuuguugccucccuggggacgcucgaguuuauuaacgaagacuucaauuggaccggaguggcucaggauggcaagagcuauucuugcaagcggggcuccgucaacagcuuuuucucucgccugaauuggcuucacaaacuggaguacaaguauccugcccucaacgugacaaugcccaauaacgggaaauuugacaagcuguacaucuggggaguucaucacccuuccaccgauagcgaccaaacaucucuguacgcgagagccuccggccgggugaccgucagcacgaaacgcucccagcagacagugauuccgaauaucggguucagacccugggugcggggacucucuagccgcauuuccaucuauuggaccauugucaagccuggcgacauccugcuuaucaacagcacagggaaccugauugcucccagaggauacuuuaagauccggaccggcaaaucuuccauuaugcgcagcgaugccccuaucggcaauuguucuagcgagugcauuacccccaacgggaauaucccgaacgacaagccuuuccagaauguuaacagaaucacauauggagcuuguccccgguacgugaaacaaaauacgcucaagcuggccaccggcaugcgcaacgugccugaaaaacagacaagagggauuuuuggagcgaucgccggcuucauugagaaugggugggaaggaauggucgauggcugguauggcuuucggcaccagaacuccgaggggaccggacaggcugccgaccuuaagucuacacaagcugccaucgaucagauuaauggcaaacugaacagacucaucgagaagaccaaugaaaaguuccaucagaucgagaaagaguucagcgaaguggaagggcgcauucaagaccuggagaaguacguugaggauacgaaaaucgaccugugguccuauaacgccggauuucucguggcucuggaaaaucagcacacaauugaucuuaccgacagcgagaugaacaagcuguucgaacggaccagaaaacagcuccgcgagaacgcggaagauaugggcaaugggugcuuuaagaucuaccauaagugugacaacgccugcauuggcucuauccggaauggaacauacgaccacgaugucuauagagacgaggcucugaacaaucgcuuccagauuaaaggcguggagcuuaaguccggguacaaagauuggauccuguggaucagcuuugccauuucuugcuuccuccuguguguugugcugcucggauuuaucaugugggccugccaaaagggcaacauucgguguaauaucugcauuuga

SEQ ID NO: 193100 - RNA, 1701 nt, Artificial Sequence
  derived and/or modified CDS sequence (opt5) from hemagglutinin__InfluenzaA__ABG47961
augaagaccaucauugcccugagcuacauccucugccugguguucgcucagaaacuucccggcaacgacaauuccacagccacgcugugucucgggcaccaugcggucccuaacggaacccugguuaagacaauuaccaaugaucaaaucgaggugacaaacgcuaccgaacuugugcagucuagcuccacaggcagaauuugcgacucuccgcaccggauccuggaugggaaaaauuguacccucaucgacgcccugcugggagauccccauugcgacggcuuucagaacaaggagugggaucucuucgucgaacgcagcaaagccuauuccaauuguuacccuuaugacgugcccgauuacgcuucucugagaagccuuguugccuccagcgggacgcuggaguuuauuaacgaagacuucaauuggaccggaguggcucaggauggcaagucuuauuccugcaagcggggcagcgucaacagcuuuuucucccgccucaauuggcugcacaaacuugaguacaaguauccugcccugaacgugacaaugcccaauaacgggaaauuugacaagcucuacaucuggggaguucaucacccuagcaccgauucugaccaaacaucccuguacgugagagcgagcggcggggucaccguguccacgaaacggucucagcagacagugauuccgaauaucggaagccgccccugggucagaggccuguccagccggauuucuaucuauuggaccauuguuaagccuggggacauccuccugaucaacuccacaggaaaccuuauugcuccccgcggcuacuucaagaugagaaauggcaaaagcucuaucaugcggagcgaugccccuauugggaacuguuccucugagugcaucacccccaauggaagcauuccgaacgacaagccuuuucagaaugugaaccgcaucaccuauggcgccugucccagauacgugaaacaaaauacacugaagcucgcuacggggaugcggaacgucccugaaaaacagacccgcggaaucuucggcgccauugcgggguuuaucgagaauggaugggaaggcaugguggauggcugguauggguucagacaccagaacuccgagggaacaggccaggccgcugaccugaagucuacccaagccgcuauugaucagaucaaugggaaacuuaaccggcugauuggaaagacaaaugagaaguuucaucagaucgaaaaagaguucucugaaguugagggcagaauccaagaccucgaaaaguacguggaggauaccaaaauugaccugugguccuauaacgccgagcugcucgucgcccuggaaaaucagcacacgaucgaucuuacagacagcgagaugaacaagcuguucgaacgcacccggaaacagcucagagagaacgcugaagauauggggaauggcugcuuuaagauuuaccauaagugugacaacgcgugcaucggaucuauucgcaauggcaccuacgaccacgauguguaucgggacgaggcccugaacaauagauuccagaucaaagggguugagcuuaaguccggauacaaagauuggauucuguggaucagcuuugcuaucuccugcuuccuccugugugugguccugcucggcuuuauuaugugggccugccaaaaggggaacauccgcuguaauauuugcaucuga

SEQ ID NO: 193101 - RNA, 1701 nt, Artificial Sequence; identical to SEQ ID NO: 193096
  derived and/or modified CDS sequence (opt5) from hemagglutinin__InfluenzaA__ABG47972

SEQ ID NO: 193102 - RNA, 1701 nt, Artificial Sequence; identical to SEQ ID NO: 193096
  derived and/or modified CDS sequence (opt5) from hemagglutinin__InfluenzaA__ABG47983

SEQ ID NO: 193103 - RNA, 1701 nt, Artificial Sequence; identical to SEQ ID NO: 193096
  derived and/or modified CDS sequence (opt5) from hemagglutinin__InfluenzaA__ABG47994

SEQ ID NO: 193104 - RNA, 1701 nt, Artificial Sequence
  derived and/or modified CDS sequence (opt5) from hemagglutinin__InfluenzaA__ABG48005
augaagaccaucauugcccugagcuacauccucugccugguguucgcucagaaacuucccggcaacgacaauuccacagccacgcugugucucgggcaccaugcggucccuaacggaacccugguuaagacaauuaccaaugaucaaaucgaggugacaaacgcuaccgaacuugugcagucuagcuccacaggcagaauuugcgacucuccgcaccggauccuggaugggaaaaauuguacccucaucgacgcccugcugggagauccccauugcgacggcuuucagaacaaggagugggaucucuucgucgaacgcagcaaagccuauuccaauuguuacccuuaugacgugcccgauuacgcuucucugagaagccuuguugccuccagcgggacgcuggaguuuauuaacgaagacuucaauuggaccggaguggcucaggauggcaagucuuaugccugcaagcggggcuccgucaacagcuuuuucucucgccucaauuggcugcacaaacuugaguacaaguauccugcgcugaacgugacaaugcccaauaacgggaaauuugacaagcucuacaucuggggaguucaucacccuuccaccgauagcgaccaaacaucucuguacgugagagccuccggccgggucaccgugagcacgaaacgcucccagcagacagugauuccgaauaucggguucagacccuggguccggggacugucuagccgcauuuccaucuauuggaccauuguuaagccuggcgacauccuccugaucaacagcacagggaaccuuauugcucccagaggauacuuuaagauccggaauggcaaaucuuccauuaugcgcagcgaugccccuaucggcaacuguucuagcgagugcauuacccccaauggguccaucccgaacgacaagccuuuccagaaugugaacagaaucaccuauggagcuuguccccgguacgugaaacaaaauacacugaagcucgccacgggcaugcgcaacgucccugaaaaacagaccagagggauuuuuggagcgaucgccggcuucauugagaaugggugggaaggaaugguggauggcugguauggcuuucggcaccagaacucugaggggacaggacaggcugccgaccuuaagagcacccaagcugccaucaaucagauuaacggcaaacugaauagacugaucgagaagacaaacgaaaaguuccaucagaucgagaaagaguucuccgaaguugaagggcgcauucaagaucucgagaaguacguggaggacaccaaaaucgaucuguggagcuauaaugccggacugcucgucgcucuggaaaaccagcacacgauugaccuuacagauucugagaugaacaagcuguuugaacggaccagaaaacagcuccgcgagaaugcggaagacaugggcaacgggugcuucaagaucuaccauaagugugauaaugccugcauuggcuccauccggaacggaaccuacgaccacgacguguauagagaugaggcucugaauaaccgcuuucagauuaaaggcguugagcuuaagagcggguacaaagacuggauccuguggaucucuuucgccauuuccugcuuucuccugugugugguccugcucggauucaucaugugggccugccaaaagggcaauauucgguguaacaucugcauuuga

SEQ ID NO: 193105 - RNA, 1701 nt, Artificial Sequence; identical to SEQ ID NO: 193096
  derived and/or modified CDS sequence (opt5) from hemagglutinin__InfluenzaA__ABG48016

SEQ ID NO: 193106 - RNA, 1701 nt, Artificial Sequence; identical to SEQ ID NO: 193096
  derived and/or modified CDS sequence (opt5) from hemagglutinin__InfluenzaA__ABG48027

SEQ ID NO: 193107 - RNA, 1698 nt, Artificial Sequence
  derived and/or modified CDS sequence (opt5) from hemagglutinin__InfluenzaA__ABG48049
augaaggugaaacugcucguccugcuuugcaccuucacagccacguacgcugacaccaucuguauuggcuaucacgccaacaauagcacagauaccguugacacagugcuggagaagaacgugaccgucacacauuccgugaaucuccuggaagauucucacaacgggaaacuuugccugcucaagggaaucgcgccccugcagcugggcaauuguagcguugcuggguggauucucggaaacccugagugcgaacugcuuaucuccaaagagucuuggagcuacauuguggaaaccccgaaucccgagaacggcacguguuauccuggguacuuugccgacuaugaggaacugagagagcaacucuccucugucagcuccuucgaacgguuugagaucuuccccaaggagagcucuuggccuaaucauaccgugacaggaguuuccgccagcugcucucacaacggcaaguccagcuuuuaccgcaaucugcuuuggcugaccggcaaaaacgggcucuaucccaaucugucuaaguccuacgcuaacaauaaagaaaaggaggugcugguccucuggggagugcaucacccuccgaacaucggcgaucagagagcccuguaccacacagaaaacgcuuaugugagcgucguuuccacccauuacucucggcgcuucacgcccgagauugccaaaagaccuaaggugcgggaccaggaagggcgcaucaauuauuacuggacacuucuggagcccggagauaccauuaucuuugaggcgaacggcaaucucauugccccuagauaugcuuucgcccugagccggggguuuggauccggcaucauuacaagcaacgcucccauggacgaaugugaugccaagugccagaccccgcaaggcgcgaucaauucuucccuuccuuuccagaacgugcaccccgucaccaucggggaguguccuaaauacgugcgcagcgccaagcugagaaugguuacaggacuccggaauauucccucuauccagagccgcggccuguuuggggcuauugccggauucaucgaaggcggguggacgggaaugguggacggcugguauggcuaccaucaccagaacgagcaaggguccggauacgcugccgaucagaaaucuacccagaaugccauuaacggcaucacaaauaaggucaacagcgugaucgaaaagaugaauacccaguuuacagcuguugggaaagaguucaacaaacuggagagacggauggaaaaucucaacaagaagguggacgauggauuccuggacauuuggaccuauaacgcggagcuucugguccuccuggaaaaugagcgcacgcuugacuuucacgauuccaacgugaaaaaucuguacgaaaaggucaaaagccaacucaagaacaaugccaaagagaucggcaacgggugcuucgaguuuuaucauaaguguaauaacgaaugcauggagucugugaagaauggcacauacgacuaucccaaauacuccgaagagagcaagcugaacagagagaaaauugauggaguuaagcuggaaucuaugggcguguaucagauccucgcuauuuacuccaccgucgccagcucccuggugcuucugguuucucucggggccaucagcuucuggaugugcuccaauggaucucugcagugucggaucugcauuuga

SEQ ID NO: 193108 - RNA, 1701 nt, Artificial Sequence; identical to SEQ ID NO: 192722
  derived and/or modified CDS sequence (opt5) from hemagglutinin__InfluenzaA__ABG48060

SEQ ID NO: 193109 - RNA, 1701 nt, Artificial Sequence; identical to SEQ ID NO: 192722
  derived and/or modified CDS sequence (opt5) from hemagglutinin__InfluenzaA__ABG48071

SEQ ID NO: 193110 - RNA, 1701 nt, Artificial Sequence
  derived and/or modified CDS sequence (opt5) from hemagglutinin__InfluenzaA__ABG48082
augaagaccaucauugcccugagcuacauccucugccugguguucgcucagaaacuucccggcaacgacaauuccacagccacgcugugucucgggcaccaugcggucccuaacggaacccugguuaagacaauuaccaaugaucaaaucgaggugacaaacgcuaccgaacuugugcagucuagcuccacaggcagaauuugcgacucuccgcaccagauccuggauggggagaauuguacccucaucgacgcccugcugggagauccccauugcgacggcuuucagaacaaagaaugggaucucuucgucgagcggagcaaggccuauuccaauuguuacccuuaugacgugcccgauuacguuucucugcgcagccuuguggcuuccagcgggacgcuggaauuuaacaaugagucuuucaacuggaccggagucgcccaaaauggcacauccagcgcuugcaaaagacggucugacaaguccuuuuucagccgccucaacuggcugcaccagcuuaaguauaaauacccugcccugaaugugaccaugcccaacaaugagaaguuugauaaacucuauauuuggggcguucugcauccugggacagacucugaucagaucucccuguacgcgcaggccagcggaagagugaccgucuccacgaagcggucucaacagacagugauuccgaacaucggcagccgccccugggugagaggggucuccagccggauuucuaucuacuggaccauuguuaaaccuggagacauccuccugaucaacuccacaggcaaucuuauugcuccccgcggguauuucaagaucagaagcggaaagucuagcauuaugcgguccgacgccccuaucggcaaauguaacucugaaugcauuacccccaauggcagcaucccgaacgggaagccuuuucagaaugugaaccgcaucaccuacggagcuugucccagauaugugaaacagaauacacugaagcucgccacgggcaugcggaacgucccugagaaacaaacccgcgggauuuucggagcgaucgccggcuuuauugaaaaugggugggagggaaugauggauggcugguacggcuucagacaccagaacuccgaggggacaggacaggcugccgaccuuaagagcacccaagcugccaucaaucagauuaacggcaaacugaaucggcugaucgaaaagacaaacgagaaguuucaccagaucgaaaaagaguucucugaaguggaggggcgcauucaggaucucgagaaguauguugaagacaccaaaaucgaucugugguccuacaaugccgagcugcucguggcucuggaaaaccaacauacgauugaccuuacagauagcgagaugaacaagcuguucgaaagaaccaaaaagcagcuccgggagaaugcggaggacaugggaaacggcugcuuuaagaucuaucacaaaugugauaaugccugcauugggucuaucagaaacggcaccuacgaccaugaugucuaccgcgacgaagcucugaauaaccgguuccagauuaagggaguggagcuuaaauccggcuauaaggacuggauccuguggaucagcuuugccauuuccugcuuccuccuguguaucguucugcucggguuuauuaugugggccugccagaaaggaaauaucagauguaacauuugcaucuga

SEQ ID NO: 193111 - RNA, 1701 nt, Artificial Sequence
  derived and/or modified CDS sequence (opt5) from hemagglutinin__InfluenzaA__ABG48104
augaagaccaucauugcccugagcuacauccucugccugguguucgcucagaaacuucccggcaacgacaauuccacagccacgcugugucucgggcaccaugcggucccuaacggaacccugguuaagacaauuaccaaugaucaaaucgaggugacaaacgcuaccgaacuugugcagucuagcuccacaggcagaauuugcgacucuccgcaccagauccuggauggggagaauuguacccucaucgacgcccugcugggagauccccauugcgacggcuuucagaacaaagaaugggaucucuucgucgagcggagccgcgccuauuccaauuguuacccuuaugacgugcccgauuacguuucucugagaagccuuguggcuuccagcgggacgcuggaauuuaacaaugagucuuucaacuggaccggagucgcccaaaauggcacauccagcgcuugcaagcggcgcucugacaaauccuuuuucagcagacucaacuggcugcaccagcuuaaguauaaguacccugcccugaaugugaccaugcccaacaaugagaaauuugauaagcucuauauuuggggcguucaucacccugggacagacucugaucagaucucccuguacgcgcaggccagcggacgggugaccgucuccacgaaacgcucucaacagacagugauuccgaacaucggcagcagacccugggugcgcggggucuccagccggauuucuaucuacuggaccauuguuaagccuggagacauccugcucaucaacuccacaggcaaucugauugcucccagaggguauuucaaaauccggagcggaaagucuagcauuaugcgcuccgacgccccuaucggcaaguguaacucugaaugcauuacccccaauggcagcaucccgaacgauaaaccuuuucagaaugugaacagaaucaccuacgggcccuguccucgguaugugaagcagaauacacuuaaacuggcuacgggaaugcgcaacguccccgagaagcaaaccagaggcauuuucggggccaucgcgggauuuauugaaaauggcugggaggggaugauggacggaugguacggcuuccggcaccagaacuccgagggcacagggcaggccgcugaucucaaaagcacccaagccgcuaucaaucagauuaacggaaagcugaauagacuuaucgagaaaacaaacgaaaaguuucaucagaucgaaaaggaguucucugaaguggagggccgcauucaggaccuggagaaauauguugaagauaccaagaucgaccucugguccuacaaugccgagcugcugguggcccucgaaaaccaacacacgauugaucugacagacagcgagaugaacaaacuuuucgaacggaccaagaaacagcugagagagaaugcugaggauauggggaacggaugcuuuaagaucuaucauaagugugacaaugcgugcauuggcucuauccgcaacgggaccuacgaucacgacgucuaccgggacgaagcccucaauaacagauuccagauuaaaggcguggagcugaaguccggauauaaagauuggauccuuuggaucagcuuugcuauuuccugcuuccugcucuguaucguucugcugggcuuuauuaugugggccugccagaaggggaauauccgcuguaacauuugcaucuga

SEQ ID NO: 193112 - RNA, 1701 nt, Artificial Sequence; identical to SEQ ID NO: 192712
  derived and/or modified CDS sequence (opt5) from hemagglutinin__InfluenzaA__ABG48115

SEQ ID NO: 193113 - RNA, 1701 nt, Artificial Sequence; identical to SEQ ID NO: 192719
  derived and/or modified CDS sequence (opt5) from hemagglutinin__InfluenzaA__ABG48126

SEQ ID NO: 193114 - RNA, 1701 nt, Artificial Sequence; identical to SEQ ID NO: 192634
  derived and/or modified CDS sequence (opt5) from hemagglutinin__InfluenzaA__ABG48148

SEQ ID NO: 193115 - RNA, 1701 nt, Artificial Sequence; identical to SEQ ID NO: 192634
  derived and/or modified CDS sequence (opt5) from hemagglutinin__InfluenzaA__ABG48159

SEQ ID NO: 193116 - RNA, 1701 nt, Artificial Sequence
  derived and/or modified CDS sequence (opt5) from hemagglutinin__InfluenzaA__ABG48170
augaagaccaucauugcccugagcuacauccucugccugguguucgcucagaaacuucccggcaacgacaauuccacagccacgcugugucucgggcaccaugcggucccuaacggaacccugguuaagacaauuaccaaugaucaaaucgaggugacaaacgcuaccgaacuugugcagucuagcuccacaggcagaauuugcgacucuccgcaccagauccuggauggggagaauuguacccucaucgacgcccugcugggagauccccauugcgacggcuuucagaacaaagaaugggaucucuucgucgagcggagcaaggccuauuccaauuguuacccuuaugacgugcccgauuacguuucucugcgcagccuuguggcuuccagcgggacgcuggaauuuaacaaugagucuuucaacuggaccggagucgcccaaaauggcacauccagcgcuugcaaaagacggucugacaaguccuuuuucagccgccucaacuggcugcaccagcuuaaguauaaauacccugcccugaaugugaccaugcccaacaaugagaaguuugauaaacucuauauuuggggcguucaucacccugggacagacucugaucagaucucccuguacgcgcaggccagcggaagagugaccgucuccacgaagcggucucaacagacagugauuccgaacaucggcagccgccccugggugagaggggucuccagccggauuucuaucuacuggaccauuguuaaaccuggagacauccugcucaucaacuccacaggcaaucugauugcuccccgcggguauuucaagaucagaagcggaaagucuagcauuaugaaauccgacgccccuaucggcaaguguaacuuugaaugcauuacccccaauggcucuaucccgaacgggaaaccuuuccagaaugugaaccggaucaccuacggagcuuguccccgcuaugugaagcagaauacacuuaaacuggccacgggcaugagaaacgucccugagaagcaaacccgggggauuuuuggagcgaucgccggcuucauugaaaaugggugggagggaaugauggauggcugguacggcuuucgccaccagaacagcgaggggacaggacaggcugccgaccucaaauccacccaagcugccaucaaucagauuaacggcaagcugaauagacuuaucgaaaagacaaacgagaaauuccaucagaucgaaaaggaguucagcgaaguggaggggcggauucaggaucuggagaaauauguugaagacaccaagaucgaucucuggucuuacaaugccgagcugcugguggcucucgaaaaccaacacacgauugaccugacagauuccgagaugaacaaacuuuuugaaagaaccaagaagcagcugcgcgagaaugcggaggacaugggaaacggcugcuucaaaaucuaucauaagugugauaaugccugcauugggagcauccggaacggcaccuacgaccacgaugucuacagagacgaagcucucaauaaccgcuuucagauuaaaggaguggagcugaagucuggcuauaaagacuggauccuuuggaucuccuucgccauuagcugcuuucugcucuguaucguucugcugggguucauuaugugggccugccagaagggaaauauccgguguaacauuugcaucuga

SEQ ID NO: 193117 - RNA, 1701 nt, Artificial Sequence
  derived and/or modified CDS sequence (opt5) from hemagglutinin__InfluenzaA__ABG48181
augaagaccaucauugcccugagcuacauccucugccugguguucgcucagaaacuucccggcaacgacaauuccacagccacgcugugucucgggcaccaugcggucccuaacggaacccugguuaagacaauuaccaaugaucaaaucgaggugacaaacgcuaccgaacuugugcagucuagcuccacaggcagaauuugcgacucuccgcaccagauccuggauggggagaauuguacccucaucgacgcccugcugggagauccccauugcgacggcuuucagaacaaagaaugggaucucuucgucgagcggagcaaggccuauuccaauuguuacccuuaugacgugcccgauuacguuucucugcgcagccuuguggcuuccagcgggacgcuggaauuuaacaaugagucuuucaacuggaccggagucgcccaaaauggcacauccuaugcuugcaaaagacggagcgacaaguccuuuuucucucgccucaacuggcugcaccagcuuaaguacaaauauccugcccugaaugugaccaugcccaacaaugagaaguuugauaaacucuacauuuggggcguucaucacccugggacagacagcgaucagaucucucuguacgcgcaggccuccggaagagugaccgucagcacgaagcggucccaacagacagugauuccgaacaucggcucucgccccugggugagaggggucagcucccggauuagcaucuauuggaccauuguuaaaccuggagacauccugcucaucaacucuacaggcaaucugauugcuccccgcggguacuucaagaucagauccggaaagagcucuauuaugcggagcgacgccccuaucggcaaauguaacuccgaaugcauuacccccaauggcucuaucccgaacgauaagccuuuucagaaugugaaccgcaucaccuauggggcuugucccagauacgugaaacagaauacacuuaagcuggccacgggaaugcggaacgucccugagaaacaaacccgcggcauuuucggggcgaucgccggauuuauugaaaauggcugggaggggaugauggacggaugguauggcuucagacaccagaacagcgagggcacagggcaggcugccgaucucaaguccacccaagcugccaucaaucagauuaacggaaaacugaaucggcuuaucgaaaagacaaacgagaaguuucaucagaucgaaaaagaguucagcgaaguggagggccgcauucaggaccuggagaaguacguugaagauaccaaaaucgaccucuggucuuauaaugccgagcugcugguggcucucgaaaaccaacacacgauugaucugacagacuccgagaugaacaaacuuuucgaaagaaccaagaagcagcugcgggagaaugcggaggauauggggaacggaugcuuuaagaucuaccauaaaugugacaaugccugcauuggcagcaucagaaacgggaccuacgaucacgacgucuaucgcgacgaagcucucaauaaccgguuccagauuaagggcguggagcugaaaucuggauacaaggauuggguucuuuggaucuccuuugccaucagcugcuuccugcucuguauugugcugcugggcuuuaucaugugggccugccagaaagggaauauuagauguaacaucugcauuuga

SEQ ID NO: 193118 - RNA, 1701 nt, Artificial Sequence; identical to SEQ ID NO: 192634
  derived and/or modified CDS sequence (opt5) from hemagglutinin__InfluenzaA__ABG48192

SEQ ID NO: 193119 - RNA, 1701 nt, Artificial Sequence
  derived and/or modified CDS sequence (opt5) from hemagglutinin__InfluenzaA__ABG48203
augaagaccaucauugcccugagcuacauccucugccugguguucgcucagaaacuucccggcaacgacaauuccacagccacgcugugucucgggcaccaugcggucccuaacggaaccauuguuaagacaaucaccaaugaucaaauugaggugacaaacgcuaccgaacuggugcagucuagcuccacaggcgggaucugcgacucuccgcaccagauccuugauggagagaauuguacccugauugacgcccuccugggcgauccccagugcgacggguuucaaaacaaaaagugggaucuguucgucgaaagaagcaaagccuauuccaauuguuacccuuaugacgugcccgaucaugcuucucuccggagccugguugccuccagcggaacgcuugaguuuaacaaugaaucuuucgacuggaccggcgugacacagaacggcaccuccagcgcuugcaagcgcagaucuaauaaguccuuuuucagccggcugaacuggcucacacaccugaaauacaaguauccugcccuuaaugucaccaugcccaacaaugagaaauuugauaagcuguacaucuggggagugcaucacccugggacggacucugaucagauuucccucuaugcgcaggccagcggccgcaucacaguuuccaccaaaagaucucaacagacagugauuccgaacaucgggagccggccccgcgucagagacguguccagccggauuucuaucuacuggaccaucgugaagccuggagacauucugcugaucaacuccaccggcaaucucauugcuccccgcggguacuucaagaucagaagcggaaaaucuagcauuaugcgguccgaugccccuaucggcaaguguaacucugagugcaucacacccaauggcagcauuccgaacgacaaaccuuuucagaaugucaaccgcaucacguauggggcuugucccagauacguuaagcagaauacccugaaacuugccacaggaaugcggaacgugccugaaaagcaaacccgcggcauuuucggggcgaucgccggauuuauugagaauggcugggaagggaugguggauggaugguauggcuucagacaccagaacuccgagggcacagggcaggcugccgaccugaaaagcacccaagcugccaucaaucagaucaacggaaagcucaaucggcugauuggcaagacgaacgagaaauuucaucagaucgaaaaggaguucucugaagucgaggggcgcauucaggaucuugaaaaauacguggaggacacaaagaucgaucugugguccuauaaugccgagcuccugguugcucuggaaaaccaacacaccauugaccucaccgauagcgagaugaacaaacuguucgaaagaacaaagaagcagcuucgggagaaugcggaagacaugggaaacggcugcuuuaaaaucuaccauaagugugauaaugccugcauugggucuaucagaaacggcaccuaugaccacgacguguaccgcgaugaggcucugaauaaccgguuccagaucaaaggagucgagcucaaguccggcuacaaagacuggauucuguggaucagcuuugccauuuccugcuuccuucuguguguggcccuccugggguuuaucaugugggcuugccagaagggaaauauuagauguaacguuugcaucuga

SEQ ID NO: 193120 - RNA, 1701 nt, Artificial Sequence; identical to SEQ ID NO: 192588
  derived and/or modified CDS sequence (opt5) from hemagglutinin__InfluenzaA__ABG48214

SEQ ID NO: 193121 - RNA, 1701 nt, Artificial Sequence; identical to SEQ ID NO: 192588
  derived and/or modified CDS sequence (opt5) from hemagglutinin__InfluenzaA__ABG48236

SEQ ID NO: 193122 - RNA, 1701 nt, Artificial Sequence
  derived and/or modified CDS sequence (opt5) from hemagglutinin__InfluenzaA__ABG48247
augaagaccaucauugcccugagcuacauccucugccugguguucgcucagaaacuucccggcaacgacaauaacacagccacgcugugucucgggcaccaugcggucccuaauggaaccauuguuaagacaaucaccaacgaucaaauugaggugacaaaugcuaccgaacuggugcaguccucuagcacaggcgggaucugcgacuccccgcaccagauccuugauggagagaacuguacccugauugacgcccuccugggcgauccccagugcgacggguuucaaaauaaaaagugggaucuguucgucgaaagaucuaaagccuauagcaacuguuacccuuaugacgugcccgaucaugcuucccuccggucucugguugccagcuccggaacgcuugaguuuaauaacgaaucuuucgacuggaccggcgugacacagaauggcaccucuuccgcuugcaagcgcagaagcaacaagagcuuuuucucccggcugaauuggcucacacaccugaaauacaaguauccugcccuuaacgucaccaugcccaauaacgagaaauuugauaagcuguacaucuggggagugcaucacccugggacggacagcgaucagauuucucucuaugcgcaggccuccggccgcaucacaguuagcaccaaaagaucccaacagacagugauuccgaacaucgggucucggccccgcgucagagacgugagcucccggauuagcaucuacuggaccaucgugaagccuggagacauucugcugaucaauucuaccggcaaccucauugcuccccgcggguacuucaagaucagauccggaaaaagcucuauuaugcggagcgaugccccuaucggcaaguguaauuccgagugcaucacacccaacggcucuauuccgaaugacaaaccuuuucagaacgucaaucgcaucacguauggggcuugucccagauacguuaagcagaacacccugaaacuugccacaggaaugcggaaugugccugaaaagcaaacccgcggcauuuucggggcgaucgccggauuuauugagaacggcugggaagggaugguggauggaugguauggcuucagacaccagaauagcgagggcacagggcaggcugccgaccugaaauccacccaagcugccaucaaccagaucaauggaaagcucaaccggcugauuggcaagacgaaugagaaauuucaucagaucgaaaaggaguucagcgaagucgaggggcgcauucaggaucuugaaaaauacguggaggacacaaagaucgaucuguggucuuauaacgccgagcuccugguugcucuggaaaaccaacacaccauugaccucaccgauuccgagaugaauaaacuguucgaaagaacaaagaagcagcuucgggagaacgcggaagacaugggaaauggcugcuuuaaaaucuaccauaagugugauaacgccugcauugggagcaucagaaauggcaccuaugaccacgacguguaccgcgaugaggcucugaacaaucgguuccagaucaaaggagucgagcucaagucuggcuacaaagacuggauucuguggaucuccuuugccauuagcugcuuccuucuguguguggcccuccugggguuuaucaugugggcuugccagaagggaaacauuagauguaauaucugcaucuga

SEQ ID NO: 193123 - RNA, 1701 nt, Artificial Sequence
  derived and/or modified CDS sequence (opt5) from hemagglutinin__InfluenzaA__ABG48269
augaagaccaucauugcccugagcuacauccucugccugguguucgcucagaaacuucccggcaacgacaauuccacagccacgcugugucucgggcaccaugcggucccuaacggaaccauuguuaagacaaucaccaaugaucaaauugaggugacaaacgcuaccgaacuggugcagucuagcccgacaggcgggaucugcgacucuccccaccagauccuugauggagagaauuguacccugauugacgcccuccugggcgauccucagugcgacggguuucaaaacaaaaagugggaucuguucgucgaaagaucuaaagcccauagcaauuguuaucccuacgacgugccugauuaugcuucccuccggucucugguugccagcuccggaacgcuugaguuuaacaaugagagcuucaacuggaccggcgugacacagaauggcaccucuuccgcuugcaagcgcagaagcaacaaguccuuuuucucccggcugaauuggcucacacaccugaaauuuaaguaccccgcccuuaacgucaccaugccuaauaacgaaaaauucgacaagcuguauaucuggggagugcaucacccggggacggauaacgaccagauuagccucuacgcgcaggccucuggccgcaucacaguuuccaccaaaagaagccaacagacagugauucccaauaucgggucccggccucgcgucagagaugugcccucucggauuagcaucuauuggaccaucgugaagccuggagacauucugcugaucaacuccaccggcaaucucauugcuccccgcggguacuuuaagaucagaagcggaaaaucuuccauuaugcggagcgacgccccgaucggcaaguguaacucugagugcaucacaccuaauggcagcauucccaacgauaaaccuuuccagaaugucaaccgcaucacguacggggcuugucccagauauguuaagcagaauacccugaaacuugccacaggaaugcggaacgugcccgaaaagcaaacccgcggcauuuuuggggcgaucgccggauucauugagaauggcugggaagggaugguggacggaugguacggcuuuagacaccagaacuccgagggcacagggcaggcugccgaucugaaaucuacccaagcugccaucaaucagaucaacggaaagcucaaucggcugauuggcaagacgaacgagaaauuccaucagaucgaaaaggaguucagcgaagucgaggggcgcauucaggaccuugaaaaauauguggaggauacaaagaucgaccugugguccuacaacgccgagcuccugguugcucuggaaaaucaacacaccauugaucucaccgacagcgagaugaacaaacuguuugaaagaacaaagaagcagcuucgggagaaugcggaagauaugggaaacggcugcuucaaaaucuaucauaagugugacaaugccugcauugggucuaucagaaacggcaccuacgaucacgacguguaucgcgacgaggcucugaauaaccgguuucagaucaaaggagucgagcucaaguccggcuacaaagauuggauucuguggaucagcuucgccauuucuugcuuucuucuguguguggcccuccugggguucaucaugugggcuugccagaagggaaauauuagauguaacaucugcaucuga

SEQ ID NO: 193124 - RNA, 1701 nt, Artificial Sequence
  derived and/or modified CDS sequence (opt5) from hemagglutinin__InfluenzaA__ABG48291
augaagaccaucauugcccugagcuacauccucugccugguguucgcucagaaacuucccggcaacgacaauuccacagccacgcugugucucgggcaccaugcggucccuaacggaacccugguuaagacaauuaccaaugaucaaaucgaggugacaaacgcuaccgaacuugugcagucuagcuccacaggcagaauuugcgacucuccgcaccggauccuggaugggaaaaauuguacccucaucgacgcccugcugggagauccccauugcgacggcuuucagaacaaggagugggaucucuucgucgaacgcagcaaagccuauuccaauuguuacccuuaugacgugcccgauuacgcuucucugagaagccuuguugccuccagcgggacgcuggaguuuauuaacgaagacuucaauuggaccggaguggcucaggauggcggcucuuaugccugcaagcggggguccgucaacagcuuuuucucucgccucaauuggcugcacaaguccgaguacaaauauccugcgcuuaacgugagcaugcccaauaacggaaaguuuaauaaacuguacaucuggggcguucaucacccuucuacagacuccgaucaaaccagccucuacgugagagccuccgggcgggucacagugucuaccaagcgcagccagcagacggugacaccgaacauuggauccagacccuggguccggggccugagcucucgcaucuccauuuauuggaccaucguuaaaccuggggacauucugcucaucaacagcacaggaaaucugaucgcucccagaggcuacuucaagauucggaacggcaagucuagcaucaugcgcuccgacgccccuauugggaccuguucuuuugagugcaucacccccaauggaagcauuccgaacgauaaaccuuuccagaaugugaacagaaucacauauggcgcuuguccccgguacgugaagcaaaauacgcuuaaacuggccaccgggaugcgcaacgucccugaaaagcagacaagaggaaucuuuggcgcgauugccggguucaucgagaauggaugggaaggcaugguggacggcugguauggguuucggcaccagaacuccgagggaaccggccaggcugccgaucucaaaagcacacaagcugccauugaccagaucaaugggaagcugaacagacuuauugagaaaaccaaugaaaaguuccaucagaucgagaaggaguucucugaaguugaaggacgcauccaagaucuggagaaauacguggaggacacgaagauugaucucugguccuauaacgccgaacugcuggucgcucucgagaaucagcacacaaucgaccugaccgauagcgaaaugaacaaacuuuuugagaagacccggaaacagcugagagaaaacgcggaggacaugggcaaugggugcuucaagauuuaccauaagugugauaacgccugcaucggcucuauucgcaauggaacauacgaccacgacguguaucgggaugaggcucucaacaauagauuucagaucaaaggcguugaacugaaguccggguacaaagacuggauucuuuggaucagcuucgccaucuccugcuuucugcucugugugguccugcugggauucauuaugugggccugccaaaagggcaacauccgcuguaauauuugcaucuga

SEQ ID NO: 193125 - RNA, 1701 nt, Artificial Sequence
  derived and/or modified CDS sequence (opt5) from hemagglutinin__InfluenzaA__ABG48335
augaagaccaucauugcccugagcuacauccucugccugguguucgcucagaaacuucccggcaacgacaauuccacagccacgcugugucucgggcaccaugcggucccuaacggaacccugguuaagacaauuaccaaugaucaaaucgaggugacaaacgcuaccgaacuugugcagucuagcuccacaggcagaauuugcgacucuccgcaccggauccuggaugggaaaaauuguacccucaucgacgcccugcugggagauccccauugcgacggcuuucagaacaaggagugggaucucuucgucgaacgcagcaaagccuauuccaauuguuacccuuaugacgugcccgauuacgcuucucugagaagccuuguugccuccagcgggacgcuggaguuuauuaacgaagacuucaauuggaccggaguggcucaggauggcaagucuuaugccugcaagcggggcuccgucaacagcuuuuucucucgccucaauuggcugcacaaacuugaguacaaguauccugcgcugaacgugacaaugcccaauaacgggaaauuugacaagcucuacaucuggggaguucaucacccuuccaccgauagcgaccaaacaucucuguacgugagagccuccggccgggucaccgugagcacgaaacgcucccagcagacagugauuccgaauaucgggucuagacccuggguccggggacugagcucccgcauuagcaucuauuggaccauuguuaagccuggcgacauccuccugaucaacucuacagggaaccuuauugcucccagaggauacuucaagauccggaauggcaaauccagcauuaugcgcucugaugccccuaucggcaacuguagcuccgagugcauuacccccaaugggucuaucccgaacgacaagccuuuucagaaugugaacagaaucaccuauggagcuuguccccgguacgugaaacaaaauacacugaagcucgccacgggcaugcgcaacgucccugaaaaacagaccagagggauuuucggagcgaucgccggcuuuauugagaaugggugggaaggaaugguggauggcugguauggcuuccggcaccagaacagcgaggggacaggacaggcugccgaccugaaguccacccaagcugccaucgaucagauuaauggcaaacuuaacagacugaucgagaagacaaaugaaaaguuucaucagaucgagaaagaguucagcgaaguugaagggcgcauucaagaccucgagaaguacguggaggauaccaaaaucgaccuguggucuuauaacgccgaacugcucgucgcucuggagaaucagcacacgauugaucuuacagacuccgaaaugaacaagcuguucgagcggaccagaaaacagcuccgcgaaaacgcggaggauaugggaaauggcugcuuuaagaucuaccauaagugugacaacgccugcauugggagcauccggaauggcaccuacgaccacgauguguauagagacgaggcucugaacaaucgcuuccagauuaaaggaguugaacuuaagucuggcuacaaagauuggauccuguggaucuccuuugccauuagcugcuuccuccugugugugguccugcucggguuuaucaugugggccugccaaaagggaaacauucgguguaauaucugcauuuga

SEQ ID NO: 193126 - RNA, 1701 nt, Artificial Sequence
  derived and/or modified CDS sequence (opt5) from hemagglutinin__InfluenzaA__ABG48346
augaagaccaucauugcccugagcuacauccucugccugguguucgcucagaaacuucccggcaacgacaauuccacagccacgcugugucucgggcaccaugcggucccuaacggaacccugguuaagacaauuaccaaugaucaaaucgaggugacaaacgcuaccgaacuugugcagucuagcuccacaggcagaauuugcgacucuccgcaccggauccuggaugggaaaaauuguacccucaucgacgcccugcugggagauccccauugcgacggcuuucagaacaaggagugggaucucuucgucgaacgcaauaaagccuauagcaacuguuacccuuaugacgugcccgauuacgcuucccugagaucucuuguugccagcuccgggacgcuggaguuuauuaaugaagacuucaacuggaccggaguggcucaggauggcaagagcuaugccugcaagcggggcucugucaauuccuuuuucagccgccucaacuggcugcacaaacuugaguacaaguauccugcgcugaaugugacaaugcccaacaaugggaaauuugacaagcucuacaucuggggaguucaucacccuucuaccgauuccgaccaaacaagccuguacgugagagccucuggccgggucaccguguccacgaaacgcagccagcagacagugauuccgaacaucggguccagacccuggguccggggacugucuagccgcauuuccaucuauuggaccauuguuaagccuggcgacauccuccugaucaacagcacagggaaucuuauugcucccagaggauacuucaagauccggaacggcaaaucuuccauuaugcgcagcgaugccccuaucggcaauuguucuagcgagugcauuacccccaacggguccaucccgaaugacagaccuuuucagaacgugaaucggaucaccuauggagcuuguccccgcuacgugaagcaaaacacacugaaacucgccacgggcaugagaaaugucccugaaaagcagacccgggggauuuucggagcgaucgccggcuuuauugagaacgggugggaaggaaugguggauggcugguauggcuucagacaccaaaauucugaggggacaggacaggcugccgaccugaaaagcacccaggcugccaucgaucagauuaacggcaaacuuaaucgccugaucgagaagacaaacgaaaaguuucaucagaucgagaaggaguucuccgaaguugaagggcggauucaagaccucgagaaauacguggaggauaccaagaucgaccuguggagcuauaaugccgaacugcucgucgcucuggagaaccagcacacgauugaucuuacagacucugaaaugaacaaacuguucgagagaacccgcaagcagcuccgggaaaaugcggaggauaugggaaacggcugcuuuaaaaucuaccauaagugugacaaugccugcauuggguccaucagaaacggcaccuacgaccacgauguguaucgcgacgaggcucugaauaaccgguuccagauuaagggaguugaacuuaaaagcggcuacaaggauuggauccuguggaucucuuuugccauuuccugcuuccuccugugugugguccugcucggguuuaucaugugggccugccaaaaaggaaauauuagauguaacaucugcauuuga

SEQ ID NO: 193127 - RNA, 1701 nt, Artificial Sequence; identical to SEQ ID NO: 193125
  derived and/or modified CDS sequence (opt5) from hemagglutinin__InfluenzaA__ABG48357

SEQ ID NO: 193128 - RNA, 1701 nt, Artificial Sequence
  derived and/or modified CDS sequence (opt5) from hemagglutinin__InfluenzaA__ABG48368
augaagaccaucauugcccugagcuacauccucugccugguguucgcucagaaacuucccggcaacgacaauuccacagccacgcugugucucgggcaccaugcggucccuaacggaacccugguuaagacaauuaccaaugaucaaaucgaggugacaaacgcuaccgaacuugugcagucuagcuccacaggcagaauuugcgacucuccgcaccggauccuggaugggaaaaauuguacccucaucgacgcccugcugggagauccccauugcgacggcuuucagaacaaggagugggaucucuucgucgaacgcagcaaagccuauuccaauuguuacccuuaugacgugcccgauuacgcuucucugagaagccuuguugccuccagcgggacgcuggaguuuauuaacgaagacuucaauuggaccggaguggcucaggauggcaagucuuaugccugcaagcggggcuccgucaacagcuuuuucucucgccucaauuggcugcacaaacuugaguacaaguauccugcgcugaacgugacaaugcccaauaacgggaaauuugacaagcucuacaucuggggaguucaucacccuuccaccgauagcgaccaaacaucucuguacgugagagccuccggccgggucaccgugagcacgaaacgcucccagcagacagugauuccgaauaucgggucuagacccuggguccggggacugagcucccgcauuagcaucuauuggaccauuguuaagccuggcgacauccuccugaucaacucuacagggaaccuuauugcucccagaggauacuucaagauccggaauggcaaauccagcauuaugcgcucugaugccccuaucggcaacuguagcuccgagugcauuacccccaaugggucuaucccgaacgacaagccuuuucagaaugugaacagaaucaccuauggagcuuguccccgguacgugaaacaaaauacacugaagcucgccacgggcaugcgcaacgucccugaaaaacagaccagagggauuuucggagcgaucgccggcuuuauugagaaugggugggaaggaaugguggauggcugguauggcuuccggcaccagaacagcgaggggacaggacaggcugccgaccugaaguccacccaagcugccaucgaucagauuaauggcaaacuuaacagacugaucgagaagacaaaugaaaaguuucaucagaucgagaaagaguucagcgaaguugaagggcgcauucaagaccucgagaaguacguggaggauaccaaaaucgaccuguggucuuauaacgccgaacugcucgucgcucuggagaaucagcacacgauugaucuuacagacuccgaaaugaacaagcuguucgagcggaccagaaaacagcuccgcgaaaacgcggaggauaugggaaauggcugcuuuaagguguaccauaagugugacaacgccugcaucgagagcauucggaaugggaccuacgaccacgauguuuauagagacgaagcucugaacaaucgcuuccagaucaaaggcguggagcuuaagucuggauacaaagauuggauucuguggaucuccuuugccaucagcugcuuccuccugugugucgugcugcucggcuuuauuaugugggccugccaaaaggggaacauccgguguaauauuugcaucuga

SEQ ID NO: 193129 - RNA, 1701 nt, Artificial Sequence; identical to SEQ ID NO: 192979
  derived and/or modified CDS sequence (opt5) from hemagglutinin__InfluenzaA__ABG67135

SEQ ID NO: 193130 - RNA, 1701 nt, Artificial Sequence; identical to SEQ ID NO: 192855
  derived and/or modified CDS sequence (opt5) from hemagglutinin__InfluenzaA__ABG67146

SEQ ID NO: 193131 - RNA, 1701 nt, Artificial Sequence
  derived and/or modified CDS sequence (opt5) from hemagglutinin__InfluenzaA__ABG67157
augaagaccaucauugcccugagcuacauccucugccugguguucgcucagaaacuucccggcaacgacaauuccacagccacgcugugucucgggcaccaugcggucccuaacggaacccugguuaagacaauuaccaaugaucaaaucgaggugacaaacgcuaccgaacuugugcagucuagcccgacaggcagaauuugcaauucuccccaccggaucaucgacgggaaaaacuguacccugauugaugcccuccugggagacccucauugcgauggcuuucagaauaaggagugggaccuguucgucgaacgcuccaaagccuauagcaacuguuaccccuaugaugugccugacuacgcuucccucagaucucugguugccagcuccgggacgcuugaguuuaucaaugaaaacuucaauuggaccggaguggcucaggauggcaagagcuaugccugcaagcggggcucugucaacuccuuuuucagccgccugaauuggcuccacaaacuggaguacaaguaucccgcgcuuaacgugacaaugccuaauaacgggaaauuugacaagcuguacauuuggggaguucaucacccgucuaccgauuccgaccaaacaagccucuacgugagagccucuggccgggucaccguguccacgaaacgcagccagcagacagugauccccgauauuggguauagaccuuggguccggggacuguccucucgcaucagcauuuacuggaccaucguuaagcccggcgacauccugcucauuaacuccacagggaaucugaucgcuccuagaggauauuucaaacuucggaacggcaagagcucuauuaugcgcuccgacgcccccaucggcaauuguagcucugagugcauuaccccgaacgggagcaucccuaaugauaagcccuuucagaacgugaauagaaucaccuacggagcuuguccucgguauauuaaacaaaacacacugaagcucgccacgggcaugcgcaaugugcccgaaaaacagaccagagggaucuucggagcgauugccggcuuuaucgagaacgggugggaaggaauggucgacggcugguacggcuuccggcaccaaaauuccgaggggacaggacaggcugccgaucugaagucuacccaggcugccauugaccagaucaacggcaaacuuaauagacugguggagaagacaaacgaaaaguuucaucagaucgagaaagaguucagcgaaguugaagggcgcauucaagaucucgagaaguauguggaggacaccaaaaucgaucugugguccuacaaugccgaacugcucgucgcucuggagaaccagcacacgauugaccuuacagauagcgaaaugaacaagcuguucgagcggaccaaaaagcagcucagagaaaaugcggaggacaugggaaacggcugcuuuaagaucuaccauaaaugugauaaugccugcauugggucuauccgcaacggcaccuaugaccacgacguguaccgggaugaggcucugaauaacagauuccagauuaagggaguugaacuuaaauccggcuauaaggacuggauccuguggaucagcuuugccauuucuugcuuccuccugugugugguccugcucggguuuaucaugugggccugccaaaaaggaaauauucgcuguaacaucugcauuuga

SEQ ID NO: 193132 - RNA, 1701 nt, Artificial Sequence; identical to SEQ ID NO: 193056
  derived and/or modified CDS sequence (opt5) from hemagglutinin__InfluenzaA__ABG67168

SEQ ID NO: 193133 - RNA, 1701 nt, Artificial Sequence; identical to SEQ ID NO: 193056
  derived and/or modified CDS sequence (opt5) from hemagglutinin__InfluenzaA__ABG67179

SEQ ID NO: 193134 - RNA, 1701 nt, Artificial Sequence
  derived and/or modified CDS sequence (opt5) from hemagglutinin__InfluenzaA__ABG67190
augaagaccaucauugcccugagcuacauccucugccugguguucgcucagaaacuucccggcaacgacaauuccacagccacgcugugucucgggcaccaugcggucccuaacggaacccugguuaagacaauuaccaaugaucaaaucgaggugacaaacgcuaccgaacuugugcagucuuuuccgacaggcagaauuugcgacagcccccaccggauccuggaugggaaaaauuguacccucaucgacgcccugcugggagauccucauugcgacggcuuccagaacaaggagugggaucucuuugucgaacgcuccaaagccuauucuaauuguuaccccuaugacgugccugauuacgcuagccugagaucccuuguugccucuagcgggacgcuggaguucaccaacgaaaauuuuaacuggacaggaguggcucaggacggcaaguccuaugccugcaagcggggcagcgucaauucuuucuuuucccgccucaacuggcugcacaaacuugaguacaaguaucccgcgcugaaugugaccaugccuaacaaugggaaauucgauaagcucuacauuuggggaguucaucacccgagcacagacucugaucaaaccucccuguacgugagagccagcggcaaagucacggugucuacaaagcggucccagcagaccgugauccccgacauuggguaucgcccuugggucagaggacugagcucccggaucucuauuuacuggacaaucguuaagcccggcgacauucuccugaucaacagcaccgggaaccuuaucgcuccucgcggauauuuuaaaauuagaaauggcaaguccagcaucaugcggucugaugcccccauuggcaacuguuccagcgagugcaucaccccgaaugggucuauuccuaacgacaaacccuuccagaaugugaaccgcaucacauacggagcuuguccuagauaugugaagcaaaauacgcugaaacucgccaccggcaugcggaacguccccgaaaagcagacacgcgggaucuuuggagcgauugccggcuucaucgagaaugggugggaaggaaugguggauggcugguacggcuuuagacaccagaacagcgaggggaccggacaggcugccgaccugaaauccacacaagcugccauugaucagaucaauggcaaacuuaaccggcugguugagaagaccaaugaaaaguuccaucagauugagaaggaguucucugaaguggaagggagaauccaagaccucgagaaauaugucgaggauacgaagaucgaccuguggagcuacaacgccgaacugcucguggcucuggagaaucagcacacaauugaucuuaccgacuccgaaaugaacaaacuguuugagcgcacccggaagcagcucagagaaaacgcggaggauaugggaaauggcugcuucaagaucuaccauaaaugugacaacgccugcauugggagcauccgcaauggcacauaugaccacgauguuuaccgggacgaggcucugaacaauagauuucagauuaagggaguggaacuuaaaucuggcuauaaggauuggauccuguggauuuccuucgccaucagcugcuuucuccugugugucgugcugcucggguucaucaugugggccugccaaaaaggaaacauucgcuguaauaucugcauuuga

SEQ ID NO: 193135 - RNA, 1701 nt, Artificial Sequence
  derived and/or modified CDS sequence (opt5) from hemagglutinin__InfluenzaA__ABG67212
augaagaccaucauugcccugagcuacauccucugccugguguucgcucagaaacuucccggcaacgacaauuccacagccacgcugugucucgggcaccaugcggucccuaacggaacccugguuaagacaauuaccaaugaucaaaucgaggugacaaacgcuaccgaacuugugcagucuagcuccacaggcagaauuugcgacucuccgcaccggauccuggaugggaaaaauuguacccucaucgacgcccugcugggagauccccauugcgacggcuuucagaacaaggagugggaucucuucgucgaacgcagcaaagccuauuccaauuguuacccuuaugacgugcccgauuacgcuucucugagaagccuuguugccuccagcgggacgcuggaguuuauuaacgaagacuucaauuggaccggaguggcucaggauggcaagucuuaugccugcaagcggggcuccgucaacagcuuuuucucucgccucaauuggcugcacaaacuugaguacagauauccugcgcugaacgugacaaugcccaauaacgggaaguuugacaaacucuacaucuggggaguucaucacccuuccaccgauagcgaccaaacaucucuguacgugcgggccuccggccgcgucaccgugagcacgaagagaucccagcagacagugauuccgaauaucggguuccggcccuggguccgcggacugucuagcagaauuuccaucuauuggaccauuguuaaaccuggcgacauccuccugaucaacagcacagggaaccuuauugcuccccggggauacuuuaagauccgcaauggcaagucuuccauuaugagaagcgaugccccuaucggcaacuguucuagcgagugcauuacccccaauggguccaucccgaacgacaaaccuuuccagaaugugaaccggaucaccuauggagcuuguccccgcuacgugaagcaaaauacacugaaacucgccacgggcaugagaaacgucccugaaaagcagacccgggggauuuuuggagcgaucgccggcuucauugagaaugggugggaaggaaugguggauggcugguauggcuuuagacaccagaacucugaggggacaggacaggcugccgaccugaaaagcacccaagcugccaucgaucagauuaauggcaaacuuaaccgccugaucgagaagacaaaugaaaaguuccaucagaucgagaaggaguucuccgaaguugaagggcggauucaagaccucgagaaauacguggaggauaccaagaucgaccuguggagcuauaacgccggacugcucgucgcucuggaaaaucagcacacgauugaucuuacagacucugagaugaacaaacuguuugaaagaacccgcaagcagcuccgggagaacgcggaagauaugggcaaugggugcuucaaaaucuaccauaagugugacaacgccugcauuggcuccaucagaaauggaaccuacgaccacgauguguaucgcgacgaggcucugaacaaucgguuucagauuaagggcguugagcuuaaaagcggguacaaggauuggauccuguggaucucuuucgccauuuccugcuuucuccugugugugguccugcucggauucaucaugugggccugccaaaaaggcaacauuagauguaauaucugcauuuga

SEQ ID NO: 193136 - RNA, 1701 nt, Artificial Sequence; identical to SEQ ID NO: 193096
  derived and/or modified CDS sequence (opt5) from hemagglutinin__InfluenzaA__ABG67223

SEQ ID NO: 193137 - RNA, 1701 nt, Artificial Sequence
  derived and/or modified CDS sequence (opt5) from hemagglutinin__InfluenzaA__ABG67234
augaagaccaucauugcccugagcuacauccucugccugguguucgcucagaaacuucccggcgacgauaacuccacagccacgcugugucucgggcaccaugcggucccuaauggaacccugguuaagacaauuaccaacgaccaaaucgaggugacaaaugcuaccgaacuugugcagucuagcuccacaggcagaauuugcgauucuccgcaccggauccuggacgggaaaaacuguacccucaucgaugcccugcugggagacccccauugcgauggcuuucagaauaaggagugggaccucuucgucgaacgcagcaaagccuauuccaacuguuacccuuaugaugugcccgacuacgcuucucugagaagccuuguugccuccagcgggacgcuggaguuuauuaaugaagauuucaacuggaccggaguggcucaggacggcaagucuuaugccugcaagcggggcuccgucaauagcuuuuucucucgccucaacuggcugcacaaacuugaguacaaguauccugcgcugaaugugacaaugcccaacaaugggaaauuugauaagcucuacaucuggggaguucaucacccuuccaccgacagcgaccaaacaucucuguacgugagagccuccggccgggucaccgugagcacgaaacgcucccagcagacagugauuccgaacaucggguucagacccuggguccggggacugucuagccgcauuuccaucuauuggaccauuguugagccuggcgauauccuccugaucaauagcacagggaaccuuauugcucccagaggauacuuuaagauccggaacggcaagucuuccauuaugcgcagcgacgccccuaucggcaauuguucuagcgaaugcauuacccccaacggguccaucccgaaugauaaaccuuuccagaacgugaauagaaucaccuauggagcuuguccccgguacgugaagcaaaacacacugaaacucgccacgggcaugcgcaaugucccugagaagcagaccagagggauuuuuggagcgaucgccggcuucauugaaaacgggugggagggaaugguggacggcugguauggcuuucggcaccaaaauucugaggggacaggacaggcugccgaucugaaaagcacccaggcugccaucgaccagauuaacggcaaacuuaauagacugaucgaaaagacaaacgagaaguuccaucagaucgaaaaggaguucuccgaaguugaggggcgcauucaagaucucgagaaauacguggaagacaccaagaucgaucuguggagcuauaaugccggacugcucgucgcucuggagaaccagcacacgauugaccuuacagauucugaaaugaauaaacuguuugagcggaccagaaagcagcuccgcgaaaacgcggaggacaugggcaacgggugcuucaaaaucuaccauaagugugacaaugccugcauuggcuccauccggaacggaaccuacgaucacgacguguauagagaugaggcucugaauaaccgcuuucagauuaagggcguugaacuuaaaagcggguacaaggacuggauccuguggaucucuuucgccauuuccugcuuucuccugugugugguccugcucggauucaucaugugggccugccaaaaaggcaauauucgguguaacaucugcauuuga

SEQ ID NO: 193138 - RNA, 1701 nt, Artificial Sequence
  derived and/or modified CDS sequence (opt5) from hemagglutinin__InfluenzaA__ABG67245
augaagaccaucauugcccugagcuacauccucugccugguguucgcucagaaacuucccggcaacgacaauuccacagccacgcugugucucgggcaccaugcggucccuaacggaacccugguuaagacaauuaccaaugaucaaaucgaggugacaaacgcuaccgaacuugugcagucuagcuccacaggcagaauuugcgacucuccgcaccggauccuggaugggaaaaauuguacccucaucgacgcccugcugggagauccccauugcgacggcuuucagaacaaggagugggaucucuucgucgaacgcagcaaagccuauuccaauuguuacccuuaugacgugcccgauuacgcuucucugagaagccuuguugccuccagcgggacgcuggaguuuauuaacgaagacuucaauuggaccggaguggcucaggauggcaagucuuaugccugcaagcggggcuccgucaacagcuuuuucucucgccucaauuggcugcacaaacuugaguacaaguauccugcgcugaacgugacaaugcccaauaacgggaaauuugacaagcucuacaucuggggaguucaucacccuuccaccgauagcgaccaaacaucucuguacgugagagccuccggccgggucaccgugagcacgaaacgcucccagcagacagugauuccgaauaucggguucagacccuggguccggggacugucuagccgcauuuccaucuauuggaccauuguuaagccuggcgacauccuccugaucaacagcacagggaaccuuauugcucccagaggauacuuuaagauccggaauggcaaaucuuccauuaugcgcagcgaugccccuaucggcaacuguucuagcgagugcauuacccccaauggguccaucccgaacgacaagccuuuccagaaugugaacagaaucaccuauggagcuuguccccgguacgugaaacaaaauacacugaagcucgccacgggcaugcgcaacgucccugaaaaacagaccagagggauuuuuggagcgaucgccggcuucauugagaaugggugggaaggaaugguggauggcugguauggcuuucggcaccagaacucugaggggacaggacaggcugccgaccuuaagagcacccaagcugccaucgaucagauugacggcaaacugaauagacugaucgagaagacaaacgaaaaguuccaucagaucgagaaagaguucuccgaaguugaagggcgcauucaagaucucgagaaguacguggaggacaccaaaaucgaucuguggagcuauaaugccggacugcucgucgcucuggaaaaccagcacacgauugaccuuacagauucugagaugaauaagcuguuugaacggaccagaaaacagcuccgcgagaacgcggaagacaugggcaacgggugcuucaagaucuaccauaagugugacaaugccugcauuggcuccauccggaacggaaccuacgaucacgacguguauagagaugaggcucugaauaaccgcuuucagauuaaaggcguugagcuuaagagcggguacaaagacuggauccuguggaucucuuucgccauuuccugcuuucuccugugugugguccugcucggauucaucaugugggccugccaaaagggcaauauucgguguaacaucugcauuuga

SEQ ID NO: 193139 - RNA, 1698 nt, Artificial Sequence; identical to SEQ ID NO: 192814
  derived and/or modified CDS sequence (opt5) from hemagglutinin__InfluenzaA__ABG67477

SEQ ID NO: 193140 - RNA, 1698 nt, Artificial Sequence; identical to SEQ ID NO: 192872
  derived and/or modified CDS sequence (opt5) from hemagglutinin__InfluenzaA__ABG67491

SEQ ID NO: 193141 - RNA, 1701 nt, Artificial Sequence
  derived and/or modified CDS sequence (opt5) from hemagglutinin__InfluenzaA__ABG67502
augaagaccaucauugcccugagcuacauccucugccugguguucgcucagaaacuucccggcaacgacaauuccacagccacgcugugucucgggcaccaugcggucccuaacggaacccugguuaagacaauuaccaaugaucaaaucgaggugacaaacgcuaccgaacuugugcagucuagcuccacaggcagaauuugcgacucuccgcaccagauccuggauggggagaauuguacccucaucgacgcccugcugggagauccccauugcgacggcuuucagaacaaagaaugggaucucuucgucgagcggagcaaggccuauuccaauuguuacccuuaugacgugucugauuacguuagccugcgcucccuuguggcuagcucugggacgcuggaauuuaacaaugaguccuucaacuggaccggagucgcccaaaauggcacaagcucugcuugcaaaagacgguccgacaagagcuuuuucucucgccucaacuggcugcaccagcuuaaguauaaauaccccgcccugaaugugaccaugccuaacaaugagaaguuugauaaacucuauauuuggggcguucaucaccccgggacagacuccgaucagaucagccuguacgcgcaggccuccggaagagugaccgucucuacgaagcggagccaacagacagugauuccuaacaucggcucccgcccgugggugagagggauuagcucucggaucuccauuuacuggaccaucgucaaacccggagacauccugcucauuaacagcacaggcaaucugaucgcuccucgcggguauuucaagauuagaucuggaaagagcuccaucaugcggucugacgcccccauuggcaaauguaacagcgaaugcaucaccccuaauggcuccauccccaacgauaagccguuucagaauguuaaccgcauuaccuacgggccuugucccagauaugugaaacagaauacacuuaagcuggcuacgggaaugcggaacgugccugagaaacaaacccgcggcaucuucggggccauugcgggauuuaucgaaaauggcugggaggggaugauggacggaugguacggcuucagacaccagaacagcgagggcacagggcaggccgcugaucucaagucuacccaagccgcuauuaaucagaucaacggaaaacugaaucggcuuaucgaaaagacaaacgagaaguuucaucagauugaaaaagaguucuccgaagucgagggcagaauccaggaccuggagaaguauguggaagauaccaaaauugaccucuggagcuacaaugccgagcugcugguugcccucgaaaaccaacacacgaucgaucugacagacucugagaugaacaaacuuuucgaacgcaccaagaagcagcugcgggagaaugcugaggauauggggaacggaugcuuuaagauuuaucauaaaugugacaaugcgugcaucggcuccauuagaaacgggaccuacgaucacgacguguaccgcgacgaagcccucaauaaccgguuccagaucaagggcgucgagcugaaaagcggauauaaggauuggauccuuuggauuuccuuugcuaucucuugcuuccugcucuguauugugcugcugggcuuuaucaugugggccugccagaaagggaauauuagauguaacaucugcaucuga

SEQ ID NO: 193142 - RNA, 1701 nt, Artificial Sequence
  derived and/or modified CDS sequence (opt5) from hemagglutinin__InfluenzaA__ABG67524
augaagaccaucauugcccugagcuacauccucugccugguguucgcucagaaacuucccggcaacgacaauuccacagccacgcugugucucgggcaccaugcggucccuaacggaacccugguuaagacaauuaccaaugaucaaaucgaggugacaaacgcuaccgaacuugugcagucuagcuccacaggcagaauuugcgacucuccgcaccagauccuggauggggagaauuguacccucaucgacgcccugcugggagauccccauugcgacggcuuucagaacaaagaaugggaucucuucgucgagcggagccgcgccuauuccaauuguuacccuuaugacgugcccgauuacguuucucugagaagccuuguggcuuccagcgggacgcuggaauuuaacaaugagucuuucaacuggaccggagucgcccaaaauggcacauccagcgcuugcaagcggcgcucugacaaauccuuuuucagcagacucaacuggcugcaccagcuuaaguauaaguacccugcccugaaugugaccaugcccaacaaugagaaauuugauaagcucuauauuuggggcguucaucacccugggacagacucugaucagaucucccuguacgcgcaggccagcggacgggugaccgucuccacgaaacgcucucaacagacagugauuccgaacaucggcagcagacccugggugcgcggggucuccagccggauuucuaucuacuggaccauuguuaagccuggagacauccugcucaucaacuccacaggcaaucugauugcucccagaggguauuucaaaauccggagcggaaagucuagcauuaugcgcuccgacgccccuaucggcaaguguaacucugaaugcauuacccccaauggcagcaucccgaacgauaaaccuuuucagaaugugaacagaaucaccuacgggcccuguccucgguaugugaagcagaauacacuuaaacuggcuacgggaaugcgcaacguccccgagaagcaaaccagaggcauuuucggggccaucgcgggauuuauugaaaauggcugggaggggaugauggacggaugguacggcuuccggcaccagaacuccgagggcacagggcaggccgcugaucucaaaagcacccaagccgcugugaaucagaucaacggaaagcugaauagacuuauugagaaaacaaacgaaaaguuucaucagaucgaaaaggaguucucugaaguugagggccgcauccaggaccuggagaaauauguggaagauaccaagauugaccucugguccuacaaugccgagcugcuggucgcccucgaaaaccaacacacgaucgaucugacagacagcgagaugaacaaacuuuucgaacggaccaagaaacagcugagagagaaugcugaggauauggggaacggaugcuuuaagauuuaucauaagugugacaaugcgugcaucggcucuauucgcaacgggaccuacgaucacgacguguaccgggacgaagcccucaauaacagauuccagaucaaaggcguugagcugaaguccggauauaaagauuggauucuuuggaucagcuuugcuaucuccugcuuccugcucuguauugugcugcugggcuuuaucaugugggccugccagaaggggaauauucgcuguaacaucugcauuuga

SEQ ID NO: 193143 - RNA, 1701 nt, Artificial Sequence; identical to SEQ ID NO: 192634
  derived and/or modified CDS sequence (opt5) from hemagglutinin__InfluenzaA__ABG67535

SEQ ID NO: 193144 - RNA, 1701 nt, Artificial Sequence; identical to SEQ ID NO: 192588
  derived and/or modified CDS sequence (opt5) from hemagglutinin__InfluenzaA__ABG67546

SEQ ID NO: 193145 - RNA, 1701 nt, Artificial Sequence
  derived and/or modified CDS sequence (opt5) from hemagglutinin__InfluenzaA__ABG67557
augaagaccaucauugcccugagcuacauccucugccugguguucgcucagaaacuucccggcaacgacaauuccacagccacgcugugucucgggcaccaugcggucccuaacggaaccauuguuaagacaaucaccaaugaucaaauugaggugacaaacgcuaccgaacuggugcagucuagcuccacaggcgggaucugcgacucuccgcaccagauccuugauggagagaauuguacccugauugacgcccuccugggcgauccccagugcgacggguuucaaaacaaaaagugggaucuguucgucgaaagaagcaaagccuauuccaauuguuacccuuaugacgugcccgaucaugcuucucuccggagccugguugccuccagcggaacgcuugaguuuaacaaugaaucuuucgacuggaccggcgugacacagaacggcaccuccagcgcuugcaagcgcagaucuaauaaguccuuuuucagccggcugaacuggcucacacaccugaaauacaaguauccugcccuuaaugucaccaugcccaacaaugagaaauuugauaagcuguacaucuggggagugcaucacccugggacggacucugaucagauuucccucuaugcgcaggccagcggccgcaucacaguuuccaccaaaagaucucaacagacagugauuccgaacaucgggagccggccccgcgucagagacguguccagccggauuucuaucuacuggaccaucgugaagccuggagacauucugcugaucaacuccaccggcaaucucauugcuccccgcggguacuucaagaucagaagcggaaaaucuagcauuaugcgguccgaugccccuaucggcaaguguaacucugagugcaucacacccaauggcagcauuccgaacgacaaaccuuuucagaaugucaaccgcaucacguauggggcuugucccagauacguuaagcagaauacccugaaacuugccacaggaaugcggaacgugccugaaaagcaaacccgcggcauuuucggggcgaucgccggauuuauugagaauggcugggaagggaugguggauggaugguauggcuucagacaccagaacuccgagggcacagggcaggcugccgaccugaaaagcacccaagcuacgaucaaucagaucaacggaaagcucaaucggcugauuggcaagacaaacgagaaauuucaucagaucgaaaaggaguucucugaagucgaggggcgcauucaggaucuugaaaaauacguggaggacaccaagaucgaucugugguccuauaaugccgagcuccugguugcccuggaaaaccaacacaccauugaccucacagauagcgagaugaacaaacuguucgaaagaaccaagaagcagcuucgggagaaugcugaagacaugggaaacggcugcuuuaaaaucuaccauaagugugauaaugcgugcauugggucuaucagaaacggcacauaugaccacgacguguaccgcgaugaggcccugaauaaccgguuccagaucaaaggagucgagcucaaguccggcuacaaagacuggauucuguggaucagcuuugcuauuuccugcuuccuucuguguguggcccuccugggguuuaucaugugggccugccagaagggaaauauuagauguaacaucugcaucuga

SEQ ID NO: 193146 - RNA, 1701 nt, Artificial Sequence; identical to SEQ ID NO: 192588
  derived and/or modified CDS sequence (opt5) from hemagglutinin__InfluenzaA__ABG67568

SEQ ID NO: 193147 - RNA, 1701 nt, Artificial Sequence; identical to SEQ ID NO: 192588
  derived and/or modified CDS sequence (opt5) from hemagglutinin__InfluenzaA__ABG67579

SEQ ID NO: 193148 - RNA, 1701 nt, Artificial Sequence; identical to SEQ ID NO: 192588
  derived and/or modified CDS sequence (opt5) from hemagglutinin__InfluenzaA__ABG67590

SEQ ID NO: 193149 - RNA, 1701 nt, Artificial Sequence; identical to SEQ ID NO: 192588
  derived and/or modified CDS sequence (opt5) from hemagglutinin__InfluenzaA__ABG67601

SEQ ID NO: 193150 - RNA, 1701 nt, Artificial Sequence; identical to SEQ ID NO: 192588
  derived and/or modified CDS sequence (opt5) from hemagglutinin__InfluenzaA__ABG67612

SEQ ID NO: 193151 - RNA, 1701 nt, Artificial Sequence; identical to SEQ ID NO: 192588
  derived and/or modified CDS sequence (opt5) from hemagglutinin__InfluenzaA__ABG67623

SEQ ID NO: 193152 - RNA, 1701 nt, Artificial Sequence
  derived and/or modified CDS sequence (opt5) from hemagglutinin__InfluenzaA__ABG67634
augaagaccaucauugcccugagcuacauccucugccugguguucgcucagaaacuucccggcaacgacaauaacacagccacgcugugucucgggcaccaugcggucccuaauggaaccauuguuaagacaaucaccaacgaucaaauugaggugacaaaugcuaccgaacuggugcaguccucuagcacaggcgggaucugcgacuccccgcaccagauccuugauggagagaacuguacccugauugacgcccuccugggcgauccccagugcgacggguuucaaaauaaaaagugggaucuguucgucgaaagaucuaaagccuauagcaacuguuacccuuaugacgugcccgaucaugcuucccuccggucucugguugccagcuccggaacgcuugaguuuaauaacgaaucuuucgacuggaccggcgugacacagaauggcaccucuuccgcuugcaagcgcagaagcaacaagagcuuuuucucccggcugaauuggcucacacaccugaaauacaaguauccugcccuuaacgucaccaugcccaauaacgagaaauuugauaagcuguacaucuggggagugcaucacccugggacggacagcgaucagauuucucucuaugcgcaggccuccggccgcaucacaguuagcaccaaaagaucccaacagacagugauuccgaacaucgggucucggccccgcgucagagacgugagcucccggauuagcaucuacuggaccaucgugaagccuggagacauucugcugaucaauucuaccggcaaccucauugcuccccgcggguacuucaagaucagauccggaaaaagcucuauuaugcggagcgaugccccuaucggcaaguguaauuccgagugcaucacacccaacggcucuauuccgaaugacaaaccuuuucagaacgucaaucgcaucacguauggggcuugucccagauacguuaagcagaacacccugaaacuugccacaggaaugcggaaugugccugaaaagcaaacccgcggcauuuucggggcgaucgccggauuuauugagaacggcugggaagggaugguggauggaugguauggcuucagacaccagaauagcgagggcacagggcaggcugccgaccugaaauccacccaagcugccaucaaccagaucaauggaaagcucaaccggcugauuggcaagacgaaugagaaauuucaucagaucgaaaaggaguucagcgaagucgaggggcgcauucaggaucuugaaaaauacguggaggacacaaagaucgaucuguggucuuauaacgccgagcuccugguugcucuggaaaaccaacacaccauugaccucaccgauuccaaaaugaauaagcuguucgagagaacaaagaaacagcuucgggaaaacgcggaggacaugggaaauggcugcuuuaagaucuaccauaaaugugauaacgccugcauugggagcaucagaaauggcaccuaugaccacgacguguaccgcgaugaagcucugaacaaucgguuccagaucaagggagucgagcucaaaucuggcuacaaggacuggauucuguggaucuccuuugccauuagcugcuuccuucuguguguggcccuccugggguuuaucaugugggcuugccagaagggaaacauuagauguaauaucugcaucuga

SEQ ID NO: 193153 - RNA, 1701 nt, Artificial Sequence; identical to SEQ ID NO: 192588
  derived and/or modified CDS sequence (opt5) from hemagglutinin__InfluenzaA__ABG67645

SEQ ID NO: 193154 - RNA, 1701 nt, Artificial Sequence
  derived and/or modified CDS sequence (opt5) from hemagglutinin__InfluenzaA__ABG67656
augaagaccaucauugcccugagcuacauccucugccugguguucgcucagaaacuucccggcaacgacaauuccacagccacgcugugucucgggcaccaugcggucccuaacggaaccauuguuaagacaaucaccaaugaucaaauugaggugacaaacgcuaccgaacuggugcagucuagcuccacaggcgggaucugcgacucuccgcaccagauccuugauggagagaauuguacccugauugacgcccuccugggcgauccccagugcgacggguuucaaaacaaaaagugggaucuguucgucgaaagaagcaaagccuauuccaauuguuacccuuaugacgugcccgaucaugcuucucuccggagccugguugccuccagcggaacgcuugaguuuaacaaugaaucuuucgacugggcuggcgugacccagaacggcacauccagcgccugcaagcgcagaucuaauaaguccuuuuucagccggcugaacuggcucacccaccugaaauacaaguauccugcgcuuaaugucacaaugcccaacaaugagaaauuugauaagcuguacaucuggggagugcaucacccugggaccgacucugaucagauuucccucuaugcccaggcuagcggccgcaucacgguuuccacaaaaagaucucaacagaccgugauuccgaacaucgggagccggccccgcgucagagacguguccagccggauuucuaucuacuggacaaucgugaagccuggagacauucugcugaucaacuccaccggcaaucucauugcuccccgcggguacuucaagaucagaagcggaaaaucuagcauuaugcgguccgaugccccuaucggcaaguguaacucugagugcaucacccccaauggcagcauuccgaacgacaaaccuuuucagaaugucaaccgcaucacauauggggccugucccagauacguuaagcagaauacgcugaaacuugcgaccggaaugcggaacgugccugaaaagcaaacacgcggcauuuucggggccaucgcuggauuuauugagaauggcugggaagggaugguggauggaugguauggcuucagacaccagaacuccgagggcaccgggcaggccgcugaccugaaaagcacacaagccgccaucaaucagaucaacggaaagcucaaucggcugauuggcaagaccaacgagaaauuucaucagaucgaaaaggaguucucugaaauugaggggagaauccaggaucuugaaaaauacgucgaggacacgaagauugaucugugguccuauaaugcugagcuccugguggcgcuggaaaaccaacacacaaucgaccucaccgauagcgagaugaacaaacuguucgaacgcaccaagaagcagcuucgggagaaugccgaagacaugggaaacggcugcuuuaaaauuuaccauaagugugauaaugcuugcaucgggucuaucagaaacggcacauaugaccacgacguuuaccgcgaugaggcccugaauaaccgguuccagauuaaaggaguggagcucaaguccggcuacaaagacuggauccuguggauuagcuuugccaucuccugcuuccuucugugugucgcucuccugggguuuauuaugugggccugccagaagggaaauaucagauguaacaucugcauuuga

SEQ ID NO: 193155 - RNA, 1701 nt, Artificial Sequence
  derived and/or modified CDS sequence (opt5) from hemagglutinin__InfluenzaA__ABG67667
augaagaccaucauugcccugagcuacauccucugccagguguucgcucaaaaacugcccggcaacgacaauuccacagccacgcuuugucuggggcaccaugcggucccuaacggaacccucguuaagacaauuaccaaugaucagaucgaggugacaaacgcuaccgaacuggugcagucuagcuccacaggcagaauuugcgacucuccgcaccggauccuugaugggaaaaauuguacccugaucgacgcccuccugggagauccccauugcgacggcuuucagaacaaggagugggaucuguucgucgaacgcagcaaagccuauuccaauuguuacccuuaugacgugcccgauuacgcuucucucagaagccugguugccuccagcgggacgcuugaguuuaccaacgaaggauucaauuggauuggcguggcucaagacggcaagucuuaugccugcaagcggggguccgucaacagcuuuuucucucgccugaauuggcuccacaaacuggaguacaaguauccugcgcuuaacgugacaaugcccaauaacgauaaauuugacaagcuguacaucuggggaguucaucacccuuccaccgauagcgaccagacaucucucuacgugcaggccuccggcagagucaccgugagcacgaaacggucccagcaaacagugauuccgaauaucgggucucgccccugggucagaggaauuagcucccggaucagcauuuauuggaccaucguuaagccuggcgacauccugcugauuaacucuacagggaaccucaucgcuccccgcggauacuucaagauuagaaauggcaaauccagcaucaugcggucugaugccccuauugacaacuguaauagcgagugcaucacccccaacggcuccaucccgaaugauaagccuuuucagaacgugaaucgcauuaccuauggggcuugucccagauacgugaaacagaacacacugaagcuggccacgggaaugcggaaugucccugaaaaacagacccgcggcaucuucggggcgauugccggauuuaucgagaacggcugggaagggaugauugacggaugguauggcuucagacaccaaaauucugagggcacagggcaggcugccgaucuuaagagcacccaggcugccaucgaccaaaucaacggaaaacucaaucggcugauugagaagacaaacgaaaaguuucaucagaucgagaaagaguucuccgaaguggaaggccgcauucaggaucuugagaaguacguugaggacaccaaaaucgaucuguggagcuauaaugccgaacuccugguggcucuggagaaccagcacacgauugaccucacagauucugaaaugaacaagcuguucgagagaacccggaaacaacuuagagaaaaugcggaggacauggggaacggaugcuuuaagaucuaccauaagugugacaaugccugcauuggcuccauccgcaacgggaccuacgaucacgacgucuaucgggaugaggcucugaauaacagauuccagaucaaaggcguggaacucaagagcggauacaaagacuggauucuguggaucucuuuugccauuuccugcuuccuucuguguguugugcuccugggcuuuaucaugugggccugccagaaggggaauauucgcuguaacaucugcaucuga

SEQ ID NO: 193156 - RNA, 1701 nt, Artificial Sequence
  derived and/or modified CDS sequence (opt5) from hemagglutinin__InfluenzaA__ABG79941
augaagaccaucauugcccugagcuacauccucugccugguguucgcucagaaacuucccggcaacgacaauuccacagccacgcugugucucgggcaccaugcggucccuaacggaacccugguuaagacaauuaccaaugaucaaaucgaggugacaaacgcuaccgaacuugugcagucuagcuccacaggcgggauuugcgacucuccgcaccagauccuggauggagagaauuguacccucaucgacgcccugcugggcgauccccauugcgacggguuucagaacaaagaaugggaucucuucgucgagagaagcaaggccuauuccaauuguuacccuuaugacgugcccgauuacgcuucucugcggagccuuguugccuccagcggaacgcuggaauuuaacaaugagucuuucaacuggaccggcguggcucaaaauggcacauccagcgccugcaaacgcagaucuaacaaguccuuuuucagccggcucaauuggcugcaccagcuuaaguauaaauacccugcgcugaacgucaccaugcccaauaacgagaaguuugacaaacucuauauuuggggagugcaucacccuucuacagauuccgaccagaucagccuguacgcccaggcuccggggcgcguuaccguguccacgaagagaucucaacagacagucauucccaacaucggcagccggccuugggugcgcgggguguccagcagaauuucuaucuacuggaccauugucaaacccggagauauccugcucaucaauuguacaggcaaccugauugccccucggggguauuucaagauccgcuccggaaagagcucuauuaugagaagcgacgcuuccaucggcaaaugcaauucugaauguauuacccccaacggcagcaucccgaaugacaagccuuuucagaacguuaaucggaucaccuacggggccugcccccgcuaugugaaacagaacacacuuaagcuggcgacgggaaugagaaaugugccugagaaacaaacccggggcauuuucggggccaucgcuggauuuauugaaaacggcugggaggggauggucgauggaugguacggcuuccgccaccaaaauuccgagggcacagggcaggccgcugaccucaagagcacccaggccgccaucaaccagauuaauggaaaacugaacagacuuaucgaaaagacaaaugagaaguuucaucagaucgaaaaagaguucucugaaguggagggccggauucaggaucuggagaaguauguugaagacaccaaaaucgaucucugguccuacaacgcugagcugcugguggcgcucgaaaaccaacacacgauugaccugacagauagcgagaugaauaaacuuuucgaaagaaccaagaagcagcugcgcgagaacgccgaggacauggggaauggauguuuuaagaucuaucauaaaugcgauaacgcuugcauuggcucuauccggaaugggaccuacgaccacgaugucuacagagacgaagcccucaacaaucgcuuccagauuaagggcguggagcugaaauccggauauaaggacuggauccuuuggaucagcuuugccauuuccuguuuccugcucugcguugugcugcugggcuuuaucaugugggcuugucagaaagggaacauucggugcucuaucuguauuuga

SEQ ID NO: 193157 - RNA, 1701 nt, Artificial Sequence; identical to SEQ ID NO: 192993
  derived and/or modified CDS sequence (opt5) from hemagglutinin__InfluenzaA__ABG79952

SEQ ID NO: 193158 - RNA, 1701 nt, Artificial Sequence; identical to SEQ ID NO: 193056
  derived and/or modified CDS sequence (opt5) from hemagglutinin__InfluenzaA__ABG79974

SEQ ID NO: 193159 - RNA, 1701 nt, Artificial Sequence; identical to SEQ ID NO: 193056
  derived and/or modified CDS sequence (opt5) from hemagglutinin__InfluenzaA__ABG79985

SEQ ID NO: 193160 - RNA, 1701 nt, Artificial Sequence
  derived and/or modified CDS sequence (opt5) from hemagglutinin__InfluenzaA__ABG79996
augaagaccaucauugcccugagcuacauccucugccugguguucgcucagaaacuucccggcaacgacaauuccacagccacgcugugucucgggcaccaugcggucccuaacggaacccugguuaagacaauuaccaaugaucaaaucgaggugacaaacgcuaccgaacuugugcagucuagcccgacaggcagaauuugcgacucuccccaccggauccuggaugggaaaaauuguacccucaucgacgcccugcugggagauccucauugcgacggcuuucagaacaaggagugggaucucuucgucgaacgcuccaaagccuauagcaauuguuaccccuaugacgugccugauuacgcuucccugagaucucuuguugccagcuccgggacgcuggaguuuaccaacgaaaauuucaacuggacaggaguggcucaggacggcaagagcuauucuugcaagcggggcuccgucaauagcuuuuucucucgccucaacuggcugcacaaacuugaguacaaguaucccgcccugaaugugaccaugccuaacaaugggaaauuugauaagcucuacauuuggggaguucaucacccguccacagacagcgaucaaaccucucuguacgugagagcguccggcaaagucacggugagcacaaagcggucccagcagaccgugauccccgacauuggguaucgcccuugggucagaggacugucuagccggaucuccauuuacuggacaaucguuaagcccggcgacauucuccugaucaacagcaccgggaaccuuaucgccccucgcggauauuucaaaauuagaaauggcaagucuuccaucaugcggagcgaugcucccauuggcaacuguucuagcgagugcaucaccccgaauggguccauuccuaacgacaaacccuuucagaaugugaaccgcaucacauacggagccuguccuagauaugugaagcaaaauacgcugaaacucgcuaccggcaugcggaacguccccgaaaagcagacacgcgggaucuucggagccauugcgggcuuuaucgagaaugggugggaaggaaugguggauggcugguacggcuucagacaccagaacucugaggggaccggacaggccgcugaccugaaaagcacacaagccgcuauugaucagaucaauggcaaacuuaaccggcugguugagaagaccaaugaaaaguuucaucagauugagaaggaguucuccgaaguggaagggagaauccaagaccucgagaaauaugucgaggauacgaagaucgaccuguggagcuacaacgccgaacugcucguggcccuggagaaucagcacacaauugaucuuaccgacucugaaaugaacaaacuguucgagcgcacccggaagcagcucagagaaaacgcugaggauaugggaaauggcugcuuuaagaucuaccauaaaugugacaacgcgugcauuggguccauccgcaauggcacauaugaccacgauguuuaccgggacgaggcccugaacaauagauuccagauuaagggaguggaacuuaaaagcggcuauaaggauuggauccuguggauuucuuuugcuaucuccugcuuccuccugugugucgugcugcucggguuuaucaugugggccugccaaaaaggaaacauucgcuguaauaucugcauuuga

SEQ ID NO: 193161 - RNA, 1701 nt, Artificial Sequence; identical to SEQ ID NO: 193056
  derived and/or modified CDS sequence (opt5) from hemagglutinin__InfluenzaA__ABG80007

SEQ ID NO: 193162 - RNA, 1701 nt, Artificial Sequence; identical to SEQ ID NO: 193056
  derived and/or modified CDS sequence (opt5) from hemagglutinin__InfluenzaA__ABG80018

SEQ ID NO: 193163 - RNA, 1701 nt, Artificial Sequence; identical to SEQ ID NO: 193061
  derived and/or modified CDS sequence (opt5) from hemagglutinin__InfluenzaA__ABG80029

SEQ ID NO: 193164 - RNA, 1701 nt, Artificial Sequence; identical to SEQ ID NO: 193061
  derived and/or modified CDS sequence (opt5) from hemagglutinin__InfluenzaA__ABG80040

SEQ ID NO: 193165 - RNA, 1701 nt, Artificial Sequence; identical to SEQ ID NO: 193056
  derived and/or modified CDS sequence (opt5) from hemagglutinin__InfluenzaA__ABG80051

SEQ ID NO: 193166 - RNA, 1701 nt, Artificial Sequence
  derived and/or modified CDS sequence (opt5) from hemagglutinin__InfluenzaA__ABG80062
augaagaccaucauugcccugagcuacauccucugccugguguucgcucagaaacuucccggcaacgacaauuccacagccacgcugugucucgggcaccaugcggucccuaacggaacccugguuaagacaauuaccaaugaucaaaucgaggugacaaacgcuaccgaacuugugcagucuagcuccacaggcagaauuugcgacucuccgcaccggauccuggaugggaaaaauuguacccucaucgacgcccugcugggagauccccauugcgacggcuuucagaacaaggagugggaucucuucgucgaacgcagcaaagccuauuccaauuguuacccuuaugacgugcccgauuacgcuucucugagaagccuuguugccuccagcgggacgcuggaguuuaccaaggaaggauucaacuggacaggcguggcucaggacggcaagucuuaugccugcaaacggggguccgucaauagcuuuuucucucgccucaacuggcugcacaaacuugaguacaaguauccugcgcugaaugugaccaugcccaacaaugauaaguuugacaaacucuacauuuggggaguucaucacccuuccacagauagcgaccaaaccucucuguacgugcaggccuccggcagagucacggugagcacaaagcggucccagcagaccgugaucccgaacauugggucucgccccugggucagaggaaucagcucccggauuagcaucuauuggacaauuguuaagccuggcgacauccugcucaucaauucuaccgggaaccugauugcuccccgcggauacuucaaaaucagaaacggcaaguccagcauuaugcggucugaugccccuaucggcaauuguaacagcgagugcauuacccccaauggguccaucccgaacgacaaaccuuuucaaaaugugaaccgcaucacauauggagcuugucccagauacgugaagcagaauacgcuuaaacuggccaccggcaugcggaacgucccugaaaagcagacacgcgggauuuucggagcgaucgccggcuuuauugagaaugggugggaaggaaugguggauggcugguauggcuucagacaccagaacucugaggggaccggacaagcugccgaccucaaaagcacacaggcugccaucgaucagauuaauggcaagcugaaccggcuuaucgagaagaccaaugaaaaauuucaucaaaucgagaaggaguucuccgaaguugaagggcgcauucaggaccuggagaaauacguggaggauacgaagaucgaccucuggagcuauaacgccgaacugcuggucgcucucgagaaucagcacacaauugaucugaccgacucugaaaugaacaaacuuuucgagagaacccggaagcagcugagagaaaacgcggaggauaugggaaauggcugcuuuaagaucuaccauaaaugugacaacgccugcauuggguccauccgcaauggcacauacgaccacgauguguaucgggacgaggcucucaacaauagauuccaaauuaagggaguugaacugaaaaccggcuacaaggauuggauccuuuggaucagcuuugccauuucuugcuuccugcucugugugguccugcugggguuuaucaugugggccugccagaaaggaaacauucgcuguaauaucugcauuuga

SEQ ID NO: 193167 - RNA, 1701 nt, Artificial Sequence
  derived and/or modified CDS sequence (opt5) from hemagglutinin__InfluenzaA__ABG80073
augaagaccaucauugcccugagcuacauccucugccugguguucgcucagaaacuucccggcaacgacaauuccacagccacgcugugucucgggcaccaugcggucccuaacggaacccugguuaagacaauuaccaaugaucaaaucgaggugacaaacgcuaccgaacuugugcagucuagcuccacaggcagaauuugcgacucuccgcaccggauccuggaugggaaaaauuguacccucaucgacgcccugcugggagaucccaacugcgacggcuuucagaauaaggagugggaucucuucgucgaacgcagcaaagccuauuccaacuguuacccuuaugacgugcccgauuacgcuucucugagaagccuuguugccuccagcgggacgcuggaguuuaccaaugaagacuucaacuggacaggaguggcucaggauggcggcucuuaugccugcaagcggggguccgucaauagcuuuuucucucgccucaacuggcugcauaaacuugaguacaaguauccugcgcugaaugugaccaugcccaacaauggaaaguuugacaaacucuacauuuggggcguucaccauccuuccacagauagcgaccaaaccucucuguacgugagagccuccgggcgggucacggugagcacaaagcgcucccagcagaccgugacaccgaacaucggaucuagacccuggguccggggccugagcucccgcauuagcaucuauuggaccauuguuaaaccuggggacauccuccugauuaacucuaccggaaaucuuaucgcucccagaggcuacuucaagauccggaacggcaaguccagcauuaugcgcucugaugccccuaucgggacauguagcuccgagugcauuacgcccaauggaucuaucccgaacgacaaaccuuuucagaaugugaacagaauuaccuauggcgcuuguccccgguacgugaagcaaaauacacugaaacucgccaccgggaugcgcaacgucccugaaaagcagacaagaggaaucuucggcgcgaucgccggguuuauugagaauggaugggaaggcaugguggauggcugguauggguuccggcaccagaacagcgagggaaccggccaggcugccgaccugaaauccacgcaagcugccaucgaucagauuaaugggaaacuuaacagacugaucgagaagacaaaugaaaaguuucaccagauugagaaggaguucagcgaaguugaaggacgcauccaagaccucgagaaauacguggaggauaccaagaucgaccuguggucuuauaacgccgaacugcucgucgcucuggagaaucagcauaccauugaucuuacagacuccgaaaugaacaaacuguucgagaagacccggaaacagcucagagaaaacgcggaggauaugggcaaugggugcuuuaagaucuaccacaagugugacaacgccugcauuggcagcauccgcaauggaacauacgaccaugauguguaucgggacgaggcucugaacaauagauuccagauuaaaggcguugaacuuaagucuggguacaaagauuggauccuguggauuuccuuugccaucagcugcuuccuccugugugugguccugcucggauuuaucaugugggccugccaaaagggcaacauucgcuguaauaucugcauuuga

SEQ ID NO: 193168 - RNA, 1701 nt, Artificial Sequence
  derived and/or modified CDS sequence (opt5) from hemagglutinin__InfluenzaA__ABG80084
augaagaccaucauugcccugagcuacauccucugccugguguucgcucagaaacuucccggcaacgacaauuccacagccacgcugugucucgggcaccaugcggucccuaacggaacccugguuaagacaauuaccaaugaucaaaucgaggugacaaacgcuaccgaacuugugcagucuagcuccacaggcagaauuugcgacucuccgcaccggauccuggaugggaaaaauuguacccucaucgacgcccugcugggagauccccauugcgacggcuuucagaacaaggagugggaucucuucgucgaacgcagcaaagccuauuccaauuguuacccuuaugacgugcccgauuacgcuucucugagaagccuuguugccuccagcgggacgcuggaguuuauuaacgaagacuucaauuggaccggaguggcucaggauggcaagucuuaugccugcaagcggggcuccgucaacagcuuuuucucucgccucaauuggcugcacaaacuugaguacaaguauccugcgcugaacgugacaaugcccaauaacgggaaauuugacaagcucuacaucuggggaguucaucacccuuccaccgauagcgaccaaacaucucuguacgugagagccuccggccgggucaccgugagcacgaaacgcucccagcagacagugauuccgaauaucggguucagacccuggguccggggacugucuagcggcauuuccaucuauuggaccauuguuaagccuggggacauccuccugaucaacagcacaggaaaccuuauugcuccccgcggcuacuuuaagaucagaaauggcaaaucuuccauuaugcggagcgaugccccuaucgggaacuguucuagcgagugcauuacccccaauggauccaucccgaacgacaagccuuuccagaaugugaaccgcaucaccuauggcgcuugucccagauacgugaaacaaaauacacugaagcucgccacggggaugcggaacgucccugaaaaacagacccgcggaauuuuuggcgcgaucgccggguucauugagaauggaugggaaggcaugguggauggcugguauggguuuagacaccagaacucugagggaacaggccaggcugccgaccuuaagagcacccaagcugccaucgaucagauuaaugggaaacugaaccggcugaucgagaagacaaaugaaaaguuccaucagaucgagaaagaguucuccgaaguugaaggacgcauucaagaccucgagaaguacguggaggauaccaaaaucgaccuguggagcuauaacgccggccugcucgucgcucuggaaaaucagcacacgauugaucuuacagacucugagaugaacaagcuguuugaaagaacccggaaacagcucagagagaacgcggaagauauggggaauggcugcuucaagaucuaccauaagugugacaacgccugcauuggauccauccgcaauggcaccuacgaccacgauauuuaucgggacgaggcucugaacaauagauuucagaucaaagggguggagcuuaagagcggauacaaagauuggauccuguggauuucuuucgccaucuccugcuuucuccuguguguugugcugcucggcuucauuaugugggccugccaaaaggggaacauccgcuguaauauuugcaucuga

SEQ ID NO: 193169 - RNA, 1701 nt, Artificial Sequence
  derived and/or modified CDS sequence (opt5) from hemagglutinin__InfluenzaA__ABG80095
augaagaccaucauugcccugagcuacauccucugccugguguucgcucagaaacuucccggcaacgacaauuccacagccacgcugugucucgggcaccaugcggucccuaacggaacccugguuaagacaauuaccaaugaucaaaucgaggugacaaacgcuaccgaacuugugcagucuagcuccacaggcagaauuugcgacucuccgcaccggauccuggaugggaaaaauuguacccucaucgacgcccugcugggagauccccauugcgacggcuuucagaacaaggagugggaucucuucgucgaacgcagcaaagccuauuccaauuguuacccuuaugacgugcccgauuacgcuucucugagaagccuuguugccuccagcgggacgcuggaguuuauuaacgaagacuucaauuggaccggaguggcucaggauggcaagucuuaugccugcaagcggggcuccgucaacagcuuuuucucucgccucaauuggcugcacaaacuugaguacaaguauccugcgcugaacgugacaaugcccaauaacgggaaaguugacaagcucuacaucuggggagugcaucacccuuccaccgauagcgaccaaacaucucuguacgucagagccuccggccgggugaccgugagcacgaaacgcucccagcagacagucauuccgaauaucggguuuagacccuggguucggggacugucuagccgcauuuccaucuauuggaccauugugaagccuggcgacauccuccugaucaacagcacagggaaccuuauugcucccagaggauacuucaagauccggaauggcaaaucuuccauuaugcgcagcgaugccccuaucggcaacuguucuagcgagugcauuacccccaauggguccaucccgaacgacaagccuuuucagaaugugaacagaaucaccuauggagcuuguccccgguacgucaaacaaaauacacugaagcucgccacgggcaugcgcaacgugccugaaaaacagaccagagggauuuucggagcgaucgccggcuuuauugagaaugggugggaaggaaugguugauggcugguauggcuuccggcaccagaacucugaggggacaggacaggcugccgaccuuaagagcacccaagcugccaucgaucagauuaauggcaaacugaacagacugaucgagaagacaaaugaaaaguuucaucagaucgagaaagaguucuccgaaguggaagggcgcauucaagaccucgagaaguacgucgaggauaccaaaaucgaccuguggagcuauaacgccggacugcucguggcucuggaaaaucagcacacgauugaucuuacagacucugagaugaacaagcuguucgaacggaccagaaaacagcuccgcgagaacgcggaagauaugggcaaugggugcuuuaagaucuaccauaagugugacaacgccugcauuggcuccauccggaauggaaccuacgaccacgauguuuauagagacgaggcucugaacaaucgcuuccagauuaaaggcguggagcuuaagagcggguacaaagauuggauccuguggaucucuuuugccauuuccugcuuccuccugugugucgugcugcucggauuuaucaugugggccugccaaaagggcaacauucgguguaauaucugcauuuga

SEQ ID NO: 193170 - RNA, 1701 nt, Artificial Sequence; identical to SEQ ID NO: 193096
  derived and/or modified CDS sequence (opt5) from hemagglutinin__InfluenzaA__ABG80106

SEQ ID NO: 193171 - RNA, 1701 nt, Artificial Sequence
  derived and/or modified CDS sequence (opt5) from hemagglutinin__InfluenzaA__ABG80117
augaagaccaucauugcccugagcuacauccucugccugguguucgcucagaaacuucccggcaacgacaauuccacagccacgcugugucucgggcaccaugcggucccuaacggaacccugguuaagacaauuaccaaugaucaaaucgaggugacaaacgcuaccgaacuugugcagucuagcuccacaggcagaauuugcgacucuccgcaccggauccuggaugggaaaaauuguacccucaucgacgcccugcugggagauccccauugcgacggcuuucagaacaaggagugggaucucuucgucgaacgcagcaaagccuauuccaauuguuacccuuaugacgugcccgauuacgcuucucugagaagccuuguugccuccagcgggacgcuggaguuuauuaacgaagacuucaauuggaccggaguggcucaggauggcaagucuuaugccugcaagcggggcuccgucaacagcuuuuucucucgccucaauuggcugcacaaacuugaguacaaguauccugcgcugaacgugacaaugcccaauaacgggaaauuugacaagcucuacaucuggggaguucaucacccuuccaccgauagcgaccaaacaucucuguacgugagagccuccggccgggucaccgugagcacgaaacgcucccagcagacagugauuccgaauaucggguucagacccuggguccggggacugucuagccgcauuuccaucuauuggaccauuguuaagccuggcgacauccuccugaucaacagcacagggaaccuuauugcucccagaggauacuuuaagauccggaauggcaaaucuuccauuaugcgcagcgaugccccuaucggcaacuguucuagcgagugcauuacccccaauggguccaucccgaacgacaagccuuuccagaaugugaacagaaucaccuauggagcuuguccccgguacgugaaacaaaauacacugaagcucgccacgggcaugcgcaacgucccugugaaacagaccagagggauuuuuggagcgaucgccggcuucauugaaaaugggugggagggaaugguugauggcugguauggcuuucggcaccagaacucugaagggacaggacaggcugccgaccuuaagagcacccaagcugccaucgaucagauuaauggcaaacugaacagacugaucgagaagacaaaugagaaguuccaucagaucgaaaaagaguucuccgaaguggaggggcgcauucaagaccucgaaaaguacgucgaggauaccaaaaucgaccuguggagcuauaacgccggacugcucguggcucuggagaaucagcacacgauugaucuuacagacucugaaaugaacaagcuguuugagcggaccagaaaacagcuccgcgaaaacgcggaggauaugggcaaugggugcuucaagaucuaccauaagugugacaacgccugcauuggcuccauccggaauggaaccuacgaccacgauguuuauagagacgaagcucugaacaaucgcuuucagauuaaaggcguggagcuuaagagcggguacaaagauuggauccuguggaucucuuucgccauuuccugcuuucuccugugugucgugcugcucggauucaucaugugggccugccaaaagggcaacauucgguguaauaucugcauuuga

SEQ ID NO: 193172 - RNA, 1701 nt, Artificial Sequence
  derived and/or modified CDS sequence (opt5) from hemagglutinin__InfluenzaA__ABG80128
augaagaccaucauugcccugagcuacauccucugccugguguucgcucagaaacuucccggcaacgacaauuccacagccacgcugugucucgggcaccaugcggucccuaacggaacccugguuaagacaauuaccaaugauagaaucgaggugacaaacgcuaccgaacuugugcaaucuagcuccacaggccggauuugcgacucuccgcaccgcauccuggaugggaaaaauuguacccucaucgacgcccugcugggagauccccauugcgacggcuuucagaacaaggagugggaucucuucgucgaaagaagcaaagccuauuccaauuguuacccuuaugacgugcccgauuacgcuucucugcggagccuuguugccuccagcgggacgcuggaguuuauuaacgaagacuucaauuggaccggaguggcucaggauggcaagucuuaugccugcaagcgcggcuccgucaacagcuuuuucucuagacucaauuggcugcacaaacuugaguacaaguauccugcgcugaacgugacaaugcccaauaacgggaaauuugacaagcucuacaucuggggaguucaucacccuuccaccgauagcgaccagacaucucuguacgugcgggccuccggccgcgucaccgugagcacgaaaagaucccaacagacagugauuccgaauaucggguuccggcccuggguccgcggacugucuagcagaauuuccaucuauuggaccauuguuaagccuggcgacauccuccugaucaacagcacagggaaccuuauugcuccccggggauacuuuaagauccgcaauggcaaaucuuccauuaugagaagcgaugccccuaucggcaacuguucuagcgagugcauuacccccaauggguccaucccgaacgacaagccuuuccagaaugugaaccggaucaccuauggagcuuguccccgcuacgugaaacagaauacacugaagcucgccacgggcaugagaaacgucccugaaaaacaaacccgggggauuuuuggagcgaucgccggcuucauugagaaugggugggaaggaaugguggauggcugguauggcuuuagacaccagaacucugaggggacaggacaggcugccgaccuuaagagcacccaggcugccaucgaucaaauuaauggcaaacugaaccgccugaucgagaagacaaaugaaaaguuccaucagaucgagaaagaguucuccgaaguugaagggcggauucaggaccucgagaaguacguggaggauaccaaaaucgaccuguggagcuauaacgccggacugcucgucgcucuggaaaaucaacacacgauugaucuuacagacucugagaugaacaagcuguuugaaagaacccgcaaacagcuccgggagaacgcggaagauaugggcaaugggugcuucaagaucuaccauaagugugacaacgccugcauuggcuccaucagaaauggaaccuacgaccacgauguguaucgcgacgaggcucugaacaaucgguuucagauuaaaggcguugagcuuaagagcggguacaaagauuggauccuguggaucucuuucgccauuuccugcuuucuccugugugugguccugcucggauucaucaugugggccugccagaagggcaacauuagauguaauaucugcauuuga

SEQ ID NO: 193173 - RNA, 1701 nt, Artificial Sequence
  derived and/or modified CDS sequence (opt5) from hemagglutinin__InfluenzaA__ABG80139
augaagaccaucauugcccugagcuacauccucugccugguguucgcucagaaacuucccggcaacgacaauuccacagccacgcugugucucgggcaccaugcggucccuaacggaacccugguuaagacaauuaccaaugaucaaaucgaggugacaaacgcuaccgaacuugugcagucuagcuccacaggcagaauuugcgacucuccgcaccggauccuggaugggaaaaauuguacccucaucgacgcccugcugggagauccccauugcgacggcuuucagaacaaggagugggaucucuucgucgaacgcagcaaagccuauuccaauuguuacccuuaugacgugcccgauuacgcuucucugagaagccuuguugccuccagcgggacgcuggaguuuauuaacgaagacuucaauuggaccggaguggcucaggauggcaagucuuaugccugcaagcggggcuccgucaacagcuuuuucucucgccucaauuggcugcacaaacuugaguacaaguauccugcgcugaacgugacaaugcccaauaacgggaaauuugacaagcucuacaucuggggaguucaucacccuuccaccgauagcgaccaaacaucucuguacgugagagccuccggccgggucaccgugagcacgaaacgcucccagcagacagugauuccgaauaucggguucagacccuggguccggggacugucuagccgcauuuccaucuauuggaccauuguuaagccuggcgacauccuccugaucaacagcacagggaaccuuauugcucccagaggauacuuuaagauccggaauggcaaaucuuccauuaugcgcagcgaugccccuaucggcaacuguucuuaugagugcauuacccccaaugggagcaucccgaacgacaagccuuuccagaaugugaacagaaucaccuacggagcuuguccccgguaugugaaacaaaauacacugaagcucgccacgggcaugcgcaacgucccugaaaaacagaccagagggauuuuuggagcgaucgccggcuucauugagaaugggugggaaggaaugguggauggcugguacggcuuucggcaccagaacuccgaggggacaggacaggcugccgaccugaagucuacccaagcugccaucgaucagauuaauggcaaacuuaacagacugaucgagaagacaaaugaaaaguuccaucagaucgagaaagaguucagcgaaguugaagggcgcauucaagaccucgagaaguauguggaggauaccaaaaucgaccugugguccuacaacgccggacugcucgucgcucuggaaaaucagcacacgauugaucuuacagacagcgagaugaacaagcuguuugaacggaccagaaaacagcuccgcgagaacgcggaagauaugggcaaugggugcuucaagaucuaccauaagugugacaauaccugcauuggcucuauccggaacggaacauaugaccacgauguguacagagacgaggcccugaacaaucgcuuucagauuaaaggcguugagcuuaaguccggguauaaagauuggauccuguggaucagcuucgcuauuucuugcuuucuccugugugugguccugcucggauucaucaugugggccugccaaaagggcaacauucgguguaauaucugcauuuga

SEQ ID NO: 193174 - RNA, 1701 nt, Artificial Sequence
  derived and/or modified CDS sequence (opt5) from hemagglutinin__InfluenzaA__ABG80150
augaagaccaucauugcccugagcuacauccucugccugguguucgcucagaaacuucccggcaacgacaauuccacagccacgcugugucucgggcaccaugcggucccuaacggaacccugguuaagacaauuaccaaugaucaaaucgaggugacaaacgcuaccgaacuugugcagucuagcuccacaggcagaauuugcgacucuccgcaccggauccuggaugggaaaaauuguacccucaucgacgcccugcugggagauccccauugcgacggcuuucagaacaaggagugggaucucuucgucgaacgcagcaaagccuauuccaauuguuacccuuaugacgugcccgauuacgcuucucugagaagccuuguugccuccagcgggacgcuggaguuuauuaacgaaaauuucaacuggaccggaguggcucaggacggcaagucuuaugccugcaagcggggcuccgucaauagcuuuuucucucgccucaacuggcugcacaaacuugaguacaaguauccugcgcugaaugugacaaugcccaacaaugggaaauuugauaagcucuacaucuggggaguucaucacccuuccaccgacagcgaucaaacaucucuguacgugagagccuccggccgggucaccgugagcacgaaacgcucccagcagacagugauuccgaacaucggguucagacccuggguccggggacugucuagcggcauuuccaucuauuggaccauuguuaagccuggggacauccuccugaucaacagcacaggaaaucuuauugcuccccgcggcuacuuuaagaucagaaacggcaaaucuuccauuaugcggagcgacgccccuaucgggaauuguucuagcgagugcauuacccccaacggauccaucccgaaugauaagccuuuccagaacgugaaucgcaucaccuauggcgcuugucccagauacgugaaacaaaacacacugaagcucgccacggggaugcggaaugucccugaaaaacagacccgcggaauuuuuggcgcgaucgccggguucauugagaacggaugggaaggcaugguggacggcugguauggguuuagacaccagaauagcgagggaacaggccaggcugccgaucugaagucuacccaagcugccaucgaccagauuaacgggaaacuuaaucggcugaucgagaagacaaacgaaaaguuccaucagaucgagaaagaguucuccgaaguugaaggacgcauucaagaucucgagaaguacguggaggacaccaaaaucgaucuguggagcuauaaugccggccugcucgucgcucuggaaaaccagcacacgauugaccuuacagauucugagaugaacaagcuguuugaaagaacccggaaacagcucagagagaaugcggaagacauggggaacggcugcuucaagaucuaccauaagugugauaaugccugcauuggauccauccgcaacggcaccuacgaccacgacguguaucgggaugaggcucugaauaacagauuucagauuaaagggguugagcuuaagagcggauacaaagacuggauccuguggaucucuuucgccauuuccugcuuucuccugugugugguccugcucggcuucaucaugugggccugccaaaaggggaauauucgcuguaacaucugcauuuga

SEQ ID NO: 193175 - RNA, 1701 nt, Artificial Sequence
  derived and/or modified CDS sequence (opt5) from hemagglutinin__InfluenzaA__ABG80161
augaagaccaucauugcccugagcuacaucuccugccucguguucgcucagaaacugcccggcaacgacaauucuacagccacgcuuugucuggggcaccaugcggucccuaacggaacccucguuaagacaauuaccaaugaucaaaucgaggugacaaacgcuaccgaacuggugcagagcuccucuacaggcagaauuugcgacagcccgcaccggauccuugaugggaaaaauuguacccugaucgacgcccuccugggagauccccauugcgacggcuuucagaacaaggagugggaucuguucgucgaacgcuccaaagccuauucuaauuguuacccuuaugacgugcccgauuacgcuagccucagaucccugguugccagcucugggacgcuugaguuuauuaacgaagacuucaauuggaccggaguggcucaggauggcaaguccuaugccugcaagcggggcagcgucaacucuuucuucucccgccugaauuggcuccacaaacuggaguacaaguauccugcgcuuaacgugacaaugcccaauaacgggaaauuugacaagcuguacaucuggggaguucaucacccuagcaccgauucugaccaaacaucccucuacgugcaggccagcggcagagucaccguguccacgaaacggucucagcagacagugauuccgaauaucggguuccgccccugggucagaggacugagcucccggauuagcaucuauuggaccauuguuaagccuggcgacauccugcucaucaacucuacagggaaccugauugcuccccgcggauacuuuaagaucagaaauggcaaauccagcauuaugcggucugaugccccuaucggcaacuguagcuccgagugcauuacccccaaugggucuaucccgaacgacaagccuuuccaaaaugugaaccgcaucaccuauggagcuugucccagauacgugaaacagaauacacuuaagcuggccacgggcaugcggaacgucccugaaaaacagacccgcgggauuuuuggagcgaucgccggcuucauugagaaugggugggaaggaaugguggauggcugguauggcuuuagacaccagaacagcgaggggacaggacaagcugccgaccucaaguccacccaggcugccaucgaucagauuaauggcaaacugaaccggcuuaucgagaagacaaaugaaaaguuccaucaaaucgagaaagaauuuagcgagguugaagggcgcauucaggaccuggagaaguacguggaggauaccaaaaucgaccucuggucuuauaacgccggacugcuggucgcucucgaaaaucagcacacgauugaucugacagacuccgagaugaacaaacuuuuugaaagaacccggaagcagcugagagagaacgcggaagauaugggcaaugggugcuucaagaucuaccauaagugugacaacgccugcauuggcagcauccgcaauggaaccuacgaccacgauguguaucgggacgaggcucucaacaauagauuucaaauuaaaggcguugagcugaagucuggguacaaagauuggauccuuuggaucuccuucgccauuagcugcuuucugcucugugugguccugcugggauucaucaugugggccugccagaagggcaacauucgcuguaauaucugcauuuga

SEQ ID NO: 193176 - RNA, 1698 nt, Artificial Sequence
  derived and/or modified CDS sequence (opt5) from hemagglutinin__InfluenzaA__ABG80172
augaaggugaaacugcucguccugcuuugcaccuucacagccacguacgcugacaccaucuguauuggcuaucacgccaacaauagcacagauaccguugacacagugcuggagaagaacgugaccgucacacauuccgugaaucuccuggaagauucucacaacgggaaacuuugccugcucaagggaaucgcgccccugcagcugggcaauuguagcguugcuggguggauucucggaaacccugagugcgaacugcuuaucuccaaagagucuuggagcuacauuguggaaaccccgaaucccgagaacggcacguguuauccuggguacuuugccgacuaugaggaacugagagagcaacucuccucugucagcuccuucgaacgguuugagaucuuccccaaggagagcucuuggccuaaucauaccgugacaggaguuuccgccagcugcucucacaacggcaaguccagcuuuuaccgcaaucugcuuuggcugaccggcaaaaacgggcucuaucccaaucugucuaaguccuacgcuaacaauaaagaaaaggaggugcugguccucuggggagugcaucacccuccgaacaucggcgaucagagagcccuguaccacacagaaaacgcuuaugugagcgucguuuccucucauuacagccggcgcuucacccccgagauugccaaaagaccuaaggugcgggaccaggaagggcgcaucaauuauuacuggacgcuucuggagcccggagauacaauuaucuuugaggcgaacggcaaucucauugccccuagauaugcuuucgcccugucccggggguuuggaagcggcaucauuaccucuaacgcucccauggacgaaugugaugccaagugccagacaccgcaaggcgcgaucaauuccagccuuccuuuccagaacgugcaccccgucaccaucggggaguguccuaaauacgugcgcucugccaagcugagaaugguuaccggacuccggaauauucccagcauccagucccgcggccuguuuggggcuauugccggauucaucgaaggcggguggacaggaaugguggacggcugguauggcuaccaucaccagaacgagcaagggucuggauacgcugccgaucagaaaagcacgcagaaugccauuaacggcaucaccaauaaggucaacuccgugaucgaaaagaugaauacacaguuuaccgcuguugggaaagaguucaacaaacuggagagacggauggaaaaucucaacaagaagguggacgauggauuccuggacauuuggacauauaacgcggagcuucugguccuccuggaaaaugagcgcacccuugacuuucacaacagcaaugugaaaaaccuguacgaaaaggucaaaucucaacucaagaauaacgccaaagagaucggcaaugggugcuucgaguuuuaucauaaguguaacaaugaaugcauggaguccgugaagaacggcacguacgauuaucccaaauacagcgaagagucuaagcugaauagagagaaaauugacggaguuaagcuggaauccaugggcguguaucagauccucgcuauuuacagcacagucgccuccucucuggugcuucugguuagccucggggccaucuccuucuggaugugcucuaacggaagccugcagugucggaucugcauuuga

SEQ ID NO: 193177 - RNA, 1698 nt, Artificial Sequence
  derived and/or modified CDS sequence (opt5) from hemagglutinin__InfluenzaA__ABG80183
augaaggugaaacugcucguccugcuuugcaccuucacagccacguacgcugacaccaucuguauuggcuaucacgccaacaauagcacagauaccguugacacagugcuggagaagaacgugaccgucacacauuccgugaaucuccuggaagauucucacaacgggaaacuuugccugcucaagggaaucgcgccccugcagcugggcaauuguagcguugcuggguggauucucggaaacccugagugcgaacugcuuaucuccaaagagucuuggagcuacauuguggaaaccccgaaucccgagaacggcacguguuauccuggguacuuugccgacuaugaggaacugagagagcaacucuccucugucagcuccuucgaacgguuugagaucuuccccaaggagagcucuuggccuaaucauaccgugacaggaguuuccgccagcugcucucacaacggcaaguccagcuuuuaccgcaaucugcuuuggcugaccggcaaaaacgggcucuaucccaaucugucuaaguccuacgcuaacaauaaagaaaaggaggugcugguccucuggggagugcaucacccuccgaacaucggcgggcagagagcccuguaccacacagaaaacgcuuaugugagcgucguuuccucucauuacagccggcgcuucacccccgagauugccaaaagaccuaaggugcgggaucaggaaggacgcaucaauuauuacuggacgcuucuggagcccggcgacacaauuaucuuugaggcgaacgggaaucucauugccccuagauaugcuuucgcccugucccggggauuuggcagcggcaucauuaccucuaacgcucccauggaugaaugugacgccaagugccagacaccgcaaggggcgaucaauuccagccuuccuuuccagaacgugcaccccgucaccaucggagaguguccuaaauacgugcgcucugccaagcugagaaugguuaccggccuccggaauauucccagcauccagucccgcgggcuguuuggagcuauugccggcuucaucgaagggggauggacaggcaugguggauggcugguauggguaccaucaccagaacgagcaaggaucuggcuacgcugccgaccagaaaagcacgcagaaugccauuaacgggaucaccaauaaggucaacuccgugaucgaaaagaugaauacacaguuuaccgcuguuggaaaagaguucaacaaacuggagagacggauggaaaaucucaacaagaagguggaugacggcuuccuggauauuuggacauauaacgcggagcuucugguccuccuggaaaaugagcgcacccuugacuuucacgacagcaacgugaaaaaucuguacgaaaaggucaaaucucaacucaagaacaaugccaaagagaucgggaacggcugcuucgaguuuuaucauaaguguaauaacgaaugcauggaguccgugaagaauggaacguacgauuaucccaaauacagcgaagagucuaagcugaacagagagaaaauugacggcguuaagcuggaauccauggggguguaucagauccucgcuauuuacagcacagucgccuccucucuggugcuucugguuagccucggagccaucuccuucuggaugugcucuaauggcagccugcagugucggaucugcauuuga

SEQ ID NO: 193178 - RNA, 1701 nt, Artificial Sequence
  derived and/or modified CDS sequence (opt5) from hemagglutinin__InfluenzaA__ABG80194
augaagaccaucauugcccugagcuacauccucugccugguguucgcucagaaacuucccgucaacgacaauuccacagccacgcugugucucggccaccaugcgguuccuaacgggacccuggugaagacaauuaccaaugaucacaucgaggugacaaacgcuaccgaacuuguccaaucuagcuccacaggaagaauuugcgacucuccgcaucagauccuggauggcgagaauuguacccucaucgacgcccugcugggggauccccacugcgacggauuucagaacaaagaauggaaucucuucguggagcggagcacggccuauuccaacuguuacccuuaugauguucccgacuacgcuucucugcgcagccuuguggccuccagcggcacccuggaauuuaauaacgagucuuucaauuggacaggggucgcucagaacggaaccuccagcgccugcaagagacggucuauuaaauccuuuuucagccgccucaauuggcugcaucaacuuaaguauaaguacccugcgcugaacgugacaaugcccaauaacgagaaauuugauaagcucuauaucuggggcguucaccacccuucuaccgacuccgaucagauuagccuguacgcccaggcuuccggcagagugacggucucuacaaaacggagccagcaaaccgugaucccgaacauugggucccgccccugggugagaggagucagcucuaucauuuccaucuacuggacaaucguuaagccuggcgacauucugcucaucaauagcaccgggaaccugauugcuccccggggauauuucaaaauccgcucuggcaagagcuccauuaugagaucuaaugccccuaucgggaaguguaacagcgaaugcaucacccccaauggauccauuccgaacgauaaaccuuuucagaaugugaaccggaucacauacggcgccuguccccgcuaugugaagcagaauacgcuuaaacuggcgaccggcaugagaaacgucccugagaagcagacacgggggauuuucggagccaucgcuggcuuuauugaaaaugggugggagggaaugguggacggcugguacggguuccgccaucaaaacagcgagggaaccggccaggccgcugaccucaaaucuacacaggccgccaucaaucaaaucaacggcaagcugaauagacuuauugagaaaaccaacgaaaaguuucaccagaucgaaaaggaguucuccgaaguugaggggcggauucaggaucuggagaaauauguggaagacacgaagaucgaucucuggagcuacaacgcugagcugcuggucgcgcucgaaaaucagcauacaauugaccugaccgauucugagaugaacaaacuuuucgaaagaacccgcaagcaacugcgggagaaugccgaggacaugggaaacggcugcuuuaaaaucuaucacaagugugauaaugcuugcauuggguccaucagaaacggaacauacgaccacgauguguaccgcgacgaagcccucaauaaccgguuccagaucaagggcguugagcugaaaagcggguauaaggauuggauucuuuggaucuccuuugccauuucuugcuuccugcucugugugguccugcugggcuuuaucaugugggcuugccagaaaggaaauauuagauguaacaucugcaucuga

SEQ ID NO: 193179 - RNA, 1701 nt, Artificial Sequence
  derived and/or modified CDS sequence (opt5) from hemagglutinin__InfluenzaA__ABG80205
augaagaccaucauugcccugagcuacauccucugccugguguucgcucagaaacuucccggcaacgacaauuccacagccacgcugugucucgggcaccaugcggucccuaacggaacccugguuaagacaauuaccaaugaucaaaucgaggugacaaacgcuaccgaacuugugcagucuagcuccacaggcgggauuugcgacucuccgcaccagauccuggauggagagaauuguacccucaucgacgcccugcugggcgauccccauugcgacggguuucagaacaaagaaugggaucucuucgucgagagaagcaaggccuauuccaauuguuacccuuaugacgugcccgauuacgcuucucugcggagccuuguugccuccagcggaacgcuggaauuuaacaaugagucuuucaacuggaccggcguggcucaaaauggcacauccagcgccugcaaacgcagaucuaacaaguccuuuuucagccggcucaauuggcugcaccagcuuaaguauaaauacccugcgcugaacgucgccaugcccaauaacgagaaguuugacaaacucuauauuuggggagugcaucacccuucuaccgauuccgaccagaucagccuguacgcucaggccccggggcgcguuacaguguccaccaagagaucucaacagacggucauucccaacaucggcagccggccuugggugcgcgggguguccagcagaauuucuaucuacuggacaauugucaaacccggagauauccugcucaucaauuguaccggcaaccugauugcuccucggggguauuucaagauccgcuccggaaagagcucuauuaugagaagcgacgccuccaucggcaaaugcaauucugaauguauuacacccaacggcagcaucccgaaugacaagccuuuucagaacguuaaucggaucaccuacggggcgugcccccgcuaugugaaacagaacacccuuaagcuggccacaggaaugagaaaugugccugagaaacaaacgcggggcauuuucggggcuaucgccggauuuauugaaaacggcugggaggggauggucgauggaugguacggcuuccgccaccaaaauuccgagggcaccgggcaggcugccgaccucaagagcacacaggccgcuaucaaccagauuaauggaaaacugaacagacuuaucgaaaagaccaaugagaaguuucaucagaucgaaaaagaguucucugaaguggagggccggauucaggaucuggagaaguauguugaagacacaaaaaucaaccucugguccuacaacgcggagcugcugguggcccucgaaaaucaacacaccauugaucugacggacagcgagaugaacaaacuuuucgaaagaacaaagaagcagcugcgcgagaaugcugaggauauggggaacggauguuuuaagaucuaucauaaaugcgacaaugccugcauuggcucuauccggaacgggaccuacgaucacgacgucuacagagaugaagcccucaauaaccgcuuccagauuaagggcguggagcugaaauccggauauaaggacuggauccuuuggaucagcuuugcuauuuccuguuuccugcucugcguugugcugcugggcuuuaucaugugggccugucagaaagggaauauucggugcaacaucuguauuuga

SEQ ID NO: 193180 - RNA, 1701 nt, Artificial Sequence
  derived and/or modified CDS sequence (opt5) from hemagglutinin__InfluenzaA__ABG80216
augaagaccaucauugcccugagcuacauccucugccugguguucgcucagaaacuucccgucaacgacaauuccacagccacgcugugucucggccaccaugcgguuccuaacgggacccuggugaagacaauuaccaaugaucacaucgaggugacaaacgcuaccgaacuuguccaaucuagcccgacaggaagaauuugcgacucuccccaucagauccuggauggcgagaauuguacccucaucgacgcccugcugggggauccucacugcgacggauuucagaacaaagaaugggaucucuucguggagcggucuacggccuauagcaauuguuaccccuaugacguuccugauuacgcuucccugcgcucucuuguggccagcuccggcacccuggaauuuaacaaugagagcuucaacuggacaggggucgcucagaauggaaccucuuccgccugcaagagacggagcauuaaauccuuuuucucccgccucaacuggcugcaucaacuuaaguauaaguaccccgcgcugaaugugacaaugccuaacaaugagaaauuugacaagcucuauaucuggggcguucaccacccgagcaccgauucugaccagauuucccuguacgcccaggcucccggcagagugacggucagcacaaaacggucccagcaaaccgugaucccuaacauugggucucgccccugggugagaggagucagcucccggaucagcauuuacuggacaaucguuaagccuggcgauauccugcucauuaacucuaccgggaaucugaucgcuccccgcggauauuucaaaauuagauccggcaagagcucuaucaugcggagcaacaccccgauugggaaguguaauuccgaaugcaucacaccuaacggaucuauccccaaugacaaaccuuuucagaacgugaaucgcauuacguacggcgccugucccagauaugugaagcagaacacccuuaaacuggccacaggcaugcggaauguccccgagaagcagacccgcgggaucuucggagcgauugccggcuuuaucgaaaacgggugggagggaaugguggacggcugguacggguucagacaucaaaauagcgagggaacaggccaggcugccgaucucaaauccacccaggcugccauuaaccaaaucaauggcaagcugaaccggcuuaucgagaaaacgaaugaaaaguuucaccagauugaaaaggaguucagcgaaguugaggggagaauccaggaccuggagaaauauguggaagauacaaagauugaccucuggucuuacaacgccgagcugcuggucgcucucgaaaaccagcauaccaucgaucugaccgacuccgagaugaauaaacuuuucgaacgcacacggaagcaacugagagagaacgcggaggauaugggaaauggcugcuuuaaaauuuaucacaagugugacaacgccugcaucgggagcauucgcaauggaaccuacgaucacgacguguaccgggaugaagcucucaacaauagauuccagaucaagggcguugagcugaaaucuggguauaaggacuggauccuuuggauuuccuuugccaucagcugcuuccugcucugugugguccugcugggcuuuauuaugugggccugccagaaaggaaacauccgcuguaauauuugcaucuga

SEQ ID NO: 193181 - RNA, 1701 nt, Artificial Sequence; identical to SEQ ID NO: 192712
  derived and/or modified CDS sequence (opt5) from hemagglutinin__InfluenzaA__ABG80227

SEQ ID NO: 193182 - RNA, 1701 nt, Artificial Sequence; identical to SEQ ID NO: 192588
  derived and/or modified CDS sequence (opt5) from hemagglutinin__InfluenzaA__ABG80238

SEQ ID NO: 193183 - RNA, 1701 nt, Artificial Sequence; identical to SEQ ID NO: 192588
  derived and/or modified CDS sequence (opt5) from hemagglutinin__InfluenzaA__ABG80249

SEQ ID NO: 193184 - RNA, 1701 nt, Artificial Sequence; identical to SEQ ID NO: 192588
  derived and/or modified CDS sequence (opt5) from hemagglutinin__InfluenzaA__ABG80260

SEQ ID NO: 193185 - RNA, 1701 nt, Artificial Sequence
  derived and/or modified CDS sequence (opt5) from hemagglutinin__InfluenzaA__ABG80271
augaagaccaucauugcccugagcuacauccucugccugguguucgcucagaaacuucccggcaacgacaauuccacagccacgcugugucucgggcaccaugcggucccuaacggaaccguugugaagacaauuaccaaugaucaaaucgaggugacaaacgcuaccgaacugguccagucuagcuccacaggcgggauuugcgacucuccgcaccagauccuugauggagagaauuguacccugauggacgcccuccugggcgauccccagugcgacggguuucaaaacaaaaagugggaucuguucguggaaagaagcaaagccuauuccaauuguuacccuuaugacguucccgauuacgcuucucuccggagccugguggccuccagcggaacgcuugaguuuaacaaugaaucuuucaacuggaccggcgucacacagaauggcaccuccagcgcuugcaagcgcagaucuaacaauuccuuuuucagccggcugaacuggcucacacaucugaaguuuaaauauccugcccuuaaugugaccaugcccaacaacgagaaguucgacaaacuguacaucuggggaguucaccauccugggacggauaaugaccagauuucucucuaugcgcaggccuccggccgcaucacagugagcaccaagagaucccaacagacagucauuccgaacaucgggucucggccccgcgugagagauauuccuagccggaucuccauuuacuggaccaucgugaaacccggagacauccugcugauuaauagcaccggcaaccucaucgcuccucgcggguacuuuaagauuagaucuggaaaguccagcaucaugcggucugacgcccccauuggcaaauguaauagcgagugcaucacaccgaacggcuccaucccuaaugauaagcccuuccagaacgucaaucgcauuacguauggggcuuguccuagauacguuaaacagaacacccugaaacuugccacaggaaugcggaaugugcccgaaaaacaaacccgcggcaucuuuggggcgauugccggauucaucgagaacggcugggaagggaugguggacggaugguauggcuuuagacaccagaauagcgagggcacagggcaggcugccgaucugaagucuacccaagcugccauuaaccagaucaauggaaaacucaaccggcugaucggcaagacgaacgagaaguuccaccagauugaaaaagaguucuccgaagucgaggggagaauccaggaccuugaaaaguacguggaggauacaaaaauugaccuguggagcuauaaugccgagcuccugguugcucuggaaaaccaacauaccaucgaucucaccgacucugagaugaauaagcuguuugaacgcacaaagaagcagcuucgggagaacgcggaagauaugggaaauggcugcuucaagauuuaccacaaaugugacaacgccugcaucggguccauuagaaauggcaccuaugaucaugacguguaccgcgacgaggcucugaacaaucgguuucagaucaagggagucgagcucaaaagcggcuacaaggauuggauccuguggauuucuuucgccaucuccugcuuucuucuguguguggcccuccugggguucauuaugugggcuugccagaaaggaaacaucagauguaauauuugcaucuga

SEQ ID NO: 193186 - RNA, 1701 nt, Artificial Sequence; identical to SEQ ID NO: 192663
  derived and/or modified CDS sequence (opt5) from hemagglutinin__InfluenzaA__ABG80282

SEQ ID NO: 193187 - RNA, 1701 nt, Artificial Sequence; identical to SEQ ID NO: 192315
  derived and/or modified CDS sequence (opt5) from hemagglutinin__InfluenzaA__ABG80293

SEQ ID NO: 193188 - RNA, 1701 nt, Artificial Sequence
  derived and/or modified CDS sequence (opt5) from hemagglutinin__InfluenzaA__ABG80304
augaagaccaucauugcccugagcuacauccucugccugguguucgcucagaaacuucccggcaacgacaauuccacagccacgcugugucucgggcaccaugcggucccuaacggaaccauuguuaagacaaucaccaaugaucaaauugaggugacaaacgcuaccgaacuggugcagucuagcuccacaggcgggaucugcgacucuccgcaccagauccuugauggagagaauuguacccugauugacgcccuccugggcgauccccagugcgacggguuucaaaacaaaaagugggaucuguucgucgaaagaagcaaagccuauuccaauuguuacccuuaugacgugcccgauuacgcuucucuccggagccugguugccuccagcggaacgcuugaguuuaacaaugaaucuuucaacuggaccggcgugacacagaauggcaccuccagcgcuugcaagcgcagaucuaacaauuccuuuuucagccggcugaacuggcucacacaucugaaguuuaaauauccugcccuuaaugucaccaugcccaacaacgagaaguucgacaaacuguacaucuggggagugcaccauccugggacgaauaacgaucagauuaaucucuaugcgcaggccucuggccgcaucacaguuuccaccaagagaagccaacagacagugauuccgaacaucgggucccggccccgcgucagagacauuccuucucggaucagcaucuacuggaccauugugaaacccggagauauccugcugauuaauuccaccggcaaccucaucgcuccucgcggguacuuuaagauuagaagcggaaagucuuccaucaugcggagcgacgcccccaucggcaaauguaauucugagugcauuacaccgaacggcagcaucccuaaugacaagcccuuccagaacgugaaucgcauuacguauggggcuuguccuagauacgucaaacagaacacccugaaacuugccacaggaaugcggaauguucccgaaaagcaaacccgcggcaucuuuggggcgauugccggauucaucgagaacggcugggaagggaugguggauggaugguauggcuuuagacaccaaaauuccgagggcaucgggcaggcugccgaccugaagucuacacaggcugccauuaaccagaucaacggaaaacucaaucggcugauuggcaagaccaacgagaaguuccaccagaucgaaaaagaguucagcgaaguggaggggcgcauucaggaucuugaaaaguacgucgaggacacgaaaaucgaucugugguccuauaaugccgagcuccugguggcucuggaaaaccaacauacaauugaccucaccgauagcgagaugaauaagcuguuugaaagaaccaaaaagcagcuucgggagaacgcggaagacaugggaaauggcugcuucaagaucuaccacaaaugugauaacgccugcaucgggucuauuagaaauggcacauaugaccaugauguuuaccgcgacgaggcucugaacaaucgguuucagaucaagggaguggagcucaaauccggcuacaaggacuggauucuguggaucagcuucgccauuucuugcuuucuucugugugucgcccuccugggguucaucaugugggcuugccagaaaggaaacaucagauguaauauuugcaucuga

SEQ ID NO: 193189 - RNA, 1701 nt, Artificial Sequence
  derived and/or modified CDS sequence (opt5) from hemagglutinin__InfluenzaA__ABG80315
augaagaccaucauugcccugagcuacauccucugccugguguucgcucagaaacuucccggcaacgacaauuccacagccacgcugugucucgggcaccaugcggucccuaacggaaccauuguuaagacaaucaccaaugaucaaauugaggugacaaacgcuaccgaacugauccagucuagcuccacaggcgggaucugcgacucuccgcaccagauucuugauggagagaauuguacccugaucgacgcccuccugggcgauccccagugcgacggguuucaaaacaaaaagugggaucuguucguggaaagaagcaaagccuauuccaauuguuacccuuaugacguccccgauuacgcuucucuccggagccugguggccuccagcggaacgcuugaguuuaacaaugaaucuuucaacuggaccggcguuacacagaauggcaccuccagcgcuugcaagcgcagaucuaacaauuccuuuuucagccggcugaacuggcucacacaucugaaguuuaaauauccugcccuuaaugugaccaugcccaacaacgagaaguucgacaaacuguacauuuggggaguccaccauccugggacggauaaugaccagaucucucucuaugcgcaggccuccggccgcauuacagugagcaccaagagaucccaacagacaguuaucccgaacauugggucucggccccgcgugagagauaucccuagccggaucuccauuuacuggaccaucgucaaacccggagacaugcugcugauuaauagcaccggcaaccucaucgcuccucgcggguacuuuaagauuagaucuggaaaguccagcaucaugcggucugacgcccccaucggcaaauguaauagcgagugcauuacaccgaacggcuccaucccuaaugauaagcccuuccagaacgugaaucgcauuacguauggggcuuguccuagauacgugaaacagaacacccugaaacuugccacaggaaugcggaauguccccgaaaaacaaacccgcggcaucuuuggggcgauugccggauucaucgagaacggcugggaagggaugguugacggaugguauggcuuuagacaccagaauagcgagggcacagggcaggcugccgaucugaagucuacccaagcugccaucaaccagauuaauggaaaacucaaccggcugaucggcaagacgaacgagaaguuccaccagauugaaaaagaguucuccgaaguggaggggagaauccaggaccuugaaaaguacguggaggauacaaaaauugaccuguggagcuauaaugccgagcuccuggucgcucuggaaaaccaacauaccaucgaucucaccgacucugagaugaauaagcuguuugaacgcacaaagaagcagcuucgggagaacgcggaagauaugggaaauggcugcuucaagauuuaccacaaaugugacaacgccugcaucggguccaucagaaauggcaccuaugaucaugacguguaccgcgacgaggcucugaacaaucgguuucagauuaagggaguugagcucaaaagcggcuacaaggauuggauccuguggauuucuuucgccaucuccugcuuucuucuguguguggcccuccugggguucauuaugugggcuugccagaaaggaaacaucagauguaauaucugcauuuga

SEQ ID NO: 193190 - RNA, 1701 nt, Artificial Sequence; identical to SEQ ID NO: 192354
  derived and/or modified CDS sequence (opt5) from hemagglutinin__InfluenzaA__ABG80326

SEQ ID NO: 193191 - RNA, 1701 nt, Artificial Sequence; identical to SEQ ID NO: 192354
  derived and/or modified CDS sequence (opt5) from hemagglutinin__InfluenzaA__ABG80337

SEQ ID NO: 193192 - RNA, 1701 nt, Artificial Sequence
  derived and/or modified CDS sequence (opt5) from hemagglutinin__InfluenzaA__ABG80359
augaagaccaucauugcccugagcuacauccucugccugguguucgcucagaaacuucccggcaacgacaauuccacagccacgcugugucucgggcaccaugcggucccuaacggaacccugguuaagacaauuaccaaugaucaaaucgaggugacaaacgcuaccgaacuugugcagucuagcuccacaggcagaauuugcgacucuccgcaccggauccuggaugggaaaaauuguacccucaucgacgcccugcugggagauccccauugcgacggcuuucagaacaaggagugggaucucuucgucgaacgcagcaaagccuauuccaauuguuacccuuaugacgugcccgauuacgcuucucugagaagccuuguugccuccagcgggacgcuggaguuuauuaacgaagacuucaauuggaccggaguggcucaggauggcggcucuuaugccugcaagcggggguccgucaacagcuuuuucucucgccucaauuggcugcacaaacuugaguacaaguauccugcgcugaacgugacaaugcccaauaacggaaaguuugacaaacucuacaucuggggcguucaucacccuuccaccgauagcgaccaaacaucucuguacgugagagccuccgggcgggucaccgugagcacgaagcgcucccagcagacagugaccccgaauauuggaucuagacccuggguccggggccugagcucccgcaucagcauuuauuggacaaucguuaaaccuggggacauucuccugaucaacucuaccggaaaccuuaucgcucccagaggcuacuucaagauucggaauggcaaguccagcaucaugcgcucugaugccccuauugggaacuguagcuccgagugcaucacccccaauggaucuauuccgagcgacaaaccuuuucagaacgugaauagaaucacauauggcgcuuguccccgguacgugaagcaaaacacgcugaaacucgccaccgggaugcgcaaugucccugaaaagcagacaagaggaaucuucggcgcgauugccggguuuaucgagaacggaugggaaggcaugguggauggcugguauggguuccggcaccaaaauuccgagggaaccggccaggcugccgaccugaaaagcacacaggcugccguugaucagauuaacgggaaacuuaauagacugaucgagcgcaccaacgaaaaguuucaucagauugagaaggaguucucugaaguggaaggacggauccaagaccucgagaaguacgucgaggauacgaaaaucgaccugugguccuauaaugccgaacugcucguggcucuggagaaccagcacacaauugaucuuaccgacagcgaaaugaauaagcuguucgagaaaaccagaaagcagcuccgcgaaaacgcggaggauaugggcaacgggugcuuuaaaaucuaccauaagugugacaaugccugcauuggcucuauccggaacggaacauacgaccacgauguuuauagagacgaggcucugaauaaccgcuuccagauuaagggcguggaacuuaaauccggguacaaggauuggauccuguggauuagcuuugccaucuccugcuuccuccugugugucgugcugcucggauuuaucaugugggccugccaaaaaggcaauauucgguguaacaucugcauuuga

SEQ ID NO: 193193 - RNA, 1701 nt, Artificial Sequence
  derived and/or modified CDS sequence (opt5) from hemagglutinin__InfluenzaA__ABG80370
augaagaccaucauugcccugagcuacauccucugccugguguucgcucagaaacuucccggcaacgacaauuccacagccacgcugugucucgggcaccaugcggucccuaacggaacccugguuaagacaauuaccaaugaucaaaucgaggugacaaacgcuaccgaacuugugcagucuagcuccacaggcagaauuugcgacucuccgcaccggauccuggaugggaaaaauuguacccucaucgacgcccugcugggagauccccauugcgacggcuuucagaacaaggagugggaucucuucgucgaacgcagcaaagccuauuccaauuguuacccuuaugacgugcccgauuacgcuucucugagaagccuuguugccuccagcgggacgcuggaguuuauuaacgaagacuucaauuggaccggaguggcucaggauggcaagucuuaugccugcaagcggggcuccgucaagagcuuuuucucucgccucaacuggcugcacaaacuugaguacaaauauccugcgcugaaugugacaaugcccaacaaugggaaguuugacaaacucuacaucuggggaguucaucacccuuccaccgauagcgaccaaacaucucuguacgugagagccuccggccgggucaccgugagcacgaagcgcucccagcagacagugauuccgaacaucgggucuagacccuggguccggggacugagcucccgcauuagcaucuauuggaccauuguuaagccuggcgacauccuccugaucaauucuacagggaaccuuauugcucccagaggauacuucaaaauccggaacggcaaguccagcauuaugcgcucugaugccccuaucggcaauuguagcuccgagugcauuacccccaacgggucuaucccgaaugacaaaccuuuucagaacgugaauagaaucaccuauggagcuuguccccgguacgugaagcaaaacacacugaaacucgccacgggcaugcgcaaugucccugaaaagcagaccagagggauuuucggagcgaucgccggcuuuauugagaacgggugggaaggaaugguggauggcugguauggcuuccggcaccagaauagcgaggggacaggacaggcugccgaccugaaauccacccaagcugccaucgaucagauuaacggcaaacuuaauagacugaucgagaagacaaacgaaaaguuucaucagaucgagaaggaguucagcgaaguugaagggcgcauucaagaccucgagaaauacguggaggauaccaagaucgaccuguggucuuauaaugccgaacugcucgucgcucuggagaaccagcacacgauugaucuuacagacuccgaaaugaauaaacuguucgagcggaccagaaagcagcuccgcgaaaacgcggaggauaugggaaacggcugcuuuaagaucuaccauaaaugugacaaugccugcauugggagcauccggaacggcaccuacgaccacgauguguauagagacgaggcucugaauaaccgcuuccagauuaagggaguugaacuuaaaucuggcuacaaggauuggauccuguggaucuccuuugccauuagcugcuuccuccugugugugguccugcucggguuuaucaugugggccugccaaaaaggaaauauucgguguaacaucugcauuuga

SEQ ID NO: 193194 - RNA, 1701 nt, Artificial Sequence; identical to SEQ ID NO: 193125
  derived and/or modified CDS sequence (opt5) from hemagglutinin__InfluenzaA__ABG80392

SEQ ID NO: 193195 - RNA, 1701 nt, Artificial Sequence; identical to SEQ ID NO: 193125
  derived and/or modified CDS sequence (opt5) from hemagglutinin__InfluenzaA__ABG80403

SEQ ID NO: 193196 - RNA, 1701 nt, Artificial Sequence; identical to SEQ ID NO: 193125
  derived and/or modified CDS sequence (opt5) from hemagglutinin__InfluenzaA__ABG80414

SEQ ID NO: 193197 - RNA, 1701 nt, Artificial Sequence; identical to SEQ ID NO: 193125
  derived and/or modified CDS sequence (opt5) from hemagglutinin__InfluenzaA__ABG80425

SEQ ID NO: 193198 - RNA, 1701 nt, Artificial Sequence; identical to SEQ ID NO: 192855
  derived and/or modified CDS sequence (opt5) from hemagglutinin__InfluenzaA__ABG88289

SEQ ID NO: 193199 - RNA, 1701 nt, Artificial Sequence
  derived and/or modified CDS sequence (opt5) from hemagglutinin__InfluenzaA__ABG88300
augaaggccaaacugcucgugcugcuuugcgcuuucaccgccacauacgcggacacgaucuguauuggcuaucacgcuaacaauagcaccgauacagucgacaccguucuggagaagaacgugacagugacccauuccgucaaucuccuggaagauucucacaacgggaaacuuugcagacugaagggaacagcuccccuccagcugggcaauuguagcguggccggguggauccugggaaacccugagugcgaaucccucuuuucuaaagagagcugguccuacauugccgaaaccccgaaucccgagaacggcacguguuauccuggguacuucgccgacuaugaggaacugcgggagcaacuuucuagcguuuccagcuuugaacgcuucgagaucuuucccaaggagucuuccuggccuaaucauaccgugacaaagggagucaccgcuagcugcucucacaacggcaaauccagcuucuacaagaaucugcucuggcugacagaaaagaacggccuuuaucccgaucugucuaaguccuacgugaauaacaaagagaaggaaguucucgugcuguggggaguccaucacccuagcaauauuggggaccagagagccaucuaccacaccgagaacgcguauguguccguggucucuagccauuacucccggcgcuuuacgccggaaaucacaaagagacccaaaguucgggaucaggagggccgcauuaacuauuacuggacccugcucgagccuggggacacaaucauuuucgaagccaauggaaaccugaucgcucccugguaugccuuugcucuuagcagaggcuucgggucuggaauuaucaccuccaaugccagcaugggcgagugugaugcgaagugccagaccccucaaggcgccauuaacucuagccugcccuuucagaaugugcacccggugacaaucggggaauguccuaaauacguccgguccacgaagcuccgcauggugaccggacugagaaacauccccucuauucagagccggggccuuuucggggcuaucgccggauuuauugagggcggguggacaggaaugaucgacggcugguauggcuaccaucaccagaaugaacaaggguccggauacgcugccgaucagaaaagcacccagaacgccauugacggcaucacaaauaagguuaacucugugaucgagaaaaugaauacccaguucacggcugucgggaaggaguucaacaagcuggaacgcagaauggagaaucucaacaaaaagguggaugacggauuucuggacauuuggacauauaaugcggaacugcucguucugcuugagaacgaacggacccuggauuuccacgacuccaacgugaaaaaucucuacgagaaggucaaaacccaacugaagaacaaugccaaggagaucggcaacgggugcuuugaguucuaucauaaauguaauaacgaaugcauggaaagcgugaagaauggcacauacgauuauccuaaauacucugaggaguccaaacuuaaccgcgagaaaauugacggagucaagcuggaaagcaugggcguguaucagauccucgcuauuuacuccaccguugccucuagccuggugcugcucgucucccugggggccaucucuuuuuggaugugcagcaauggaucccuucaguguagaaucugcauuuga

SEQ ID NO: 193200 - RNA, 1701 nt, Artificial Sequence; identical to SEQ ID NO: 192983
  derived and/or modified CDS sequence (opt5) from hemagglutinin__InfluenzaA__ABG88311

SEQ ID NO: 193201 - RNA, 1701 nt, Artificial Sequence
  derived and/or modified CDS sequence (opt5) from hemagglutinin__InfluenzaA__ABG88322
augaaggccaaacugcucgugcugcuuugcgcuuucaccgccacauacgcggacacgaucuguauuggcuaucacgcuaacaauagcaccgauacagucgacaccguucuggagaagaacgugacagugacccauuccgucaaucuccuggaagauucucacaacgggaaacuuugcagacugaagggaacagcuccccuccagcugggcaauuguagcguggccggguggauccugggaaacccugagugcgaaucccucuuuucuaaagagagcugguccuacauugccgaaaccccgaaucccgagaacggcacguguuauccuggguacuucgccgacuaugaggaacugcgggagcaacuuucuagcguuuccagcuuugaacgcuucgagaucuuucccaaggagucuuccuggccuaaucauaccgugacaaagggagucaccgcuagcugcucucacaacggcaaauccagcuucuacaagaaucugcucuggcugacagaaaagaacggccuuuaucccauucugucuaaguccuacgugaauaacaaagagaaggaaguucucgugcuguggggaguccaucacccuagcaauaucggggaucagagagccaucuaccacaccgagaacgcguauguguccguggucucuagccauuacucccggcgcuuuacgccggaaauugccaagagacccaaaguucgggaccaggagggccgcaucaacuauuacuggacacugcucgagccuggggauaccauuaucuucgaagcuaauggaaaccugauugcccccugguaugcuuuugcccuuagcagaggcuucgggucuggaaucauuacauccaaugcgagcaugggcgagugugacgccaagugccagaccccucaaggcgcuaucaacucuagccugcccuuucagaaugugcacccggugaccaucggggaauguccuaaauacguccgguccacaaagcuccgcauggugacgggacugagaaacauucccucuauccagagccggggccuuuucggggccauugcuggauuuaucgagggcggguggaccggaaugauugauggcugguauggcuaccaucaccagaaugaacaaggguccggauacgccgccgaccagaaaagcacacagaacgcuaucgauggcaucaccaauaagguuaacucugugauugagaaaaugaauacacaguucaccgcggucgggaaggaguucaacaagcuggaacgcagaauggagaaucucaacaaaaagguggacgauggauuucuggacaucuggacguauaaugccgaacugcucguucugcuugagaacgaacggacacuggacuuccacgauuccaacgugaaaaaucucuacgagaaggucaaaaaccaacugaagaauaacgcuaaggagauuggcaaugggugcuuugaguucuaucauaaauguaacaaugaaugcauggaaagcgugaagaacggcaccuacgacuauccuaaauacucugaggaguccaaacuuaaucgcgagaaaaucgauggagucaagcuggaaagcaugggcguguaucagauucucgccaucuacuccaccguugccucuagccuggugcugcucgucucccugggggcuaucucuuuuuggaugugcagcaacggaucccuucaguguagaauuugcaucuga

SEQ ID NO: 193202 - RNA, 1701 nt, Artificial Sequence
  derived and/or modified CDS sequence (opt5) from hemagglutinin__InfluenzaA__ABG88333
augaaggccaaacugcucgugcugcuuugcgcucugagcgccaccgacgcggauacaaucuguauuggcuaccacgcuaacaauuccacggacaccgucgauacaguucucgagaagaacgugaccgugacacauucugucaaucugcuugaagacagccacaacgggaaacugugcagacucaagggaaucgcuccccugcagcugggcaaauguuccauugccggguggauccucggaaauccugagugcgaaucucuguucagcaagaaguccuggucuuauauugccgagaccccgaacagcgaaaauggcacauguuaccccggguauuuugccgauuacgaggagcuucgggaacaacuguccagcgugucuuccuucgagcgcuuugaaaucuucccuaaagagagcucuuggcccaagcauaacguuaccagaggagugacggcuuccugcagccacaaaggcaagucuuccuuuuaucggaaucuccuguggcuuaccgagaaaaacggcagcuacccuaaucuguccaagucuuaugucaacaauaaggaaaaagaggugcucguucuguggggagugcaucaccccagcaacaucgaagaccagaagacaauuuaccgcaaagagaaugccuacgucuccguggugagcucucacuauaacagacgguucaccccugaaaucuccaagcgcccgaaagucagagggcaggagggccggauuaacuacuauuggacacugcucgagcccggggauaccaucauuuuugaagcgaauggaaaccugaucgccccuugguacgcuuucgcccuuagccgcggcuuugggucuggaauuaucacgagcaaugcuuccauggacgagugugaugccaagugccagacaccccaaggcgcgaucaacucuagccugccuuuccagaauguucaucccgugaccauuggcgaauguccgaaauaugugagauccacaaagcuccggauggucaccgggcugcgcaacaucccuagcauucagucuagaggacuuuuuggcgccaucgcuggguucauugagggaggcuggaccgggaugaucgacggaugguacggcuaucaccaucagaaugaacaaggcuccggguacgccgcugaucagaagucuacacagaacgccaucaauggaauuacgaacaaagugaauagcguuaucgagaagaugaacacccaguuuacagccgugggcaaagaguucaauaagcuggaaaaacggauggagaaccucaauaagaaggucgacgauggguuccuggacauuuggaccuacaacgcugaacugcucgugcugcuugagaacgaacgcacacuggacuuucacgauuccaauguuaaaaaccucuaugagaaggugaaaagccaacugaagaauaacgcgaaagagaucggaaauggcugcuucgaauuuuaccacaaguguaacaaugagugcauggaauccgucaagaacgggaccuaugacuaccccaaauauucugaggagagcaaacuuaauagagaaaagauugauggcgugaagcuggaguccaugggagucuaccagauccucgccaucuauucuacgguggcuagcucccugguucugcucgugagccugggcgccauuucuuucuggaugugcuccaacgggagccuucagugucggaucugcauuuga

SEQ ID NO: 193203 - RNA, 1701 nt, Artificial Sequence
  derived and/or modified CDS sequence (opt5) from hemagglutinin__InfluenzaA__ABG88344
augaaggccaaacugcucgugcugcuuugcgcucugagcgccaccgacgcggauacaaucuguauuggcuaccacgcuaacaauuccacggacaccgucgauacaguucucgagaagaacgugaccgugacacauucugucaaucugcuugaagacagccacaacgggaaacugugcagacucaagggaaucgcuccccugcagcugggcaaauguuccauugccggguggauccucggaaauccugagugcgaaucucuguucagcaagaaguccuggucuuauauugccgagaccccgaacagcgaaaauggcacauguuaccccggguauuuugccgauuacgaggagcuucgggaacaacuguccagcgugucuuccuucgagcgcuuugaaaucuucccuaaagagagcucuuggcccaagcauaacguuaccagaggagugacggcuuccugcagccacaaaggcaagucuuccuuuuaucggaaucuccuguggcuuaccgagaaaaacggcagcuacccuaaucuguccaagucuuaugucaacaauaaggaaaaagaggugcucguucuguggggagugcaucaccccagcaacaucgaagaccagaagacaauuuaccgcaaagagaaugccuacgucuccguggugagcucucacuauaacagacgguucaccccugaaaucuccaagcgcccgaaagucagaaaccaggaggggcggauuaauuacuauuggacacugcucgagcccggcgauaccaucauuuuugaagcgaacgggaaucugaucgccccuugguacgcuuucgcccuuagccgcggauuuggcucugggauuaucacgagcaacgcuuccauggacgagugugaugccaagugccagacaccccaaggagcgaucaauucuagccugccuuuccagaacguucaucccgugaccauuggcgaauguccgaaauaugugagauccacaaagcuccggauggucaccggccugcgcaauaucccuagcauucagucuagagggcuuuuuggagccaucgcuggcuucauugaagggggauggaccggcaugaucgacgggugguacggauaucaccaucagaacgaacaaggcuccggcuacgccgcugaucaaaagagcacacagaaugccaucaacgggauuacgaauaaagugaacucuguuaucgagaagaugaauacccaguuuacagccgugggaaaagaguucaacaagcuggaaaaacggauggagaaucucaacaagaaggucgacgauggcuuccuggacauuuggaccuacaacgcugaacugcucgugcugcuugagaaugaacgcacacuggacuuucacgauuccaacguuaaaaaucucuaugagaaggugaaaagccagcugaagaacaaugcgaaagagaucgggaacggaugcuucgaauuuuaccacaaguguaauaacgagugcauggaauccgucaagaauggcaccuaugacuaccccaaauauucugaggagagcaaacuuaacagagagaagauugauggggugaagcuggaguccaugggcgucuaccagauccucgccaucuauucuacgguggcuagcucccugguucugcucgugagccugggagccauuucuuucuggaugugcuccaauggcagccuucagugucggaucugcauuuga

SEQ ID NO: 193204 - RNA, 1701 nt, Artificial Sequence
  derived and/or modified CDS sequence (opt5) from hemagglutinin__InfluenzaA__ABG88355
augaagaccaucauugcccugagcuacauccucugccugguguucgcucagaaacuucccggcaacgacaauuccacagccacgcugugucucgggcaccaugcggucccuaacggaacccugguuaagacaauuaccaaugaucaaaucgaggugacaaacgcuaccgaacuugugcagucuagcccgacaggcagaauuugcgacucuccccaccggauccuggaugggaaaaauuguacccucaucgacgcccugcugggagauccucauugcgacggcuuucagaacaaggagugggaucucuucgucgaacgcuccaaagccuauagcaauuguuaccccuaugacgugccugauuacgcuucccugagaucucuuguugccagcuccgggacgcuggaguuuaccaacgaaaauuucaacuggacaggaguggcucaggacggcaagagcuaugccugcaagcggggcucugucaauuccuuuuucagccgccucaacuggcugcacaaacuugaguacaaguaucccgcgcugaaugugaccaugccuaacaaugggaaauuugauaagcucuacauuuggggaguucaucacccgucuacagacuccgaucaaaccagccuguacgugagagccucuggcaaagucacgguguccacaaagcggagccagcagaccgugauccccgacauuggguaucgcccuugggucagaggacuguccucucggaucagcauuuacuggacaaucguuaagcccggcgacauucuccugaucaacuccaccgggaaccuuaucgcuccucgcggauauuucaaaauuagaaauggcgagagcucuaucaugcgguccgaugcccccauuggcaacuguagcucugaaugcaucaccccgaaugggagcauuccuaacgacaagcccuuucagaaugugaaccgcaucacauacggagcuuguccuagauaugugaaacaaaauacgcugaagcucgccaccggcaugcggaacguccccgagaaacagacacgcgggaucuucggagcgauugccggcuuuaucgaaaaugggugggagggaaugguggauggcugguacggcuucagacaccagaacuccgaggggaccggacaggcugccgaccugaagucuacacaagcugccauugaucagaucaauggcaaacuuaaccggcugguugaaaagaccaaugagaaguuucaucagauugaaaaagaguucagcgaaguggaggggagaauccaagaccucgagaaguaugucgaagauacgaaaaucgaccugugguccuacaacgccgagcugcucguggcucuggaaaaucagcacacaauugaucuuaccgacagcgagaugaacaagcuguucgaacgcacccggaaacagcucagagagaacgcggaggauaugggaaauggcugcuuuaagaucuaccauaagugugacaacgccugcauugggucuauccgcaauggcacauaugaccacgauguuuaccgggacgaagcucugaacaauagauuccagauuaaaggaguggagcuuaaguccggcuauaaagauuggauccuguggauuagcuuugccaucucuugcuuccuccugugugucgugcugcucggguuuaucaugugggccugccaaaagggaaacauucgcuguaauaucugcauuuga

SEQ ID NO: 193205 - RNA, 1701 nt, Artificial Sequence
  derived and/or modified CDS sequence (opt5) from hemagglutinin__InfluenzaA__ABG88366
augaagaccaucauugcccugagcuacuuccucugccugguguuugcucagaaacuucccggcaacgacaauuccacagccacgcugugucucgggcaccaugcggucccuaacggaacccugguuaagacaaucaccaaugaucaaauugaggugacaaacgcuaccgaacuugugcaaaauucuccgacaggcagaaucugcgacagcccccaccggauucuggaugggaaaaacuguacccucaucgacgcccugcugggagauccucauugcgacggcuuccagaauaaggagugggaucucuuugucgaacgcuccaaagccuauucuaacuguuaccccuaugacgugccugauuacgcuagccugagaucccuuguugccucuagcgggacgcuggaguucaccaaugaaaacuuuaauuggacaggaguggcucaggacggcaaguccuaugccugcaagcggggcagcgucaacucuuucuuuucccgccucaauuggcugcacaaacuugaguacaaguaucccgcgcugaacgugaccaugccuaauaacgggaaauucgauaagcucuacaucuggggaguucaucacccgagcacagacucugaucagaccucccuguacgugagagccagcggcaaagucacggugucuacaaagcggucccagcagaccgugauucccgacaucggguaucgcccuugggucagaggacugagcucccggauuucuaucuacuggacaauuguuaagcccggcgacauccuccugauuaacagcaccgggaaucuuaucgcuccucgcggauauuuuaaaaucagaaacggcaaguccagcauuaugcggucugaugcccccaucggcaauuguuccagcgagugcauuaccccgaacgggucuaucccuaaugacaaacccuuccagaacgugaaucgcauuacauacggagcuuguccuagauaugugaagcaaaacacgcugaaacucgccaccggcaugcggaauguccccgaaaagcagacacgcgggaucuuuggagcgaucgccggcuucauugagaacgggugggaaggaaugguggauggcugguacggcuuuagacaccagaauagcgaggggaccggacaggcugccgaccugaaauccacacaagcugccaucgaucagauuaacggcaaacuuaaucggcugguugagaagaccaacgaaaaguuccaucagaucgagaaggaguucucugaaguggaagggcgcauucaagaccucgagaaauaugucgaggauacgaagaucgaccuguggagcuacaaugccgaacugcucguggcucuggagaaccagcacacaaucgaucuuaccgacuccgaaaugaacaaacuguuugagagaacccggaagcagcucagagaaaaugcggaggauaugggaaacggcugcuucaagauuuaccauaaaugugacaaugccugcaucgggagcauucgcaacggcacauaugaccacgauguuuaccgggacgaggcucugaauaacagauuucagaucaagggaguggaacuuaaaucuggcuauaaggauuggauucuguggaucuccuucgccauuagcugcuuucuccugugugucgugcugcucggguucaucaugugggccugccaaaaaggaaauauccgcuguaacauuugcaucuga

SEQ ID NO: 193206 - RNA, 1701 nt, Artificial Sequence; identical to SEQ ID NO: 193056
  derived and/or modified CDS sequence (opt5) from hemagglutinin__InfluenzaA__ABG88377

SEQ ID NO: 193207 - RNA, 1701 nt, Artificial Sequence; identical to SEQ ID NO: 193056
  derived and/or modified CDS sequence (opt5) from hemagglutinin__InfluenzaA__ABG88388

SEQ ID NO: 193208 - RNA, 1701 nt, Artificial Sequence
  derived and/or modified CDS sequence (opt5) from hemagglutinin__InfluenzaA__ABG88399
augaagaccaucauugcccugagcuacauccucugccugguguucgcucagaaacuucccggcaacgacaauuccacagccacgcugugucucgggcaccaugcggucccuaacggaacccugguuaagacaauuaccaaugaucaaaucgaggugacaaacgcuaccgaacuugugcagucuagcuccacaggcagaauuugcgacucuccgcaccggauccuggaugggaaaaauuguacccucaucgacgcccugcugggagauccccauugcgacggcuuucagaacaaggagugggaucucuucgucgaacgcagcaaagccuauuccaauuguuacccuuaugacgugcccgauuacgcuucucugagaagccuuguugccuccagcgggacgcuggaguuuaccaaggaaucuuucaacuggacaggaguggcucaggacggcaaguccuaugccugcaaacggggcagcgucaauucuuucuucucccgccucaacuggcugcacaaacuugaguacaaguauccugcgcugaaugugaccaugcccaacaaugauaaguuugacaaacucuacauuuggggaguucaucacccuagcacagauucugaccaaaccucccuguacgugcaggccagcgggagagucacgguguccacaaagcggucucagcagaccgugaucccgaacauuggcagccgccccugggucagagggaucuccagccggauuucuaucuauuggacaauuguuaagccuggagacauccugcucaucaauuccaccggcaaccugauugcuccccgcggguacuucaaaaucagaaacggaaagagcucuauuaugcggagcgaugccccuaucggcaauuguaacuccgagugcauuacccccaauggcucuaucccgaacgacaaaccuuuucaaaaugugaaccgcaucacauauggggcuugucccagauacgugaagcagaauacgcuuaaacuggccaccggaaugcggaacgucccugaaaagcagacacgcggcauuuucggggcgaucgccggauuuauugagaauggcugggaagggaugguggauggaugguauggcuucagacaccagaacagcgagggcaccgggcaagcugccgaccucaaauccacacaggcugccaucgaucagauuaauggaaagcugaaccggcuuaucgagaagaccaaugaaaaauuucaucaaaucgagaaggaauuuagcgagguugaaggccgcauucaggaccuggagaaauacguggaggauacgaagaucgaccucuggucuuauaacgccgaacugcuggucgcucucgagaaucagcacacaauugaucugaccgacuccgaaaugaacaaacuuuucgagagaacccggaagcagcugagagaaaacgcggaggauauggggaauggaugcuuuaagaucuaccauaaaugugacaacgccugcauuggcagcauccgcaaugggacauacgaccacgauguguaucgggacgaggcucucaacaauagauuccaaauuaagggcguugaacugaaaucuggauacaaggauuggauccuuuggaucuccuuugccauuagcugcuuccugcucugugugguccugcugggcuuuaucaugugggccugccagaaagggaacauucgcuguaauaucugcauuuga

SEQ ID NO: 193209 - RNA, 1701 nt, Artificial Sequence; identical to SEQ ID NO: 193096
  derived and/or modified CDS sequence (opt5) from hemagglutinin__InfluenzaA__ABG88410

SEQ ID NO: 193210 - RNA, 1701 nt, Artificial Sequence; identical to SEQ ID NO: 193096
  derived and/or modified CDS sequence (opt5) from hemagglutinin__InfluenzaA__ABG88421

SEQ ID NO: 193211 - RNA, 1701 nt, Artificial Sequence
  derived and/or modified CDS sequence (opt5) from hemagglutinin__InfluenzaA__ABG88432
augaagaccaucauugcccugagcuacauccucugccugguguucgcucagaaacuucccggcaacgacaauuccacagccacgcugugucucgggcaccaugcggucccuaacggaacccugguuaagacaauuaccaaugaucaaaucgaggugacaaacgcuaccgaacuugugcagucuagcuccacaggcagaauuugcgacucuccgcaccggauccuggaugggaaaaauuguacccucaucgacgcccugcugggagauccccauugcgacggcuuucagaacaaggagugggaucucuucgucgaacgcagcaaagccuauuccaauuguuacccuuaugacgugcccgauuacgcuucucugagaagccuuguugccuccagcgggacgcuggaguuuauuaacgaagacuucaauuggaccggaguggcucaggauggcaagucuuaugccugcaagcggggcuccgucaacagcuuuuucucucgccucaauuggcugcacaaacuugaguacaaguauccugcgcugaacgugacaaugcccaauaacgggaaauuugacaagcucuacaucuggggaguucaucacccuuccaccgauagcgaccaaacaucucuguacgugagagccuccggccgggucaccgugagcacgaaacgcucccagcagacagugauuccgaauaucggguucagacccuggguccggggacugucuagccgcauuuccaucuauuggaccauuguuaagccuggcgacauccuccugaucaacagcacagggaaccuuauugcucccagaggauacuuuaagaugcggaauggcaaaucuuccaucaugcgcagcgaugccccuauuggcaacuguucuagcgagugcaucacccccaauggguccauuccgaacgacaagccuuuccagaaugugaacagaaucaccuauggagcuuguccccgguacgugaaacaaaauacacugaagcucgccacgggcaugcgcaacgucccugaaaaacagaccagagggaucuuuggagcgauugccggcuucaucgagaaugggugggaaggaaugguggauggcugguauggcuuucggcaccagaacucugaggggacaggacaggcugccgaccuuaagagcacccaagcugccauugaucagaucaauggcaaacugaacagacugauugagaagacaaaugaaaaguuccaucagaucgagaaagaguucuccgaaguugaagggcgcauccaagaccucgagaaguacguggaggauaccaaaauugaccuguggagcuauaacgccggacugcucgucgcucuggaaaaucagcacacgaucgaucuuacagacucugagaugaacaagcuguuugaacggaccagaaaacagcuccgcgagaacgcggaagauaugggcaaugggugcuucaagauuuaccauaagugugacaacgccugcaucggcuccauucggaauggaaccuacgaccacgauguguauagagacgaggcucugaacaaucgcuuucagaucaaaggcguugagcuuaagagcggguacaaagauuggauucuguggaucucuuucgccaucuccugcuuucuccugugugugguccugcucggauucauuaugugggccugccaaaagggcaacauccgguguaauauuugcaucuga

SEQ ID NO: 193212 - RNA, 1701 nt, Artificial Sequence; identical to SEQ ID NO: 193096
  derived and/or modified CDS sequence (opt5) from hemagglutinin__InfluenzaA__ABG88443

SEQ ID NO: 193213 - RNA, 1701 nt, Artificial Sequence
  derived and/or modified CDS sequence (opt5) from hemagglutinin__InfluenzaA__ABG88454
augaagaccaucauugcccugagcuacauccucugccugguguucgcucagaaacuucccggcaacgacaauuccacagccacgcugugucucgggcaccaugcggucccuaacggaacccugguuaagacaauuaccaaugaucaaaucgaggugacaaacgcuaccgaacuugugcagucuagcuccacaggcagaauuugcgacucuccgcaccggauccuggaugggaaaaauuguacccucaucgacgcccugcugggagauccccauugcgacggcuuucagaacaaggagugggaucucuucgucgaacgcagcaaagccuauuccaauuguuacccuuaugacgugcccgauuacgcuucucugagaagccuuguugccuccagcgggacgcuggaguuuauuaacgaagacuucaauuggaccggaguggcucaggauggcaagucuuaugccugcaagcggggcuccgcgaacagcuuuuucucucgccucaauuggcugcacaaacuugaguacaaguauccugcccugaacgucacaaugcccaauaacgggaaauuugacaagcucuacaucuggggagugcaucacccuuccaccgauagcgaccaaacaucucuguacguuagagcuuccggcggggugaccgucagcacgaaacggucccagcagacagugauuccgaauaucggaucucgccccugggugagaggccugagcucccggauuagcaucuauuggaccauugucaagccuggggacauccuccugaucaacucuacaggaaaccuuauugcccccagaggcuacuucaagaucagauccggcaaaagcucuauuaugcggagcgaugcuuccaucgggaauuguucuagcgagugcauuaccccuaacggauccauccccaaugacaagccguuucagaacguuaaucgcaucaccuauggcgccuguccuagauacgugaaacaaaacacacugaagcucgcgacggggaugcggaaugugcccgaaaaacagacccgcggaauuuucggcgccaucgcuggguuuauugagaacggaugggaaggcauggucgauggcugguauggguucagacaccagaauagcgagggaacaggccaggccgcugaccugaagucuacccaagccgccaucgaucagauuaacgggaaacuuaaucggcugaucggaaagacaaacgacaaguuucaucagaucgagaaagaguucuccgaaguggaaggccgcauucaagaucucgagaaguacguugaagacaccaaaaucgaucuguggagcuauaaugcugagcugcucguggcgcuggagaaccagcacacgauugaccuuacagauucugaaaugaauaagcuguucgagcgcacccggaaacagcucagagaaaacgccgaggacauggggaacggcugcuuuaagaucuaccauaagugugacaaugcuugcauuggauccauccgcaacggcaccuacgaucacgacgucuaucgggaugaagcccugaauaacagauuccagauuaaagggguggagcuuaagagcggauacaaagacuggauccuguggaucuccuuugccauuucuugcuuccuccuguguguugugcugcucggcuuuaucaugugggcuugccaaaaggggaauauucgcuguaacaucugcauuuga

SEQ ID NO: 193214 - RNA, 1701 nt, Artificial Sequence
  derived and/or modified CDS sequence (opt5) from hemagglutinin__InfluenzaA__ABG88465
augaagaccaucauugcccugagcuacauccucugccugguguucgcucagaaacuucccggcaacgacaauuccacagccacgcugugucucgggcaccaugcggucccuaacggaacccugguuaagacaauuaccaaugaucaaaucgaggugacaaacgcuaccgaacuugugcagucuagcuccacaggcagaauuugcgacucuccgcaccggauccuggaugggaaaaauuguacccucaucgacgcccugcugggagauccccauugcgacggcuuucagaacaaggagugggaucucuucgucgaacgcagcaaagccuauuccaauuguuacccuuaugacgugcccgauuacgcuucucugagaagccuuguugccuccagcgggacgcuggaguuuauuaacgaagacuucaauuggaccggaguggcucaggauggcaagucuuaugccugcaagcggggcuccgucaacagcuuuuucucucgccucaauuggcugcacaaacuugaguacaaguauccugcgcugaacgugacaaugcccaauaacgggaaauuugacaagcucuacaucuggggaguucaucacccuuccaccgauagcgaccaaacaucucuguacgugagagccuccggccgggucaccgugagcacgaaacgcucccagcagacagugauuccgaauaucggguucagacccuggguccggggacugucuagccgcauuuccaucuauuggaccauuguuaagccuggcgacauccuccugaucaacagcacagggaaccuuauugcucccagaggauacuuuaagauccggaauggcaaaucuuccauuaugcgcagcgaugccccuaucggcaacuguucuagcgagugcauuacccccaauggguccaucccgaacgacaagccuuuccagaaugugaacagaaucaccuauggagcuuguccccgguacgugaaacaaaauacacugaagcucgccacgggcaugcgcaacauuccugaaaaacagaccagagggaucuuuggagcgauugccggcuucaucgagaaugggugggaaggaauggucgauggcugguauggcuuucggcaccagaacucugaggggacaggacaggcugccgaccuuaagagcacccaagcugccauugaucagaucaauggcaaacugaacagacugaucgagaagacaaaugaaaaguuccaucagauugagaaagaguucuccgaaguggaagggcgcauccaagaccucgagaaguacguugaggauaccaaaauugaccuguggagcuauaacgccggacugcucguggcucuggaaaaucagcacacgaucgaucuuacagacucugagaugaacaagcuguuugaacggaccagaaaacagcuccgcgagaacgcggaagauaugggcaaugggugcuucaagauuuaccauaagugugacaacgccugcaucggcuccauucggaauggaaccuacgaccacgaugucuauagagacgaggcucugaacaaucgcuuucagaucaaaggcguggagcuuaagagcggguacaaagauuggauccuguggauuucuuucgccaucuccugcuuucuccuguguguugugcugcucggauucauuaugugggccugccaaaagggcaacauccgguguaauauuugcaucuga

SEQ ID NO: 193215 - RNA, 1701 nt, Artificial Sequence; identical to SEQ ID NO: 193096
  derived and/or modified CDS sequence (opt5) from hemagglutinin__InfluenzaA__ABG88476

SEQ ID NO: 193216 - RNA, 1701 nt, Artificial Sequence; identical to SEQ ID NO: 193096
  derived and/or modified CDS sequence (opt5) from hemagglutinin__InfluenzaA__ABG88487

SEQ ID NO: 193217 - RNA, 1701 nt, Artificial Sequence; identical to SEQ ID NO: 193096
  derived and/or modified CDS sequence (opt5) from hemagglutinin__InfluenzaA__ABG88498

SEQ ID NO: 193218 - RNA, 1701 nt, Artificial Sequence; identical to SEQ ID NO: 193096
  derived and/or modified CDS sequence (opt5) from hemagglutinin__InfluenzaA__ABG88509

SEQ ID NO: 193219 - RNA, 1701 nt, Artificial Sequence
  derived and/or modified CDS sequence (opt5) from hemagglutinin__InfluenzaA__ABG88520
augaagaccaucauugcccugagcuacaucuccugccucguguucgcucagaaacugcccggcaacgacaauucuacagccacgcuuugucuggggcaccaugcggucccuaacggaacccucguuaagacaauuaccaaugaucaaaucgaggugacaaacgcuaccgaacuggugcagagcuccucuacaggcagaauuugcgacagcccgcaccggauccuugaugggaaaaauuguacccugaucgacgcccuccugggagauccccauugcgacggcuuucagaacaaggagugggaucuguucgucgaacgcuccaaagccuauucuaauuguuacccuuaugacgugcccgauuacgcuagccucagaucccugguugccagcucugggacgcuugaguuuauuaacgaagacuucaauuggaccggaguggcucaggauggcaaguccuaugccugcaagcggggcagcgucaacucuuucuucucccgccugaauuggcuccacaaacuggaguacaaguauccugcgcuuaacgugacaaugcccaauaacgggaaauuugacaagcuguacaucuggggaguucaucacccuagcaccgauucugaccaaacaucccucuacgugagagccagcggccgggucaccguguccacgaaacgcucucagcagacagugauuccgaauaucggguucagacccuggguccggggacugagcucccgcauuagcaucuauuggaccauuguuaagccuggcgacauccugcucaucaacucuacagggaaccugauugcucccagaggauacuuuaagauccggaauggcaaauccagcauuaugcgcucugaugccccuaucggcaacuguagcuccgagugcauuacccccaaugggucuaucccgaacgacaagccuuuccagaaugugaacagaaucaccuauggagcuuguccccgguacgugaaacaaaauacacuuaagcuggccacgggcaugcgcaacgucccugaaaaacagaccagagggauuuuuggagcgaucgccggcuucauugagaaugggugggaaggaaugguggauggcugguauggcuuucggcaccagaacagcgaggggacaggacaggcugccgaccucaaguccacccaagcugccaucgaucagauuaauggcaaacugaacagacuuaucgagaagacaaaugaaaaguuccaucagaucgagaaagaauuuagcgagguugaagggcgcauucaagaccuggagaaguacguggaggauaccaaaaucgaccucuggucuuauaacgccggacugcuggucgcucucgaaaaucagcacacgauugaucugacagacuccgagaugaacaaacuuuuugaacggaccagaaagcagcugcgcgagaacgcggaagauaugggcaaugggugcuucaagaucuaccauaagugugacaacgccugcauuggcagcauccggaauggaaccuacgaccacgauguguauagagacgaggcucucaacaaucgcuuucagauuaaaggcguugagcugaagucuggguacaaagauuggauccuuuggaucuccuucgccauuagcugcuuucugcucugugugguccugcugggauucacaaugugggccugccaaaagggcaacauccgguguaauauuugcaucuga

SEQ ID NO: 193220 - RNA, 1701 nt, Artificial Sequence
  derived and/or modified CDS sequence (opt5) from hemagglutinin__InfluenzaA__ABG88531
augaagaccaucauugcccugagcuacauccucugccugguguucgcucagaaacuucccggcaacgacaauuccacagccacgcugugucucgggcaccaugcggucccuaacggaacccugguuaagacaauuaccaaugaucaaaucgaggugacaaacgcuaccgaacuugugcagucuagcuccacaggcagaauuugcgacucuccgcaccggauccuggaugggaaaaauuguacccucaucgacgcccugcugggagauccccauugcgacggcuuucagaacaaggagugggaucucuucgucgaacgcagcaaagccuauuccaauuguuacccuuaugacgugcccgauuacgcuucucugagaagccuuguugccuccagcgggacgcuggaguuuauuaacgaagacuucaauuggaccggaguggcucaggauggcaagucuuaugccugcaagcggggcuccgucaacagcuuuuucucucgccucaauuggcugcacaaacuugaguacaaguauccugcgcugaacgugacaaugcccaauaacgggaaauuugacaagcucuacaucuggggaguucaucacccuuccaccgauagcgugcaaacaucucuguacgucagagccuccggccgggugaccgugagcacgaaacgcucccagcagacagucauuccgaauaucggguucagacccuggguucggggacugucuagccgcauuuccaucuauuggaccauugugaagccuggcgacauccuccugaucaacagcacagggaaccuuauugcucccagaggauacuuuaagauccggaauggcaaaucuuccauuaugcgcagcgacgccccuaucggcaacuguucuagcgagugcauuacccccaauggguccaucccgaacgauaagccuuuccagaaugugaacagaaucaccuauggagcuuguccccgguacgucaaacaaaauacacugaagcucgccacgggcaugcgcaacgugccugaaaaacagaccagagggauuuuuggagcgaucgccggcuucauugagaaugggugggaaggaaugguugacggcugguauggcuuucggcaccagaacucugaggggacaggacaggcugccgaucuuaagagcacccaagcugccaucgaccagauuaauggcaaacugaacagacugaucgagaagacaaaugaaaaguuccaucagaucgagaaagaguucuccgaaguggaagggcgcauucaagaucucgagaaguacgucgaggacaccaaaaucgaucuguggagcuauaacgccggacugcucguggcucuggaaaaucagcacacgauugaccuuacagauucugagaugaacaagcuguuugaacggaccagaaaacagcuccgcgagaacgcggaagacaugggcaaugggugcuucaagaucuaccauaagugugauaacgccugcauuggcuccauccggaauggaaccuacgaccacgacguuuauagagaugaggcucugaacaaucgcuuucagauuaaaggcguggagcuuaagagcggguacaaagacuggauccuguggaucucuuucgccauuuccugcuuucuccugugugucgugcugcucggauucaucaugugggccugccaaaagggcaacauucgguguaauaucugcauuuga

SEQ ID NO: 193221 - RNA, 1698 nt, Artificial Sequence; identical to SEQ ID NO: 193107
  derived and/or modified CDS sequence (opt5) from hemagglutinin__InfluenzaA__ABG88553

SEQ ID NO: 193222 - RNA, 1701 nt, Artificial Sequence; identical to SEQ ID NO: 192782
  derived and/or modified CDS sequence (opt5) from hemagglutinin__InfluenzaA__ABG88564

SEQ ID NO: 193223 - RNA, 1701 nt, Artificial Sequence; identical to SEQ ID NO: 192812
  derived and/or modified CDS sequence (opt5) from hemagglutinin__InfluenzaA__ABG88575

SEQ ID NO: 193224 - RNA, 1701 nt, Artificial Sequence; identical to SEQ ID NO: 192722
  derived and/or modified CDS sequence (opt5) from hemagglutinin__InfluenzaA__ABG88586

SEQ ID NO: 193225 - RNA, 1701 nt, Artificial Sequence
  derived and/or modified CDS sequence (opt5) from hemagglutinin__InfluenzaA__ABG88597
augaagaccaucauugcccugagcuacauccucugccugguguucgcucagaaacuucccgccaacgacaauuccacagcgacgcugugucucggccaccaugcugucccuaacgggacccugguuaagacaauuaccaaugauaacaucgaggugacaaaugccaccgaacuugugcaaucuagcuccacaggaagaauuugcgacucuccgcaccagauccuggauggcgagaacuguacccucaucgacgcccugcugggggauccccauugcgacggauuucagaauaaagaaugggaucucuucgucgagcggagcacggcuuauuccaacuguuacccuuaugacgugcccgauuacgccucucugcgcagccuuguugcuuccagcggcacccuggaauuuaauaacgagucuuucaauuggacagggguggaccagaacggaaccuccagcgccugcaagagacggucuaauaaauccuuuuucagccgccucaacuggcugcaccaacuuaaguauaaguacccugcgcugaaugucacaaugcccaacaacgagaaauuugauaagcucuauauuuggggcgugcaucacccuucuaccgacuccgaucagaucagccuguacgcccaggcuuccggcagaguuacggugucuacaaaacggagccagcaaaccgucauuccgaauaucgggucccgccccugggugagaggagugagcucucggauuuccaucuacuggacaauugucaagccuggcgacauccugcucaucaacagcaccgggaaucugauugcccccagaggauauuucaaaaucagaucuggcaagagcuccauuaugcggucuaacgcuccuaucgggaaguguaauagcgaaugcauuacccccaacggauccaucccgaaugacaaaccuuuucagaacguuaaucgcaucacauacggcgccugucccagauaugugaagcagaacacgcuuaaacuggcgaccggcaugcggaaugugccugagaagcagacacgcgggauuuucggagccaucgcuggcuuuauugaaaacgggugggagggaauggucgauggcugguacggguucagacaccaaaauagcgagggaaccggccaggccgcugaccucaaaucuacacaggccgccaucaaccaaauuaauggcaagcugaaccggcuuaucgagaaaaccaacgaaaaguuucaucagaucgaaaaggaguucuccgaaguggaggggcgcauucaggaucuggagaaauauguugaagacacgaagaucgaucucuggagcuacaaugcugagcugcugguggcgcucgaaaaccagcacacaauugaccugaccgauucugagaugaauaaacuuuucgaacgcacccggaagcaacugagagagaacgccgaggacaugggaaauggcugcuuuaaaaucuaucauaagugugauaacgcuugcauuggguccauccgcaauggaacauacgaccacgaugucuaccgggacgaagcccucaacaauagauuccagauuaagggcguggagcugaaaagcggguauaaggacuggauccuuuggaucuccuuugccauuucuugcuuccugcucuguguugugcugcugggcuuuaucaugugggcuugccagaaaggaaacauucgcuguaauaucugcauuuga

SEQ ID NO: 193226 - RNA, 1701 nt, Artificial Sequence
  derived and/or modified CDS sequence (opt5) from hemagglutinin__InfluenzaA__ABG88608
augaagaccaucauugcccugagcuacauccucugccugguguucgcucagaaacuucccggcaacgacaauuccacagccacgcugugucucgggcaccaugcggucccuaacggaacccugguuaagacaauuaccaaugaucaaaucgaggugacaaacgcuaccgaacuugugcagucuagcuccacaggcagaauuugcgacucuccgcaccagauccuggauggggagaauuguacccucaucgacgcccugcugggagauccccauugcgacggcuuucagaacaaagaaugggaucucuucgucgagcggagccgcgccuauuccaauuguuacccuuaugacgugcccgauuacguuucucugagaagccuuguggcuuccagcgggacgcuggaauuuaacaaugagucuuucaacuggaccggagucgcccaaaauggcacauccagcgcuugcaagcggcgcucugacaaauccuuuuucagcagacucaacuggcugcaccagcuuaaguauaaguacccugcccugaaugugaccaugcccaacaaugagaaauuugauaagcucuauauuuggggcguucaucacccugggacagacucugaucagaucucccuguacgcgcaggccagcggacgggugaccgucuccacgaaacgcucucaacagacagugauuccgaacaucggcagcagacccugggugcgcggggucuccagccggauuucuaucuacuggaccauuguuaagccuggagacauccugcucaucaacuccacaggcaaucugauugcucccagaggguauuucaaaauccggagcggaaagucuagcauuaugcgcuccgacgccccuaucggcaaguguaacucugaaugcauuacccccaauggcagcaucccgaacgauaaaccuuuucagaaugugaacagaaucaccuacgggcccuguccucgguaugugaagcagaauacacuuaaacuggcuacgggaaugcgcaacguccccgagaagcaaaccagaggcauuuucggggccaucgcgggauuuauugaaaauggcugggaggggaugauggacggaugguacggcuuccggcaccagaacuccgagggcacagggcaggccgcugaucucaaaagcacccaagccgcuaucaaucagauuaacggaaagcugaauagacuuaucgagaaaacaaacgaaaaguuucaucagaucgaaaaggaguucucugaaguggagggccgcauucaggaccuggagaaauauguugaagauaccaagaucgaccucugguccuacaaugccgagcugcugguggcccucgaaaaccaacacacgauugaucugacagacagcgagaugaacaaacuuuucgaacggaccaagaaacagcugagagagaaugcugaggauauggggaacggaugcuuuaagaucuaucauaagugugacaaugcgugcauuggcucuauccgcaacgggaccuacgaucacgacgucuaccgggacgaagcccucaauacaagauuccagauuaaaggcguggagcugaaguccggauauaaagauuggauccuuuggaucagcuuugcuauuuccugcuuccugcucuguaucguucugcugggcuuuauuaugugggccugccagaaggggaacauccgcuguaauauuugcaucuga

SEQ ID NO: 193227 - RNA, 1701 nt, Artificial Sequence; identical to SEQ ID NO: 192634
  derived and/or modified CDS sequence (opt5) from hemagglutinin__InfluenzaA__ABG88619

SEQ ID NO: 193228 - RNA, 1701 nt, Artificial Sequence
  derived and/or modified CDS sequence (opt5) from hemagglutinin__InfluenzaA__ABG88630
augaagaccaucauugcccugagcuacauccucugccugguguucgcucagaaacuucccggcaacgacaauuccacagccacgcugugucucgggcaccaugcggucccuaacggaacccugguuaagacaauuaccaaugaucaaaucgaggugacaaacgcuaccgaacuugugcagucuagcuccacaggcagaauuugcgacucuccgcaccagguccuggauggggagaauuguacccucaucgacgcccugcugggagauccccauugcgacggcuuucagaacaaagaaugggaucucuucguggagcggagcaaggccuauuccaauuguuacccuuaugacguucccgauuacgugucucugcgcagccuugucgcuuccagcgggacgcuggaauuuaacaaugagucuuucaacuggaccggaguggcccaaaauggcacauccagcgcuugcaaaagacggucugacaaguccuuuuucagccgccucaacuggcugcaccagcuuaaguauaaauacccugcccugaauguuaccaugcccaacaaugagaaguuugauaaacucuauaucuggggcgugcaucacccugggacagacucugaucagauuucccuguacgcgcaggccagcggaagagucaccguguccacgaagcggucucaacagacagugaucccgaacauuggcagccgccccugggucagagggguuuccagccggaucucuauuuacuggaccaucgugaaaccuggagacauucugcucaucaacuccacaggcaaucugaucgcuccccgcggguauuucaagauuagaagcggaaagucuagcaucaugcgguccgacgccccuauuggcaaauguaacucugaaugcaucacccccaauggcagcauuccgaacgauaagccuuuucagaaugugaaccgcaucaccuacggggcuugucccagauaugucaaacagaagacacuuaaacuggccacgggaaugcggaaugugccugagaagcaaacccgcggcaucuucggggcgauugccggauuuaucgaaaacggcugggaggggaugauggacggaugguacggcuucagacaccaaaauuccgagggcacagggcaggcugccgaucucaaaagcacccaggcugccauuaaccagaucaauggaaagcugaaccggcuuauugaaaagacaaaugagaaauuucaucagaucgaaaaggaguucucugaaguugagggcagaauccaggaccuggagaaauauguggaagauaccaagauugaccucugguccuacaacgccgagcugcuggucgcucucgaaaaucaacacacgaucgaucugacagacagcgagaugaacaaacuuuucgaacgcaccaagaagcagcugcgggagaacgcggaggauauggggaauggaugcuuuaaaauuuaucauaagugugacaacgccugcaucggcucuauuagaaaugggaccuacgaucacgacguguaccgcgacgaagcucucaacaaucgguuccagaucaaaggcguugagcugaaguccggauauaaagauuggauucuuuggaucagcuuugccaucuccugcuuccugcucuguauugugcugcugggcuuuaucaugugggccugccagaaggggaacauuagauguaauaucugcauuuga

SEQ ID NO: 193229 - RNA, 1701 nt, Artificial Sequence
  derived and/or modified CDS sequence (opt5) from hemagglutinin__InfluenzaA__ABG88641
augaagaccaucauugcccugagcuacauccucugccugguguucgcucagaaacuucccggcaacgacaauuccacagccacgcugugucucgggcaccaugcggucccuaacggaacccugguuaagacaauuaccaaugaucaaaucgaggugacaaacgcuaccgaacuugugcagucuagcuccacaucuagaauuugcgacagcccgcaccagauccuggauggcgagaauuguacccucaucgacgcccugcugggggauccccauugcgacggauuucagaacaaagaaugggaucucuucgucgagcgguccaaggccuauucuaauuguuacccuuaugacgugcccgauuacguuagccugcgcucccuuguggcuagcucuggcacgcuggaauuuaacaaugaguccuucaacuggaccggggucgcccaaaauggaacaagcucugcuugcaaaagacgguccgacaagagcuuuuucucucgccucaacuggcugcaccagcuuaaguauaaauacccugcccugaaugugaccaugcccaacaaugagaaguuugauaaacucuauauuuggggcguucaucacccuggcacagacuccgaucagaucagccuguacgcgcaggccuccgggagagugaccgucucuacgaagcggagccaacagacagugauuccgaacaucggauccggccccugggugcgcggggucagcucuagaauuuccaucuacuggaccauuguuaaaccuggagacauccugcucaucaacagcacaggcaaucugauugcuccccggggguauuucaagauccgcucuggaaagagcuccauuaugagaucugacgccccuaucggcaaauguaacagcgaaugcauuacccccaauggcuccaucccgaacgggaagccuuuucagaaugugaaccggaucaccuacggagcuuguccccgcuaugugaaacagaauacacuuaagcuggccacgggcaugagaaacgucccugagaaacaaacccgggggauuuucggagcgaucgccggcuuuauugaaaaugggugggagggaaugauggauggcugguacggcuuccgccaccagaacagcgaggggacaggacaggcugccgaccucaagucuacccaagcugccaucaaucagauuaacggcaaacugaauagacuuaucgaaaagacaaacgagaaguuucaucagaucgaaaaagaguucuccgaaguggaggggcggauucaggaucuggagaaguauguugaagacaccaaaaucgaucucuggagcuacaaugccgagcugcugguggcucucgaaaaccaacacacgauugaccugacagauucugagaugaacaaacuuuucgaaagaaccaagaagcagcugcgcgagaaugcggaggacaugggaaacggcugcuuuaagaucuaucauaaaugugauaaugccugcauuggguccauccggaacggcaccuacgaccacgaugucuacagagacgaagcucucaauaaccgcuuccagauuaagggaguggagcugaaaagcggcuauaaggacuggauccuuuggaucuccuuugccacaucuugcuuccugcucuguauuguucugcugggguuuaucaugugggccugccagaaaggaaauauucgguguaacaucugcauuuga

SEQ ID NO: 193230 - RNA, 1701 nt, Artificial Sequence; identical to SEQ ID NO: 192588
  derived and/or modified CDS sequence (opt5) from hemagglutinin__InfluenzaA__ABG88652

SEQ ID NO: 193231 - RNA, 1701 nt, Artificial Sequence; identical to SEQ ID NO: 192588
  derived and/or modified CDS sequence (opt5) from hemagglutinin__InfluenzaA__ABG88663

SEQ ID NO: 193232 - RNA, 1701 nt, Artificial Sequence; identical to SEQ ID NO: 192588
  derived and/or modified CDS sequence (opt5) from hemagglutinin__InfluenzaA__ABG88674

SEQ ID NO: 193233 - RNA, 1701 nt, Artificial Sequence; identical to SEQ ID NO: 192588
  derived and/or modified CDS sequence (opt5) from hemagglutinin__InfluenzaA__ABG88685

SEQ ID NO: 193234 - RNA, 1701 nt, Artificial Sequence; identical to SEQ ID NO: 192588
  derived and/or modified CDS sequence (opt5) from hemagglutinin__InfluenzaA__ABG88696

SEQ ID NO: 193235 - RNA, 1701 nt, Artificial Sequence; identical to SEQ ID NO: 192354
  derived and/or modified CDS sequence (opt5) from hemagglutinin__InfluenzaA__ABG88707

SEQ ID NO: 193236 - RNA, 1701 nt, Artificial Sequence; identical to SEQ ID NO: 192354
  derived and/or modified CDS sequence (opt5) from hemagglutinin__InfluenzaA__ABG88718

SEQ ID NO: 193237 - RNA, 1701 nt, Artificial Sequence
  derived and/or modified CDS sequence (opt5) from hemagglutinin__InfluenzaA__ABG88729
augaagaccaucauugcccugagcuacauccucugccugguguucgcucagaaacuucccggcaacgacaauuccacagccacgcugugucucgggcaccaugcggucccuaacggaacccugguuaagacaauuaccaaugaucaaaucgaggugacaaacgcuaccgaacuugugcagucuagcuccacaggcagaauuugcgacucuccgcaccggauccuggaugggaaaaauuguacccucaucgacgcccugcugggagauccccauugcgacggcuuucagaacaaggagugggaucucuucgucgaacgcagcaaagccuauuccaauuguuacccuuaugacgugcccgauuacgcuucucugagaagccuuguugccuccagcgggacgcuggaguuuauuaacgaagacuucaauuggaccggaguggcucaggauggcggcucuuaugccugcaagcggggguccgucaacagcuuuuucucucgccucaauuggcugcacaaacuugaguacaaguauccugcgcugaacgugacaaugcccaauuccggaaaguuugacaaacucuacaucuggggcguucaucacccuagcaccgauucugaccaaacaucccuguacgugagagccagcgggcgggucaccguguccacgaagcgcucucagcagacagugaccccgaacauuggaagcagacccuggguccggggccuguccagccgcaucucuauuuauuggacaaucguuaaaccuggggacauucuccugaucaauuccaccggaaaccuuaucgcucccagaggcuacuucaagauucggaacggcaagagcucuaucaugcgcagcgaugccccuauugggaauuguuccucugagugcaucacccccaacggaagcauuccgaaugacaaaccuuuucagaacgugaauagaaucacauauggcgcuuguccccgguacgugaagcaaaacacgcugaaacucgccaccgggaugcgcaaugucccugaaaagcagacaagaggaaucuucggcgcgauugccggguuuaucgagaacggaugggaaggcaugguggauggcugguauggguuccggcaccaaaauuccgagggaaccggccaggcugccgaccugaaaagcacacaggcugccauugaucagaucaacgggaaacuuaauagacugauugagaagaccaacgaaaaguuucaucagaucgagaaggaguucucugaaguugaaggacgcauccaagaccucgagaaauacguggaggauacgaagauugaccugugguccuauaaugccgaacugcucgucgcucuggagaaccagcacacaaucgaucuuaccgacagcgaaaugaauaaacuguucgagaagacccggaaacagcucagagaaaacgcggaggauaugggcaacgggugcuuuaagauuuaccauaagugugacaaugccugcaucggcucuauucgcaacggaacauacgaccacgauguguaucgggacgaggcucugaauaacagauuccagaucaaaggcguugaacuuaaguccggguacaaagauuggauucuguggaucagcuuugccaucuccugcuuccuccugugugugguccugcucggauuuauuaugugggccugccaaaagggcaauauccgcuguaacauuugcaucuga

SEQ ID NO: 193238 - RNA, 1701 nt, Artificial Sequence
  derived and/or modified CDS sequence (opt5) from hemagglutinin__InfluenzaA__ABG88740
augaagaccaucauugcccugagcuacauccucugccugguguucgcucagaaacuucccggcaacgacaauuccacagccacgcugugucucgggcaccaugcggucccuaacggaacccugguuaagacaauuaccaaugaucaaaucgaggugacaaacgcuaccgaacuugugcagucuagcuccacaggcagaauuugcgacucuccgcaccggauccuggaugggaaaaauuguacccucaucgacgcccugcugggagauccccauugcgacggcuuucagaacaaggagugggaucucuucgucgaacgcagcaaagccuauuccaauuguuacccuuaugacgugcccgauuacgcuucucugagaagccuuguugccuccagcgggacgcuggaguuuauuaacgaagacuucaauuggaccggaguggcucaggauggcaagucuuaugccugcaagcggggcuccgucaacagcuuuuucucucgccucaauuggcugcacaaacuugaguacaaguauccugcgcugaacgugacaaugcccaauaacgggaaauuugacaagcucuacaucuggggaguucaucacccuuccaccgauagcgaccaaacaucucuguacgugagagccuccggccgggucaccgugagcacgaaacgcucccagcagacagugauuccgaauaucgggucuagacccuggguccggggacugagcucccgcauuagcaucuauuggaccauuguuaagccuggcgacauccuccugaucaacucuacagggaaccuuauugcucccagaggauacuucaagauccggaauggcaaauccagcauuaugcgcucugaugccccuaucggcaacuguagcuccgagugcauuacccccaaugggucuaucccgaacgacaagccuuuucagaaugugaacagaaucaccuauggagcuuguccccgguacauuaaacaaaauacacugaagcucgccacgggcaugcgcaacgugccugaaaaacagaccagagggaucuucggagcgauugccggcuuuaucgagaaugggugggaaggaauggucgauggcugguauggcuuccggcaccagaacagcgaggggacaggacaggcugccgaccugaaguccacccaagcugccauugaucagaucaauggcaaacuuaacagacugaucgagaagacaaaugaaaaguuucaucagauugagaaagaguucagcgaaguggaagggcgcauccaagaccucgagaaguacguugaggauaccaaaauugaccuguggucuuauaacgccgaacugcucguggcucuggagaaucagcacacgaucgaucuuacagacuccgaaaugaacaagcuguucgagcggaccagaaaacagcuccgcgaaaacgcggaggauaugggaaauggcugcuuuaagauuuaccauaagugugacaacgccugcaucgggagcauucggaauggcaccuacgaccacgaugucuauagagacgaggcucugaacaaucgcuuccagaucaaaggaguggaacuuaagucuggcuacaaagauuggauccuguggauuuccuuugccaucagcugcuuccuccuguguguugugcugcucggguuuauuaugugggccugccaaaagggaaacauccgguguaauauuugcaucuga

SEQ ID NO: 193239 - RNA, 1701 nt, Artificial Sequence; identical to SEQ ID NO: 193125
  derived and/or modified CDS sequence (opt5) from hemagglutinin__InfluenzaA__ABG88751

SEQ ID NO: 193240 - RNA, 1701 nt, Artificial Sequence
  derived and/or modified CDS sequence (opt5) from hemagglutinin__InfluenzaA__ABG88762
augaagaccaucauugcccugagcuacauccucugccugguguucacacagaaacuucccggcaacgacaauuccacggcuacccugugucucgggcaccaugccgucccuaacggaacacugguuaagaccauuacaaaugaucaaaucgaggugaccaacgcgacagaacuugugcagucuagcuccaccggcagaauuugcgacucuccgcaccggauccuggaugggaaaaauuguacgcucaucgacgcucugcugggagauccccauugcgacggcuuucagaacaaggagugggaucucuucgucgaacgcagcaaagccuauuccaauuguuacccuuaugacgugcccgauuacgccucucugagaagccuuguugcuuccagcgggacccuggaguuuauuaacgaagacuucaauuggacaggaguggcccaggauggcggcucuuaugcuugcaagcggggguccgucaacagcuuuuucucucgccucaauuggcugcacaaacuugaguacaaguauccugcccugaacgugaccaugcccaauaacggaaaguuugacaaacucuacaucuggggcguucaucacccuuccacagauagcgaccaaaccucucuguacgugagagcguccgggcgggucacggugagcacaaagcgcucccagcagaccgugauuccgaauaucggaucuagacccuggguccggggccugagcucccgcauuagcaucuauuggacaauuguuaaaccuggggacauccuccugaucaacucuaccggaaaccuuauugcccccagaggcuacuucaagauccggaauggcaaguccagcauuaugcgcucugaugcuagcaucgggaacuguuccucugagugcauuaccccuaauggaagcauccccaacgacaaaccguuucagaaugugaacagaaucacauauggcgccuguccucgguacgugaagcaaaauacgcugaaacucgcuaccgggaugcgcaacguccccgaaaagcagacaagaggaauuuucggcgccaucgcgggguuuauugagaauggaugggaaggcaugguggauggcugguauggguuccggcaccagaacuccgagggaaccggccaggccgcugaccugaaaagcacacaagccgcuaucgaucagauuaaugggaaacuuaacagacugaucgagaagaccaaugaaaaguuucaucagaucgagaaggaaguuucugagguggaaggacgcauucaagaccucgagaaauacgucgaggauacgaagaucgaccugugguccuauaacgccgaacugcucguggcccuggagaaucagcacacaauugaucuuaccgacagcgaaaugaacaaacuguucgagcggaccagaaagcagcuccgcgaaaacgcugaggauaugggcaaugggugcuucaaaaucuaccauaagugugacaacgcgugcauuggcucuauccggaauggaacauacgaccacgauguuuauagagacgaggcccugaacaaucgcuuucagauuaaguccguggaacuuaaaagcggcuacaaggauuggauccuguggaucuccuucgcuauuucuugcuuucuccugugugucgugcugcucggguucaucaugugggccugccaaaaaggaaacauucgguguaauaucugcauuuga

SEQ ID NO: 193241 - RNA, 1701 nt, Artificial Sequence
  derived and/or modified CDS sequence (opt5) from hemagglutinin__InfluenzaA__ABG88773
augaagaccaucauugcccugagcuacauccucugccugguguucgcucagaaacuucccggcaacgacaauuccacagccacgcugugucucgggcaccaugcggucccuaacggaacccugguuaagacaauuaccaaugaucaaaucgaggugacaaacgcuaccgaacuugugcagucuagcuccgccggcagaauuugcgacucuccgcaccggauccuggaugggaaaaauuguacacucaucgacgcccugcugggagauccccauugcgacggcuuucagaacaaggagugggaucucuucgucgaacgcagcaaggcuuauuccaauuguuacccuuaugacgugcccgauuacgccucucugagaagccuuguugcuuccagcgggacccuggaguuuauuaacgaagacuucaauuggacgggaguggcccaggauggcaaaucuuaugcgugcaagcggggcuccgucaacagcuuuuucucucgccucaauuggcugcacaaacuugaguacaaguauccugcccugaacgugaccaugcccaauaacgggaaauuugacaagcucuacaucuggggaguucaucacccuuccacagauagcgaccaaaccucucuguacgugagagcuuccggccgggucacagugagcaccaaacgcucccagcagacggugauuccgaauaucgggucuagacccuggguccggggacugagcucccgcauuagcaucuauuggacaauuguuaagccuggcgacauccuccugaucaacucuaccgggaaccuuauugcccccagaggauacuucaagauccggaauggcaaauccagcauuaugcgcucugaugcuccuaucggcaacuguagcuccgagugcauuacacccaaugggucuaucccgaacgacaagccuuuucagaaugugaacagaaucaccuauggagccuguccccgguacgugaaacaaaauacccugaagcucgcgacaggcaugcgcaacgucccugaaaaacagacgagagggauuuucggagccaucgcuggcuuuauugagaaugggugggaaggaaugguggauggcugguauggcuuccggcaccagaacagcgaggggaccggacaggccgcugaccugaaguccacacaagccgccaccgaucagaucaauggcaaacuuaacagacugauugagaagacaaaugaaaaguuucaucagaucgagaaagaguucagcgaaguugaagggcgcauccaagaccucgagaaguacguggaggauaccaaaauugaccuguggucuuauaacgcugaacugcucgucgcgcuggagaaucagcacacgaucgaucuuacagacuccgaaaugaacaagcuguucgagcggaccagaaaacagcuccgcgaaaacgccgaggauaugggaaauggcugcuuuaagauuuaccauaagugugacaacgcuugcaucgggagcauucggaauggcaccuacgaccacgauguguauagagacgaggcccugaacaaucgcuuccagaucaaaggaguugaacuuaagucuggcuacaaagauuggauucuguggaucuccuuugccaucagcugcuuccuccugugugugguccugcucggguuuauuaugugggcuugccaaaagggaaacauccgguguaauauuugcaucuga

SEQ ID NO: 193242 - RNA, 1701 nt, Artificial Sequence
  derived and/or modified CDS sequence (opt5) from hemagglutinin__InfluenzaA__ABG88784
augaagaccaucauugcccugagcuacauccucugccugguguucgcucagaaacuucccggcaacgacaauuccacagccacgcugugucucgggcaccaugcggucccuaacggaacccugguuaagacaauuaccaaugaucaaaucgaggugacaaacgcuaccgaacuugugcagucuagcuccacaggcagaauuugcgacucuccgcaccggauccuggaugggaaaaauuguacccucaucgacgcccugcugggagauccccauugcgacggcuuucagaacaaggagugggaucucuucgucgaacgcagcaaagccuauuccaauuguuacccuuaugacgugcccgauuacgcuucucugagaagccuuguugccuccagcgggacgcuggaguuuauuaacgaagacuucaauuggaccggaguggcucaggauggcaagucuuaugccugcaagcggggcuccgucaacagcuuuuucucucgccucaauuggcugcacaaacuugaguacaaguauccugcgcugaacgugacaaugcccaauaacgggaaauuugacaagcucuacaucuggggaguucaucacccuuccaccgauagcgaccaaacaucucuguacgugagagccuccggccgggucaccgugagcacgaaacgcucccagcagacagugauuccgaauaucgggucuagacccuggguccggggacugagcucccgcauuagcaucuauuggaccauuguuaagccuggcgacauccuccugaucaacucuacagggaaccuuauugcucccagaggauacuucaagauccggaauggcaaauccagcauuaugcgcucugaugccccuaucggcaacuguagcuccgagugcauuacccccaaugggucuaucccgaacgacaagccuuuucagaaugugaacagaaucaccuauggagcuuguccccgguacgugaaacaaaauacacugaagcucgccacgggcaugcgcaacgucccugaaaaacagaccagagggauuuucggagcgaucgccggcuuuauugagaaugggugggaaggaaugguggauggcugguauggcuuccggcaccagaacagcgaggggacaggacaggcugccgaccugaaguccacccaagcugccaucgaucagauuaauggcaaacuuaacagacugaucaagaagacaaaugagaaauuucaucagaucgaaaaggaguucagcgaaguugaggggcgcauucaagaccucgaaaaauacguggaggauaccaagaucgaccuguggucuuauaacgccgagcugcucgucgcucuggaaaaucagcacacgauugaucuuacagacuccgagaugaacaaacuguucgaacggaccagaaagcagcuccgcgagaacgcggaagauaugggaaauggcugcuuuaagaucuaccauaaaugugacaacgccugcauugggagcauccggaauggcaccuacgaccacgauguguauagagacgaggcucugaacaaucgcuuccagauuaagggaguugagcuuaaaucuggcuacaaggauuggauccuguggaucuccuuugccauuagcugcuuccuccugugugugguccugcucggguuuaucaugugggccugccaaaaaggaaacauucgguguaauaucugcauuuga

SEQ ID NO: 193243 - RNA, 1701 nt, Artificial Sequence
  derived and/or modified CDS sequence (opt5) from hemagglutinin__InfluenzaA__ABG88806
augaagaccaucauugcccugagcuacauccucugccugguguucgcucagaaacuucccggcaacgacaauuccacagccacgcugugucucgggcaccaugcggucccuaacggaacccugguuaagacaauuaccaaugaucaaaucgaggugacaaacgcuaccgaacuugugcagucuagcuccacaggcagaauuugcgacucuccgcaccagauccuggauggggagaauuguacccucaucgacgcccugcugggagauccccauugcgacggcuuucagaacaaagaaugggaucucuucgucgagcggagcaaggccuauuccaauuguuacccuuaugacgugcccgauuacguuucucugcgcagccuuguggcuuccagcgggacgcuggaauuuaacaaugagucuuucaacuggaccggagucgcccaaaauggcacauccagcgcuugcaaaagacggucugacaaguccuuuuucagccgccucaacuggcugcaccagcuuaaguauaaauacccugcccugaaugugaccguucccaacaaugagaaguuugauaaacucuauauuuggggcgugcaucacccugggacagacucugaucagaucucccuguacgcgcaggccagcggaagagucaccguguccacgaagcggucucaacagacagugauuccgaacaucggcagccgccccugggucagagggguuuccagccggauuucuaucuacuggaccauugugaaaccuggagacauccugcucaucaacuccacaggcaaucugauugcuccccgcggguauuucaagaucagaagcggaaagucuagcauuaugcgguccgacgccccuaucggcaaauguaacucugaaugcauuacccccaauggcagcaucccgaacgauaagccuuuucagaaugugaaccgcaucaccuacggggcuugucccagauaugucaaacagaauacacuuaagcuggccacgggaaugcggaacgugccugagaaacaaacccgcggcauuuucggggcgaucgccggauuuauugaaaauggcugggaggggaugauggacggaugguacggcuucagacaccagaacuccgagggcacagggcaggcugccgaucucaagagcacccaagcugccaucaaucagauuaacggaaaacugaaucggcuuaucgaaaagacaaacgagaaguuucaucagaucgaaaaagaguucucugaaguugagggccgcauucaggaccuggagaaguauguggaagauaccaaaaucgaccucugguccuacaaugccgagcugcuggucgcucucgaaaaccaacacacgauugaucugacagacagcgagaugaacaaacuuuucgaaagaaccaagaagcagcugcgggagaaugcggaggauauggggaacggaugcuuuaagaucuaucauaaaugugacaaugccugcauuggcucuaucagaaacgggaccuacgaucacgacguguaccgcgacgaagcucucaauaaccgguuccagauuaagggcguugagcugaaauccggauauaaggauuggauccuuuggaucagcuuugccauuuccugcuuccugcucuguaucgugcugcugggcuuuauuaugugggccugccagaaagggaauaucagauguaacauuugcaucuga

SEQ ID NO: 193244 - RNA, 1704 nt, Artificial Sequence
  derived and/or modified CDS sequence (opt5) from hemagglutinin__InfluenzaA__ABI16504
auggagaagaucgugcugcuccuggccauugucagccuuguuaaauccgaccagaucugcauuggcuaccacgcuaacaauucuaccgaacaaguggauacaaucauggagaagaacgugacggucacccaugcccaggacauucuggaaaagacacacaaugggaagcucugugaucuggacggagugaaaccccuuauccugagagauugcagcguugcgggcuggcuccuggggaacccuaugugugacgaguucaucaaugugccggaaugguccuauauugucgagaaggcuaaccccgccaaugaucugugcuacccuggaaacuuuaaugacuaugaggaacucaagcaucugcuuucucggaucaaccacuucgagaaaauucagaucauuagcaaguccucuuggagcgaucaugaagccuccagcggcgugucuuccgcuugucccuaccaggggaccccuagcuuuuuccgcaauguuguguggcugaucaaaaagaacaauacauaucccaccauuaaaagaucuuacaacaauacaaaccaagaggaccuccugauccuuuggggaauccaccacuccaacaaugccgcugagcagaccaagcuguaucagaacccuacgaccuacauuagcgucggcacaucuacccucaaucugcggcuggugccgaagaucgccacacgcuccaaagugaacggccagagcgggagaauggacuuuuucuggaccauucucaagcccaaugaugcgaucaacuuugaauccaauggaaacuucauugccccugaguacgcuuauaaaaucgucaagaaaggcgauucugccaucaugaaaagcgaaguugaguacgggaauugcaacacgaaaugucaaacacccauuggagcuaucaauuccagcaugccuuuucauaacauucacccccugaccaucggcgaaugcccgaaguaugugaagucuaauaaacuugugcuggccacagggcuccggaacuccccucugcgcgagagacggcgcaagagaggacuuuucggcgcgauugccggcuuuaucgaagggggauggcagggcauggucgacgggugguacggauaucaucacagcaaugaacagggcucuggguacgcugccgacaaagagagcacccagaaggcuaucgauggagugaccaacaaaguuaacuccauuaucgacaagaugaauacacaauucgaagccgugggccgggaguuuaacaaucuggaacgcagaauugagaaccucaauaagaaaauggaggauggcuuccuggacgucuggacguauaacgccgaacugcucgugcugauggagaaugaacggacccuugauuuccacgacucuaacguuaagaaucuguacgauaaagugcgccuccagcugagagacaacgcuaaggagcuugggaauggauguuuugaguucuaccauaaaugcgauaacgaguguauggagagcguccggaauggcacauaugacuacccccaguauuccgaagaggcgagacugaagcgcgaagagaucagcggggugaagcucgagucuauuggaaccuaccaaauccuguccauuuauagcacagucgccucuucccuggcucucgccaucaugguggccggccugagccuuuggaugugcuccaacgggucucugcagugccggaucuguauuuga

SEQ ID NO: 193245 - RNA, 1701 nt, Artificial Sequence; identical to SEQ ID NO: 192705
  derived and/or modified CDS sequence (opt5) from hemagglutinin__InfluenzaA__ABI20793

SEQ ID NO: 193246 - RNA, 1701 nt, Artificial Sequence
  derived and/or modified CDS sequence (opt5) from hemagglutinin__InfluenzaA__ABI20837
augaaggccaaacugcucgugcugcuuugcgcuuucaccgccacauacgcggacacgaucuguauuggcuaucacgcuaacaauagcaccgauacagucgacaccguucuggagaagaacgugacagugacccauuccgucaaucuccuggaagauucucacaacgggaaacuuugcagacugaagggaacagcuccccuccagcugggcaauuguagcguggccggguggauccugggaaacccugagugcgaaucccucuuuucuaaagagagcugguccuacauugccgaaaccccgaaucccgagaacggcacguguuauccuggguacuucgccgacuaugaggaacugcgggagcaacuuucuagcguuuccagcuuugaacgcuucgagaucuuucccaaggagucuuccuggccuaaucauaccgugacaaagggagucaccgcuagcugcucucacaacggcaaauccagcuucuacaagaaucugcucuggcugacagaaaagaacggccuuuaucccaaucugucuaaguccuacgugaacaauaaagagaaggaaguucucgugcuguggggaguccaucacccuagcaacauuggggaucagagagccaucuaccacaccgagaacgcguauguguccguggucucuagccauuacucccggcgcuuuacgccggaaaucgccaagagacccaaaguucgggaccaggagggccgcauuaauuauuacuggacacugcucgagccuggggauaccaucauuuucgaagcuaacggaaaucugaucgcccccugguaugcuuuugcccuuagcagaggcuucgggucuggaauuaucacauccaacgcgagcaugggcgagugugacgccaagugccagaccccucaaggcgcuauuaauucuagccugcccuuucagaacgugcacccggugaccaucggggaauguccuaaauacguccgguccacaaagcuccgcauggugacgggacugagaaauauccccucuauucagagccggggccuuuucggggccaucgcuggauuuauugagggcggguggaccggaaugaucgauggcugguauggcuaccaucaccagaacgaacaaggguccggauacgccgccgaccagaaaagcacacagaaugcuauuaacggcaucaccaauaagguuaacucugugaucgagaaaaugaauacacaguucaccgcggucgggaaggaguucaacaagcuggaacgcagaauggagaaucucaacaaaaagguggaugacggauuucuggauauuuggacguauaacgccgaacugcucguucugcuugagaaugaacggacacuggacuuccacgacuccaacgugaaaaaucucuacgagaaggucaaaacccaacugaagaacaaugcuaaggagaucggcaacgggugcuuugaguucuaucauaaauguaauaacgaaugcauggaaagcgugaagaauggcaccuacgauuauccuaaauacucugaggaguccaaacuuaaccgcgagaaaauugacggagucaagcuggaaagcaugggcguguaucagauccucgccauuuacuccacaguugccucuagccuggugcugcucgucucccugggggcuaucucuuuuuggaugugcagcaauggaucccuucaguguagaaucugcauuuga

SEQ ID NO: 193247 - RNA, 1701 nt, Artificial Sequence
  derived and/or modified CDS sequence (opt5) from hemagglutinin__InfluenzaA__ABI20848
augaaggccaaacugcucgugcugcuuugcgcuuucaccgccacauacgcggacacgaucuguauuggcuaucacgcuaacaauagcaccgauacagucgacaccguucuggagaagaacgugacagugacccauuccgucaaucuccuggaagauucucacaacgggaaacuuugcagacugaagggaacagcuccccuccagcugggcaauuguagcguggccggguggauccugggaaacccugagugcgaaucccucuuuucuaaagagagcugguccuacauugccgaaaccccgaaucccgagaacggcacguguuauccuggguacuucgccgacuaugaggaacugaaggagcaacuuucuagcguuuccagcuuugaacgguucgagaucuuucccaaggagucuuccuggccuaaucauaccgugacaaaaggagucaccgcuagcugcucucacaacggcaaguccagcuucuacaaaaaucugcucuggcugacagaaaagaacggccuuuaucccaaucugucuaaauccuacgugaacaauaaggagaaggaaguucucgugcuguggggaguccaucacccuagcaacauuggggaucagcgcgccaucuaccacaccgagaacgcgcauguguccguggucucuagccacuauuccagacgguuuacgccggaaaucgccaaacgccccaagguuagagaccaggagggccggauuaauuacuauuggacacugcucgagccuggggauaccaucauuuucgaagcuaacggaaaucugaucgcccccugguacgcuuuugcccuuagccgcggcuucgggucuggaauuaucacauccaacgcgagcaugggcgagugugacgccaaaugccagaccccucaaggcgcuauuaauucuagccugcccuuucagaacgugcauccggugaccaucggggaauguccuaaguaugucagauccacaaaacuccggauggugacgggacugcgcaauauccccucuauucagagcagaggccuuuucggggccaucgcuggauuuauugagggcggguggaccggaaugaucgauggcugguacggcuaucaccaccagaacgaacaaggguccggauacgccgccgacaagaaaagcacacagaaugcuauugauggcaucaccaacaagguuaauucugugaucgagaagaugaacacacaguucaccgcggucgggaaagaguucaauaagcuggaacggcgcauggagaaccucaauaaaaagguggacgauggauuucuggacauuuggacguacaacgccgaacugcucguucugcuugagaacgaaagaacacuggacuuccaugauuccaaugugaaaaaccucuaugagaaggucaagaaucagcugaaaaacaaugcuaaggagaucggcaacgggugcuuugaguucuaccacaaauguaauaacgaaugcauggaaagcgugaagaauggcaccuaugacuacccuaaauauucugaggaguccaaacuuaagcgggaaaagauugauggagucaagcuggagagcaugggcguguaccaaauccucgccauuuauuccaccguugccucuagccuggugcugcucgucucccugggggcuaucucuuuuuggaugugcagcaacggaucccuucagugucgcaucugcauuuga

SEQ ID NO: 193248 - RNA, 1701 nt, Artificial Sequence; identical to SEQ ID NO: 192993
  derived and/or modified CDS sequence (opt5) from hemagglutinin__InfluenzaA__ABI20859

SEQ ID NO: 193249 - RNA, 1701 nt, Artificial Sequence
  derived and/or modified CDS sequence (opt5) from hemagglutinin__InfluenzaA__ABI20870
augaaggccaaacugcucgugcugcuuugcgcuuucaccgccacauacgcggacacgaucuguauuggcuaucacgcuaacaauagcaccgauacagucgacaccguucuggagaagaacgugacagugacccauuccgucaaucuccuggaagauucucacaacgggaaacuuugcagacugaagggaaucgcuccccuccagcugggcaauuguagcguggccggguggauucugggaaacccugagugcgaaucccucuuuucuaaagagagcugguccuacaucgccgaaacaccgaaucccgagaacggcaccuguuauccugggaauuucgccgacuacgaggaacugcgggagcaacuuucuagcguuuccagcuuugaacgcuucgagauuuuucccaaggagucuuccuggccuaaccauacggugaccaagggagucacagugagcugcucucacaauggcaaauccagcuucuauagaaaccugcucuggcugaccgaaaagaauggccuuuaccccaaccugucuaaauccuauguuaauaacaaggagaaagaagugcucguccuguggggagugcaucacccuagcaacaugcgggaucagcgcgcuaucuaccacacagagaaugccuacguguccgucguuucuagccauuauuccagacgguuuaccccggaaaucgcgaagcgccccaaggugagagaccaggaggggcggauuaacuacuauuggacgcugcucgagccuggcgauacaaucauuuucgaagccaaugggaaccugaucgcuccccgcuacgccuuugcucuuagcagaggauucggcucugggauuaucaccuccaaugccagcauggacgagugugaugcgaaaugccagacaccucaaggagccauuaacucuagccugcccuuucagaaugugcacccggucaccaucggcgaauguccuaaguaugugcgguccaccaaacuccgcaugguuacaggccugagaaacauccccucuauucagagccgggggcuuuucggagcuaucgccggcuuuauugaagggggauggacgggcaugaucgacgggugguacggauaucaucaccagaaugaacaaggcuccggcuacgcugccgaucagaagucuacccagaacgccauuaaugggaucacaaacaaagugaauagcgucaucgagaagaugaacacccaguucacagcugugggaaaagaguucaauaagcuggaacgcagaauggagaaccucaacaagaaaguugacgauggcuuucuggacauuuggaccuacaaugcggaacugcucgugcugcuugagaacgaacggacgcuggacuuccacgauuccaaugucaagaaccucuaugagaaagucaagagccaacugaaaaauaacgccaaggagaucgggaauggaugcuuugaguucuaccauaaguguaacaaugagugcauggaaucugugaaaaacggcacauaugacuacccuaaguauuccgaggagagcaaacuuaauagagaaaagauugauggggugaaacuggaguccaugggcguuuaccagauccucgcuauuuauucuaccguggccagcucccugguccugcucgugucucugggagccaucagcuuuuggaugugcuccaacggcagccuucagugucgcaucugcauuuga

SEQ ID NO: 193250 - RNA, 1701 nt, Artificial Sequence; identical to SEQ ID NO: 193061
  derived and/or modified CDS sequence (opt5) from hemagglutinin__InfluenzaA__ABI20881

SEQ ID NO: 193251 - RNA, 1701 nt, Artificial Sequence
  derived and/or modified CDS sequence (opt5) from hemagglutinin__InfluenzaA__ABI20892
augaagaccaucauugcccugagcuacauccucugccugguguucgcucagaaacuucccggcaacgacaauuccacagccacgcugugucucgggcaccaugcggucccuaacggaacccugguuaagacaauuaccaaugaucaaaucgaggugacaaacgcuaccgaacuugugcagucuagcuccacaggcagaauuugcgacucuccgcaccggauccuggaugggaaaaauuguacccucaucgacgcccugcugggagauccccauugcgacggcuuucagaacaaggagugggaucucuucgucgaacgcagcaaagccuauuccaauuguuacccuuaugacgugcccgauuacgcuucucugagaagccuuguugccuccagcgggacgcuggaguuuaccaaggaaggauucaacuggacaggcguggcucaggacggcaagucuuaugccugcaaacggggguccgucaauagcuuuuucucucgccucaacuggcugcacaaacuugaguacaaguauccugcgcugaaugugaccaugcccaacaaugauaaguuugacaaacucuacauuuggggaguucaucacccuuccacagauagcgaccaaaccucucuguacgugcaggccuccggcagagucacggugagcacaaagcggucccagcagaccgugaucccgaacauugggucucgccccugggucagaggaaucagcucccggauuagcauccacuggacaauuguuaagccuggcgacauccugcucaucaccucuaccgggaaucugauugcuccccgcggauauuucaaaaucagaaacggcaaguccagcauuaugcggucugaugccccuaucggcaacuguaauagcgagugcauuacacccaacggguccaucccgaaugacaaaccuuuucaaaacgugaaucgcaucacguacggagcuugucccagauaugugaagcagaacacccuuaaacuggccacaggcaugcggaaugucccugaaaagcagacccgcgggauuuucggagcgaucgccggcuuuauugagaacgggugggaaggaaugguggauggcugguacggcuucagacaucaaaauucugaggggacaggacaggcugccgaccucaaaagcacccaggcugccaucgaucagauuaacggcaagcugaaucggcuuaucgagaagacgaacgaaaaauuucaccaaaucgagaaggaguucuccgaaguugaagggcgcauucaggaccuggagaaauauguggaggauacaaagaucgaccucuggagcuacaaugccgaacugcuggucgcucucgagaaccagcauaccauugaucugaccgacucugaaaugaauaaacuuuucgagagaacacggaagcagcugagagaaaacgcggaggauaugggaaacggcugcuuuaagaucuaucacaaaugugacaaugccugcauuggguccauccgcaacggcaccuacgaccacgauguguaccgggacgaggcucucaauaacagauuccaaauuaagggaguugaacugaaaagcggcuauaaggauuggauccuuuggaucucuuuugccauuuccugcuuccugcucugugugguccugcugggguuuaucaugugggccugccagaaaggaaauauucgcuguaacaucugcauuuga

SEQ ID NO: 193252 - RNA, 1701 nt, Artificial Sequence
  derived and/or modified CDS sequence (opt5) from hemagglutinin__InfluenzaA__ABI20903
augaagaccaucauugcccugagcuacauccucugccugguguucgcucagaaacuucccggcaacgacaauuccacagccacgcugugucucgggcaccaugcggucccuaacggaacccugguuaagacaauuaccaaugaucaaaucgaggugacaaacgcuaccgaacuugugcaaaauucuccgacaggcagaauuugcgacagcccccaccggauccuggaugggaaaaacuguacccucaucgacgcccugcugggagauccucauugcgacggcuuucagaauaaggagugggaucucuucgucgaacgcuccaaagccuauucuaacuguuaccccuaugacgugccugauuacgcuagccugagaucccuuguugccucuagcgggacgcuggaguuuaccaaugaaaacuucaauuggacaggaguggcucaggacggcaaguccuaugccugcaagcggggcagcgucaacucuuucuucucccgccucaauuggcugcacaaacuugaguacaaguaucccgcgcugaacgugaccaugccuaauaacgggaaauuugauaagcucuacauuuggggaguucaucacccgagcacagacucugaucagaccucccuguacgugagagccagcggcaaagucacggugucuacaaagcggucccagcagaccgugauccccgacauuggguaucgcccuugggucagaggacugagcucccggaucucuauuuacuggacaaucguuaagcccggcgacauucuccugauccacagcaccgggaaccuuaucgcuccucgcggauauuucaaaauuagaaauggcaaguccagcaucaugcggucugaugcccccauuggcaacuguuccagcgagugcaucaccccgaaugggucuauuccuaacgacaaacccuuucagaaugugaaccgcaucacauacggagcuuguccuagauaugugaagcaaaauacgcugaaacucgccaccggcaugcggaacguccccgaaaagcagacacgcgggaucuucggagcgauugccggcuuuaucgagaaugggugggaaggaaugguggauggcugguacggcuucagacaucagaacagcgaggggaccggacaggcugccgaccugaaauccacacaagcugccauugaucagaucaauggcaaacuuaaccggcugguugagaagaccaaugaaaaguuucaccagauugagaaggaauuuucugagguggaagggagaauccaagaccucgagaaauaugucgaggauacgaagaucgaccuguggagcuacaacgccgaacugcucguggcucuggagaaucagcauacaauugaucuuaccgacuccgaaaugaacaaacuguucgagcgcacccggaagcagcucagagaaaacgcggaggauaugggaaauggcugcuuuaagaucuaccacaaaugugacaacgccugcauugggagcauccgcaauggcacauaugaccacgauguuuaccgggacgaggcucugaacaauagauuccagauuaagggaguggaacuuaaaucuggcuauaaggauuggauccuguggauuuccuuugccaucagcugcuuccuccugugugucgugcugcucggguuuaucaugugggccugccaaaaaggaaacauucgcuguaauaucugcauuuga

SEQ ID NO: 193253 - RNA, 1701 nt, Artificial Sequence
  derived and/or modified CDS sequence (opt5) from hemagglutinin__InfluenzaA__ABI20914
augaagaccaucauugcccugagcuacauccucugccugguguucgcucagaaacuucccggcaacgacaauuccacagccacgcugugucucgggcaccaugcggucccuaacggaacccugguuaagacaauuaccaaugaucaaaucgaggugacaaacgcuaccgaacuugugcagucuagcuccacaggcagaauuugcgacucuccgcaccggauccuggaugggaaaaauuguacccucaucgacgcccugcugggagauccccauugcgacggcuuucagaacaaggagugggaucucuucgucgaacgcagcaaagccuauuccaauuguuacccuuaugacgugcccgauuacgcuucucugagaagccuuguugccuccagcgggacgcuggaguuuauuaacgaagacuucaauuggaccggaguggcucaggauggcaagucuuaugccugcaagcggggcuccgucaacagcuuuuucucucgccucaauuggcugcacaaacuugaguacaaguauccugcgcugaacgugacaaugcccaauaacgggaaauuugacaagcucuacaucuggggaguucaucacccuuccaccgauagcgaccaaacaucucuguacgugagagccuccggccgggucaccgugagcacgaaacgcucccagcagacagugauuccgaauaucggguucagacccuggguccggggacugucuagccgcauuuccaucuauuggaccauuguuaagccuggcgacauccuccugaucaacagcacagggaaccuuauugcucccagaggauacuuuaagauccggaauggcaaaucuuccauuaugcgcagcgaugccccuaucggcaacuguucuagcgagugcauuacccccaauggguccaucccgaacgacaagccuuuccagaaugugaacagaaucaccuauggagcuuguccccgguacgugaaacaaaauacacugaagcucgccacgggcaugcgcaacgucccugaaaaacagaccagagggauuuuuggagcgaucgccggcuucauugagaaugggugggaaggaaugguggauggcugguauggcuuucggcaccagaacucugaggggacaggacaggcugccgaccuuaagagcacccaagcugccaucgaucagauuaauggcaaacugaacagacugaucgagaagacaaaugaaaaguuccaucagaucgagaaagaguucuccgaaguugaagggcgcauucaagaccucgagaaguacguggaggauaccaaaaucgaccuguggagcuauaacgccggacugcucgucgcucuggaaaaucagcacacgauugaucuuacagacucugagaugaacaagcuguuugaacggaccagaaaacagcuccgcgagaacgcggaagauaugggcaaugggugcuucaagaucuaccauaagugugacaacgccugcauuggcuccauccggaauggaaccuacgaccacgauguguauagagacgaggcucugaacaaucgcuuucagauuaaaggcguugagcuuaagagcggguacaaagauuggauccuguggaucucuuucgccauuuccugcuuucuccuguguguggucagccugggauucaucaugugggccugccaaaagggcaacauucgguguaauaucugcauuuga

SEQ ID NO: 193254 - RNA, 1701 nt, Artificial Sequence; identical to SEQ ID NO: 193138
  derived and/or modified CDS sequence (opt5) from hemagglutinin__InfluenzaA__ABI20925

SEQ ID NO: 193255 - RNA, 1701 nt, Artificial Sequence; identical to SEQ ID NO: 193138
  derived and/or modified CDS sequence (opt5) from hemagglutinin__InfluenzaA__ABI20936

SEQ ID NO: 193256 - RNA, 1701 nt, Artificial Sequence
  derived and/or modified CDS sequence (opt5) from hemagglutinin__InfluenzaA__ABI20947
augaagaccaucauugcccugagcuacauccucugccugguguucgcucagaaacuucccggcaacgacaauuccacagccacgcugugucucgggcaccaugcggucccuaacggaacccugguuaagacaauuaccaaugaucaaaucgaggugacaaacgcuaccgaacuugugcagucuagcuccacaggcagaauuugcgacucuccgcaccggauccuggaugggaaaaauuguacccucaucgacgcccugcugggagauccccauugcgacggcuuucagaacaaggagugggaucucuucgucgaacgcagcaaagccuauuccaauuguuacccuuaugacgugcccgauuacgcuucucugagaagccuuguugccuccagcgggacgcuggaguuuauuaacgaagacuucaauuggaccggaguggcucaggauggcaagucuuaugccugcaagcggggcuccgucaacagcuuuuucucucgccucaauuggcugcacaaacuugaguacaaguauccugcgcugaacgugacaaugcccaauaacgggaaauuugacaagcucuacaucuggggaguucaucacccuuccaccgauagcgaccaaacaucucuguacgugagagccuccggccgggucaccgugagcacgaaacgcucccagcagacagugauuccgaauaucggguucagacccuggguccggggacugucuagccgcauuuccaucuauuggaccauuguuaagccuggcgacauccuccugaucaacagcacagggaaccuuauugcucccagaggauacuuuaagauccggaauggcaaaucuuccauuaugcgcagcgaugccccuaucggcaacuguucuagcgagugcauuacccccaauggguccaucccgaacgacaagccuuuccagaaugugaacagaaucaccuauggagcuuguccccgguacgugaaacaaaauacacugaagcucgccacgggcaugcgcaacgucccugaaaaacagaccagagggauuuuuggagcgaucgccggcuucauugagaaugggugggaaggaaugguggauggcugguauggcuuucggcaccagaacucugaggggacaggacaggcugccgaccuuaagagcacccaagcugccaucgaucagauuaauggcaaacugaacagacugaucgagaagacaaaugaaaaguuccaucagaucgagcaagaguucuccgaaguugaagggcgcauucaggaccucgagaaauacguggaggauaccaagaucgaccuguggagcuauaacgccggacugcucgucgcucuggaaaaucagcacacgauugaucuuacagacucugagaugaacaaacuguuugaacggaccagaaagcagcuccgcgagaacgcggaagauaugggcaaugggugcuucaaaaucuaccauaagugugacaacgccugcauuggcuccauccggaauggaaccuacgaccacgauguguauagagacgaggcucugaacaaucgcuuucaaauuaagggcguugagcuuaaaagcggguacaaggauuggauccuguggaucucuuucgccauuuccugcuuucuccugugugugguccugcucggauucaucaugugggccugccagaaaggcaacauucgguguaauaucugcauuuga

SEQ ID NO: 193257 - RNA, 1701 nt, Artificial Sequence
  derived and/or modified CDS sequence (opt5) from hemagglutinin__InfluenzaA__ABI20958
augaagaccaucauugcccugagcuacauccucugccugguguucgcucagaaacuucccggcaacgacaauuccacagccacgcugugucucgggcaccaugcggucccuaacggaacccugguuaagacaauuaccaaugaucaaaucgaggugacaaacgcuaccgaacuugugcagucuagcuccacaggcagaauuugcgacucuccgcaccggauccuggaugggaaaaauuguacccucaucgacgcccugcugggagauccccauugcgacggcuuucagaacaaggagugggaucucuucgucgaacgcagcaaagccuauuccaauuguuacccuuaugacgugcccgauuacgcuucucugagaagccuuguugccuccagcgggacgcuggaguuuauuaacgaagacuucaauuggaccggaguggcucaggauggcaagucuuaugccugcaagcggggcuccgucaacagcuuuuucucucgccucaauuggcuguacaaacuugaguauaaguacccugcgcugaacgugacaaugcccaauaacgggaaauuugacaagcucuacaucuggggaguucaccauccuuccaccgauagcgaccaaacaucucuguaugugagagccuccggccgggucaccgugagcacgaaacgcucccagcagacagugauuccgaauaucggguucagacccuggguccggggacugucuagccgcauuuccaucuacuggaccauuguuaagccuggcgacauccuccugaucaacagcacagggaaccuuauugcucccagaggauauuuuaagauccggaauggcaaaucuuccauuaugcgcagcgaugccccuaucggcaacuguucuagcgagugcauuacccccaauggguccaucccgaacgacaagccuuuccagaaugugaacagaaucaccuacggagcuuguccccgguaugugaaacaaaauacacugaagcucgccacgggcaugcgcaacgucccugaaaaacagaccagagggauuuuuggagcgaucgccggcuucauugagaaugggugggaaggaaugguggauggcugguacggcuuucggcaccagaacucugaggggacaggacaggcugccgaccuuaagagcacccaagcugccaucgaucagauuaauggcaaacugaacagacugaucgagaagacaaaugaaaaguuccaccagaucgagaaagaguucuccgaaguugaagggcgcauucaagaccucgagaaguauguggaggauaccaaaaucgaccuguggagcuacaacgccggacugcucgucgcucuggaaaaucagcauacgauugaucuuacagacucugagaugaacaagcuguuugaacggaccagaaaacagcuccgcgagaacgcggaagauaugggcaaugggugcuucaagaucuaccacaagugugacaacgccugcauuggcuccauccggaauggaaccuaugaccaugauguguacagagacgaggcucugaacaaucgcuuucagauuaaaggcguugagcuuaagagcggguauaaagauuggauccuguggaucucuuucgccauuuccugcuuucuccugugugugguccugcucggauucaucaugugggccugccaaaagggcaacauucgguguaauaucugcauuuga

SEQ ID NO: 193258 - RNA, 1701 nt, Artificial Sequence
  derived and/or modified CDS sequence (opt5) from hemagglutinin__InfluenzaA__ABI20969
augaagaccaucauugcccugagcuacauccucugccugguguucgcucagaaacuucccgucaacgacaauuccacagccacgcugugucucggccaccaugcgguuccuaacgggacccuggugaagacaauuaccaaugaucacaucgaggugacaaacgcuaccgaacuuguccaaucuagcuccacaggaagaauuugcgacucuccgcaucagauccuggauggcgagaauuguacccucaucgacgcccugcugggggauccccacugcgacggauuucagaacaaagaauggaaucucuucguggagcggagcacggccuauuccaacuguuacccuuaugauguucccgacuacgcuucucugcgcagccuuguggccuccagcggcacccuggaauuuaauaacgagucuuucaauuggacaggggucgcucagaacggaaccuccagcgccugcaagagacggucuauuaaauccuuuuucagccgccucaauuggcugcaucaacuuaaguauaaguacccugcgcugaacgugacaaugcccaauaacgagaaauuugauaagcucuauaucuggggcguucaccacccuucuaccgacuccgaucagauuagccuguacgcccaggcuuccggcagagugacggucucuacaaaacggagccagcaaaccgugaucccgaacauugggucccgccccugggugagaggagucagcucucggaucuccauuuacuggacaaucguuaagccuggcgacauccugcucauuaauagcaccgggaaccugaucgcuccccgcggauauuucaaaauuagaucuggcaagagcuccaucaugcggucuaaugccccuauugggaaguguaacagcgaaugcaucacccccaauggauccaucccgaacgauaaaccuuuucagaaugugaaccgcauuacauacggcgccugucccagauaugugaagcagaauacgcuuaaacuggcgaccggcaugcggaacgucccugagaagcagacacgcgggaucuucggagccauugcuggcuuuaucgaaaaugggugggagggaaugguggacggcugguacggguucagacaucaaaacagcgagggaaccggccaggccgcugaccucaaaucuacacaggccgccauuaaucaaaucaacggcaagcugaaucggcuuaucgagaaaaccaacgaaaaguuucaccagauugaaaaggaguucuccgaaguugaggggagaauccaggaucuggagaaauauguggaagacacgaagauugaucucuggagcuacaacgcugagcugcuggucgcgcucgaaaaucagcauacaaucgaccugaccgauucugagaugaacaaacuuuucgaacgcacccggaagcaacugagagagaaugccgaggacaugggaaacggcugcuuuaaaauuuaucacaagugugauaaugcuugcaucggguccauucgcaacggaacauacgaccacgauguguaccgggacgaagcccucaauaacagauuccagaucaagggcguugagcugaaaagcggguauaaggauuggauccuuuggauuuccuuugccaucucuugcuuccugcucugugugguccugcugggcuuuauuaugugggcuugccagaaaggaaauauccgcuguaacauuugcaucuga

SEQ ID NO: 193259 - RNA, 1701 nt, Artificial Sequence
  derived and/or modified CDS sequence (opt5) from hemagglutinin__InfluenzaA__ABI20980
augaagaccaucauugcccugagcuacauccucugccugguguucgcucagaaacuucccgucaacgacaauuccacagccacgcugugucucggccaccaugcgguuccuaacgggacccuggugaagacaauuaccaaugaucacaucgaggugacaaacgcuaccgaacuuguccaaucuagcuccacaggaagaauuugcgacucuccgcaucagauccuggauggcgagaauuguacccucaucgacgcccugcugggggauccccacugcgacggauuucagaacaaagaaugggaucucuucguggagcggagcacggccuauuccaauuguuacccuuaugacguucccgauuacgcuucucugcgcagccuuguggccuccagcggcacccuggaauuuaacaaugagucuuucaacuggacaggggucgaccagaauggaaccuccagcgcuugcaagagacggucuacaaaauccuuuuucagccgccucaacuggcugcaucaacuuaaguauaaguacccugcccugaaugugaccaugcccaacaaugagaaauuugauaagcucuauauuuggggcguucaccacccuucuacggacuccgaucagaucagccuguacgcgcaggccuccggcagagugacagucucuaccaaacggagccagcaaacagugaccccgaacauugggucccgccccugggugagaggagucagcucucggaucuccauuuacuggaccaucguuaagccuggcgacauucugcucaucaacagcacagggaaucugaucgcuccccgcggauauuucaaaauuagaucuggcaagagcuccaucaugcggucuaacgcccuuauugggaaguguaauagcgaaugcaucacgccuaacggauccauucccaaugacaaaccguuucagaacgugaaucgcaucaccuacggcgcuuguccuagauaugugaagcagaacacacugaaacucgccaccggcaugcggaauguccccgagaagcagacacgcgggaucuucggagcgauugccggcuuuaucgaaaacgggugggagggaaugguggauggcugguacggguucagacaucaaaauagcgagggaaccggccaggcugccgaccugaaaucuacgcaggcugccauuaaccaaaucaauggcaaacuuaaccggcugauugaaaagacaaaugagaaguuucaccagaucgaaaaggaguucuccgaaguugaggggagaauccaggaucucgagaaauauguggaagacaccaagauugaucuguggagcuacaacgccgagauccuggucgcucucgaaaaccagcauaccauugaccugacagauucugagaugaauaaacuuuucgaacgcacccggaagcaacugagagagaacgcggaggacaugggaaauggcugcuuuaaaaucuaucacaagugugauaacgccugcauuggguccauccgcaauggaacauacgaccacgauguguaccgggacgaagcucucaacaauagauuccagauuaagggcguugagcugaaaagcggguauaaggacuggauccuuuggaucuccuuugccauuucuugcuuccugcucugugugguccugcugggcuuuaucaugugggccugccagaaaggaaacauucgcuguaauaucugcauuuga

SEQ ID NO: 193260 - RNA, 1701 nt, Artificial Sequence
  derived and/or modified CDS sequence (opt5) from hemagglutinin__InfluenzaA__ABI20991
augaagaccaucauugcccugagcuacauccucugccugguguucgcucagaaacuucccggcaacgacaauuccacagccacgcugugucucgggcaccaugcggucccuaacggaacccugguuaagacaauuaccaaugaucaaaucgaggugacaaacgcuaccgaacuugugcagucuagcuccacaggcgggauuugcgacucuccgcaccagauccuggauggagagaauuguacccucaucgacgcccugcugggcgauccccauugcgacggguuucagaacaaagaaugggaucucuucgucgagagaagcaaggccuauuccaauuguuacccuuaugacgugcccgauuacgcuucucugcggagccuuguugccuccagcggaacgcuggaauuuaacaaugagucuuucaacuggaccggcguggcucaaaauggcacauccagcgccugcaaacgcagaucuaacaaguccuuuuucagccggcucaauuggcugcaccagcuuaaguauaaauacccugcgcugaacgucaccaugcccaauaacgagaaguuugacaaacucuauauuuggggagugcaucacccuucuacagauuccgaccagaucagccuguacgcccaggcuccggggcgcguuaccguguccacgaagagaucucaacagacagucauucccaacaucggcagccggccuugggugcgcgggguguccagcagaauuucuaucuacuggaccauugucaaacccggagauauccugcucaucaauuguacaggcaaccugauugccccucggggguauuucaagauccgcuccggaaagagcucuauuaugagaagcgacgcuuccaucggcaaaugcaauucugaauguauuacccccaacggcagcaucccgaaugacaagccuuuucagaacguuaaucggaucaccuacggggccugcccccgcuaugugaaacagaacacacuuaagcuggcgacgggaaugagaaaugugccugagaaacaaacccggggcauuuucggggccaucgcuggauuuauugaaaacggcugggaggggauggucgauggaugguacggcuuccgccaccaaaauuccgagggcacagggcaggccgcugaccucaagagcacccaggccgccaucaaccagauuaauggaaaacugaacagacuuaucgaaaagacaaaugagaaguuucaucagaucgaaaaagaguucucugaaguggagggccggauucaggaucuggagaaguauguugaagacaccaaaaucgaucucugguccuacaacgcugagcugcugguggcgcucgaaaaccaacacacgauugaccugacagauagcgagaucaauaaacuuuucgaaagaaccaagaagcagcugcgcgagaacgccgaggacauggggaauggauguuuuaagauuuaucauaaaugcgauaacgcuugcaucggcucuauucggaaugggaccuacgaccacgaugucuacagagacgaagcccucaacaaucgcuuccagaucaagggcguggagcugaaauccggauauaaggacuggauccuuuggauuagcuuugccaucuccuguuuccugcucugcguugugcugcugggcuuuauuaugugggcuugucagaaagggaacauccggugcaauauuuguaucuga

SEQ ID NO: 193261 - RNA, 1701 nt, Artificial Sequence; identical to SEQ ID NO: 192782
  derived and/or modified CDS sequence (opt5) from hemagglutinin__InfluenzaA__ABI21002

SEQ ID NO: 193262 - RNA, 1701 nt, Artificial Sequence; identical to SEQ ID NO: 193226
  derived and/or modified CDS sequence (opt5) from hemagglutinin__InfluenzaA__ABI21013

SEQ ID NO: 193263 - RNA, 1701 nt, Artificial Sequence; identical to SEQ ID NO: 192712
  derived and/or modified CDS sequence (opt5) from hemagglutinin__InfluenzaA__ABI21024

SEQ ID NO: 193264 - RNA, 1701 nt, Artificial Sequence; identical to SEQ ID NO: 192588
  derived and/or modified CDS sequence (opt5) from hemagglutinin__InfluenzaA__ABI21035

SEQ ID NO: 193265 - RNA, 1701 nt, Artificial Sequence
  derived and/or modified CDS sequence (opt5) from hemagglutinin__InfluenzaA__ABI21046
augaagaccaucauugcccugagcuacauccucugccugguguucgcucagaaacuucccggcaacgacaauuccacagccacgcugugucucgggcaccaugcggucccuaacggaaccauuguuaagacaaucaccaaugaucaaauugaggugacaaacgcuaccgaacuggugcagucuagcuccacaggcgggaucugcgacucuccgcaccagauccuugauggagagaauuguacccugauugacgcccuccugggcgauccccagugcgacggguuucaaaacaaaaagugggaucuguucgucgaaagaagcaaagccuauuccaauuguuacccuuaugacgugcccgaucaugcuucucuccggagccugguugccuccagcggaacgcuugaguuuaacaaugaaucuuucgacuggaccggcgugacacagaacggcaccuccagcgcuugcaagcgcagaucuaauaaguccuuuuucagccggcugaacuggcucacacaccugaaauacaaguauccugcccuuaaugucaccaugcccaacaaugagaaauuugauaagcuguacaucuggggagugcaucacccugggacggacaacgaucagauuucucucuaugcgcaggccuccggccgcaucacaguuagcaccaaaagaucccaacagacagugauuccgaacaucgggucucggccccgcgucagagacgugagcucccggauuagcaucuacuggaccaucgugaagccuggagacauucugcugaucaauucuaccggcaaccucauugcuccccgcggguacuucaagaucagauccggaaaaagcucuauuaugcggagcgaugccccuaucggcaaguguaauuccgagugcaucacacccaacggcucuauuccgaaugacaaaccuuuucagaacgucaaucgcaucacguauggggcuugucccagauacguuaagcagaacacccugaaacuugccacaggaaugcggaaugugccugaaaagcaaacccgcggcauuuucggggcgaucgccggauuuauugagaacggcugggaagggaugguggauggaugguauggcuucagacaccagaauagcgagggcacagggcaggcugccgaccugaaauccacccaagcugccaucaaccagaucaauggaaagcucaaccggcugauuggcaagacgaaugagaaauuucaucagaucgaaaaggaguucagcgaagucgaggggcgcauucaggaucuugaaaaauacguggaggacacaaagaucgaucuguggucuuauaacgccgagcuccugguugcucuggaaaaccaacacaccauugaccucaccgauuccgagaugaauaaacuguucgaaagaacaaagaagcagcuucgggagaacgcggaagacaugggaaauggcugcuuuaaaaucuaccauaagugugauaacgccugcauugggagcaucagaaauggcaccuaugaccacgacguguaccgcgaugaggcucugaacaaucgguuccagaucaaaggagucgagcucaagucuggcuacaaagacuggauucuguggaucuccuuugccauuagcugcuuccuucuguguguggcccuccugggguuuaucaugugggcuugccagaagggaaacauuagauguaauaucugcaucuga

SEQ ID NO: 193266 - RNA, 1701 nt, Artificial Sequence
  derived and/or modified CDS sequence (opt5) from hemagglutinin__InfluenzaA__ABI21057
augaagaccaucauugcccugagcuacauccucugccugguguucgcucagaaacuucccggcaacgacaauuccacagccacgcugugucucgggcaccaugcggucccuaacggaaccauuguuaagacaaucaccaaugaucaaauugaggugacaaacgcuaccgaacuggugcaaaauucuagcacaggcgggaucugcgacuccccgcaccagauccuugauggagagaacuguacccugauugacgcccuccugggcgauccccagugcgacggguuucagaauaaaaagugggaucuguucgucgaaagaucuaaagccuauagcaacuguuacccuuaugacgugcccgaucaugcuucccuccggucucugguugccagcuccggaacgcuugaguuuaauaacgaaucuuucgacuggaccggcgugacacagaauggcaccucuuccgcuugcaagcgcagaagcaacaagagcuuuuucucccggcugaauuggcucacacaccugaaauacaaguauccugcccuuaacgucaccaugcccaauaacgagaaauuugauaagcuguacaucuggggagugcaucacccugggacggacagcgaucagauuucucucuaugcgcaggccuccggccgcaucacaguuagcaccaaaagaucccaacagacagugauuccgaacaucgggucucggccccgcgucagagacgugagcucccggauuagcaucuacuggaccaucgugaagccuggagacauucugcugaucaauucuaccggcaaccucauugcuccccgcggguacuucaagaucagauccggaaaaagcucuauuaugcggagcgaugccccuaucggcaaguguaauuccgagugcaucacacccaacggcucuauuccgaaugacaaaccuuuucagaacgucaaucgcaucacguauggggcuugucccagauacguuaagcagaacacccugaaacuugccacaggaaugcggaaugugccugaaaagcaaacccgcggcauuuucggggcgaucgccggauuuauugagaacggcugggaagggaugguggauggaugguauggcuucagacaccagaauagcgagggcacagggcaggcugccgaccugaaauccacccaagcugccaucaaccagaucaauggaaagcucaaccggcugauuggcaagacgaaugagaaauuucaucagaucgaaaaggaguucagcgaagucgaggggcgcauucaggaucuugaaaaauacguggaggacacaaagaucgaucuguggucuuauaacgccgagcuccugguugcucuggaaaaccaacacaccauugaccucaccgauuccgagaugaauaaacuguucgaaagaacaaagaagcagcuucgggagaacgcggaagacaugggaaauggcugcuuuaaaaucuaccauaagugugauaacgccugcauugggagcaucagaaauggcaccuaugaccacgacguguaccgcgaugaggcucugaacaaucgguuccagaucaaaggagucgagcucaagucuggcuacaaagacuggauucuguggaucuccuuugccauuagcugcuuccuucuguguguggcccuccugggguuuaucaugugggcuugccagaagggaaacauuagauguaauaucugcaucuga

SEQ ID NO: 193267 - RNA, 1701 nt, Artificial Sequence; identical to SEQ ID NO: 192315
  derived and/or modified CDS sequence (opt5) from hemagglutinin__InfluenzaA__ABI21068

SEQ ID NO: 193268 - RNA, 1701 nt, Artificial Sequence; identical to SEQ ID NO: 192354
  derived and/or modified CDS sequence (opt5) from hemagglutinin__InfluenzaA__ABI21079

SEQ ID NO: 193269 - RNA, 1701 nt, Artificial Sequence; identical to SEQ ID NO: 193185
  derived and/or modified CDS sequence (opt5) from hemagglutinin__InfluenzaA__ABI21090

SEQ ID NO: 193270 - RNA, 1701 nt, Artificial Sequence; identical to SEQ ID NO: 193185
  derived and/or modified CDS sequence (opt5) from hemagglutinin__InfluenzaA__ABI21101

SEQ ID NO: 193271 - RNA, 1701 nt, Artificial Sequence
  derived and/or modified CDS sequence (opt5) from hemagglutinin__InfluenzaA__ABI21123
augaagaccaucauugcccugagcuacauccucugccugguguucgcucagaaacuucccggcaacgacaauuccacagccacgcugugucucgggcaccaugcggucccuaacggaaccauuguuaagacaaucaccaaugaucaaauugaggugacaaacgcuaccgaacuggugcagucuagcuccacaggcgggaucugcgacucuccgcaccagauccuugauggagagaauuguacccugauugacgcccuccugggcgauccccagugcgacggguuucaaaacaaaaagugggaucuguucgucgaaagaagcaaagccuauuccaauuguuacccuuaugacgugcccgauuacgcuucucuccggagccugguugccuccagcggaacgcuugaguuuaacaaugaaucuuucaacuggaccggcgugacacagaauggcaccuccagcgcuugcaagcgcagaucuaacaauuccuuuuucagccggcugaacuggcucacacaucugaaguuuaaauauccugcccuuaaugucaccaugcccaacaacgagaaguucgacaaacuguacaucuggggagugcaccauccugggacgaauaacgaucagauuucucucuaugcgcaggccuccggccgcaucacaguuagcaccaagagaucccaacagacagugauuccgaauaucgggucucggccccgcgucagagacauuccuagccggaucuccaucuacuggaccauugugaaacccggagauauccugcugauuaacagcaccggcaaucucaucgcuccucgcggguacuuuaagauuagaucuggaaaguccagcaucaugcggucugacgcccccaucggcaaauguaacagcgagugcauuacaccgaauggcuccaucccuaacgacaagcccuuccagaaugugaaccgcauuacguauggggcuuguccuagauacgucaaacagaauacccugaagcuggccacaggaaugcggaacguucccgaaaaacaaacccgcggcaucuuuggggcgauugccggauucaucgagaauggcugggaagggaugguggauggaugguauggcuuuagacaccagaacucugagggcaucgggcaggcugccgaccuuaagagcacacaagcugccauuaaucagaucaacggaaaacucaaccggcugauuggcaagaccaaugagaaguuccaccagaucgaaaaagaguucuccgaaguggaggggcgcauucaggaucuugaaaagcaugucgaggacacgaaaaucgaucuguggagcuacaacgccgagcuccugguggcucuggaaaaucaacacacaauugaccucaccgauucugagaugaacaagcuguuugaaagaaccaaaaagcagcuucgggagaaugcggaagacaugggaaacggcugcuucaagaucuaucauaaaugugauaaugccugcaucggguccauuagaaacggcacauacgaccacgauguuuaucgcgacgaggcucugaauaaccgguuucagaucaagggaguggagcucaaaagcggcuacaaggacuggauucuguggaucucuuucgccauuuccugcuuucuucugugugucgcccuccugggguucaucaugugggcuugccagaaaggaaauaucagauguaacauuugcaucuga

SEQ ID NO: 193272 - RNA, 1701 nt, Artificial Sequence
  derived and/or modified CDS sequence (opt5) from hemagglutinin__InfluenzaA__ABI21134
augaagaccaucauugcccugagcuacauccucugccugguguucgcucagaaacuucccggcaacgacaauuccacagccacgcugugucucgggcaccaugcggucccuaacggaaccguugugaagacaauuaccaaugaucaaaucgaggugacaaacgcuaccgaacugguccagucuagcuccacaggcgggauuugcgacucuccgcaccagauccuugauggagagaauuguacccugauggacgcccuccugggcgauccccagugcgacggguuucaaaacaaaaagugggaucuguucguggaaagaagcaaagccuauuccaauuguuacccuuaugacguucccgauuacgcuucucuccggagccugguggccuccagcggaacgcuugaguuuaacaaugaaucuuucaacuggaccggcgucacacagaauggcaccuccagcgcuugcaagcgcagaucuaacaauuccuuuuucagccggcugaacuggcucacacaucugaaguuuaaauauccugcccuuaaugugaccaugcccaacaacgagaaguucgacaaacuguacaucuggggaguucaccauccugggacggauaaugaccagauuucucucuaugcgcaggccuccggccgcaucacagugagcaccaagagaucccaacagacagucauuccgaacaucgggucucggagccgcgugagagauauucccucccggaucagcauuuacuggaccaucgugaaaccuggagacauccugcugauuaauucuaccggcaaccucaucgcuccccgcggguacuuuaagauuagauccggaaagagcucuaucaugcggagcgacgccccuauuggcaaauguaauuccgagugcaucacacccaacggcucuaucccgaaugauaagccuuuccagaacgucaaucgcauuacguauggggcuugucccagauacguuaaacagaacacccugaaacuugccacaggaaugcggaaugugccugaaaaacaaacccgcggcaucuuuggggcgauugccggauucaucgagaacggcugggaagggaugguggacggaugguauggcuuuagacaccagaauagcgagggcacagggcaggcugccgaucugaaguccacccaagcugccauuaaccagaucaauggaaaacucaaccggcugaucggcaagacgaacgagaaguuccaccagauugaaaaagaguucagcgaagucgaggggagaauccaggaccuugaaaaguacguggaggauacaaaaauugaccuguggucuuauaaugccgagcuccugguugcucuggaaaaccaacauaccaucgaucucaccgacuccgagaugaauaagcuguuugaacgcacaaagaagcagcuucgggagaacgcggaagauaugggaaauggcugcuucaagauuuaccacaaaugugacaacgccugcaucgggagcauuagaaauggcaccuaugaucaugacguguaccgcgacgaggcucugaacaaucgguuucagaucaagggagucgagcucaaaucuggcuacaaggauuggauccuguggauuuccuucgccaucagcugcuuucuucuguguguggcccuccugggguucauuaugugggcuugccagaaaggaaacaucagauguaauauuugcaucuga

SEQ ID NO: 193273 - RNA, 1701 nt, Artificial Sequence; identical to SEQ ID NO: 192354
  derived and/or modified CDS sequence (opt5) from hemagglutinin__InfluenzaA__ABI21156

SEQ ID NO: 193274 - RNA, 1701 nt, Artificial Sequence
  derived and/or modified CDS sequence (opt5) from hemagglutinin__InfluenzaA__ABI21167
augaagaccaucauugcccugggcuacauccucugccugguguucgcucagaaacuucccgggaacgacaauagcacagccacgcugugucucggacaccaugcggucccuaacggcaccauuguuaagacaaucaccaaugaucaaauugaggugacaaacgcuaccgaacuggugcaguccucuagcacagggggaaucugcgacuccccgcaccagauccuugauggcgagaauuguacccugauugacgcccuccugggggauccccagugcgacggauuucaaaacaaaaagugggaucuguucgucgaaagaucuaaagccuauagcaauuguuacccuuaugacgugcccgauuacgcuucccuccggucucugguugccagcuccggcacgcuugaguuuaacaaugaaucuuucaacuggaccggcgugacacagaaugggaccucuuccgcuugcaagcgcagaagcaacaauagcuuuuucucccggcugaacuggcucacacaucugaaguuuaaauauccugcccuuaaugucaccaugcccaacaacgagaaguucgacaaacuguacaucuggggagugcaccauccuggcacgaauaacgaucagauuagccucuaugcgcaggccucugggcgcaucacaguuuccaccaagagaagccaacagacagugauuccgaauaucggaucccggccccgcgucagagacauuccuucucggaucagcaucuacuggaccauugugaaacccggcgauauccugcugauuaacuccaccgggaaucucaucgcuccucgcggauacuuuaagauuagaagcggcaagucuuccaucaugcggagcgacgcccccaucggcaaauguaacucugagugcauuacaccgaaugggagcaucccuaacgacaagcccuuccagaaugugaaccgcauuacguauggagcuuguccuagauacgucaaacagaauacccugaaacuugccacaggcaugcggaacguucccgaaaagcaaacccgcgggaucuuuggagcgauugccggcuucaucgagaaugggugggaaggaaugguggauggcugguauggcuuuagacaccagaacuccgaggggaucggacaggcugccgaccugaagucuacacaagcugccauuaaucagaucaacggcaaacucaaccggcugauugggaagaccaaugagaaguuccaccagaucgaaaaagaguucagcgaaguggagggacgcauucaggaucuugaaaaguacgucgaggacacgaaaaucgaucugugguccuauaacgccgagcuccugguggcucuggaaaaucaacauacaauugaccucaccgauagcgagaugaacaagcuguuugaaagaaccaaaaagcagcuucgggagaaugcggaagacaugggcaacgggugcuucaagaucuaccacaaaugugauaaugccugcaucggcucuauuagaaacggaacauaugaccaugagguuuaccgcgaugaggcucugaauaaccgguuucagaucaagggcguggaacucaaauccggguacaaggacuggauucuguggaucagcuucgccauuucuugcuuucuucugugugucgcccuccugggauucaucaugugggcuugccagaaaggcaauaucagauguaacauuugcaucuga

SEQ ID NO: 193275 - RNA, 1701 nt, Artificial Sequence
  derived and/or modified CDS sequence (opt5) from hemagglutinin__InfluenzaA__ABI21178
augaagaccaucauugcccugagcuacauccucugccugguguucgcucagaaacuucccggcaacgacaauuccacagccacgcugugucucgggcaccaugcggucccuaacggaaccauuguuaagacaaucaccaaugaucaaauugaggugacaaacgcuaccgaacuggugcagucuagcuccacaggcgggaucugcgacucuccgcaccagauccuugauggagagaauuguacccugauugacgcccuccugggcgauccccagugcgacggguuucaaaacaaaaagugggaucuguucgucgaaagaagcaaagccuauuccucuuguuacccuuaugacgugcccgauuacgcuagccuccggucccugguugccagcucuggaacgcuugaguuuaauaacgaauccuucaauuggaccggcgugacacagaacggcaccagcucugcuugcaagcgcagauccaauaacagcuuuuucucucggcugaauuggcucacacaucugaaguuuaaauauccugcccuuaacgucaccaugcccaauaacgagaaguucgacaaacuguacaucuggggagugcaccauccugggacgaacaaugaucagauuucccucuaugcgcaggccagcggccgcaucacaguuuccaccaagagaucucaacagacagugauuccgaacaucgggagccggccccgcgucagagacauuccuucccggaucagcaucuacuggaccauugugaaacccggagauauccugcugauuaauucuaccggcaaccucaucgcuccucgcggguacuuuaagauuagauccggaaagagcucuaucaugcggagcgacgcccccaucggcaaauguaauuccgagugcauuacaccgaacggcucuaucccuaaugacaagcccuuccagaacgugaaucgcauuacguauggggcuuguccuagauacgucaaacagaacacccugaaacuugccacaggaaugcggaauguucccgaaaagcaaacccgcggcaucuuuggggcgauugccggauucaucgagaacggcugggaagggaugguggauggaugguauggcuuuagacaccagaauagcgagggcaucgggcaggcugccgaccugaaguccacacaagcugccauuaaccagaucaauggaaaacucaaccggcugauuggcaagaccaacgagaaguuccaccagaucgaaaaagaguucagcgaaguggaggggcgcauucaggaucuugaaaaguacgucgaggacacgaaaaucgaucuguggucuuauaaugccgagcuccugguggcucuggaaaaccaacauacaauugaccucaccgauuccgagaugaauaagcuguuugaaagaaccaaaaagcagcuucgggagaacgcggaagacaugggaaauggcugcuucaagaucuaccacaaaugugauaacgccugcaucgggagcauuagaaauggcacauaugaccaugauguuuaccgcgacgaggcucugaacaaucgguuucagaucaagggaguggagcucaaaucuggcuacaaggacuggauucuguggaucuccuucgccauuagcugcuuucuucugugugucgcccuccugggguucaucaugugggcuugccagaaaggaaacaucagauguaauauuugcaucuga

SEQ ID NO: 193276 - RNA, 1698 nt, Artificial Sequence
  derived and/or modified CDS sequence (opt5) from hemagglutinin__InfluenzaA__ABI21200
augaaggugaaacugcucguccugcuuugcaccuucacagccacguacgcugacaccaucuguauuggcuaucacgccaacaauagcacagauaccguugacacagugcuggagaagaacgugaccgucacacauuccgugaaucuccuggaagauucucacaacgggaaacuuugccugcucaagggaaucgcgccccugcagcugggcaauuguagcguugcuggguggauucucggaaacccugagugcgaacugcuuaucuccaaagagucuuggagcuacauuguggaaaccccgaaucccgagaacggcacguguuauccuggguacuuugccgacuaugaggaacugagagagcaacucuccucugucagcuccuucgaacgguuugagaucuuccccaaggagagcucuuggccuaaucauaccgugacaggaguuuccgccagcugcucucacaacggcaaguccagcuuuuaccgcaaucugcuuuggcugaccggcaaaaacgggcucuaucccaaucugucuaaguccuacgcuaacaauaaagaaaaggaggugcugguccucuggggagugcaucacccuccgaacaucggcgaucagagagcccuguaccacacagaaaacgcuuaugugagcgucguuuccucucauuacagccggcgcuucacccccgagauugccaaaagaccuaaggugcgggaccaggaagggcgcaucaauuauuacuggacgcuucuggagcccggagauacaauuaucuuugaggcgaacggcaaucucauugccccuagauucgcuuuugcccugucccggggguucggaagcggcaucauuaccucuaacgcucccauggacgaaugugaugccaagugccagacaccgcaaggcgcgaucaauuccagccuuccuuuucagaacgugcaccccgucaccaucggggaguguccuaaauaugugcgcucugccaagcugagaaugguuaccggacuccggaauauucccagcauccagucccgcggccuguucggggcuauugccggauuuaucgaaggcggguggacaggaaugguggacggcugguacggcuaucaucaccagaacgagcaagggucuggauacgcugccgaucagaaaagcacgcagaaugccauuaacggcaucaccaauaaggucaacuccgugaucgaaaagaugaauacacaguucaccgcuguugggaaagaguucaacaaacuggagagacggauggaaaaucucaacaagaagguggacgauggauuucuggacauuuggacauacaacgcggagcuucugguccuccuggaaaaugagcgcacccuugacuuccacgauagcaacgugaaaaaucuguaugaaaaggucaaaucucaacucaagaacaaugccaaagagaucggcaacgggugcuuugaguucuaccauaaguguaaugacgaaugcauggaguccgugaagaacggcacguaugauuaccccaaauauagcgaagagucuaagcugaauagagagcggauugacggaguuaaacuggaauccaugggcguguaccagauccucgcuauuuauagcacagucgccuccucucuggugcuucugguuagccucggggccaucuccuuuuggaugugcucuaacggaagccugcaguguagaaucugcauuuga

SEQ ID NO: 193277 - RNA, 1698 nt, Artificial Sequence; identical to SEQ ID NO: 193276
  derived and/or modified CDS sequence (opt5) from hemagglutinin__InfluenzaA__ABI21211

SEQ ID NO: 193278 - RNA, 1698 nt, Artificial Sequence
  derived and/or modified CDS sequence (opt5) from hemagglutinin__InfluenzaA__ABI21233
augaaggugaaacugcucguccugcuuugcaccuucacagccacguacgcugacaccaucuguauuggcuaucacgccaacaauagcacagauaccguugacacagugcuggagaagaacgugaccgucacacauuccgugaaucuccuggaagauucucacaacgggaaacuuugccugcucaagggaaucgcgccccugcagcugggcaauuguagcguugcuggguggauucucggaaacccugagugcgaacugcuuaucuccaaagagucuuggagcuacauuguggaaaccccgaaucccgagaacggcacguguuauccuggguacuuugccgacuaugaggaacugagagagcaacucaauuccgucucuagcuucgaacgguuugagaucuuccccaaggaguccagcuggccuaaccauaccgugacaggaguuucugccuccugcagccacaauggcaagucuuccuuuuaccgcaaccugcuuuggcugaccggcaaaaaugggcucuaucccaaccugagcaagucuuacgcuaauaacaaagaaaaggaggugcugguccucuggggagugcaucacccuccgaacaucggcgaucagagagcccuguaccacacagaaaaugcuuauguguccgucguuagcucccauuacucucggcgcuucacccccgagauugccaaaagaccuaaggugcgggaccaggaagggcgcaucaacuauuacuggacgcuucuggagcccggagauacaauuaucuuugaggcgaauggcaaccucauugccccuagauucgcuuuugcccugagccggggguucggauccggcaucauuaccagcaaugcucccauggacgaaugugaugccaagugccagacaccgcaaggcgcgaucaacucuucccuuccuuuucagaaugugcaccccgucaccaucggggaguguccuaaauaugugcgcagcgccaagcugagaaugguuaccggacuccggaacauucccucuauccagagccgcggccuguucggggcuauugccggauuuaucgaaggcggguggacaggaaugguggacggcugguacggcuaucaucaccagaaugagcaaggguccggauacgcugccgaucagaaaucuacgcagaacgccauuaauggcaucaccaacaaggucaauagcgugaucgaaaagaugaacacacaguucaccgcuguugggaaagaguucaauaaacuggagagacggauggaaaaccucaacaagaagguggacgauggauuucuggacauuuggacauacaaugcggagcuucugguccuccuggaaaacgagcgcacccuugacuuccacgauuccaaugugaaaaaccuguaugaaaaggucaaaagccaacucaagaauaacgccaaagagaucggcaaugggugcuuugaguucuaccauaaguguaacgacgaaugcauggagucugugaagaauggcacguaugauuaccccaaauauuccgaagagagcaagcugaacagagagcggauugacggaguuaaacuggaaucuaugggcguguaccagauccucgcuauuuauuccacagucgccagcucccuggugcuucugguuucucucggggccaucagcuuuuggaugugcuccaauggaucucugcaguguagaaucugcauuuga

SEQ ID NO: 193279 - RNA, 1701 nt, Artificial Sequence
  derived and/or modified CDS sequence (opt5) from hemagglutinin__InfluenzaA__ABI21244
augaagaccaucauugcccugagcuacauccucugccugguguucgcucagaaacuucccggcaacgacaauuccacagccacgcugugucucgggcaccaugcggucccuaacggaacccugguuaagacaauuaccaaugaucaaaucgaggugacaaacgcuaccgaacuugugcagucuagcuccacaggcagaauuugcgacucuccgcaccggauccuggaugggaaaaauuguacccucaucgacgcccugcugggagauccccauugcgacggcuuucagaacaaggagugggaucucuucgucgaacgcagcaaagccuauuccaauuguuacccuuaugacgugcccgauuacgcuucucugagaagccuuguugccuccagcgggacgcugaaguuuauuaacgaggacuucaauuggaccggaguggcucaggauggcaagucuuaugccugcaaacggggcuccgucaacagcuuuuucucucgccucaauuggcugcacaaacuugaauacaaguauccugcgcugaacgugacaaugcccaauaacgggaaguuugacaaacucuacaucuggggaguucaucacccuuccaccgauagcgaccaaacaucucuguacgugagagccuccggccgggucaccgugagcacgaagcgcucccagcagacagugauuccgaauaucgggucuagacccuggguccggggacugagcucccgcauuagcaucuauuggaccauuguuaagccuggcgacauccuccugaucaacucuacagggaaccuuauugcucccagaggauacuucaaaauccgguccggcaagagcucuauuaugcgcagcgaugccccuaucggcaauuguuccucugagugcauuacccccaacgggagcaucccgaaugacaaaccuuuucagaacgugaauagaaucaccuauggagcuuguccccgguacgugaagcaaaacacacugaaacucgccacgggcaugcgcaaugucccugagaagcagaccagagggauuuucggagcgaucgccggcuuuauugaaaacgggugggagggaaugguggauggcugguauggcuuccggcaccaaaauuccgaagggacaggacaggcugccgaccugaaaagcacccaggcugccaucgaucagauuaacggcaaacuuaauagacugaucgagaagacaaacgagaaguuucaucagaucgaaaaggaguucucugaaguugaggggcgcauucaagaccucgaaaaauacguggaggauaccaagaucgaccugugguccuauaaugccgagcugcucgucgcucuggaaaaccagcacacgauugaucuuacagacagcgagaugaauaaacuguucgaacggaccagaaagcagcuccgcgagaacgcggaagauaugggaaacggcugcuuuaagaucuaccauaaaugugacaaugccugcauugggucuauccggaacggcaccuacgaccacgauguguauagagacgaggcucugaauaaccgcuuccagauuaagggaguugagcuuaaauccggcuacaaggauuggauccuguggaucagcuuugccauuuccugcuuccuccugugugugguccugcucggguuuaucaugugggccugccaaaaaggaaauauucgguguaacaucugcauuuga

SEQ ID NO: 193280 - RNA, 1701 nt, Artificial Sequence; identical to SEQ ID NO: 193125
  derived and/or modified CDS sequence (opt5) from hemagglutinin__InfluenzaA__ABI21255

SEQ ID NO: 193281 - RNA, 1701 nt, Artificial Sequence; identical to SEQ ID NO: 193125
  derived and/or modified CDS sequence (opt5) from hemagglutinin__InfluenzaA__ABI21266

SEQ ID NO: 193282 - RNA, 1701 nt, Artificial Sequence; identical to SEQ ID NO: 193125
  derived and/or modified CDS sequence (opt5) from hemagglutinin__InfluenzaA__ABI21277

SEQ ID NO: 193283 - RNA, 1701 nt, Artificial Sequence
  derived and/or modified CDS sequence (opt5) from hemagglutinin__InfluenzaA__ABI21299
augaagaccaucauugcccugagcuacauccucugccugguguucgcucagaaacuucccggcaacgacaauuccacagccacgcugugucucgggcaccaugcggucccuaacggaacccugguuaagacaauuaccaaugaucaaaucgaggugacaaacgcuaccgaacuugugcagucuagcuccacaggcagaauuugcgacucuccgcaccggauccuggaugggaaaaauuguacccucaucgacgcccugcugggagauccccauugcgacggcuuucagaacaaggagugggaucucuucgucgaacgcagcaaagccuauuccaauuguuacccuuaugacgugcccgauuacgcuucucugagaagccuuguugccuccagcgggacgcuggaguuuauuaacgaagacuucaauuggaccggaguggcucaggauggcaagucuuaugccugcaagcggggcuccgucaacagcuuuuucucucgccucaauuggcugcacaaacuugaguacaaguauccugcgcugaacgugacaaugcccaauaacgacaaauuugauaagcucuacaucuggggaguucaucacccuuccaccgacagcgaccaaacaucucuguacgugagagccuccgggcgggucaccgugagcacgaaacgcucccagcagacagugauuccgaauaucggcucuagacccuggguccgggggcugagcucccgcauuagcaucuauuggaccauuguuaagccuggagauauccuccugaucaacucuacaggcaaccuuauugcucccagaggguacuucaagauccggaauggaaaauccagcauuaugcgcucugacgccccuaucggcaacuguagcuccgagugcauuacccccaauggcucuaucccgaacgauaagccuuuucagaaugugaacagaaucaccuauggggcuuguccccgguacgugaaacaaaauacacugaagcucgccacgggaaugcgcaacgucccugaaaaacagaccagaggcauuuucggggcgaucgccggauuuauugagaauggcugggaagggaugguggacggaugguauggcuuccggcaccagaacagcgagggcacagggcaggcugccgaucugaaguccacccaagcugccaucgaccagauuaauggaaaacuuaacagacugaucgagaagacaaaugaaaaguuucaucagaucgagaaagaguucagcgaaguugaaggccgcauucaagaucucgagaaguacguggaggacaccaaaaucgaucuguggucuuauaacgccgaacugcucgucgcucuggagaaucagcacacgauugaccuuacagauuccgaaaugaacaagcuguucgagcggaccagaaaacagcuccgcgaaaacgcggaggacauggggaauggaugcuuuaagaucuaccauaagugugacaacgccugcauuggcagcauccggaaugggaccuacgaucacgacguguauagagaugaggcucugaacaaucgcuuccagauuaaaggcguugaacuuaagucuggauacaaagacuggauccuguggaucuccuuugccauuagcugcuuccuccugugugugguccugcucggcuuuaucaugugggccugccaaaaggggaacauucgguguaauaucugcauuuga

SEQ ID NO: 193284 - RNA, 1701 nt, Artificial Sequence; identical to SEQ ID NO: 193125
  derived and/or modified CDS sequence (opt5) from hemagglutinin__InfluenzaA__ABI21310

SEQ ID NO: 193285 - RNA, 1701 nt, Artificial Sequence
  derived and/or modified CDS sequence (opt5) from hemagglutinin__InfluenzaA__ABI21321
augaagaccaucauugcccugagcuacauccucugccugguguucgcucagaaacuucccggcaacgacaauuccacagccacgcugugucucgggcaccaugcggucccuaacggaacccugguuaagacaauuaccaaugaucaaaucgaggugacaaacgcuaccgaacuugugcagucuagcuccacaggcagaauuugcgacucuccgcaccggauccuggaugggaaaaauuguacccucaucgacgcccugcugggagauccccauugcgacggcuuucagaacaaggagugggaucucuucgucgaacgcagcaaagccuauuccaauuguuacccuuaugacgugcccgauuacgcuucucugagaagccuuguugccuccagcgggacgcuggaguuuauuaacgaagacuucaauuggaccggaguggcucaggauggcaagucuuaugccugcaagcggggcuccgucaacagcuuuuucucucgccucaauuggcugcacaaacuugaguacaaguauccugcgcugaacgugacaaugcccaauaacgggaaauuugacaagcucuacaucuggggaguucaucacccuuccaccgauagcgaccaaacaucucuguacgugagagccuccggccgggucaccgugagcacgaaacgcucccagcagacagugauuccgaauaucgggucuagacccuggguccggggacugagcucccgcauuagcaucuauuggaccauuguuaagccuggcgacauccuccugaucaacucuacagggaaccuuauugcucccagaggauacuucaagauccggaauggcaaauccagcauuaugcgcucugaugccccuaucggcaacuguagcuccgagugcauuacccccaaugggucuaucccgaacgacaagccuuuucagaaugugaacagaaucaccuauggagcuuguccccgguacgugaaacaaaauacacugaagcucgccacgggcaugcgcaacgucccugaaaaacagaccagagggauuuucggagcgaucgccggcuuuauugagaaugggugggaaggaaugguggauggcugguauggcuuccggcaccagaacagcgaggggacaggacaggcugccgaccugaaguccacccaagcugccaucgaucagauuaauggcaaacuuaacagacugaucgagaagacaaaugaaaaguuucaucagaucgagaaagaguucagcgaaguugaagggcgcauucaagaccucgagaaguacguggaggauaccaaaaucgaccuguggucuuauaacgccgaacugcucgucgcucuggagaaucagcacacgauugaucuuacagacuccgaaaugaacaagcuguucgagaaaacccggaagcagcucagagaaaacgcggaggauaugggaaauggcugcuuuaagaucuaccauaaaugugacaacgccugcauugggagcauccgcaauggcaccuacgaccacgauguguaucgggacgaggcucugaacaauagauuccagauuaagggaguugaacuuaaaucuggcuacaaggauuggauccuguggaucuccuuugccauuagcugcuuccuccugugugugguccugcucggguuuaucaugugggccugccaaaaaggaaacauucgcuguaauaucugcauuuga

SEQ ID NO: 193286 - RNA, 1701 nt, Artificial Sequence
  derived and/or modified CDS sequence (opt5) from hemagglutinin__InfluenzaA__ABI21332
augaagaccaucauugcccugagcuacauccucugccugguguucgcucagaaacuucccggcaacgacaauuccacagccacgcugugucucgggcaccaugcggucccuaacggaacccugguuaagacaauuaccaaugaucaaaucgaggugacaaacgcuaccgaacuugugcagucuagcuccacaggcagaauuugcgacucuccgcaccggauccuggaugggaaaaauuguacccucaucgacgcccugcugggagauccccauugcgacggcuuucagaacaaggagugggaucucuucgucgaacgcagcaaagccuauuccaauuguuacccuuaugacgugcccgauuacgcuucucugagaagccuuguugccuccagcgggacgcuggaguuuauuaacgaagacuucaauuggaccggaguggcucaggauggcaagucuuaugccugcaagcggggcuccgucaacagcuuuuucucucgccucaauuggcugcacaaacuugaguacaaguauccugcgcugaacgugacaaugcccaauaacgggaaauuugacaagcucuacaucuggggaguucaucacccuuccaccgauagcgaccaaacaucucuguacgugcaggccuccggcagagucaccgugagcacgaaacggucccagcagacagugauuccgaauaucgggucucgccccugggucagaggacugagcucccggauuagcaucuauuggaccauuguuaagccuggcgacauccuccugaucaacucuacagggaaccuuauugcuccccgcggauacuucaagaucagaaauggcaaauccagcauuaugcggucugaugccccuaucggcaacuguagcuccgagugcauuacccccaaugggucuaucccgaacgacaagccuuuucaaaaugugaaccgcaucaccuauggagcuugucccagauacgugaaacagaauacacugaagcucgccacgggcaugcggaacgucccugaaaaacagacccgcgggauuuucggagcgaucgccggcuuuauugagaaugggugggaaggaaugguggauggcugguauggcuucagacaccagaacagcgaggggacaggacaagcugccgaccugaaguccacccaggcugccaucgaucagauuaauggcaaacuuaaccggcugaucgagaagacaaaugaaaaguuucaucaaaucgagaaagaguucagcgaaguugaagggcgcauucaggaccucgagaaguacguggaggauaccaaaaucgaccuguggucuuauaacgccgaacugcucgucgcucuggagaaucagcacacgauugaucuuacagacuccgaaaugaacaagcuguucgagagaacccggaaacagcucagagaaaacgcggaggauaugggaaauggcugcuuuaagaucuaccauaagugugacaacgccugcauugggagcauccgcaauggcaccuacgaccacgauguguaucgggacgaggcucugaacaauagauuccaaauuaaaggaguugaacuuaagucuggcuacaaagauuggauccuguggaucuccuuugccauuagcugcuuccuccugugugugguccugcucggguuuaucaugugggccugccagaagggaaacauucgcuguaauaucugcauuuga

SEQ ID NO: 193287 - RNA, 1701 nt, Artificial Sequence; identical to SEQ ID NO: 193125
  derived and/or modified CDS sequence (opt5) from hemagglutinin__InfluenzaA__ABI21343

SEQ ID NO: 193288 - RNA, 1701 nt, Artificial Sequence
  derived and/or modified CDS sequence (opt5) from hemagglutinin__InfluenzaA__ABI21354
augaagaccaucauugcccugagcuacaucuccugccucguguucgcucagaaacugcccggcaacgacaauucuacagccacgcuuugucuggggcaccaugcggucccuaacggaacccucguuaagacaauuaccaaugaucaaaucgaggugacaaacgcuaccgaacuggugcagagcuccucuacaggcagaauuugcgacagcccgcaccggauccuugaugggaaaaauuguacccugaucgacgcccuccugggagauccccauugcgacggcuuucagaacaaggagugggaucuguucgucgaacgcuccaaagccuauucuaauuguuacccuuaugacgugcccgauuacgcuagccucagaucccugguugccagcucugggacgcuugaguuuauuaacgaagacuucaauuggaccggaguggcucaggauggcaaguccuaugccugcaagcggggcagcgucaacucuuucuucucccgccugaauuggcuccacaaacuggaguacaaguauccugcgcuuaacgugacaaugcccaauaacgggaaauuugacaagcuguacaucuggggaguucaucacccuagcaccgauucugaccaaacaucccucuacgugagagccagcggccgggucaccguguccacgaaacgcucucagcagacagugauuccgaauaucgggagcagacccuggguccggggacuguccagccgcauuucuaucuauuggaccauuguuaagccuggcgacauccugcucaucaacuccacagggaaccugauugcucccagaggauacuucaagauccggaauggcaaaagcucuauuaugcgcagcgaugccccuaucggcaacuguuccucugagugcauuacccccaaugggagcaucccgaacgacaagccuuuucagaaugugaacagaaucaccuauggagcuuguccccgguacgugaaacaaaauacacuuaagcuggccacgggcaugcgcaacgucccugaaaaacagaccagagggauuuucggagcgaucgccggcuuuauugagaaugggugggaaggaaugguggauggcugguauggcuuccggcaccagaacuccgaggggacaggacaggcugccgaccucaagagcacccaagcugccaucgaucagauuaauggcaaacugaacagacuuaucgagaagacaaaugaaaaguuucaucagaucgagaaagaauuuucugagguugaagggcgcauucaagaccuggagaaguacguggaggauaccaaaaucgaccucugguccuauaacgccgaacugcuggucgcucucgagaaucagcacacgauugaucugacagacagcgaaaugaacaaacuuuucgagcggaccagaaagcagcugcgcgaaaacgcggaggauaugggaaauggcugcuuuaagaucuaccauaagugugacaacgccugcauugggucuauccggaauggcaccuacgaccacgauguguauagagacgaggcucucaacaaucgcuuccagauuaaaggaguugaacugaaguccggcuacaaagauuggauccuuuggaucagcuuugccauuuccugcuuccugcucugugugguccugcugggguuuaucaugugggccugccaaaagggaaacauucgguguaauaucugcauuuga

SEQ ID NO: 193289 - RNA, 1701 nt, Artificial Sequence
  derived and/or modified CDS sequence (opt5) from hemagglutinin__InfluenzaA__ABI21365
augaagaccaucauugcccugagcuacauccucugccugguguucgcucagaaacuucccggcaacgacaauuccacagccacgcugugucucgggcaccaugcggucccuaacggaacccugguuaagacaauuaccaaugaucaaaucgaggugacaaacgcuaccgaacuugugcagucuagcuccacaggcagaauuugcgacucuccgcaccggauccuggaugggaaaaauuguacccucaucgacgcccugcugggagauccccauugcgacggcuuucagaacaaggagugggaucucuucgucgaacgcagcaaagccuauuccaauuguuacccuuaugacgugcccgauuacgcuucucugagaagccuuguugccuccagcgggacgcuggaguuuauuaacgaagacuucaauuggaccggaguggcucaggauggcaagucuuaugccugcaagcggggcuccgucaacagcuuuuucucucgccucaauuggcugcacaaacuugaguacaaguauccugcgcugaacgugacaaugcccaauaacgggaaauuugacaagcucuacaucuggggaguucaucacccuuccaccgauagcgaccaaacaucucuguacgugagagccuccggccgggucaccgugagcacgaaacgcucccagcagacagugauuccgaauaucgggucuagacccuggguccggggacugagcucccgcauuagcaucuauuggaccauuguuaagccuggcgacauccuccugaucaacucuacagggaaccuuauugcucccagaggauacuucaagauccggaauggcaaauccagcauuaugcgcucugaugccccuaucggcaacuguagcuccgagugcauuacccccaaugggucuaucccgaacgacaagccuuuucagaaugugaacagaaucaccuauggagcuuguccccgguacgugaaacaaaauacacugaagcucgccacgggcaugcgcaacgucccugaaaaacagaccagagggauuuucggagcgaucgccggcuuuauugagaaugggugggaaggaaugguggauggcugguauggcuuccggcaccagaacagcgaggggacaggacaggcugccgaccugaaguccacccaagcugccaucgaucagauuaauggcaaacuuaacagacugaucgagaagacaaaugaaaaguuucaucagaucgagaaagaguucagcgaaguugaagggcgcauucaagaccucgagaaguacguggaggauaccaaaaucgaccuguggucuuauaacgccgaacugcucgucgcucuggagaaucagcacacgauugaucuuacagacuccgaaauggauaagcuguucgagcggaccagaaaacagcuccgcgaaaacgcggaggacaugggaaacggcugcuuuaagaucuaccauaagugugacaaugccugcauugggagcauccggaacggcaccuacgaucacgacguguauagagaugaggcucugaauaaccgcuuccagauuaaaggaguugaacuuaagucuggcuacaaagacuggauccuguggaucuccuuugccauuagcugcuuccuccugugugugguccugcucggguuuaucaugugggccugccaaaagggaaauauucgguguaacaucugcauuuga

SEQ ID NO: 193290 - RNA, 1701 nt, Artificial Sequence
  derived and/or modified CDS sequence (opt5) from hemagglutinin__InfluenzaA__ABI21376
augaagaccaucauugcccugagcuacauccucugccugguguucgcucagaaacuucccggcaacgacaauuccacagccacgcugugucucgggcaccaugcggucccuaacggaacccugguuaagacaauuaccaaugaucaaaucgaggugacaaacgcuaccgaacuugugcagucuagcuccacaggcagaauuugcgacucuccgcaccggauccuggaugggaaaaauuguacccucaucgacgcccugcugggagauccccauugcgacggcuuucagaacaaggagugggaucucuucgucgaacgcagcaaagccuauuccaauuguuacccuuaugacgugcccgauuacgcuucucugagaagccuuguugccuccagcgggacgcuggaguuuauuaacgaagacuucaauuggaccggaguggcucaggauggcaagucuuauuccugcaagcggggcagcgucaacucuuucuucucccgccucaauuggcugcacaaacuugaguacaaguauccugcccugaacgugacaaugcccaauaacgacaaauuugauaagcucuacaucuggggaguucaucacccuagcaccgacucugaccaaacaucccuguacgugagagcgagcgggcgggucaccguguccacgaaacgcucucagcagacagugauuccgaauaucggcagcagacccuggguccgggggcuguccagccgcauuucuaucuauuggaccauuguuaagccuggagauauccuccugaucaacuccacaggcaaccuuauugcccccagaggguacuucaagauccggaauggaaaaagcucuauuaugcgcagcgacgcuccuaucggcaacuguuccucugagugcauuacccccaauggcagcaucccgaacgauaagccuuuucagaaugugaacagaaucaccuauggggccuguccccgguacgugaaacaaaauacacugaagcucgcuacgggaaugcgcaacgucccugaaaaacagaccagaggcauuuucggggccaucgcgggauuuauugagaauggcugggaagggaugguggacggaugguauggcuuccggcaccagaacuccgagggcacagggcaggccgcugaucuuaagagcacccaagccgcuaucgaccagauuaauggaaaacugaacagacugaucgagaagacaaaugaaaaguuucaucagaucgagaaagaauuuucugagguugaaggccgcauucaagaucucgagaaguacguggaggacaccaaaaucgaucugugguccuauaacgccgaacugcucgucgcccuggagaaucagcacacgauugaccuuacagauagcgaaaugaacaagcuguucgagcggaccagaaaacagcuccgcgaaaacgcugaggacauggggaauggaugcuuuaagaucuaccauaagugugacaacgcgugcauuggcucuauccggaaugggaccuacgaucacgacguguauagagaugaggcccugaacaaucgcuuccagauuaaaggcguugaacuuaaguccggauacaaagacuggauccuguggaucagcuuugcuauuuccugcuuccuccugugugugguccugcucggcuuuaucaugugggccugccaaaaggggaacauucgguguaauaucugcauuuga

SEQ ID NO: 193291 - RNA, 1701 nt, Artificial Sequence; identical to SEQ ID NO: 193125
  derived and/or modified CDS sequence (opt5) from hemagglutinin__InfluenzaA__ABI21387

SEQ ID NO: 193292 - RNA, 1701 nt, Artificial Sequence
  derived and/or modified CDS sequence (opt5) from hemagglutinin__InfluenzaA__ABI21398
augaagaccaucauugcccugagcuacauccucugccugguguucgcucagaaacuucccggcaacgacaauuccacagccacgcugugucucgggcaccaugcggucccuaacggaacccugguuaagacaauuaccaaugaucaaaucgaggugacaaacgcuaccgaacuugugcagucuagcuccacaggcagaauuugcgacucuccgcaccggauccuggaugggaaaaauuguacccucaucgacgcccugcugggagauccccauugcgacggcuuucagaacaaggagugggaucucuucgucgaacgcagcaaagccuauuccaauuguuacccuuaugacgugcccgauuacgcuucucugagaagccuuguugccuccagcgggacgcuggaguuugugaacgaagacuucaauuggaccggagucgcucaggauggcaagucuuaugccugcaagcggggcuccgugaacagcuuuuucucucgccucaauuggcugcacaaacuugaguacaaguauccugcgcugaacguuacaaugcccaauaacgggaaauuugacaagcucuacauuuggggagugcaucacccuuccaccgauagcgaccaaacaucucuguacgucagagccuccggccgggugaccgugagcacgaaacgcucccagcagacagucaucccgaauauugggucuagacccuggguucggggacugagcucccgcaucagcauuuauuggaccaucgugaagccuggcgacauucuccugaucaacucuacagggaaccuuaucgcucccagaggauacuucaagauucggaauggcaaauccagcaucaugcgcucugaugccccuauuggcaacuguagcuccgagugcaucacccccaaugggucuauuccgaacgacaagccuuuucagaaugugaacagaaucaccuauggagcuuguccccgguacgucaaacaaaauacacugaagcucgccacgggcaugcgcaacgugccugaaaaacagaccagagggaucuucggagcgauugccggcuuuaucgagaaugggugggaaggaaugguugauggcugguauggcuuccggcaccagaacagcgaggggacaggacaggcugccgaccugaaguccacccaagcugccauugaucagaucaauggcaaacuuaacagacugauugagaagacaaaugaaaaguuucaucagaucgagaaagaguucagcgaaguggaagggcgcauccaagaccucgagaaguacgucgaggauaccaaaauugaccuguggucuuauaacgccgaacugcucguggcucuggagaaucagcacacgaucgaucuuacagacuccgaaaugaacaagcuguucgagcggaccagaaaacagcuccgcgaaaacgcggaggauaugggaaauggcugcuuuaagauuuaccauaagugugacaacgccugcaucgggagcauucggaauggcaccuacgaccacgauguuuauagagacgaggcucugaacaaucgcuuccagaucaaaggaguggaacuuaagucuggcuacaaagauuggauucuguggaucuccuuugccaucagcugcuuccuccugugugucgugcugcucggguuuauuaugugggccugccaaaagggaaacauccgguguaauauuugcaucuga

SEQ ID NO: 193293 - RNA, 1701 nt, Artificial Sequence; identical to SEQ ID NO: 193125
  derived and/or modified CDS sequence (opt5) from hemagglutinin__InfluenzaA__ABI21409

SEQ ID NO: 193294 - RNA, 1701 nt, Artificial Sequence
  derived and/or modified CDS sequence (opt5) from hemagglutinin__InfluenzaA__ABI21420
augaagaccaucauugcccugagcuacauccucugccugguguucacacagaaacuucccggcaacgacaauuccacggcuacccugugucucgggcaccaugccgucccuaacggaacacugguuaagaccauuacaaaugaucaaaucgaggugaccaacgcgacagaacuugugcagucuagcuccaccggcagaauuugcgacucuccgcaccggauccuggaugggaaaaauuguacgcucaucgacgcucugcugggagauccccauugcgacggcuuucagaacaaggagugggaucucuucgucgaacgcagcaaagccuauuccaauuguuacccuuaugacgugcccgauuacgccucucugagaagccuuguugcuuccagcgggacccuggaguuuauuaacgaagacuucaauuggacaggaguggcccaggauggcggcucuuauuccugcaagcgggggagcgucaacucuuucuucucccgccucaauuggcugcacaaacuugaguacaaguauccugcucugaacgugaccaugcccaauaacggaaaguuugacaaacucuacaucuggggcguucaucacccuagcacagauucugaccaaaccucccuguacgugagagccagcgggcgggucacgguguccacaaagcgcucucagcagaccgugauuccgaauaucggaagcagacccuggguccggggccuguccagccgcauuucuaucuauuggacaauuguuaaaccuggggacauccuccugaucaacuccaccggaaaccuuauugcgcccagaggcuacuucaagauccggaauggcaagagcucuauuaugcgcagcgaugccccuaucgggaacuguuccucugagugcauuacccccaauggaagcaucccgaacgacaaaccuuuucagaaugugaacagaaucacauauggcgcuuguccccgguacgugaagcaaaauacgcugaaacucgccaccgggaugcgcaacgucccugaaaagcagacaagaggaauuuucggcgcuaucgccggguuuauugagaauggaugggaaggcaugguggauggcugguauggguuccggcaccagaacuccgagggaaccggccaggcggccgaccugaaaagcacacaagcugccaucgaucagauuaaugggaaacuuaacagacugaucgagaagaccaaugaaaaguuucaucagaucgagaaggaauuuucugagguugaaggacgcauucaagaccucgagaaauacguggaggauacgaagaucgaccugugguccuauaacgcugaacugcucgucgcccuggagaaucagcacacaauugaucuuaccgacagcgaaaugaacaaacuguucgagcggaccagaaagcagcuccgcgaaaacgccgaggauaugggcaaugggugcuuuaaaaucuaccauaagugugacaacgcuugcauuggcucuauccggaauggaacauacgaccacgauguguauagagacgaggcgcugaacaaucgcuuccagauuaaguccguugaacuuaaaagcggcuacaaggauuggauccuguggaucuccuuugccauuucuugcuuccuccugugugugguccugcucggguuuaucaugugggcuugccaaaaaggaaacauucgguguaauaucugcauuuga

SEQ ID NO: 193295 - RNA, 1701 nt, Artificial Sequence; identical to SEQ ID NO: 193125
  derived and/or modified CDS sequence (opt5) from hemagglutinin__InfluenzaA__ABI21431

SEQ ID NO: 193296 - RNA, 1701 nt, Artificial Sequence; identical to SEQ ID NO: 193125
  derived and/or modified CDS sequence (opt5) from hemagglutinin__InfluenzaA__ABI21442

SEQ ID NO: 193297 - RNA, 1701 nt, Artificial Sequence; identical to SEQ ID NO: 193125
  derived and/or modified CDS sequence (opt5) from hemagglutinin__InfluenzaA__ABI21453

SEQ ID NO: 193298 - RNA, 1701 nt, Artificial Sequence; identical to SEQ ID NO: 193125
  derived and/or modified CDS sequence (opt5) from hemagglutinin__InfluenzaA__ABI21464

SEQ ID NO: 193299 - RNA, 1701 nt, Artificial Sequence; identical to SEQ ID NO: 193125
  derived and/or modified CDS sequence (opt5) from hemagglutinin__InfluenzaA__ABI21475

SEQ ID NO: 193300 - RNA, 1701 nt, Artificial Sequence
  derived and/or modified CDS sequence (opt5) from hemagglutinin__InfluenzaA__ABI21486
augaagaccaucauugcccugagcuacauccucugccugguguucgcucagaaacuucccggcaacgacaauuccacagccacgcugugucucgggcaccaugcggucccuaacggaacccugguuaagacaauuaccaaugaucaaaucgaggugacaaacgcuaccgaacuugugcagucuagcuccacaggcagaauuugcgacucuccgcaccggauccuggaugggaaaaauuguacccucaucgacgcccugcugggagauccccauugcgacggcuuucagaacaaggagugggaucucuucgucgaacgcagcaaagccuauuccaauuguuacccuuaugacgugcccgauuacgcuucucugagaagccuuguugccuccagcgggacgcuggaguuuauuaacgaagacuucaauuggaccggaguggcucaggauggcaagucuuaugccugcaagcggggcuccgucaacagcuuuuucucucgccucaauuggcugcacaaacuugaguacaaguauccugcgcugaacgugacaaugcccaauaacgggaaauuugacaagcucuacaucuggggaguucaucacccuuccaccgauagcgaccaaacaucucuguacgugagagccuccggccgggucaccgugagcacgaaacgcucccagcagacagugauuccgaauaucgggucuagacccuggguccggggacugagcucccgcauuagcaucuauuggaccauuguuaagccuggcgacauccuccugaucaacucuacagggaaccuuauugcucccagaggauacuucaagauccggaauggcaaauccagcauuaugcgcucugaugccccuaucggcaacuguagcuccgagugcauuacccccaaugggucuaucccgaacgacaagccuuuucagaaugugaacagaaucaccuauggagcuuguccccgguacgugaaacaaaauacacugaagcucgccacgggcaugcgcaacgucccugaaaaacagaccagagggauuuucggagcgaucgccggcuuuauugagaaugggugggaaggaaugguggauggcugguauggcuuccggcaccagaacagcgaggggacaggacaggcugccgaccugaaguccacccaagaggcuaucgaucagauuaauggcaaacuuaacagacugaucgaaaagacaaaugagaaguuucaucagaucgaaaaagaguucagcgaaguugaggggcgcauucaagaccucgagaaguacguggaagauaccaaaaucgaccuguggucuuauaacgccgagcugcucgucgcccuggaaaaucagcacacgauugaucuuacagacuccgagaugaacaagcuguucgaacggaccagaaaacagcuccgcgagaacgcugaggauaugggaaauggcugcuuuaagaucuaccauaagugugacaacgcgugcauugggagcauccggaauggcaccuacgaccacgauguguauagagacgaagcccugaacaaucgcuuccagauuaaaggaguugagcuuaagucuggcuacaaagauuggauccuguggaucuccuuugcuauuagcugcuuccuccugugugugguccugcucggguuuaucaugugggccugccaaaagggaaacauucgguguaauaucugcauuuga

SEQ ID NO: 193301 - RNA, 1701 nt, Artificial Sequence; identical to SEQ ID NO: 193125
  derived and/or modified CDS sequence (opt5) from hemagglutinin__InfluenzaA__ABI21497

SEQ ID NO: 193302 - RNA, 1698 nt, Artificial Sequence
  derived and/or modified CDS sequence (opt5) from hemagglutinin__InfluenzaA__ABI21530
augaaggccaaacugcucgugcugcuuugcaccuucacagcuacguacgccgacaccaucuguauuggcuaucacgcgaacaauagcacagauaccgucgacacaguucuggagaagaacgugaccgugacacauuccgucaaucuccuggaagauucucacaacgggaaacuuugccugcucaagggaaucgcuccccugcagcugggcaauuguagcguggccggguggauucucggaaacccugagugcgaaucccugaucucuaaagagagcugguccuacauuguugaaaccccgaaucccgagaacggcacguguuauccuggguacuuugccgacuaugaggaacuuagagagcaacugucuagcguguccagcuucgaacgguuugagaucuuccccaaggagucuuccuggccuaaucauaccgucacaggagugagcgcuucuugcucccacaacggcaagagcucuuuuuaccgcaaucuccuguggcuuaccgagaaaaacggccuguaucccaaucucuccaagagcuacguuaacaauaaagaaaaggaagugcugguccuguggggagugcaucacccuuccaacaucggggugcagagagccauuuaccggacagagaacgcuuaugucucuguugugagcucccacuacagccgcagauucaccccggaaaucgccaaacggcccaaggugcgcgaucaggagggcagaauuaauuauuacuggacgcuccuggagccuggggacacaaucauuuuugaagcgaacggaaaucuuaucgcccccugguaugcuuucgcccugucucggggcuuugaguccgggauuaucaccagcaacgcuccuaugaaugaaugugaugccaagugccagacaccccaaggagcgaucaacucuagccucccguuccagaauguccauccugugaccauuggcgagugucccaaauacguucgcuccgccaagcugagaauggugaccggccuucggaacaucccuucuauucagagccgcgggcuguuuggagcuaucgccggcuucauugaagggggauggacaggcaugaucgacgggugguauggauaccaccaucagaaugagcaaggcuccggcuacgcugccgaucagaaaagcacgcagaacgccaucaaugggauuaccaacaaggucaauucugugaucgagaaaaugaacacacaguuuaccgcuguuggaaaggaguucaauaaacucgaaagacggauggaaaaccugaacaagaagguggacgauggcuuccuggacauuuggacauauaaugcggagcuccugguccuucuggaaaacgagcgcacccucgauuuucacgacuccaaugugaaaaaccuguacgagaaggucaaaagccaacuuaagaauaacgccaaagaaaucgggaauggaugcuucgaguuuuaucacaaguguaacaaugaaugcauggagucugugaagaacggcacguacgacuaucccaaauacuccgaggaaagcaagcugaauagagagaaaauugaugggguuaagcucgaauccaugggcguguaucagauccuggcuaucuacucuacagucgccagcucccuggugcuccugguuucucuuggagccauuagcuucuggaugugcuccaacggcagccugcagugucggaucugcauuuga

SEQ ID NO: 193303 - RNA, 1698 nt, Artificial Sequence
  derived and/or modified CDS sequence (opt5) from hemagglutinin__InfluenzaA__ABI21552
augaaggccaaacugcucgugcugcuuugcaccuucacagcuacguacgccgacaccaucuguauuggcuaucacgcgaacaauagcacagauaccgucgacacaguucuggagaagaacgugaccgugacacauuccgucaaucuccuggaagauucucacaacgggaaacuuugccugcucaagggaaucgcuccccugcagcugggcaauuguagcguggccggguggauucucggaaacccugagugcgaaucccugaucucuaaagagagcugguccuacauuguugaaaccccgaaucccgagaacggcacguguuauccuggguacuuugccgacuaugaggaacuuagagagcaacugucuagcguguccagcuucgaacgguuugagaucuuccccaaggagucuuccuggccuaaucauaccgucacaggagugagcgcuucuugcucccacaacggcaagagcucuuuuuaccgcaaucuccuguggcuuaccgagaaaaacggccuguaucccaaucucuccaagagcuacguuaacaauaaagaaaaggaagugcugguccuguggggagugcaucacccuuccaacaucggggugcagagagccauuuaccacacagagaacgcuuaugucucuguugugagcucccauuacagccggcgcuucaccccggaaaucgccaaaagacccaaggugcgggaucaggagggccgcauuaauuauuacuggacgcuccuggagccuggggacacaaucauuuuugaagcgaacggaaaucuuaucgcccccugguaugcuuucgcccugucuagaggcuuugaguccgggauuaucaccagcaacgcuccuauggaugaaugugacgccaagugccagacaccccaaggagcgaucaauucuagccucccguuccagaacguccacccugugaccauuggcgagugucccaaauacguucgguccgccaagcugcgcauggugaccggccuuagaaauaucccuucuauucagagccgggggcuguuuggagcuaucgccggcuucauugaagggggauggacaggcaugaucgaugggugguauggauaccaucaccagaacgagcaaggcuccggcuacgcugccgaccagaaaagcacgcagaaugccaucaacgggauuaccaauaaggucaacucugugaucgagaaaaugaauacacaguuuaccgcuguuggaaaggaguucaacaaacucgaacgcagaauggaaaaucugaacaagaagguggaugacggcuuccuggauauuuggacauauaacgcggagcuccugguccuucuggaaaaugagcggacccucgacuuucacgacuccaacgugaaaaaucuguacgagaaggucaaaagccaacuuaagaacaaugccaaagaaaucgggaacggaugcuucgaguuuuaucauaaguguaauaacgaaugcauggagucugugaagaauggcacguacgauuaucccaaauacuccgaggaaagcaagcugaaccgcgagaaaauugacgggguuaagcucgaauccaugggcguguaucagauccuggcuaucuacucuacagucgccagcucccuggugcuccugguuucucuuggagccauuagcuucuggaugugcuccaauggcagccugcaguguagaaucugcauuuga

SEQ ID NO: 193304 - RNA, 1698 nt, Artificial Sequence
  derived and/or modified CDS sequence (opt5) from hemagglutinin__InfluenzaA__ABI21563
augaaggccaaacugcucgugcugcuuugcaccuucacagcuacguacgccgacaccaucuguauuggcuaucacgcgaacaauagcacagauaccgucgacacaguucuggagaagaacgugaccgugacacauuccgucaaucuccuggaagauucucacaacgggaaacuuugccugcucaagggaaucgcuccccugcagcugggcaauuguagcguggccggguggauucucggaaacccugagugcgaaucccugaucucuaaagagagcugguccuacauuguugaaaccccgaaucccgagaacggcacguguuauccuggguacuuugccgacuaugaggaacuuagagagcaacugucuagcguguccagcuucgaacgguuugagaucuuccccaaggagucuuccuggccuaaucauaccgucacaggagugagcgcuucuugcucccacaacggcaagagcucuuuuuaccgcaaucuccuguggcuuaccgagaaaaacggccuguaucccaaucucuccaagagcuacguuaacaauaaagaaaaggaagugcugguccuguggggagugcaucacccuuccaacaucggggugcagagagccauuuaccacacagagaacgcuuaugucucuguugugagcucccauuacagccggcgcuucaccccggaaaucgccaaaagacccaaggugcggggccaggaggggcgcauuaauuauuacuggacgcuccuggagccuggagauacaaucauuuuugaagcgaacggcaaucuuaucgcccccugguaugcuuucgcccugucuagaggguuugaguccggaauuaucaccagcaacgcuccuaugaaugaaugugacgccaagugccagacaccccaaggcgcgaucaacucuagccucccguuccagaauguccacccugugaccauuggcgagugucccaaauacguucgguccgccaagcugcgcauggugaccgggcuuagaaacaucccuucuauucagagccggggacuguuuggcgcuaucgccggguucauugaaggaggcuggacagggaugaucgauggaugguauggcuaccaucaccagaaugagcaaggcuccggguacgcugccgaccagaaaagcacgcagaacgccaucaauggaauuaccaacaaggucaauucugugaucgagaaaaugaacacacaguuuaccgcuguuggcaaggaguucaauaaacucgaacgcagaauggaaaaccugaacaagaagguggaugacggguuccuggauauuuggacauauaaugcggagcuccugguccuucuggaaaacgagcggacccucgacuuucacgauuccaaugugaaaaaccuguacgagaaggucaaaagccaacuuaagaauaacgccaaagaaaucggaaauggcugcuucgaguuuuaucauaaguguaacaaugaaugcauggagucugugaagaacgggacguacgacuaucccaaauacuccgaggaaagcaagcugaaucgcgagaaaauugacggcguuaagcucgaauccaugggaguguaucagauccuggcuaucuacucuacagucgccagcucccuggugcuccugguuucucuuggcgccauuagcuucuggaugugcuccaacgggagccugcaguguagaaucugcauuuga

SEQ ID NO: 193305 - RNA, 1698 nt, Artificial Sequence; identical to SEQ ID NO: 193304
  derived and/or modified CDS sequence (opt5) from hemagglutinin__InfluenzaA__ABI21574

SEQ ID NO: 193306 - RNA, 1701 nt, Artificial Sequence
  derived and/or modified CDS sequence (opt5) from hemagglutinin__InfluenzaA__ABI21736
augaagaccaucauugcccugagcuacauccucugccugguguucgcucagaaacuucccggcaacgacaauuccacagccacgcugugucucgggcaccaugcggucccuaacggaacccugguuaagacaauuaccaaugaucaaaucgaggugacaaacgcuaccgaacuugugcagucuagcuccacaggcgggauuugcgacucuccgcaccagauccuggauggagagaauuguacccucaucgacgcccugcugggcgauccccauugcgacggguuucagaacaaagaaugggaucucuucgucgagagaagcaaggccuauuccaauuguuacccuuaugacgugcccgauuacgcuucucugcggagccuuguugccuccagcggaacgcuggaauuuaacaaugagucuuucaacuggaccggcguggcucaaaauggcacauccagcgccugcaaacgcagaucuaacaaguccuuuuucagccggcucaauuggcugcaccagcuuaaguauaaauacccugcgcugaacgucaccaugcccaauaacgagaaguuugacaaacucuauauuuggggagugcaucacccuucuacagauuccgaccagaucagccuguacgcccaggcuccggggcgcguuaccguguccacgaagagaucucaacagacagucauucccaacaucggcagccggccuugggugcgcgggguguccagcagaauuucuaucuacuggaccauugucaaacccggagauauccugcucaucaauuguacaggcaaccugauugccccucggggguauuucaagauccgcuccggaaagagcucuauuaugagaagcgacgcuuccaucggcaaaugcaauucugaauguauuacccccaacggcagcaucccgaaugacaagccuuuucagaacguuaaucggaucaccuacggggccugcccccgcuaugugaaacagaacacacuuaagcuggcgacgggaaugagaaaugugccugagaaacaaacccggggcauuuucggggccaucgcuggauuuauugaaaacggcugggaggggauggucgauggaugguacggcuuccgccaccaaaauuccgagggcacagggcaggccgcugaccucaagagcacccaggccgccaucaaccagauuaauggaaaacugaacagacuuaucgaaaagacaaaugagaaguuucaucagaucgaaaaagaguucucugaaguggagggccggauucaggaucuggagaaguauguugaagacaccaaaaucgaucucugguccuacaacgcugagcugcugguggcgcucgaaaaccaacacacgauugaccugacagauagcgagaugaauaaacuuuucgaaagaaccaagaagcagcugcgcgagaacgccgaggacgucgggaauggauguuuuaagaucuaucauaaaugcgauaacgcuugcauuggcucuauccggaaugggaccuacgaccacgauguguacagagacgaagcccucaacaaucgcuuccagauuaagggcguugagcugaaauccggauauaaggacuggauccuuuggaucagcuuugccauuuccuguuuccugcucugcgugguccugcugggcuuuaucaugugggcuugucagaaagggaacauucggugcaauaucuguauuuga

SEQ ID NO: 193307 - RNA, 1701 nt, Artificial Sequence
  derived and/or modified CDS sequence (opt5) from hemagglutinin__InfluenzaA__ABI22159
augaagaccaucauugcccugagcuacauccucugccugguguucgcucagaaacuucccggcaacgacaauuccacagccacgcugugucucgggcaccaugcggucccuaacggaaccauuguuaagacaaucaccaaugaucaaauugaggugacaaacgcuaccgaacuggugcagucuagcuccacaggcgagaucugcgacucuccgcaccagauccuugauggggaaaauuguacccugauugacgcccuccugggagauccccagugcgacggcuuucaaaacaaaaagugggaucuguucgucgagagaagcaaugccuauuccaacuguuacccuuaugacgugcccgauuacgcuucucuccggagccugguugccuccagcgggacgcuugaauuuaauaacgagucuuucaauuggaccggagugacacagaacggcaccuccagcgcuugcaaacgcagaucuaauaacuccuuuuucagccggcugaauuggcucacacaucugaaguuuaaguauccugcccuuaacgucaccaugcccaacaaugagaaauucgacaagcuguacaucuggggcgugcaccauccugggacggauaacgaccagauuuuucucuaugcgcaggccucuggacgcaucacaguuuccaccaaaagaagccaacagacagugauuccgaauaucggcucccggccccgcgucagaaacauuccuucucggaucagcaucuacuggaccauugugaagcccggggauauccugcugauuaauuccaccggaaaccucaucgcuccucgcggcuacuucaaaauuagaagcgggaagucuuccaucaugcggagcgacgcccccaucggaaaguguaauucugaaugcauuacaccgaacggcagcaucccuaaugacaaacccuuucagaacgugaaucgcauuacguauggcgcuuguccuagauacgucaagcagaacacccugaaacuugccacagggaugcggaauguucccgagaagcaaacccgcggaaucuucggcgcgauugccggguuuaucgaaaacggaugggagggcaugguggaugggugguauggauucagacaccaaaauuccgagggcaucggccaggcugccgaccugaaaucuacacaggcugccauuaaccagaucaacgggaagcucaaucggcugauuggaaaaaccaacgaaaaguuccaccagaucgagaaggaauuuagcgagguggaaggccgcauucaggaucuugagaaauacgucgaggacacgaagaucgaucugugguccuauaaugccgaacuccugguggcucuggagaaccaacauacaauugaccucaccgauagcgaaaugaauaaacuguucgagagaaccaagaaacagcuucgggaaaacgcggaggacauggggaauggaugcuuuaagaucuaccacaagugugauaacgccugcaucggcucuauuagaaaugggacauaugaccaugauguuuaccgcgacgaggcucugaacaaucgguuccagaucaaaggcguggaacucaaguccggauacaaagacuggauucuguggaucagcuuugccauuucuugcuuccuucugugugucgcccuccugggcuuuaucaugugggcuugccagaaggggaacaucagauguaauauuugcaucuga

SEQ ID NO: 193308 - RNA, 1707 nt, Artificial Sequence
  derived and/or modified CDS sequence (opt5) from hemagglutinin__InfluenzaA__ABI23979
auggagaagaucgugcugcuccuggccauuaucagccuugucaaauccgaccagauuugcaucggcuaccacgcuaacaauucuaccgaacaaguugauacaauuauggagaagaacgugacggugacccaugcccaggacauccuggaaaagacacacaaugggaaacucugugaucuggacggagucaaaccccuuauccugagagauugcagcguggcgggcuggcuccuggggaacccuaugugugacgaguuccugaauguuccggaaugguccuauauuguggagaagaucaaccccgcuaaugaucucugcuacccuggaaacuuuaaugacuaugaggaacugaagcaucuucugucucggauuaaccacuucgagaaaauccagauuauccccaagagcuccuggucugaucaugaagccagcuccggcgucagcucugccuguccuuaccaggggcgcuccagcuuuuucagaaaugugguuuggcucauuaaaaaggacaacgcuuaucccaccaucaaacggucuuacaauaacacaaaucaagaggaucugcuugugcuguggggaauccaccacccuaacgacgccgcugagcagacccgccucuaucagaacccgacaaccuacauuuccgucggcacgagcacccugaaucagagacuggugcccaagaucgccacacggucuaaggugaacggccaauccgggcgcauggaauuuuucuggaccauucucaaaccuaaugaugcgaucaacuuugagagcaauggaaacuucauugcccccgaaaaugcuuacaagaucgucaaaaagggcgacuccacaaucaugaaaucugagcuggaauaugggaacugcaauaccaagugucagacgccuauuggagccaucaacagcuccaugcccuuucauaauauucacccgcuuacaaucggcgagugcccuaaauacguuaagagcaacagacuggugcucgcuaccgggcugcgcaauucuccccagggagagcggagacggaagaaacgcggccuuuucggcgccauugcgggguuuaucgaaggaggcuggcaggggaugguggacggaugguauggcuaccaucacuccaacgagcaagggagcggauaugccgcugauaaggaaucuacacagaaagccaucgacggcgucaccaauaaggugaacagcauuaucgauaaaaugaacacccaguucgaggcuguuggcagagaauuuaauaaccuggagcggcgcauugagaaucucaacaagaagauggaagacggguuccuggauguguggacauacaaugccgagcugcucguccugauggaaaacgagagaacgcuugacuuccacgauuccaaugugaaaaaccuguaugacaagguucggcuccaacugagagauaaugccaaagaacuuggaaacggcuguuuugaguucuaccaucgcugcgacaaugaguguauggaaucugugcggaacgggaccuacgauuauccucaguacagcgaggaauccagacugaagcgcgaggagaucagcggagucaaacucgaaucuauuggcacauaucagauccuguccauuuacagcaccguggcuucuucccuggcgcucgccaucauggucgcugggcugagccuuuggaugugcuccaauggcucucugcagugccggaucuguauuuga

SEQ ID NO: 193309 - RNA, 1701 nt, Artificial Sequence; identical to SEQ ID NO: 192354
  derived and/or modified CDS sequence (opt5) from hemagglutinin__InfluenzaA__ABI26646

SEQ ID NO: 193310 - RNA, 1701 nt, Artificial Sequence; identical to SEQ ID NO: 192983
  derived and/or modified CDS sequence (opt5) from hemagglutinin__InfluenzaA__ABI30367

SEQ ID NO: 193311 - RNA, 1701 nt, Artificial Sequence; identical to SEQ ID NO: 192993
  derived and/or modified CDS sequence (opt5) from hemagglutinin__InfluenzaA__ABI30378

SEQ ID NO: 193312 - RNA, 1701 nt, Artificial Sequence; identical to SEQ ID NO: 192722
  derived and/or modified CDS sequence (opt5) from hemagglutinin__InfluenzaA__ABI30400

SEQ ID NO: 193313 - RNA, 1701 nt, Artificial Sequence
  derived and/or modified CDS sequence (opt5) from hemagglutinin__InfluenzaA__ABI30411
augaagaccaucauugcccugagcuacauccucugccugguguucgcucagaaacuucccggcaacgacaauuccacagccacgcugugucucgggcaccaugcggucccuaacggaacccugguuaagacaauuaccaaugaucaaaucgaggugacaaacgcuaccgaacuugugcagucuagcuccacaggcgggauuugcgacucuccgcaccagauccuggauggagagaauuguacccucaucgacgcccugcugggcgauccccauugcgacggguuucagaacaaagaaugggaucucuucgucgagagaagcaaggccuauuccaauuguuacccuuaugacgugcccgauuacgcuucucugcggagccuuguugccuccagcggaacgcuggaauuuaacaaugagucuuucaacuggaccggcguggcucaaaauggcacauccagcgccugcaaacgcagaucuaacaaguccuuuuucagccggcucaauuggcugcaccagcuuaaguauaaauacccugcgcugaacgucaccaugcccaauaacgagaaguuugacaaacucuauauuuggggagugcaucacccuucuacagauuccgaccagaucagccuguacgcccaggcuccggggcgcguuaccguguccacgaagagaucucaacagacagucauucccaacaucggcagccggccuugggugcgcgggguguccagcagaauuucuaucuacuggaccauugucaaacccggagauauccugcucaucaauuguacaggcaaccugauugccccucggggguauuucaagauccgcuccggaaagagcucuauuaugagaagcgacgcuuccaucggcaaaugcaauucugaauguauuacccccaacggcagcaucccgaaugacaagccuuuucagaacguuaaucggaucaccuacggggccugcccccgcuaugugaaacagaacacacuuaagcuggcgacgggaaugagaaaugugccugagaaacaaacccggggcauuuucggggccaucgcuggauuuauugaaaacggcugggaggggauggucgauggaugguacggcuuccgccaccaaaauuccgagggcacagggcaggccgcugaccucaagagcacccaggccgccaucaaccagauuaauggaaaacugaacagacuuaucgaaaagacaaaugagaaguuucaucagaucgaaaaagaguucucugaaguggagggccggauucaggaucuggagaaguauguugaagacaccaaaaucgaucucugguccuacaacgcugagcugcugguggcgcucgaaaaccaacacacgauugaccugacagauagcgagauggacaaacuuuucgaaagaaccaagaagcagcugcgcgagaaugccgaggauauggggaacggauguuuuaagaucuaucauaaaugcgacaaugcuugcauuggcucuauccggaacgggaccuacgaucacgacgucuacagagacgaagcccucaauaaccgcuuccagauuaagggcguggagcugaaauccggauauaaggauuggauccuuuggaucagcuuugccauuuccuguuuccugcucugcguugugcugcugggcuuuaucaugugggcuugucagaaagggaauauucggugcaacaucuguauuuga

SEQ ID NO: 193314 - RNA, 1701 nt, Artificial Sequence; identical to SEQ ID NO: 192663
  derived and/or modified CDS sequence (opt5) from hemagglutinin__InfluenzaA__ABI30422

SEQ ID NO: 193315 - RNA, 1701 nt, Artificial Sequence; identical to SEQ ID NO: 192354
  derived and/or modified CDS sequence (opt5) from hemagglutinin__InfluenzaA__ABI30433

SEQ ID NO: 193316 - RNA, 1701 nt, Artificial Sequence; identical to SEQ ID NO: 192663
  derived and/or modified CDS sequence (opt5) from hemagglutinin__InfluenzaA__ABI30444

SEQ ID NO: 193317 - RNA, 1701 nt, Artificial Sequence; identical to SEQ ID NO: 192354
  derived and/or modified CDS sequence (opt5) from hemagglutinin__InfluenzaA__ABI30455

SEQ ID NO: 193318 - RNA, 1701 nt, Artificial Sequence; identical to SEQ ID NO: 192354
  derived and/or modified CDS sequence (opt5) from hemagglutinin__InfluenzaA__ABI30466

SEQ ID NO: 193319 - RNA, 1701 nt, Artificial Sequence; identical to SEQ ID NO: 192354
  derived and/or modified CDS sequence (opt5) from hemagglutinin__InfluenzaA__ABI30477

SEQ ID NO: 193320 - RNA, 1701 nt, Artificial Sequence; identical to SEQ ID NO: 192354
  derived and/or modified CDS sequence (opt5) from hemagglutinin__InfluenzaA__ABI30488

SEQ ID NO: 193321 - RNA, 1701 nt, Artificial Sequence; identical to SEQ ID NO: 192354
  derived and/or modified CDS sequence (opt5) from hemagglutinin__InfluenzaA__ABI30499

SEQ ID NO: 193322 - RNA, 1701 nt, Artificial Sequence; identical to SEQ ID NO: 192315
  derived and/or modified CDS sequence (opt5) from hemagglutinin__InfluenzaA__ABI30510

SEQ ID NO: 193323 - RNA, 1701 nt, Artificial Sequence
  derived and/or modified CDS sequence (opt5) from hemagglutinin__InfluenzaA__ABI30521
augaagaccaucauugcccugagcuacauccucugccugguguucgcucagaaacuucccggcaacgacaauuccacagccacgcugugucucgggcaccaugcggucccuaacggaaccauuguuaagacaaucaccaaugaucaaauugaggugacaaacgcuaccgaacuggugcagucuagcuccacaggcgggaucugcgacucuccgcaccagauccuugauggagagaauuguacccugauugacgcccuccugggcgauccccagugcgacggguuucaaaacaaaaagugggaucuguucgucgaaagaagcaaagccuauuccaauuguuacccuuaugacgugcccgauuacgcuucucuccggagccugguugccuccagcggaacgcuugaguuuaacaaugaaucuuucaacuggaccggcgugacacagaauggcaccuccagcgcuugcaagcgcagaucuaacaauuccuuuuucagccggcugaacuggcucacacaucugaaguuuaaauauccugcccuuaaugucaccaugcccaacaacgagaaguucgacaaacuguacaucuggggagugcaccauccugggacgaauaacgaucagauuucucucuaugcgcaggccuccggccgcaucacaguuagcaccaagagaucccaacagacagugauuccgaauaucgggucucggccccgcgucagagacauuccuagccggaucuccaucuacuggaccauugugaaacccggagauauccugcugauuaacagcaccggcaaucucaucgcuccucgcggguacuuuaagauuagaucuggaaaguccagcaucaugcggucugacgccagcaucggcaaauguaacuccgagugcauuacacccaauggcucuaucccgaacgacaagccuuuccagaaugugaaccgcauuacguauggggcuugucccagauacgucaaacagaauacccugaaacuugccacaggaaugcggaacguuccugaaaagcaaacccgcggcaucuuuggggcgauugccggauucaucgagaauggcugggaagggaugguggauggaugguauggcuuuagacaccagaacagcgagggcaucgggcaggcugccgaccugaaguccacacaagcugccauuaaucagaucaacggaaaacucaaccggcugauuggcaagaccaaugagaaguuccaccagaucgaaaaagaguucagcgaaguggaggggcgcauucaggaucuugaaaaguacgucgaggacacgaaaaucgaucuguggucuuauaacgccgagcuccugguggcucuggaaaaucaacauacaauugaccucaccgauuccgagaugaacaagcuguuugaaagaaccaaaaagcagcuucgggagaaugcggaagacaugggaaacggcugcuucaagaucuaccacaaaugugauaaugccugcaucgggagcauuagaaacggcacauaugaccaugauguuuaccgcgacgaggcucugaauaaccgguuucagaucaagggaguggagcucaaaucuggcuacaaggacuggauucuguggaucuccuucgccauuagcugcuuucuucugugugucgcccuccugggguucaucaugugggcuugccagaaaggaaauaucagauguaacauuugcaucuga

SEQ ID NO: 193324 - RNA, 1701 nt, Artificial Sequence; identical to SEQ ID NO: 192354
  derived and/or modified CDS sequence (opt5) from hemagglutinin__InfluenzaA__ABI30532

SEQ ID NO: 193325 - RNA, 1701 nt, Artificial Sequence; identical to SEQ ID NO: 193185
  derived and/or modified CDS sequence (opt5) from hemagglutinin__InfluenzaA__ABI30543

SEQ ID NO: 193326 - RNA, 1701 nt, Artificial Sequence; identical to SEQ ID NO: 192354
  derived and/or modified CDS sequence (opt5) from hemagglutinin__InfluenzaA__ABI30554

SEQ ID NO: 193327 - RNA, 1698 nt, Artificial Sequence; identical to SEQ ID NO: 193276
  derived and/or modified CDS sequence (opt5) from hemagglutinin__InfluenzaA__ABI30565

SEQ ID NO: 193328 - RNA, 1701 nt, Artificial Sequence; identical to SEQ ID NO: 192705
  derived and/or modified CDS sequence (opt5) from hemagglutinin__InfluenzaA__ABI30587

SEQ ID NO: 193329 - RNA, 1701 nt, Artificial Sequence
  derived and/or modified CDS sequence (opt5) from hemagglutinin__InfluenzaA__ABI30609
augaagaccaucauugcccugagcuacauccucugccugguguucgcucagaaacuucccggcaacgacaauuccacagccacgcugugucucgggcaccaugcggucccuaacggaaccauuguuaagacaaucaugaaugaucaaauugaggugaccaacgcuacagaacuggugcagucuagcuccaccggcgggaucugcgacucuccgcaccagauccuugauggagagaauuguacacugauugacgcccuccugggcgauccccagugcgacggguuucaaaacaaaaagugggaucuguucgucgaaagaagcaaagccuauuccaauuguuacccuuaugacgugcccgauuacgcuucucuccggagccugguugccuccagcggaacccuugaguuuaacaaugaaucuuucaacuggacgggcgugacccagaauggcacauccagcgcuugcaagcgcagaucuaacaauuccuuuuucagccggcugaacuggcucacccaucugaaguuuaaauauccugcccuuaaugucacaaugcccaacaacgagaaguucgacaaacuguacaucuggggagugcaccauccugggaccgauaaugaccagauuuuucucuaugcgcaggccucuggccgcaucacgguuuccacaaagagaagccaacagaccgugauuccgaacaucgggucccggccccgcgucagaaauauuccuucucggaucagcaucuacuggacaauugugaaacccggagauauccugcugauuaacuccaccggcaaucucaucgcuccucgcggguacuucaagauuagaagcggaaagucuuccaucaugcggagcgacgcccccaucggcaaauguaacucugagugcauuaccccgaauggcagcaucccuaacgacaagcccuuucagaaugugaaccgcauuacauauggggcuuguccuagauacgucaaacagaauacgcugaaacuugccaccggaaugcggaacguucccgaaaagcaaacacgcggcaucuucggggcgauugccggauuuaucgagaauggcugggaagggaugguggauggaugguauggcuucagacaccagaacuccgagggcaccgggcaggcugccgaccugaagucuacacaagcugccaucaaucagauuaacggaaaacucaaccggcugaucggcaagaccaaugagaaguuccaccagauugaaaaagaguuuagcgaaguggaggggagaauccaggaucuugaaaaguacgucgaggacacgaaaauugaucugugguccuauaacgccgagcuccugguggcucuggaaaaucaacauacaaucgaccucaccgauagcgagaugaacaagcuguucgaacgcaccaaaaagcagcuucgggagaaugcggaagacaugggaaacggcugcuuuaagauuuaccacaaaugugauaaugccugcaucgggucuaucagaaacggcacauaugaccaugauguuuaccgcgacgaggcucugaauaaccgguuccagauuaagggaguggagcucaaauccggcuacaaggacuggauccuguggauuagcuuugccaucucuugcuuccuucugugugucgcccuccugggguuuauuaugugggcuugccagaaaggaaauaucagauguaacaucugcauuuga

SEQ ID NO: 193330 - RNA, 1701 nt, Artificial Sequence
  derived and/or modified CDS sequence (opt5) from hemagglutinin__InfluenzaA__ABI30620
augaagaccaucauugcccugagcuacauccucugccugguguucgcucagaaacuucccggcaacgacaauuccacagccacgcugugucucgggcaccaugcggucccuaacggaaccauuguuaagacaaucaccaaugaucaaauugaggugacaaacgcuaccgaacuggugcagucuagcuccacaggcgggaucugcgacucuccgcaccagauccuugauggagagaauuguacccugauugacgcccuccugggcgauccccagugcgacggguuucaaaacaaaaagugggaucuguucaucgaaagaagcaaagccuauuccaauuguuacccuuaugacguccccgauuacgcuucucuccggagccugguggccuccagcggaacgcuugaguuuaacaaugaaucuuucaacuggaccggcguuacacagaauggcaccuccagcgcuugcaagcgcagaucuaacaauuccuuuuucagccggcugaacuggcucacacaucugaaguuuaaauauccugcccuuaaugugaccaugcccaacaacgagaaguucgacaaacuguacauuuggggaguccaccauccugggacggauaaugaccagaucucucucuaugcgcaggccuccggccgcauuacagugagcaccaagagaucccaacagacaguuaucccgaacauugggucucggccccgcgugagagauaucccuagccggaucuccauuuacuggaccaucgucaaacccggagacauucugcugaucaauagcaccggcaaccucauugcuccucgcggguacuuuaagaucagaucuggaaaguccagcaucaugcggucugacgcccccauuggcaaauguaauagcgagugcaucacaccgaacggcuccauuccuaaugauaagcccuuccagaacgugaaucgcaucacguauggggcuuguccuagauacgugaaacagaacacccugaagcuggccacaggaaugcggaauguccccgaaaaacaaacccgcggcauuuuuggggcgaucgccggauucaucgagaacggcugggaagggaugguugacggaugguauggcuuuagacaccaaaauucugagggcauugggcaggcugccgaucuuaagagcacacaggcugccaucaaccagauuaauggaaaacucaaccggcugaucggcaagaccaacgagaaguuccaccagauugaaaaagaguucuccgaaguggaggggagaauccaggaccuugaaaaguacguggaggauacgaaagucgaccuguggagcuauaaugccgagcuccugguggcucuggaaaaccaacauacaauugaucucaccgacucugagaugaauaagcuguuugaacgcaccaaaaagcagcuucgggagaacgcggaagauaugggaaauggcugcuucaagaucuaccacaaaugugacaacgccugcaucggguccauuagaaauggcacauaugaucaugacguuuaccgcgacgaggcucugaacaaucgguuucagaucaagggaguggagcucaaaagcggcuacaaggauuggauucuguggaucucuuucgccauuuccugcuuucuucugugugucgcccuccugggguucaucaugugggcuugccagaaaggaaacaucagauguaauauuugcaucuga

SEQ ID NO: 193331 - RNA, 1701 nt, Artificial Sequence; identical to SEQ ID NO: 192705
  derived and/or modified CDS sequence (opt5) from hemagglutinin__InfluenzaA__ABI30733

SEQ ID NO: 193332 - RNA, 1701 nt, Artificial Sequence; identical to SEQ ID NO: 192705
  derived and/or modified CDS sequence (opt5) from hemagglutinin__InfluenzaA__ABI30744

SEQ ID NO: 193333 - RNA, 1701 nt, Artificial Sequence; identical to SEQ ID NO: 192705
  derived and/or modified CDS sequence (opt5) from hemagglutinin__InfluenzaA__ABI30755

SEQ ID NO: 193334 - RNA, 1701 nt, Artificial Sequence; identical to SEQ ID NO: 192705
  derived and/or modified CDS sequence (opt5) from hemagglutinin__InfluenzaA__ABI30766

SEQ ID NO: 193335 - RNA, 1701 nt, Artificial Sequence; identical to SEQ ID NO: 192705
  derived and/or modified CDS sequence (opt5) from hemagglutinin__InfluenzaA__ABI30777

SEQ ID NO: 193336 - RNA, 1701 nt, Artificial Sequence
  derived and/or modified CDS sequence (opt5) from hemagglutinin__InfluenzaA__ABI30788
augaagaccaucauugcccugagcuacauccucugccugguguucgcucagaaacuuuccggcaacgacaauucuacagccacgcugugucucgggcaccaugcgguccccaacggaaccauuguuaagacaaucaccaaugaucaaauugaggugacaaacgcuaccgaacuggugcagagcuccucuacaggcgggaucugcgacagcccucaccagauccuugauggagagaauuguacccugauugacgcccuccugggcgauccgcagugcgacggguuucaaaacaaaaagugggaucuguucgucgaaagauccaaagccuauucuaauuguuaccccuaugacgugccugauuacgcuagccuccggucccugaucgccagcucuggaacgcuugaguuuaacaaugaauccuucaacuggaccggcguuacacagaauggcaccagcucugcuugcaagcgcagauccaacagcucuuucuucucccggcugaauuggcucacacaucugaaguuuaaauaucccgcccuuaacgugaccaugccuaauaacgaggaguucgacaagcuguacauuuggggaguccaccaucccgggacguauaacgaucagaucagccucuacgcgcaggccuccggccgcauuacagugucuaccaaaagaagccaacagacaguuaucccuaauauugggucccggccgcgcgugagagacauccccagccggaucucuauuuacuggaccaucgucaagccuggagauauucugcugaucaacuccaccggcaaucucauugcuccccgcggguauuuuaaaaucagaagcggaaagucuagcaucaugcgguccgacgccccuauuggcaaguguaacucugaaugcaucacacccaauggcagcauuccgaacgacaaaccuuuccagaaugugaaccgcaucacguacggggcuugucccagauaugugaagcagaauacccugaaacuugccacaggaaugcggaacgucccugagaagcaaacccgcggcauuuuuggggcgaucgccggauucaucgaaaauggcugggaggggaugguugauggaugguacggcuuuagacaccagaacuccgagggcauugggcaggcugccgaccugaaaagcacacaagcugccaucgaucagauuaauggaaagcucaaccggcugaucggcaaaaccaaugaaaaguuccaccagauugagaaggaauuuucugagguggaagggagaauccaggaccuugagaaauauguggaggauacgaagauugaccugugguccuacaacgccgaacuccuggucgcucuggagaaccaacauacaaucgaucucaccgacagcgaaaugaauaaacuguuugagcgcaccaagaaacagcuucgggaaaacgcggaggauaugggaaauggcugcuucaagaucuaucacaagugugacaacgccugcauugggucuaucagaaauggcacauacgaucaugacguguaccgcgacgaggcucugaacaaucgguuucagauuaaaggaguugaacucaaguccggcuauaaagauuggauccuguggauuagcuucgccaucuccugcuuucuucuguguguggcccuccugggguucaucaugugggcuugccagaagggaaacauuagauguaauaucugcauuuga

SEQ ID NO: 193337 - RNA, 1701 nt, Artificial Sequence; identical to SEQ ID NO: 192705
  derived and/or modified CDS sequence (opt5) from hemagglutinin__InfluenzaA__ABI30799

SEQ ID NO: 193338 - RNA, 1701 nt, Artificial Sequence
  derived and/or modified CDS sequence (opt5) from hemagglutinin__InfluenzaA__ABI30810
augaagaccaucauugcccugagcuacauccucugccugguguucgcucagaaacuucccggcaacgacaauuccacagccacgcugugucucgggcaccaugcggucccuaacggaaccauuguuaagacaaucaccaaugaucaaauugaggugacaaacgcuaccgaacuggugcagucuagcuccacaggcgggaucugcgacucuccgcaccagauccuugauggagagaauuguacccugauugacgcccuccugggcgauccccagugcgacggguuucaaaacaaaaagugggaucuguucgucgaaagaagcaaagccuauuccaauuguuacccuuaugacgugcccgauuacgcuucucuccggagccugaucgccuccagcggaacgcuugaguuuaacaaugaaucuuucaacuggaccggcguuacacagaauggcaccuccagcgcuugcaagcgcagaucuaacuccagcuuuuucucucggcugaauuggcucacacaucugaaguuuaaauauccugcccuuaacgugaccaugcccaauaacgaggaguucgacaagcuguacauuuggggaguccaccauccugggacguauaacgaucagaucucccucuacgcgcaggccagcggccgcauuacaguguccaccaaaagaucucaacagacaguuaucccgaauauugggagccggccccgcgugagagacaucccuucccggaucagcauuuacuggaccaucgucaagcccggagauauucugcugaucaacucuaccggcaaucucauugcuccucgcggguauuuuaaaaucagauccggaaagagcucuaucaugcggagcgacgcccccauuggcaaguguaacuccgaaugcaucacaccgaauggcucuauuccuaacgacaaacccuuccagaaugugaaccgcaucacguacggggcuuguccuagauaugugaagcagaauacccugaaacuugccacaggaaugcggaacguccccgagaagcaaacccgcggcauuuuuggggcgaucgccggauucaucgaaaauggcugggaggggaugguugauggaugguacggcuuuagacaccagaacagcgagggcauugggcaggcugccgaccugaaauccacacaagcugccaucgaucagauuaauggaaagcucaaccggcugaucggcaaaaccaaugaaaaguuccaccagauugagaaggaguucagcgaaguggaagggagaauccaggaccuugagaaauauguggaggauacgaagauugaccuguggucuuacaacgccgaacuccuggucgcucuggagaaccaacauacaaucgaucucaccgacuccgaaaugaauaaacuguuugagcgcaccaagaaacagcuucgggaaaacgcggaggauaugggaaauggcugcuucaagaucuaucacaagugugacaacgccugcauugggagcaucaaaaauggcacauacgaucaugacguguacagagacgaggcucugaacaaucgcuuucagauuaagggaguugaacucaaaucuggcuauaaggauuggauccuguggauuuccuucgccaucagcugcuuucuucuguguguggcccuccugggguucaucaugugggcuugccagaaaggaaacauucgguguaauaucugcauuuga

SEQ ID NO: 193339 - RNA, 1701 nt, Artificial Sequence
  derived and/or modified CDS sequence (opt5) from hemagglutinin__InfluenzaA__ABI30821
augaagaccaucauugcccugagcuacauccucugccugguguucgcucagaaacuucccggcaacgacaauuccacagccacgcugugucucgggcaccaugcggucccuaacggaaccauuguuaagacaaucaccaaugaucaaauugaggugacaaacgcuaccgaacuggugcagucuagcuccacaggcgggaucugcgacucuccgcaccagauccuugauggagagaauuguacccugauugacgcccuccugggcgauccccagugcgacggguuucaaaacaaaaagugggaucuguucgucgaaagaagcaaagccuauuccaauuguuacccuuaugacgugcccgauuacgcuucucuccggagccugaucgccuccagcggaacgcuugaguuuaacaaugaaucuuucaacuggaccggcguuacacagaauggcaccuccagcgcuugcaagcgcagaucuaacuccagcuuuuucucucggcugaauuggcucacacaucugaaguuuaaauauccugcccuuaacguggcgaugcccaauaacgaggaguucgacaagcuguacauuuggggaguccaccauccugggaccuauaacgaucagaucucccucuacgcccaggcuagcggccgcauuacgguguccacaaaaagaucucaacagaccguuaucccgaauauugggagccggccccgcgugagagacaucccuucccggaucagcauuuacuggacaaucgucaagcccggagauauucugcugaucaacucuaccggcaaucucauugccccucgcggguauuuuaaaaucagauccggaaagagcucuaucaugcggagcgacgcucccauuggcaaguguaacuccgaaugcaucaccccgaauggcucuauuccuaacgacaaacccuuccagaaugugaaccgcaucacauacggggccuguccuagauaugugaagcagaauacgcugaaacuugcgaccggaaugcggaacguccccgagaagcaaacacgcggcauuuuuggggccaucgcuggauucaucgaaaauggcugggaggggaugguugauggaugguacggcuuuagacaccagaacagcgagggcauugggcaggccgcugaccugaaauccacccaagccgccaucgaucagauuaauggaaagcucaaccggcugaucggcaaaacaaaugaaaaguuccaccagauugagaaggaguucagcgaaguggaagggagaauccaggaccuugagaaauauguggaggauaccaagauugaccuguggucuuacaacgcugaacuccuggucgcgcuggagaaccaacauacgaucgaucucacagacuccgaaaugaauaaacuguuugagcgcaccaagaaacagcuucgggaaaacgccgaggauaugggaaauggcugcuucaagaucuaucacaagugugacaacgcuugcauugggagcaucagaaauggcaccuacgaucaugacguguaccgcgacgaggcccugaacaaucgguuucagauuaaaggaguugaacucaagucuggcuauaaagauuggauccuguggauuuccuucgccaucagcugcuuucuucuguguguggcucuccugggguucaucaugugggccugccagaagggaaacauuagauguaauaucugcauuuga

SEQ ID NO: 193340 - RNA, 1701 nt, Artificial Sequence; identical to SEQ ID NO: 192705
  derived and/or modified CDS sequence (opt5) from hemagglutinin__InfluenzaA__ABI30832

SEQ ID NO: 193341 - RNA, 1701 nt, Artificial Sequence
  derived and/or modified CDS sequence (opt5) from hemagglutinin__InfluenzaA__ABI30843
augaagaccaucauugcccugagcuacauccucugccugguguucgcucagaaacuucccggcaacgacaauuccacagccacgcugugucucgggcaccaugcggucccuaacggaaccauuguuaagacaaucaccaaugaucaaauugaggugacaaacgcuaccgaacuggugcagucuagcuccacaggcgggaucugcgacucuccgcaccagauccuugauggagagaauuguacccugauugacgcccuccugggcgauccccagugcgacggguuucaaaacaaaaagugggaucuguucgucgaaagaagcaaagccuauuccaauuguuacccuuaugacgugcccgauuacgcuucucuccggagccugaucgccuccagcggaacgcuugaguuuaacaaugaaucuuucaacuggaccggcguuacacagaauggcaccuccagcgcuugcaagcgcagaucuaacuccagcuuuuucucucggcugaauuggcucacacaucugaaguuuaaauauccugcccuuaacgugaccaugcccaauaacgaggaguucgacaagcuguacauuuggggaguccaccauccugggacguauaacgaucagaucucccucuacgcgcaggccagcggccgcauuacaguguccaccaaaagaucucaacagacaguuaucccgaauauugggagccggccccgcgugagagacaucccuucccggaucagcauuuacuggaccaucgucaagcccggagauauucugcugaucaacucuaccggcaaucucauugcuccucgcggguauuuuaaaaucagauccggaaagagcucuaucaugcggagcgacgcccccauuggcaaguguaacuccgaaugcaucacaccgaauggcucuauuccuaacgacaaacccuuccagaaugugaaccgcaucacguacggggcuuguccuagauaugugaagcagaauacccugaaacuugccacaggaaugcggaacguccccgagaagcaaacccgcggcauuuuuggggcgaucgccggauucaucgaaaauggcugggaggggaugguugauggaugguacggcuuuagacaccagaacagcgagggcauugggcaggcugccgaccugaaauccacacaagcugccaucgaucagauuaauggaaagcucaaccggcugaucggcaaaaccaaugaaaaguuccaccagauugagaaggaguucagcgaaguggaagggagaauccaggaccuugagaaauauguggaggauacgaagauugaccuguggucuuacaacgccgaacuccuggucgcucuggagaaccaacauacaaucgaucucaccgacuccgaaaugaauaaacuguuugagcgcacccggaagcagcuuagagaaaacgcggaggauaugggaaauggcugcuucaaaaucuaucacaagugugacaacgccugcauugggagcauccgcaauggcacauacgaucaugacguguaccgggacgaggcucugaacaauagauuucagauuaagggaguugaacucaaaucuggcuauaaggauuggauccuguggauuuccuucgccaucagcugcuuucuucuguguguggcccuccugggguucaucaugugggcuugccagaaaggaaacauucgcuguaauaucugcauuuga

SEQ ID NO: 193342 - RNA, 1701 nt, Artificial Sequence; identical to SEQ ID NO: 193285
  derived and/or modified CDS sequence (opt5) from hemagglutinin__InfluenzaA__ABI30865

SEQ ID NO: 193343 - RNA, 1707 nt, Artificial Sequence
  derived and/or modified CDS sequence (opt5) from hemagglutinin__InfluenzaA__ABI36155
auggagaagaucgugcugcuccuggccaccgucagccuuguuaaauccgaccagauuugcaucggcuaccacgcuaacaauucuacagaacaaguggauacgauuauggagaagaacgugaccgucacacaugcccaggacauccuggaaaagacccacaaugggaaacucugugaucuggacggagugaaaccccuuauucugagagauugcagcguugcgggcuggcuccuggggaacccuaugugugacgaguucaucaaugugccggaaugguccuauaucgucgagaaggcuaaccccgccaauggacugugcuacccuggcaacuuuaaugauuaugaggaacucaagcaucugcuuucucggauuaaccacuucgagaaacugcagaucauucccaagagcuccuggucugaccaugaagccagccucgggguguccagcgcuuguccuuaccugggaagaucuuccuuuuuccgcaauguuguguggcuuaucaaaaagaacaauacauaucccaccauuaaacggagcuacaacaauacaaaccaggaggaucugcucguccuguggggcauccaccacccuaacgacgccgcugagcaaacccgccuguaucagaauccgacgaccuacauuucugugggcacauccacccucaaccagagacuggugcccaagaucgccacacggagcaaggucaaugggcagucuggacgcauggaauuuuucuggaccauccuuaaaccuaacgaugcgauuaauuuugaguccaacggcaauuucaucgcccccgaauacgcuuauaagauuguuaaaaagggggacagcgccaucaugaaauccgagcuggaauacggagauugcaacacgaagugucaaacaccuaugggcgcuauuaauucuagcaugccccuccauaacauccacccgcugaccaucggggagugcccuaaauaugugaaguccaauagacuugugcuggccacaggacuccggaacagcccccagcgcgagagacggcgcaagaaaagaggccuguuuggcgcgauugccggguucaucgaaggaggcuggcaggggauggucgacggaugguacggcuaucaucacucuaaugagcagggguccggauacgcugccgacaaggaaagcacccaaaaagcuauugauggcgugaccaacaagguuaauucuaucauugacaaaaugaacacacaguuugaggccgugggccgggaguucaacaaucuggaacgcagaaucgagaaccucaauaagaagauggaagauggguuucuggacgucuggacguauaacgccgagcuucuggugcucauggaaaaugagcggacccuggauuuccacgacagcaacguuaaaaaucuuuacgauaaggugagacugcagcuccgcgacaacgcuaaagaacugggaaauggcuguuucgaguuuuaccauaagugcgauaacgaguguauggaauccauccggaaugggacauauaacuacccucaauauucugaggaagcgagacugaaacgcgaggagauuagcggagucaagcucgaauccaucggcauuuaccagauccugagcauuuauucuaccguggccuccagccuugcucuggccaucaugauggccgggcucucucuguggaugugcuccaauggcagccugcagugccgggucuguauuuga

SEQ ID NO: 193344 - RNA, 1707 nt, Artificial Sequence
  derived and/or modified CDS sequence (opt5) from hemagglutinin__InfluenzaA__ABI36166
auggagaagaucgugcugcuccuggccaccgucagccuuguuaaauccgaccagauuugcaucggcuaccacgcuaacaauucuacagaacaaguggauacgauuauggagaagaacgugaccgucacacaugcccaggacauccuggaaaagacccacaaugggaaacucugugaucuggacggagugaaaccccuuauucugagagauugcagcguugcgggcuggcuccuggggaacccuaugugugacgaguucaucaaugugccggaaugguccuauaucgucgagaaggcuaaccccgccaauggacugugcuacccuggcaacuuuaaugauuaugaggaacucaagcaucugcuuucucggauuaaccacuucgagaaacugcagaucauucccaagagcuccuggucugaccaugaagccagccucgggguguccagcgcuuguccuuaccugggaagaucuuccuuuuuccgcaauguuguguggcuuaucaaaaagaacaauacauaucccaccauuaaacggagcuacaacaauacaaaccaggaggaucugcucguccuguggggcauccaccacccuaacgacgccgcugagcaaacccgccuguaucagaauccgacgaccuacauuucugugggcacauccacccucaaccagagacuggugcccaagaucgccacacggagcaaggucaaugggcagucuggacgcauggaauuuuucuggaccauccuuaaaccuaacgaugcgauuaauuuugaguccaacggcaauuucaucgcccccgaauacgcuuauaagauuguuaaaaagggggacagcgccaucaugaaauccgagcuggaauacggagauugcaacacgaagugucaaacaccuaugggcgcuauuaauucuagcaugcccuuucauaacauccacccgcucaccaucggggagugcccuaaauaugugaaguccaauagacuggugcuugccacaggacugcggaacagcccccagcgcgagagacggcgcaagaaaagaggccucuucggcgcgauugccggguuuaucgaaggaggcuggcaggggauggucgacggaugguacggcuaucaucacucuaaugagcagggguccggauacgcugccgacaaggaaagcacccaaaaagcuauugauggcgugaccaacaagguuaauucuaucauugacaaaaugaacacacaguucgaggccgugggccgggaauuuaacaaucuggagcgcagaaucgagaaccugaauaagaagauggaagauggguuccucgacgucuggacguauaacgccgagcugcuugugcugauggaaaaugagcggacccucgauuuccacgacagcaacguuaaaaaucuguacgauaaggugagacuucagcugcgcgacaacgcuaaagaacucggaaauggcuguuuugaguucuaccauaagugcgauaacgaguguauggaauccauccggaaugggacauauaacuacccucaauauucugaggaagcgagacugaaacgcgaggagauuagcggagucaagcuggaauccaucggcauuuaccagauccucagcauuuauucuaccguggccuccagccuggcucuugccaucaugauggccgggcugucucucuggaugugcuccaauggcagccugcagugccgggucuguauuuga

SEQ ID NO: 193345 - RNA, 1707 nt, Artificial Sequence; identical to SEQ ID NO: 193344
  derived and/or modified CDS sequence (opt5) from hemagglutinin__InfluenzaA__ABI36177

SEQ ID NO: 193346 - RNA, 1707 nt, Artificial Sequence
  derived and/or modified CDS sequence (opt5) from hemagglutinin__InfluenzaA__ABI36406
auggagaagaucgugcugcuccuggccaccgucagccuuguuaaauccgaccagauuugcaucggcuaccacgcuaacaauucuacagaacaaguggauacgauuauggagaagaacgugaccgucacacaugcccaggacauccuggaaaagacccacaaugggaaacucugugaucuggacggagugaaaccccuuauucugagagauugcagcguugcgggcuggcuccuggggaacccuaugugugacgaguucaucaaugugccggaaugguccuauaucgucgagaaggcuaaccccgccaauggacugugcuacccuggcaacuuuaaugauuaugaggaacucaagcaucugcuuucucggauuaaccacuucgagaaacugcagaucauucccaagagcuccuggucugaccaugaagccagccucgggguguccagcgcuuguccuuaccugggaagaucuuccuuuuuccgcaauguuguguggcuuaucaaaaagaacaauacauaucccaccauuaaacggagcuacaacaauacaaaccaggaggaucugcucguccuguggggccugcaccacccuaacgacgccgcugagcaaacccgccucuaucagaauccgacgaccuacaucucugugggcacauccacccugaaccagagacuugugcccaagauugccacacggagcaaggucaaugggcagucuggacgcauggaauuuuucuggaccauccugaaaccuaacgaugcgaucaauuuugaguccaacggcaauuucauugcccccgaauacgcuuauaagaucguuaaaaagggggacagcgccauuaugaaauccgagcucgaauacggagauugcaacacgaagugucaaacaccuaugggcgcuaucaauucuagcaugcccuuucauaacauucacccgcugaccaucggggagugcccuaaauaugugaaguccaauagacuugugcuggccacaggacuccggaacagcccccagcgcgagagacggcgcaagaaaagaggccuguucggcgcgaucgccggguuuauugaaggaggcuggcaggggauggucgacggaugguacggcuaucaucacucuaaugagcagggguccggauacgcugccgacaaggaaagcacccaaaaagcuaucgauggcgugaccaacaagguuaauucuauuaucgacaaaaugaacacacaguucgaggccgugggccgggaauuuaacaaucuggagcgcagaauugagaaccucaauaagaagauggaagauggguuccuggacgucuggacguauaacgccgagcuucuggugcucauggaaaaugagcggacccuggauuuccacgacagcaacguuaaaaaucuuuacgauaaggugagacugcagcuccgcgacaacgcuaaagaacugggaaauggcuguuuugaguucuaccauaagugcgauaacgaguguauggaauccauccggaaugggacauauaacuacccucaauauucugaggaagcgagacugaaacgcgaggagaucagcggagucaagcucgaauccauuggcaucuaccagauucugagcaucuauucuaccguggccuccagccuugcucuggccauuaugauggccgggcucucucuguggaugugcuccaauggcagccugcagugccgggucuguaucuga

SEQ ID NO: 193347 - RNA, 1707 nt, Artificial Sequence
  derived and/or modified CDS sequence (opt5) from hemagglutinin__InfluenzaA__ABI36450
auggagaagaucgugcugcuccuggccauugucagccuuguuaaauccgaccagaucugcauuggcuaccacgcuaacaauucuaccgaacaaguggauacaaucauggagaagaacgugacggucacccaugcccaggacauucuggggaaaacacacaauggaaagcucugugaucuggacggcgugaaaccccuuauccugagagauugcagcguugcgggguggcuccugggaaacccuaugugugacgaauuuaucaaugugccggagugguccuauauugucgaaaaggcuaaccccaccaaugaucugugcuacccuggcucuuuuaacgacuaugaggagcucaagcaucugcuuagccggaucaaucacuucgagaaaauucagaucauucccaaguccucuuggagcgaucaugaagccuccagcggggugucuuccgccuguccuuaccugggaagccccucuuucuuccgcaacguuguguggcucaucaaaaagaacuccacauauccuaccauuaaaacaagcuacaauaauaccaaccaggaagaccugcuuguccuguggggcauccaccacucuaaugaugcugccgagcaaacgagacucuaucagaacccgaccacauacaucuccauuggcaccagcacacugaaccagcggcuggugcccaagaucgcuacccgcuccaaggugaaugggcagucuggaagaauggaguuuuucuggacgauucucaaaccuaacgacgccaucaauuuugaaagcaacggcaauuucauugcgcccgaguacgccuauaagaucgucaaaaagggggauuccgcuaucaugaaaagcgaacuggaguacggaaacugcaauacaaagugucaaaccccuaugggcgccauuaacucuuccaugcccuuucauaauauccacccgcuuacaauuggggaaugcccuaaauauguuaagagcaaccggcuggugcucgcuaccggacugcgcaauucuccccagagagagagccggcgcaagaaaagaggccuuuucggcgccaucgcgggguuuauugagggaggcuggcaggggaugguggacggaugguacggcuaucaucacuccaacgaacaggggucuggauacgccgcugacaaggagagcacccaaaaagccaucgauggcgucacaaauaaggugaacuccaucauugacaaaaugaauacgcaguucgaagcuguuggccgggaguuuaacaaccuggaacgcagaaucgagaaucucaacaagaagauggaggauggguuccuggacguguggaccuauaaugccgaacugcucguccugauggagaacgaacggacacuugauuuccacgacagcaaugugaaaaaccuguacgauaagguucgccuccagcugagagacaaugccaaagagcuuggaaacggcuguuuugaguucuaccauaagugcgauaaugaauguauggagucuauucggaacgggaccuauaauuacccucaauauuccgaagaggcuagacugaaacgcgaagagaucagcggagugaagcucgagucuauuggcacauaccagauccuguccauuuauagcaccgucgcguccucucuggcccucgcuaucaugaucgccgggcugagccuuuggaugugcuccaacggcucucugcagugccggauuuguaucuga

SEQ ID NO: 193348 - RNA, 1707 nt, Artificial Sequence
  derived and/or modified CDS sequence (opt5) from hemagglutinin__InfluenzaA__ABI49396
auggagaagaucgugcugcuccuggccauugucagccuuguuaaauccgaccagaucugcauuggcuaccacgcuaacaauucuaccgaacaaguggauacaaucauggagaagaacgugacggucacccaugcccaggacauucuggggaaaacacacaauggaaagcucugugaucuggacggcgugaaaccccuuauccugagagauugcagcguugcgggguggcuccugggaaacccuaugugugacgaauuuaucaaugugccggagugguccuauauugucgaaaaggcuaaccccaccaaugaucugugcuacccuggcucuuuuaacgacuaugaggagcucaagcaucugcuuagccggaucaaucacuucgagaaaauucagaucauucccaaguccucuuggagcgaucaugaagccuccagcggggugucuuccgccuguccuuaccugggaagccccucuuucuuccgcaacguuguguggcucaucaaaaagaacuccacauauccuaccauuaaaaagagcuacaauaauacaaaccaggaagaccugcuuguccuguggggcauccaccacccgaaugaugcugccgagcaaaccagacucuaucagaaccccacgaccuacaucucuauuggcacauccacccugaaccagcggcuggugccuaagaucgcuacacgcagcaaagugaaugggcaguccggaagaauggaguuuuucugggccauucucaagcccaacgacgcgaucaauuuugaaucuaacggcaauuucauugccccugaguacgcuuauaaaaucgucaagaaaggggauagcgccaucaugaaguccgaacuggaguacggaaacugcaauaccaaaugucaaacgcccaugggcgcuauuaacagcucuaugccguuucauaauauccacccucuuacaauuggggaaugccccaaguauguuaaguccaaccggcuggugcucgccaccggacugcgcaauagcccucagagagagucucggcgcaaaaagagaggccuuuucggcgcgaucgccggguuuauugagggaggcuggcaggggaugguggacggaugguacggcuaucaucacagcaacgaacagggguccggauacgcugccgacaaagagucuacacaaaaggcuaucgauggcgucaccaauaaagugaacagcaucauugacaagaugaauacccaguucgaagccguuggccgggaguuuaacaaccuggaacgcagaaucgagaaucucaacaagaaaauggaggauggguuccuggacguguggacauauaaugccgaacugcucguccugauggagaacgaacggacgcuugauuuccacgacuccaaugugaagaaccuguacgauaaaguucgccuccagcugagagacaaugcuaaggagcuuggaaacggcuguuuugaguucuaccauaaaugcgauaaugaauguauggagagcauucggaacgggaccuauaauuacccccaauauucugaagaggcgagacugaagcgcgaagagaucuccggagugaagcucgagagcauuggcacauaccagauccugucuauuuauuccaccgucgccagcucccuggcucucgccaucaugaucgccgggcugucucuuuggaugugcagcaacggcucccugcagugccggauuuguaucuga

SEQ ID NO: 193349 - RNA, 1704 nt, Artificial Sequence
  derived and/or modified CDS sequence (opt5) from hemagglutinin__InfluenzaA__ABI85000
augaacacccagauccuggccuucauugcuugcaugcucaucggcacaaagggggacaaaauuugucugggacaccaugccguggcgaauggcacgaaggucaacacccuuacagagagagggaucgaaguugugaaugcuaccgagacaguggaaaccgucaacauuaaaaagaucugcacacaaggaaaacggcccaccgaucugggccagugugggcuccugggaacgcuuaucggcccuccgcagugcgaccaguuucuggaguucgaugccaaucucauuaucgaacgcagagagggcaccgacguguguuaccccgggaaguuuacaaacgaggaaagccugcggcaaauucugcgcggauccggcgggaucgauaaggagucuaugggauucaccuauagcggcauuagaacaaauggggccaccuccgcuugccggcgcucuggaagcuccuuuuacgccgaaaugaaauggcuccugucuaacagcgacaaugcugccuucccucagaugacgaaguccuauagaaacccccggaauaaaccugcgcuuaucauuuggggcguucaccauagcggcucugccacagagcagaccaagcuguacggguccggaaacaaacucaucacagugggcagcucuaaguaucagcaauccuuuacccccagcccuggggcucgcccgcaggucaauggacagucuggcagaaucgauuuccacuggcugcuucuggaccccaacgauaccgugacauuuacguucaauggggccuuuauugcuccugaccgggccuccuucuuucgcggagagagccucggcguucaguccgaugugccccuggacucuggcugugaaggggauugcuuccauagcggaggcaccaucgucuccagccugccuuuccaaaacauuaaccccagaacaguggggaaguguccgcgguacgugaaacagaccucucuccugcuugcgacaggaaugcgcaaugucccugagaaccccaagcaggccuaucagaaaagaaugacccggggccuguuuggggcuaucgccggcuucauugaaaauggaugggagggccucaucgacgggugguacggauuuagacaccaaaacgcucagggcgaagggacggccgccgacuacaaguccacacagagcgcuaucgaucaaauuaccggaaaacugaaucgccuuaucgacaagaccaaccagcaguucgagcugauugauaaugaguuuucugaaaucgagcagcaaauuggcaacguuaucaauuggacacgggacagcaugaccgaagugugguccuauaacgcggagcuccugguggccauggaaaaucagcacacaaucgaucuggcugacucugagaugaacaaacucuacgagagaguccgcaagcagcugcgggaaaaugccgaggaagaugggacgggcugcuucgagauuuuucauaagugugacgaucagugcauggaaagcaucagaaacaauaccuaugaccacacacaauaccgcaccgagucccuucagaaccggauucagaucgauccugugaaacugagcucuggauauaaggacauuauccucugguucuccuuuggcgccagcugcuuccugcuucuggcuauugccauggggcucguuuuuaucuguaucaaaaacggaaauaugagaugcacaauuuguaucuga

SEQ ID NO: 193350 - RNA, 1701 nt, Artificial Sequence; identical to SEQ ID NO: 192902
  derived and/or modified CDS sequence (opt5) from hemagglutinin__InfluenzaA__ABI92291

SEQ ID NO: 193351 - RNA, 1701 nt, Artificial Sequence
  derived and/or modified CDS sequence (opt5) from hemagglutinin__InfluenzaA__ABI92302
augaaggccaaacugcucgugcugcuuugcgcucugagcgccaccgacgcggauacaaucuguauuggcuaccacgcuaacaauuccacggacaccgucgauacaguucucgagaagaacgugaccgugacacauucugucaaucugcuugaagacagccacaacgggaaacugugcagacucaagggaaucgcuccccugcagcugggcaaauguuccauugccggguggauccucggaaauccugagugcgaaucucuguucagcaagaaguccuggucuuauauugccgagaccccgaacagcgaaaauggcacauguuaccccggguauuuugccgauuacgaggagcuucgggaacaacuguccagcgugucuuccuucgagcgcuuugaaaucuucccuaaagagagcucuuggcccaagcauaacguuaccagaggagugacggcuuccugcagccacaaaggcaagucuuccuuuuaucggaaucuccuguggcuuaccgagaaaaacggcagcuacccuaaucuguccaagucuuaugucaacaauaaggaaaaagaggugcucguucuguggggagugcaucaccccagcaacaucgaagaccagaagacaauuuaccgcaaagagaaugccuacgucuccguggugagcucucacuauaacagacgguucaccccugaaaucgcgaagcgcccgaaagucagagaucaggaggggcggauuaacuacuauuggacacugcucgagcccggcgacaccaucauuuuugaagccaaugggaaccugaucgcuccuugguacgccuucgcucuuucccgcggauuuggcagcgggauuaucacgucuaaugccagcauggaugagugugacgcgaagugccagacaccccaaggagccaucaacuccucucugccuuuccagaauguucaucccgugaccauuggcgaauguccgaaauaugugagaagcacaaagcuccggauggucaccggccugcgcaacaucccuuccauucagagcagagggcuuuuuggagcuaucgccggcuucauugaagggggauggaccggcaugaucgaugggugguacggauaucaccaucagaaugaacaaggcucuggcuacgcugccgaccagaaguccacacagaacgccaucaaugggauuacgaacaaagugaauagcguuaucgagaagaugaacauucaguuuaccgcugugggaaaagaguucaauaagcuggaaaaacggauggagaaccucaauaagaaggucgaugacggcuuccuggacaucuggacauacaacgcggaacugcucgugcugcuugagaacgaacgcacccuggauuuucacgacucuaauguuaaaaaccucuaugagaaggugaaaucccaacugaagaauaacgccaaagagauugggaauggaugcuucgaauuuuaccacaaguguaacaaugagugcauggaaagcgucaagaacggcacauaugauuaccccaaauauuccgaggagucuaaacuuaauagagagaagaucgacggggugaagcuggagagcaugggcgucuaccagauccucgcuauuuauuccaccguggccucuagccugguucugcucgugucccugggagccaucagcuucuggaugugcucuaacggcucccuucagugucggauuugcaucuga

SEQ ID NO: 193352 - RNA, 1701 nt, Artificial Sequence
  derived and/or modified CDS sequence (opt5) from hemagglutinin__InfluenzaA__ABI92313
augaaggccaaacugcucgugcugcuuugcgcuuucaccgccacauacgcggacacgaucuguauuggcuaucacgcuaacaauagcaccgauacagucgacaccguucuggagaagaacgugacagugacccauuccgucaaucuccuggaagauucucacaacgggaaacuuugcagacugaagggaacagcuccccuccagcugggcaauuguagcguggccggguggauccugggaaacccugagugcgaaucccucuuuucuaaagagagcugguccuacauugccgaaaccccgaaucccgagaacggcacguguuauccuggguacuucgccgacuaugaggaacugcgggagcaacuuucuagcaucuccagcuuugaacgcuucgagauuuuucccaaggagucuuccuggccuaaucauaccguuacaaagggagugaccgcuagcugcucucacaacggcaaauccagcuucuacaagaaucugcucuggcugacagaaaagaacggccuuuaucccaaucugucuaaguccuacgucaacaauaaagagaaggaagugcucguucuguggggagugcaucacccuagcaacaucggggaucagagagccaucuaccacaccgagaacgcguaugucuccguggugucuagccauuacucccggcgcuuuacgccggaaauuacaaagagacccaaaguccgggaccaggagggccgcaucaauuauuacuggacccugcucgagccuggggauacaauuaucuucgaagccaacggaaaucugauugcucccugguaugccuuugcucuuagcagaggcuucgggucuggaaucauuaccuccaacgccagcaugggcgagugugacgcgaagugccagaccccucaaggcgccaucaauucuagccugcccuuucagaacguucacccggugacaaucggggaauguccuaaauacgugcgguccacgaagcuccgcauggucaccggacugagaaauauucccucuauccagagccggggccuuuucggggcuauugccggauuuaucgagggcggguggacaggaaugauugauggcugguauggcuaccaucaccagaacgaacaaggguccggauacgcugccgaccagaaaagcacccagaaugccaucgauggcaucacaaacaagguuaauucugugauugagaaaaugaacacccaguucacggcuguggggaaggaguucaauaagcuggaacgcagaauggagaaccucaauaaaaaggucgacgauggauuucuggacaucuggacauauaacgcggaacugcucgugcugcuugagaacgaacggacccuggacuuccacgauuccaauguuaaaaaccucuacgagaaggugaaaaaucaacugaagaacaaugccaaggagauuggcaacgggugcuuugaguucuaucauaaauguaauaacgaaugcauggaaagcgucaagaauggcaccuacgacuauccuaaauacucugaggaguccaaacuuaaccgcgagaaaaucgauggagugaagcuggaaagcaugggcgucuaucacauucucgcuaucuacuccacaguggccucuagccugguucugcucgugucccugggggccaucucuuuuuggaugugcagcaauggaucccuucaguguagaauuugcaucuga

SEQ ID NO: 193353 - RNA, 1701 nt, Artificial Sequence
  derived and/or modified CDS sequence (opt5) from hemagglutinin__InfluenzaA__ABI92324
augaagaccaucauugcccugagcuacauccucugccugguguucgcucagaaacuucccggcaacgacaauuccacagccacgcugugucucgggcaccaugcggucccuaacggaacccugguuaagacaauuaccaaugaucaaaucgaggugacaaacgcuaccgaacuugugcagucuagcuccacaggcagaauuugcgacucuccgcaccggauccuggaugggaaaaauuguacccucaucgacgcccugcugggagauccccauugcgacggcuuucagaacaaggagugggaucucuucgucgaacgcagcaaagccuauuccaauuguuacccuuaugacgugcccgauuacgcuucucugagaagccuuguugccuccagcgggacgcuggaguuuauuaacgaagacuucaauuggaccggaguggcucaggauggcaagucuuaugccugcaagcggggcuccgucaacagcuuuuucucucgccucaauuggcugcacaaacuugaguacaaguauccugcgcugaacgugacaaugcccaauaacgggaaauuugacaagcucuacaucuggggaguucaucacccuuccaccgauagcgaccaaacaucucuguacgugagagccuccggcaaagucaccgugagcacgaagcggucccagcagacagugauuccgaauaucggguuccgccccugggucagaggacugucuagccggauuuccaucuauuggaccauuguuaagccuggcgacauccuccugaucaacagcacagggaaccuuauugcuccccgcggauacuuuaaaaucagaaauggcaagucuuccauuaugcggagcgaugccccuaucggcaacuguucuagcgagugcauuacccccaauggguccaucccgaacgacaaaccuuuccagaaugugaaccgcaucaccuauggagcuugucccagauacgugaagcaaaauacacugaaacucgccacgggcaugcggaacgucccugaaaagcagacccgcgggauuuuuggagcgaucgccggcuucauugagaaugggugggaaggaaugguggauggcugguauggcuuuagacaccagaacucugaggggacaggacaggcugccgaccugaaaagcacccaagcugccaucgaucagauuaauggcaaacuuaaccggcugaucgagaagacaaaugaaaaguuccaucagaucgagaaggaguucuccgaaguugaagggcgcauucaagaccucgagaaauacguggaggauaccaagaucgaccuguggagcuauaacgccggacugcucgucgcucuggaaaaucagcacacgauugaucuuacagacucugagaugaacaaacuguuugaaagaacccggaagcagcucagagagaacgcggaagauaugggcaaugggugcuucaagaucuaccauaaaugugacaacgccugcauuggcuccauccgcaauggaaccuacgaccacgauguguaucgggacgaggcucugaacaauagauuucagauuaagggcguugagcuuaaaagcggguacaaggauuggauccuguggaucucuuucgccauuuccugcuuucuccugugugugguccugcucggauucaucaugugggccugccaaaaaggcaacauucgcuguaauaucugcauuuga

SEQ ID NO: 193354 - RNA, 1701 nt, Artificial Sequence
  derived and/or modified CDS sequence (opt5) from hemagglutinin__InfluenzaA__ABI92335
augaagaccaucauugcccugagcuacauccucugccugguguucgcucagaaacuucccggcaacgacaauuccacagccacgcugugucucgggcaccaugcggucccuaacggaacccugguuaagacaauuaccaaugaucaaaucgaggugacaaacgcuaccgaacuugugcagucuagcuccacaucuagaauuugcgacagcccgcaccagauccuggauggcgagaauuguacccucaucgacgcccugcugggggauccccauugcgacggauuucagaacaaagaaugggaucucuucgucgagcgguccaaggccuauucuaauuguuacccuuaugacgugcccgauuacguuagccugcgcucccuuguggcuagcucuggcacgcuggaauuuaacaaugaguccuucaacuggaccggggucgcccaaaauggaacaagcucugcuugcaaaagacgguccgacaagagcuuuuucucucgccucaacuggcugcaccagcuuaaguauaaauacccugcccugaaugugaccaugcccaacaaugagaaguuugauaaacucuauauuuggggcguucaucacccuggcacagacuccgaucagaucagccuguacgcgcaggccuccgggagagugaccgucucuacgaagcggagccaacagacagugauuccgaacaucggaucccgccccugggugagaggcgucagcucucggauuuccaucuacuggaccauuguuaaaccuggggacauccugcucaucaacagcacaggaaaucugauugcuccccgcggcuauuucaagaucagaucuggaaagagcuccauuaugcggucugacgccccuaucgggaaauguaacagcgaaugcauuacccccaauggcuccaucccgaacgauaagccuuuucagaaugugaaccgcaucaccuacggcgcuugucccagauaugugaaacagaauacacuuaagcuggccacggggaugcggaacgucccugagaaacaaacccgcggaauuuucggcgcgaucgccggguuuauugaaaauggaugggagggcaugauggacgggugguacggauucagacaccagaacagcgagggcacaggccaggcugccgaucucaagucuacccaagcugccaucaaucagauuaacgggaaacugaaucggcuuaucgaaaagacaaacgagaaguuucaucagaucgaaaaagaguucuccgaaguggagggacgcauucaggaccuggagaaguauguugaagauaccaaaaucgaccucuggagcuacaaugccgagcugcugguggcucucgaaaaccaacacacgauugaucugacagacucugagaugaacaaacuuuucgaaagaaccaagaagcagcugcgggagaaugcggaggauaugggcaacgggugcuuuaagaucuaucauaaaugugacaaugccugcaugggauccauuagaaacggcaccuacgaucacgacgucuaccgcgacgaagcucucaauaaccgguuccagaucaaggggguggagcugaaaagcggcuauaaggauuggauucuuuggaucuccuuugccaucucuugcuuccugcucuguauuguucugaugggauuuaucaugugggccugccagaaaggcaauauuagauguaacaucugcauuuga

SEQ ID NO: 193355 - RNA, 1701 nt, Artificial Sequence
  derived and/or modified CDS sequence (opt5) from hemagglutinin__InfluenzaA__ABI92346
augaagaccaucauugcccugagcuacauccucugccugguguucgcucagaaacuucccggcaacgacaauuccacagccacgcugugucucgggcaccaugcggucccuaacggaacccugguuaagacaauuaccaaugaucaaaucgaggugacaaacgcuaccgaacuugugcagucuagcuccacaggcagaauuugcgacucuccgcaccagauccuggauggggagaauuguacccucaucgacgcccugcugggagauccccauugcgacggcuuucagaacaaagaaugggaucucuucgucgagcggagcaaggccuauuccaauuguuacccuuaugacgugcccgauuacguuucucugcgcagccuuguggcuuccagcgggacgcuggaauuuaacaaugagucuuucaacuggaccggagucgcccaaaauggcacauccagcgcuugcaaaagacggucugacaaguccuuuuucagccgccucaacuggcugcaccagcuuaaguauaaauacccugcccugaaugugaccaugcccaacaaugagaaguuugauaaacucuauauuuggggcguucaucacccugggacagacucugaucagaucucccuguacgcgcaggccagcggaagagugaccgucuccacgaagcggucucaacagacagugauuccgaacaucggcagccgccccugggugagaggggucuccagccggauuucuaucuacuggaccauuguuaaaccuggagacauccugcucaucaacuccacaggcaaucugauugcuccccgcggguauuucaagaucagaagcggaaagucuagcauuaugcgguccgacgccccuaucggcaaauguaacucugaaugcauuacccccaauggcagcaucccgaacgauaagccuuuucagaaugugaaccgcaucaccuacggggcuugucccagauaugugaaacagaauacacuuaagcuggccacgggaaugcggaacgucccugagaaacaaacccgcggcauuuucggggcgaucgccggauuuauugaaaauggcugggaggggaugauggacggaugguacggcuucagacaccagaacuccgagggcacagggcaggcugccgaucucaagagcacccaagcugccaucaaucagauuaacggaaaacugaaucggcuuaucgaaaagacaaacgagaaguuucaucagaucgaaaaagaguucucugaaguggagggccgcauucaggaccuggagaaguauguugaagauaccaaaaucgaccucugguccuacaaugccgagcugcugguggcucucgaaaaccaacacacgauugaucugacagacagcgagaugaacaaacuuuucgaaagaaccaagaagcagcugcgggagaaugcggaggauauggggaacggaugcuuuaagaucuaucauaaaugugacaaugccugcauuggcucuaucagaaacgggaccuacgaucacgacgucuaccgcgacgaagcucucaauaaccgguuccacauuaagggcguggagcugaaauccggauauaaggauuggguucuuuggaucagcuuugccaucuccugcuuccugcucuguauugugcugcugggcuuuaucaugugggccugccagaaagggaauauuagauguaacaucugcauuuga

SEQ ID NO: 193356 - RNA, 1701 nt, Artificial Sequence; identical to SEQ ID NO: 192354
  derived and/or modified CDS sequence (opt5) from hemagglutinin__InfluenzaA__ABI92357

SEQ ID NO: 193357 - RNA, 1701 nt, Artificial Sequence; identical to SEQ ID NO: 192354
  derived and/or modified CDS sequence (opt5) from hemagglutinin__InfluenzaA__ABI92368

SEQ ID NO: 193358 - RNA, 1698 nt, Artificial Sequence; identical to SEQ ID NO: 193276
  derived and/or modified CDS sequence (opt5) from hemagglutinin__InfluenzaA__ABI92379

SEQ ID NO: 193359 - RNA, 1701 nt, Artificial Sequence
  derived and/or modified CDS sequence (opt5) from hemagglutinin__InfluenzaA__ABI92390
augaagaccaucauugccuucagcuacauccugugccucguguuugcucagaaacugcccggcaacgacaauuccacagccacgcuuugucuggggcaccaugcggucccuaacggaaccauuguuaagacaaucaccaaugaucaaauugaggugacaaacgcuaccgaacucgugcagucuagcuccacaggcgggaucugcgacucuccgcaccagauccuggauggagagaauuguacccuuauugacgcccugcucggcgauccccagugcgacggguuccaaaacaaaaagugggaucuguuugucgaaagaagcaaagccuauuccaauuguuacccuuaugacgugcccgauuacgcuucucugcggagccucguugccuccagcggaacgcuggaguucaacaaugaaucuuuuaacuggaccggcgugacacagaauggcaccuccagcgcuugcaagcgcagaucuaacaauuccuucuuuagccggcuuaacuggcugacacaucucaaguucaaauauccugcccugaaugucaccaugcccaacaacgagaaguuugacaaacuuuacaucuggggagugcaccauccugggacggauaaugaccagacaucucuguaugcgcaggccuccggccgcauuaccguuagcacaaagagaucccaacagaccgugaccccgaacaucgggucucggccccgcgucagagauauuccuagccggaucuccauuuacuggacaaucgugaaacccggagacauccuccugauuaauagcacgggcaaccugaucgcuccucgcggguacuucaagauuagaucuggaaaguccagcaucaugcggucugacgcccccauuggcaaauguaauagcgagugcaucaccccgaacggcuccaucccuaaugauaagcccuuucagaacgugaaucgcauuacauauggggcuuguccuagauacgucaaacagaacacccucaagcuggccacaggaaugcggaauguucccgaaaaacaaacccgcggcaucuucggggcgauugccggauuuaucgagaacggcugggaagggaugguggacggaugguauggcuucagacaccaaaauucugagggcacggggcaggcugccgaucuuaagagcacacaggcugccauuaaccagaucaauggaaaacugaaccggcucaucggcaagaccaacgagaaguuccaccagauugaaaaagaguuuuccgaaguggaggggagaauccaggaccuggaaaaguacgucgaggauaccaaaauugaccuuuggagcuauaaugccgagcugcucguggcucuggaaaaccaacauacaaucgaucugaccgacucugagaugaauaaacucuucgaacgcacaaagaagcagcugcgggagaacgcggaagauaugggaaauggcugcuuuaagauuuaccacaaaugugacaacgccugcaucggguccauuagaaauggcacguaugaucaugacguuuaccgcgacgaggcucuuaacaaucgguuccagaucaagggaguggagcugaaaagcggcuacaaggauuggauccucuggauuucuuuugccaucuccugcuuccugcuuugugucgcccugcucggguuuauuaugugggcuugccagaaaggaaacaucagauguaauauuugcaucuga

SEQ ID NO: 193360 - RNA, 1701 nt, Artificial Sequence; identical to SEQ ID NO: 192354
  derived and/or modified CDS sequence (opt5) from hemagglutinin__InfluenzaA__ABI92401

SEQ ID NO: 193361 - RNA, 1701 nt, Artificial Sequence
  derived and/or modified CDS sequence (opt5) from hemagglutinin__InfluenzaA__ABI92412
augaagaccaucauugcccugagcuacauccucugccugguguucgcucagaaacuucccggcaacgacaauuccacagccacgcugugucucgggcaccaugcggucccuaacggaacccugguuaagacaauuaccaaugaucaaaucgaggugacaaacgcuaccgaacuugugcagucuagcuccacaggcgggauuugcgacucuccgcaccagauccuggauggagagaauuguacccucaucgacgcccugcugggcgauccccagugcgacggguuucaaaacaaaaagugggaucucuucgucgaaagaagcaaagccuauuccaauuguuacccuuaugacgugcccgauuacgcuucucugcggagccuuauugccuccagcggaacgcuggaguuuaacaaugaaucuuucaacuggaccggcguuacacagaauggcaccuccagcgcuugcaagcgcagaucuaacuccagcuuuuucucucggcucaauuggcugacacaucuuaaguuuaaauauccugcccugaacgugaccaugcccaauaacgaggaguucgacaagcucuacaucuggggaguccaccauccugggacguauaacgaucagauuucccuguacgcgcaggccagcggccgcaucacaguguccaccaaaagaucucaacagacaguuauuccgaauaucgggagccggccccgcgugagagacauuccuucccggaucagcaucuacuggaccauugucaagcccggagauauccugcucauuaacucuaccggcaaucugaucgcuccucgcggguauuuuaaaauuagauccggaaagagcucuaucaugcggagcgacgcccccaucggcaaguguaacuccgaaugcauuacaccgaauggcucuaucccuaacgacaaacccuuccagaauauuaaccgcaucacguacggggcuuguccuagauaugugaagcagaauacccuuaaacuggccacaggaaugcggaacgugcccgagaagcaaacccgcggcauuuuuggggcgaucgccggauucaucgaaaauggcugggaggggauggucgauggaugguacggcuuuagacaccagaacagcgagggcauugggcaggcugccgaccucaaauccacacaagcugccaucgaucagauuaauggaaagcugaaccggcuuaucggcaaaaccaaugaaaaguuccaccagauugagaaggaguucagcgaaguugaagggagaauccaggaccuggagaaauauguggaggauacgaagauugaccucuggucuuacaacgccgaacugcugguggcucucgagaaccaacauacaaucgaucugaccgacuccgaaaugaauaaacuuuuugagcgcaccaagaaacagcugcgggaaaacgcggaggauaugggaaauggcugcuucaagaucuaucacaagugugacaacgccugcauugggagcaucagaaauggcacauacgaucaugacgucuaccgcgacgaggcucucaacaaucgguuucagauuaaaggaguggaacugaagucuggcuauaaagauuggauccuuuggauuuccuucgccaucagcugcuuucugcucuguguugcccugcugggguucaucaugugggcuugccagaagggaaacauuagauguaauaucugcauuuga

SEQ ID NO: 193362 - RNA, 1701 nt, Artificial Sequence
  derived and/or modified CDS sequence (opt5) from hemagglutinin__InfluenzaA__ABI92423
augaagaccaucauugcccugagcuacauccucugccugguguucgcucagaaacuucccggcaacgacaauuccacagccacgcugugucucgggcaccaugcggucccuaacggaaccauuguuaagacaaucaccaaugaucaaauugaggugacaaacgcuaccgaacuggugcagucuagcuccacaggcgggaucugcgacucuccgcaccagauccuugauggagagaauuguacccugauugacgcccuccugggcgauccccagugcgacggguuucaaaacaaaaagugggaucuguucgucgaaagaagcaaagccuauuccaauuguuacccuuaugacgugcccgauuacgcuucucuccggagccugaucgccuccagcggaacgcuugaguuuaacaaugaaucuuucaacuggaccggcguuacacagaauggcaccuccagcgcuugcaagcgcagaucuaacuccagcuuuuucucucggcugaauuggcucacacaucugaaguuuaaauauccugcccuuaacgugaccaugcccaauaacgaggaguucgacaagcuguacauuuggggaguccaccauccugggacguauaacgaucagaucucccucuacgcgcaggccagcggccgcauuacaguguccaccaaaagaucucaacagacaguuaucccgaauauugggagccggccccgcgugagagacaucccuucccggaucagcauuuacuggaccaucgucaagcccggagauauucugcugaucaacucuaccggcaaucucauugcuccucgcggguauuuuaaaaucagauccggaaagagcucuaucaugcggagcgacgcccccauuggcaaguguaacuccgaaugcaucacaccgaauggcucuauuccuaacgacaaacccuuccagaaugugaaccgcaucacguacggggcuuguccuagauaugugaagcagaauacccugaaacuugccacaggaaugcggaacguccccgauaagcaaacccgcggcauuuuuggggcgaucgccggauucaucgagaauggcugggaagggaugguugacggaugguacggcuuuagacaccagaacagcgagggcauugggcaggcugccgaucugaaauccacacaagcugccaucgaccagauuaauggaaagcucaaccggcugaucggcaaaaccaaugagaaguuccaccagauugaaaaggaguucagcgaaguggaggggagaauccaggaucuugaaaaauauguggaggacacgaagauugaucuguggucuuacaacgccgagcuccuggucgcucuggaaaaccaacauacaaucgaccucaccgauuccgagaugaauaaacuguuugaacgcaccaagaaacagcuucgggagaacgcggaagacaugggaaauggcugcuucaagaucuaucacaagugugauaacgccugcauugggagcaucagaaauggcacauacgaccaugacguguaccgcgaugaggcucugaacaaucgguuucagauuaaaggaguugagcucaagucuggcuauaaagacuggauccuguggauuuccuucgccaucagcugcuuucuucuguguguggcccuccugggguucaucaugugggcuugccagaagggaaacauuagauguaauaucugcauuuga

SEQ ID NO: 193363 - RNA, 1701 nt, Artificial Sequence; identical to SEQ ID NO: 192705
  derived and/or modified CDS sequence (opt5) from hemagglutinin__InfluenzaA__ABI92434

SEQ ID NO: 193364 - RNA, 1701 nt, Artificial Sequence
  derived and/or modified CDS sequence (opt5) from hemagglutinin__InfluenzaA__ABI92445
augaagaccaucauugcccugagcuacauccucugccugguguucacacagaaacuucccggcaacgacaauuccacggcuacccugugucucgggcaccaugccgucccuaacggaacaauuguuaagaccaucacaaaugaucaaauugaggugaccaacgcgacagaacuggugcagucuagcuccaccggcgggaucugcgacucuccgcaccagauccuugauggagagaauuguacgcugauugacgcucuccugggcgauccccagugcgacggguuucaaaacaaaaagugggaucuguucgucgaaagaagcaaagccuauuccaauuguuacccuuaugacgugcccgauuacgccucucuccggagccugaucgcuuccagcggaacccuugaguuuaacaaugaaucuuucaacuggacaggcguuaaucagaacggcaccuccagcgccugcaagcgcagaucuaauuccagcuuuuucucucggcugaacuggcucacacaucugaaguuuaaauauccugcucuuaaugugaccaugcccaacaacgaggaguucgacaagcuguacauuuggggaguccaccauccugggacguauaaugaucagaucucccucuacgcccaggcgagcggccgcauuacaguguccaccaaaagaucucaacagacaguuaucccgaacauugggagccggccccgcgugagagacaucccuucccggaucagcauuuacuggaccaucgucaagcccggagauauucugcugaucaauucuaccggcaaccucauugccccucgcggguauuuuaaaaucagauccggaaagagcucuaucaugcggagcgacgcucccauuggcaaguguaauuccgaaugcaucacaccgaacggcucuauuccuaaugacaaacccuuccagaacgugaaucgcaucacguacggggccuguccuagauaugugaagcagaacacccugaaacuugcuacaggaaugcggaauguccccgagaagcaaacccgcggcauuuuuggggccaucgcgggauucaucgaaaacggcugggaggggaugguugauggaugguacggcuuuagacaccagaauagcgagggcauugggcaggccgcugaccugaaauccacacaagccgcuaucgaucagauuaacggaaagcucaaucggcugaucggcaaaaccaacgaaaaguuccaccagauugagaaggaguucagcgaaguggaagggagaauccaggaccuugagaaauauguggaggauacgaagauugaccuguggucuuacaacgccgaacuccuggucgcccuggagaaucaacauacaaucgaucucaccgacuccgaaaugaacaaacuguuugagcgcaccaagaaacagcuucgggaaaaugcugaggauaugggaaacggcugcuucaagaucuaucacaagugugacaauacaugcauugggagcaucagaaacggcaccuacgaucaugacguguaccgcgacgaggcgcugaauaaccgguuucagauuaaaggaguugaacucaagucuggcuauaaagauuggauccuguggauuuccuucgccaucagcugcuuucuucuguguguggcucuccugggguucaucaugugggccugccagaagggaaauauuagauguaacaucugcauuuga

SEQ ID NO: 193365 - RNA, 1701 nt, Artificial Sequence; identical to SEQ ID NO: 192705
  derived and/or modified CDS sequence (opt5) from hemagglutinin__InfluenzaA__ABI92456

SEQ ID NO: 193366 - RNA, 1701 nt, Artificial Sequence; identical to SEQ ID NO: 193313
  derived and/or modified CDS sequence (opt5) from hemagglutinin__InfluenzaA__ABI92467

SEQ ID NO: 193367 - RNA, 1701 nt, Artificial Sequence; identical to SEQ ID NO: 192722
  derived and/or modified CDS sequence (opt5) from hemagglutinin__InfluenzaA__ABI92478

SEQ ID NO: 193368 - RNA, 1701 nt, Artificial Sequence; identical to SEQ ID NO: 193313
  derived and/or modified CDS sequence (opt5) from hemagglutinin__InfluenzaA__ABI92489

SEQ ID NO: 193369 - RNA, 1701 nt, Artificial Sequence
  derived and/or modified CDS sequence (opt5) from hemagglutinin__InfluenzaA__ABI92500
augaagaccaucauugcccugagcuacauccucugccugguguucgcucagaaacuucccggcaacgacaauuccacagccacgcugugucucgggcaccaugcggucccuaacggaacccugguuaagacaauuaccaaugaucaaaucgaggugacaaacgcuaccgaacuugugcagucuagcuccacaggcgggauuugcgacucuccgcaccagauccuggauggagagaauuguacccucaucgacgcccugcugggcgauccccauugcgacggguuucagaacaaagaaugggaucucuucgucgagagaagcaaggccuauuccaauuguuacccuuaugacgugcccgauuacgcuucucugcggagccuuguugccuccagcggaacgcuggaauuuaacaaugagucuuucaacuggaccggcguggcucaaaauggcacauccagcgccugcaaacgcagaucuaacaaguccuuuuucagccggcucaauuggcugcaccagcuuaaguauaaauacccugcgcugaacgucaccaugcccaauaacgagaaguuugacaaacucuauauuuggggagugcaucacccuucuacagauuccgaccagaucagccuguacgcccaggcuccggggcgcguuaccguguccacgaagagaucucaacagacagucauucccaacaucggcagccggccuugggugcgcgggguguccagcagaauuucuaucuacuggaccauugucaaacccggagauauccugcucaucaauuguacaggcaaccugauugccccucggggguauuucaagauccgcuccggaaagagcucuauuaugagaagcgacgcuuccaucggcaaaugcaauucugaauguauuacccccaacggcagcaucccgaaugacaagccuuuucagaacguuaaucggaucaccuacggggccugcccccgcuaugugaaacagaacacacuuaagcuggcgacgggaaugagaaaugugccugagaaacaaacccggggcauuuucggggccaucgcuggauuuauugaaaacggcugggaggggauggucgauggaugguacggcuuccgccaccaaaauuccgagggcacagggcaggccgcugaccucaagagcacccaggccgugaucaaccagauuaauggaaaacugaacagacuuaucgaaaagacaaaugagaaguuucaucagaucgaaaaagaguucucugaaguugagggccggauucaggaucuggagaaguauguggaagacaccaaaaucgaucucugguccuacaacgccgagcugcuggucgcucucgaaaaccaacacacgauugaccugacagauagcgagaugaauaaacuuuucgaaagaaccaagaagcagcugcgcgagaacgcggaggacauggggaauggauguuuuaagaucuaucauaaaugcgauaacgccugcauuggcucuauccggaaugggaccuacgaccacgauguguacagagacgaagcucucaacaaucgcuuccagauuaagggcguugagcugaaauccggauauaaggacuggauccuuuggaucagcuuugccauuuccuguuuccugcucugcgugguccugcugggcuuuaucaugugggccugucagaaagggaacauucggugcaauaucuguauuuga

SEQ ID NO: 193370 - RNA, 1701 nt, Artificial Sequence
  derived and/or modified CDS sequence (opt5) from hemagglutinin__InfluenzaA__ABI92511
augaagaccaucauugcccugagcuacauccucugccugguguucgcucagaaacuucccggcaacgacaauuccacagccacgcugugucucgggcaccaugcggucccuaacggaacccugguuaagacaauuaccaaugaucaaaucgaggugacaaacgcuaccgaacuugugcagaauagcagcacaggcauuaucugcgacuccccgcaccagauccuggauggggagaacuguacccucauugacgcccugcugggagauccccauugcgacggcuuucagaauaaagaaugggaucucuucgucgagagaucuaaggccuauagcaacuguuacccuuaugacgugcccgauuacgcuucccugcggucucuuguugccagcuccgggacgcuggaauuuaauaacgagagcuucaauuggaccggaguggcucaaaacggcacaucuuccgccugcaaacgcagaagcgacaagucuuucuucucccggcucaauuggcugcaccagcuuaaguauaaauacccugcgcugaacgucaccaugcccaauacagagaaguuugauaaacucuauaucuggggcgugcaucacccuagcaccgacucugaucagauuucccuguacgcccaggcuagcgggcgcguuacgguguccacaaagagaucucaacagaccgucaucccgaacauuggaagccggcccugggugcgcggcguguccagcagagucucuaucuacuggacaauuguuaaaccuggggacauccugcucaucaacuccaccggaaaucugauugcuccccggggcuauuucaagauccgcagcgggaagucuagcauuaugagauccgacgccucuaucggaaaauguaacagcaagugcauuaccccuaauggcuccauccccaacgauaaaccguuucagaaugugaaccggaucacauacggcgccuguccucgcuaugugaagcagaauacgcuuaaacuggcgaccgggaugagaaacguccccgaaaagcaaacacggggaauuuucggcgccaucgcuggguuuauugagaauggaugggaaggcaugguggacgggugguacggauuccgccaccagaacagcgagggcaccggccaggccgcugaucucaaaucuacacaagccgccaucaaucagauuaacgggaagcugaauagacuuaucgagaagaccaacgaaaaauuucaucagaucgagaaggaauuuuccgagguugaaggacggauucaggaccuggagaaauauguggaggauacgaagaucgaccucuggagcuacaaugcugaacugcuggucgcgcucgagaaccaacacacaauugaucugaccgacucugaaaugaacaaacuuuucgagagaaccaagaagcagcugcgcgaaaaugccgaggauaugggcaacgggugcuuuaaaaucuaucauaagugugacaauacaugcauuggauccauccggaacggcaccuacgaucacgacguguacagagacgaggcucucaauaaccgcuuccagauuaaagggguugaacugaagucuggcuauaaagauuggauccuuuggaucuccuuugccauuucuugcuuccugcucugugugguccugcugggauuuaucaugugggccugccagaagggcaauauucgguguaacaucugcauuuga

SEQ ID NO: 193371 - RNA, 1701 nt, Artificial Sequence
  derived and/or modified CDS sequence (opt5) from hemagglutinin__InfluenzaA__ABI92522
augaagaccaucauugcccugagcuacauccucugccugguguucgcucagaaacuucccggcaacgacaauuccacagccacgcugugucucgggcaccaugcggucccuaacggaacccugguuaagacaauuaccaaugaucaaaucgaggugacaaacgcuaccgaacuugugcagucuagcuccacaggcagaauuugcgacucuccgcaccagauccuggauggggagaauuguacccucaucgacgcccugcugggagauccccauugcgacggcuuucagaacaaagaaugggaucucuucgucgagcggagcaaggccuauuccaauuguuacccuuaugacgugcccgauuacguuucucugcgcagccuuguggcuuccagcgggacgcuggaauuuaacaaugagucuuucaacuggaccggagucgcccaaaauggcacauccagcgcuugcaaaagacggucuaacaaguccuuuuucagccgccucaauuggcugcaccagcuuaaguauaaauacccugcccugaacgugaccaugcccaauaacgagaaguuugacaaacucuauauuuggggcguucaucacccugggacagauucugaccagaucucccuguacgcgcaggccagcggaagagugaccgucuccacgaagcggucucaacagacagugauuccgaacaucggcagccgccccugggugagaggggucuccagccggauuucuaucuacuggaccauuguuaaaccuggagauauccugcucaucaauuccacaggcaaccugauugcuccccgcggguauuucaagaucagaagcggaaagucuagcauuaugaaauccgacgccccuaucggcaaguguaauucugaaugcauuacccccaacggcagcaucccgaaugacaaaccuuuucagaacgugaaucggaucaccuacggggcuuguccccgcuaugugaagcagaacacacuuaaacuggccacgggaaugagaaaugucccugagaagcaaacccggggcauuuucggggcgaucgccggauuuauugaaaacggcugggaggggaugauggauggaugguacggcuuccgccaccaaaauuccgagggcacagggcaggcugccgaccucaaaagcacccaggcugccaucaaccagauuaauggaaagcugaacagacuuaucgaaaagacaaaugagaaauuucaucagaucgaaaaggaguucucugaaguggagggccggauucaggaucuggagaaauauguugaagacaccaagaucgaucucugguccuacaacgccgagcugcugguggcucucgaaaaccaacacacgauugaccugacagauagcgagaugaauaaacuuuucgaaagaaccaagaagcagcugcgcgagaacgcggaggacauggggaauggaugcuuuaaaaucuaucauaagugugauaacgccugcauuggcucuauccggaaugggaccuacgaccacgaugucuacagagacgaagcucucaacaaucgcuuccagauuaaaggcguggagcugaaguccggauauaaagacuggauccuuuggaucagcuuugccauuuccugcuuccugcucuguaucguucugcugggcuuuauuaugugggccugccagaaggggaacauccgguguaauauuugcaucuga

SEQ ID NO: 193372 - RNA, 1701 nt, Artificial Sequence
  derived and/or modified CDS sequence (opt5) from hemagglutinin__InfluenzaA__ABI92533
augaagaccaucauugcccugagcuacauccucugccugguguucgcucagaaacuucccggcaacgacaauuccagagccacacugugucucgggcaccaugcggucccuaacggaacgcugguuaagaccauuacaaaugaucaaaucgaggugaccaacgcuacagaacuugugcagucuagcuccaccggccggauuugcgacucuccgcaccagauccuggauggggagaauuguacacucaucgacgcccugcugggagauccccauugcgacggcuuucagaacaaagaaugggaucucuucgucgagcgcagcaaggccuauuccaauuguuacccuuaugacgugcccgauuacguuucucugagaagccuuguggcuuccagcgggacccuggaauuuaacaaugagucuuucaacuggacgggagucgcccaaaauggcaccuccagcgcuugcaaacggcgcucugacaaguccuuuuucagcagacucaacuggcugcaccagcuuaaguauaaauacccugcccugaaugugacaaugcccaacaaugagaaguuugauaaacucuauauuuggggcguucaucacccugggaccgacucugaucagaucucccuguacgcgcaggccagcggacgggugacagucuccaccaagcgcucucaacagacggugauuccgaacaucggcagcagacccugggugcgcggggucuccagccggauuucuaucuacuggacaauuguuaaaccuggagacauccugcucaucaacuccaccggcaaucugauugcucccagaggguauuucaagauccggagcggaaagucuagcauuaugcgcuccgacgccccuaucggcaaauguaacucugaaugcauuacacccaauggcagcaucccgaacgauaagccuuuucagaaugugaacagaaucaccuacgggcccuguccucgguaugugaaacagaauacccuuaagcuggcuacaggaaugcgcaacguccccgagaaacaaacgagaggcauuuucggggccaucgcgggauuuauugaaaauggcugggaggggaugauggacggaugguacggcuuccggcaccagaacuccgagggcaccgggcaggccgcugaucucaagagcacacaagccgcuaucaaucagauuaacggaaaacugaauagacuuaucgaaaagaccaacgagaaguuucaucagaucgaaaaagaguucucugaaguggagggccgcauucaggaccuggagaaguauguugaagauacaaaaaucgaccucugguccuacaaugccgagcugcugguggcccucgaaaaccaacacaccauugaucugacggacagcgagaugaacaaacuuuucgaacggacaaagaagcagcugagagagaaugcugaggauauggggaacggaugcuuuaagaucuaucauaaaugugacaaugcgugcauuggcucuauccgcaacgggaccuacgaucacgacgucuaccgggacgaagcccucaauaacagauuccagauuaagggcguggagcugaaauccggauauaaggauuggauccuuuggaucagcuuugcuauuuccugcuuccugcucuguaucguucugcugggcuuuauuaugugggccugccagaaagggaauauccgcuguaacauuugcaucuga

SEQ ID NO: 193373 - RNA, 1701 nt, Artificial Sequence; identical to SEQ ID NO: 193372
  derived and/or modified CDS sequence (opt5) from hemagglutinin__InfluenzaA__ABI92544

SEQ ID NO: 193374 - RNA, 1701 nt, Artificial Sequence
  derived and/or modified CDS sequence (opt5) from hemagglutinin__InfluenzaA__ABI92577
augaagaccaucauugcccugagcuacauccucugccugguguucgcucagaaacuucccggcaacgacaauuccacagccacgcugugucucgggcaccaugcggucccuaacggaacccugguuaagacaauuaccaaugaucaaaucgaggugacaaacgcuaccgaacuugugcagucuagcuccacaggcagaauuugcgacucuccgcaccagauccuggauggggagaauuguacccucaucgacgcccugcugggagauccccauugcgacggcuuucagaacaaagaaugggaucucuucgucgagcggagccgcgccuauuccaauuguuacccuuaugacgugcccgauuacguuucucugagaagccuuguggcuuccagcgggacgcuggaauuuaacaaugagucuuucaacuggaccggagucgcccaaaauggcacauccagcgcuugcaagcggcgcucugacaaauccuuuuucagcagacucaacuggcugcaccagcuuaaguauaaguacccugcccugaaugugaccaugcccaacaaugagaaauuugauaagcucuauauuuggggcguucaucacccugggacagacucugaucagaucucccuguacgcgcaggccagcggacgggugaccgucuccacgaaacgcucucaacagacagugauuccgaacaucggcagcagacccugggugagaggggucuccagcaagauuucuaucuacuggaccauuguuaaaccuggagacauccugcucaucaacuccacaggcaaucugauugcuccccgcggguauuucaagaucagaagcggaaagucuagcauuaugcgguccgacgccccuaucggcaaauguaacucugaaugcauuacccccaauggcagcaucccgaacgauaagccuuuucagaaugugaaccgcaucaccuacgggcccuguccuagauaugugaaacagaauacacuuaagcuggcuacgggaaugcggaacguccccgagaaacaaacccgcggcauuuucggggccaucgcgggauuuauugaaaauggcugggaggggaugauggacggaugguacggcuucagacaccagaacuccgagggcacagggcaggccgcugaucucaagagcacccaagccgcuaucaaucagauuaacggaaaacugaaucggcuuaucgaaaagacaaacgagaaguuucaucagaucgaaaaagaguucucugaaguggagggccggauucaggaccuggagaaguauguugaagauaccaaaaucgaccucugguccuacaaugccgagcugcugguggcccucgaaaaccaacacacgauugaucugacagacagcgagaugaacaaacuuuucgaacgcaccaagaagcagcugcgggagaaugcugaggauauggggaacggaugcuuuaagaucuaucauaaaugugacaaugcgugcauuggcucuaucagaaacgggaccuacgaucacgacgucuaccgcgacgaagcccucaauaaccgguuccagauuaagggcguggagcugaaauccggauauaaggauuggauccuuuggaucagcuuugcuauuuccugcuuccugcucuguaucguucugcugggcuuuauuaugugggccugccagaaagggaauaucagauguaacauuugcaucuga

SEQ ID NO: 193375 - RNA, 1701 nt, Artificial Sequence; identical to SEQ ID NO: 193111
  derived and/or modified CDS sequence (opt5) from hemagglutinin__InfluenzaA__ABI92588

SEQ ID NO: 193376 - RNA, 1701 nt, Artificial Sequence
  derived and/or modified CDS sequence (opt5) from hemagglutinin__InfluenzaA__ABI92599
augaagaccaucauugcccugagcuacauccucugccugguguucgcucagaaacuucccggcaacgacaauuccacagccacgcugugucucgggcaccaugcggucccuaacggaacccugguuaagacaauuaccaaugaucaaaucgaggugacaaacgcuaccgaacuugugcagucuagcuccacaggcagaauuugcaauucuccgcaccagauccuggacggggagaacuguacccucaucgaugcccugcugggagacccccauugcgauggcuuucagaauaaagaaugggaccucuucgucgagcggagcaaggccuauuccaacuguuacccuuaugaugugcccgacuacguuucucugcgcagccuuguggcuuccagcgggacgcuggaauuuaauaacgagucuuucaauuggaccggagucgcccaaaacggcacauccagcgcuugcaaaagacggucugauaaguccuuuuucagccgccucaauuggcugcaccagcuuaaguauaaauacccugcccugaacgugaccaugcccaauaacgagaaguuugacaaacucuauauuuggggcguucaucacccugggacagauucugaccagaucucccuguacgcgcaggccagcggaagagugaccgucuccacgaagcggucucaacagacagugauuccgaacaucggcagccgccccugggugagaggggucuccagccggauuucuaucuacuggaccauuguuaaaccuggagauauccugcucaucaauuccacaggcaaccugauugcuccccgcggguauuucaagaucagaagcggaaagucuagcauuaugcgguccgacgccccuaucggcaaauguaauucugaaugcauuacccccaacggcagcaucccgaaugacaagccuuuucagaacgugaaucgcaucaccuacggggcuugucccagauaugugaaacagaagacacuuaaacuggccacgggaaugcggaacgucccugagaagcaaacccgcggcauuuucggggcgaucgccggauuuauugaaaauggcugggaggggaugauggauggaugguacggcuucagacaccagaacuccgagggcacagggcaggcugccgaccucaaaagcacccaagcugccaucaaucagauuaacggaaagcugaaucggcuuaucgaaaagacaaacgagaaauuucaucagaucgaaaaggaguucucugaaguggagggccgcauucaggaucuggagaaauauguugaagacaccaagaucgaucucugguccuacaaugccgagcugcugguggcucucgaaaaccaacacacgauugaccugacagauagcgagaugaacaaacuuuucgaaagaaccaagaagcagcugcgggagaaugcggaggacauggggaacggaugcuuuaaaaucuaucauaagugugauaaugccugcauuggcucuaucagaaacgggaccuacgaccacgaugucuaccgcgacgaagcucucaauaaccgguuccagauuaaaggcguggagcugaaguccggauauaaagacuggauccuuuggaucagcuuugccauuuccugcuuccugcucuguaucguucugcugggcuuuauuaugugggccugccagaaggggaauaucagauguaacauuugcaucuga

SEQ ID NO: 193377 - RNA, 1701 nt, Artificial Sequence
  derived and/or modified CDS sequence (opt5) from hemagglutinin__InfluenzaA__ABI92610
augaagaccaucauugcccugagcuacauccucugccugguguucgcucagaaacuucccggcaacgacaauuccacagccacgcugugucucgggcaccaugcggucccuaacggaacccugguuaagacaauuaccaaugaucaaaucgaggugacaaacgcuaccgaacuugugcagucuagcuccacaggcagaauuugcgacucuccgcaccagauccuggauggggagaauuguacccucaucgacgcccugcugggagauccccauugcgacggcuuucagaacaaagaaugggaucucuucgucgagcggagcaaggccuauuccaauuguuacccuuaugacgugcccgauuacguuucucugcgcagccuuguggcuuccagcgggacgcuggaauuuaacaaugagucuuucaacuggaccggagucgcccaaaauggcacauccagcgcuugcaaaagacggucugacaaguccuuuuucagccgccucaacuggcugcaccagcuuaaguauaaauacccugcccugaaugugaccaugcccaacaaugagaaguuugauaaacucuauauuuggggcguucaucacccugggacagacucugaucagaucucccuguacgcgcaggccagcggaagagugaccgucuccacgaagcggucucaacagacagugauuccgaacaucggcagccgccccugggugagaggggucuccagccggauuucuaucuacuggaccauuguuaaaccuggagacauccugcucaucaacuccacaggcaaucugauugcuccccgcggguauuucaagaucagaagcggaaagucuagcauuaugcgguccgacgccccuaucggcaaauguaacucugaaugcauuacccccaauggcagcaucccgaacgauaagccuuuucagaaugugaaccgcaucaccuacggggcuugucccagauaugugaaacagaauacacuuaagcuggccacgggaaugcggaacgucccugagaaacaaacccgcggcauuuucggggcgaucgccggauuuauugaaaauggcugggaggggaugauggacggaugguacggcuucagacaccagaacuccgagggcacagggcaggcugccgaucucaagagcacccaagcugccaucaaucagauuaacggaaaacugaaucggcuuaucgaaaagacaaacgagaaguuucaucagaucgaaaaagaguucucugaaguggagggccgcauucaggaccuggagaaguauguugaagauaccaaaaucgaccucugguccuacaaugccgagcugcugguggcucucgaaaaccaacacacgauugaucugacagacagcgagaugaacaaacuuuucgaaagaaccaagaagcagcugcgggagaaugcggaggauauggggaacggaugcuuuaagaucuaucauaaaugugacaaugccugcauuggcucuaucagaaacgggaccuacgaucacgacgucuaccgcgacgaagcucucaauaaccgguuccagauuaagggcguggagcugaaauccggauauaaggauuggauccuuuggaucagcuuugccauuuccugcuuccugcucuguaucguucugcugggcuuuauuaugugggccugccagaaagggaauaucagauguaacauuugcaucuga

SEQ ID NO: 193378 - RNA, 1701 nt, Artificial Sequence
  derived and/or modified CDS sequence (opt5) from hemagglutinin__InfluenzaA__ABI92621
augaagaccaucauugcccugagcuacauccucugccugguguucgcucagaaacuucccggcaacgacaauuccauggccacacugugucucgggcaccaugcggucccuaacggaacgcugguuaagaccauuacaaaugaucaaaucgaggugaccaacgcuacagaacuugugcagucuagcuccaccggcagaauuugcaauucuccgcaccagauccuggacggggagaacuguacacucaucgaugcccugcugggagacccccauugcgaaggcuuucagaauaaagagugggaucucuucgucgaacggagcaaggccuauuccaacuguuacccuuaugacgugcccgauuacguuucucugcgcagccuuguggcuuccagcgggacccuggaguuuaauaacgagucuuucaauuggacgggagucgcccaaaacggcaccuccagcgcuugcaaaagacggucugacaaguccuuuuucagccgccucaauuggcugcaccagcuuaaguauaaauacccugcccugaacgugacaaugcccaauaacgaaaaguuugauaaacucuauauuuggggcguucaucacccugggaccgacucugaucagaucucccuguacgcgcaggccagcggaagagugacagucuccaccaagcggucucaacagacggugauuccgaacaucggcagccgccccugggugagaggggucuccagcaaaauuucuaucuacuggacaauuguuaagccuggagacauccugcucaucaauuccaccggcaaccugauugcuccccggggguauuucaagauccgcagcggaaaaucuagcauuaugagauccgaugccccuaucgacaaguguaauucugagugcauuacacccaacggcagcaucccgaaugacaaaccuuuucagaacgugaaucggaucaccuacggccuuuguccccgcuaugugaagcagaacacccugaaacucgcuacagggaugagaaaugucccugaaaagcaaacgcggggaauuuucggcgccaucgcgggguuuauugagaacggaugggagggcaugauggaugggugguacggauuccgccaccaaaauuccgaaggcaccggccaggccgcugaccugaaaagcacacaggccgcuaucaaccagauuaaugggaaacuuaacagacugaucgagaagaccaaugaaaaguuucaucagaucgagaaggaguucucugaaguggagggacggauucaggaucucgaaaaauauguugaggacacaaagaucgaucugugguccuacaacgccgaacugcucguggcccuggagaaccaacacaccauugaccuuacggauagcgaaaugaauaaacuguucgagagaacaaagaagcagcuccgcgagaacgcugaagacaugggcaaugggugcuuuaaaaucuaucauaagugugauaacgcgugcauuggaucuauccggaauggcaccuacgaccacgaugucuacagagacgaggcccugaacaaucgcuuccagauuaaagggguggaacuuaaguccggcuauaaagacuggauccuguggaucagcuuugcuauuuccugcuuccuccuguguaucguucugcucggauuuauuaugugggccugccagaagggcaacauccgguguaauauuugcaucuga

SEQ ID NO: 193379 - RNA, 1701 nt, Artificial Sequence; identical to SEQ ID NO: 192634
  derived and/or modified CDS sequence (opt5) from hemagglutinin__InfluenzaA__ABI92632

SEQ ID NO: 193380 - RNA, 1701 nt, Artificial Sequence
  derived and/or modified CDS sequence (opt5) from hemagglutinin__InfluenzaA__ABI92643
augaagaccaucauugcccugagcuacauccucugccugguguucgcucagaaacuucccggcaacgacaauuccacagccacgcugugucucgggcaccaugcggucccuaacggaaccauuguuaagacaaucaccaaugaucaaauugaggugacaaacgcuaccgaacuggugcagucuagcuccacaggcgggaucugcgacucuccgcaccagauccuugauggagagaauuguacccugauugacgcccuccugggcgauccccagugcgacggguuucaaaacaaaaagugggaucuguucgucgaaagaagcaaagccuauuccaauuguuacccuuaugacgugcccgauuacgcuucucuccggagccugguugccuccagcggaacgcuugaguuuaacaaugaaucuuucgacuggaccggcgugacacagaacggcaccuccagcgcuugcaagcgcagaucuaauaaguccuuuuucagccggcugaacuggcucacacaucugaaauauaaguacccugcccuuaaugucaccauccccaacaaugagaaauuugauaagcuguauauuuggggagugcaccauccugggacggacucugaucagaucucccucuacgcgcaggccagcggccgcauuacaguuuccaccaaaagaucucaacagacagugaucccgaacauugggagccggccccgcgucagagacguguccagccggaucucuaucuacuggaccauugugaagccuggagacauccugcugauuaacuccaccggcaaucucaucgcuccccgcggguauuucaagauuagaagcggaaaaucuagcaucaugcgguccgaugccccuaucggcaaguguaacucugagugcauuacacccaauggcagcaucccgaacgacaaaccuuuucagaaugucaaccgcauuacguacggggcuugucccagauauguuaagcagaauacccugaaacuugccacaggaaugcggaacgugccugaaaagcaaacccgcggcaucuucggggcgauugccggauuuaucgagaauggcugggaagggaugguggauggaugguacggcuucagacaccagaacuccgagggcacagggcaggcugccgaccugaaaagcacccaagcugccaucaaucagauuaacggaaagcucaaucggcugaucggcaagacgaacgagaaauuucaccagauugaaaaggaguucucugaagucgaggggagaauccaggaucuugaaaaauauguggaggacacaaagauugaucugugguccuacaaugccgagcuccugguugcucuggaaaaccaacauaccaucgaccucaccgauagcgagaugaacaaacuguucgaacgcacaaagcggcagcuuagagagaaugcggaagacaugggaaacggcugcuuuaagauuuaucacaaaugugauaaugccugcaucgggucuauccgcaacggcaccuacgaccaugacguguaccgggaugaggcucugaauaacagauuccagauuaagggagucgagcucaaauccggcuauaaggacuggauccuguggauuagcuuugccaucuccugcuuccuucuguguguggcccuccugggguuuauuaugugggcuugccagaaaggaaauauccgcuguaacaucugcauuuga

SEQ ID NO: 193381 - RNA, 1701 nt, Artificial Sequence
  derived and/or modified CDS sequence (opt5) from hemagglutinin__InfluenzaA__ABI92665
augaagaccaucauugcccugagcuacauccucugccugguguucgcucagaaacuucccggcaacgacaauuccacagccacgcugugucucgggcaccaugcggucccuaacggaaccauuguuaagacaaucaccaaugaucaaauugaggugacaaacgcuaccgaacuggugcagucuagcuccacaggcgggaucugcgacucuccgcaccagauccuugauggagagaauuguacccugauugacgcccuccugggcgauccccagugcgacggguuucaaaacaaaaagugggaucuguucgucgaaagaagcaaagccuauuccaauuguuacccuuaugacgugcccgauuacgcuucucuccggagccugguugccuccagcggaacgcuugaguuuaacaaugaaucuuucgacuggaccggcgugacacagaacggcaccuccagcgcuugcaagcgcgggucuaauaaguccuuuuucagcagacugaacuggcucacacaucugaaauauaaguacccugcccuuaaugucaccaugcccaacaaugagaaauuugauaagcuguauaucuggggagugcaccauccuggcacggacucugaucagauuucccucuacgcgcaggccagcgggcggaucacaguuuccaccaaacgcucucaacagacagugauuccgaacaucggaagcagaccccggguccgcgacguguccagcagaauuucuaucuacuggaccaucgugaagccuggcgacauucugcugaucaacuccaccgggaaucucauugcuccccggggauauuucaagauccgcagcggcaaaucuagcauuaugagauccgaugccccuaucggcaaguguaacucugagugcaucacacccaaugggagcauuccgaacgacaaaccuuuucagaaugucaaccggaucacguacggagcuuguccccgcuauguuaagcagaauacccugaaacuugccacaggcaugagaaacgugccugaaaagcaaacccgggggauuuucggagcgaucgccggcuuuauugagaaugggugggaaggaaugguggauggcugguacggcuuccgccaccagaacuccgaggggacaggacaggcugccgaccugaaaagcacccaagcugccaucaaucagaucaacggcaagcucaauagacugauugggaagacgaacgagaaauuucaccagaucgaaaaggaguucucugaagucgagggacggauucaggaucuugaaaaauauguggaggacacaaagaucgaucugugguccuacaaugccgagcuccugguugcucuggaaaaccaacauaccauugaccucaccgauagcgagaugaacaaacuguucgaaagaacaaagcgccagcuucgggagaaugcggaagacaugggcaacgggugcuuuaagaucuaucacaaaugugauaaugccugcauuggcucuaucagaaacggaaccuacgaccaugacguguaccgcaaugaggcucugaacaaucgguuccagaucaagggcgucgagcucaaauccggguauaaggauuggauucuguggaucagcuuugccauuuccugcuuccuucuguguguggcccuccugggauuuaucaugugggcuugccagaaaggcaacauuagauguaauaucugcaucuga

SEQ ID NO: 193382 - RNA, 1701 nt, Artificial Sequence
  derived and/or modified CDS sequence (opt5) from hemagglutinin__InfluenzaA__ABI92676
augaagaccaucauugcccugagcuacauccucugccugguguucgcucagaaacuucccggcaacgacaauuccacagccacgcugugucucgggcaccaugcggucccuaacggaaccauuguuaagacaaucaccaaugaucaaauugaggugacaaacgcuaccgaacuggugcagucuagcuccacaggcgggaucugcgacucuccgcaccagauccuugauggagagaauuguacccugauugacgcccuccugggcgauccccagugcgacggguuucaaaacaaaaagugggaucuguucgucgaaagaagcaaagccuauuccaauuguuacccuuaugacgugcccgaucaugcuucucuccggagccugguugccuccagcggaacgcuugaguuuaacaaugaaucuuucgacuggaccggcgugacacagaacggcaccuccagcgcuugcaagcgcagaucuaauaaguccuuuuucagccggcugaacuggcucacacaccugaaauacaaguauccugcccuuaaugucaccaugcccaacaaugagaaauuugauaagcuguacaucuggggagugcaucacccugggacggacucugaucagauuucccucuaugcgcaggccagcggccgcaucacaguuuccaccaaaagaucucaacagacagugauuccgaacaucgggagccggccccgcgucagagacguguccagccggauuucuaucuacuggaccaucgugaagccuggagacauucugcugaucaacuccaccggcaaucucauugcuccccgcggguacuucaagaucagaaacggaaaaagcucuauuaugcggagcgaugccccuaucggcaaguguaauuccgagugcaucacacccaacggcucuauuccgaaugacaaaccuuuucagaacgucaaucgcaucacguauggggcuugucccagauacguuaagcagaacacccugaaacuugccacaggaaugcggaaugugccugaaaagcaaacccgcggcauuuucggggcgaucgccggauuuauugagaacggcugggaagggaugguggauggaugguauggcuucagacaccagaauagcgagggcacagggcaggcugccgaccugaaauccacccaagcugccaucaaccagaucaauggaaagcucaaccggcugauuggcaagacgaaugagaaauuucaucagaucgaaaaggaguucagcgaagucgaggggcgcauucaggaucuugaaaaauacguggaggacacaaagaucgaucuguggucuuauaacgccgagcuccugguugcucuggaaaaccaacacaccauugaccucaccgauuccgagaugaauaaacuguucgaaagaacaaagaagcagcuucgggagaacgcggaagacaugggaaauggcugcuuuaaaaucuaccauaagugugauaacgccugcauugggagcaucagaaauggcaccuaugaccacgacguguaccgcgaugaggcucugaacaaucgguuccagaucaaaggagucgagcucaagucuggcuacaaagacuggauucuguggaucuccuuugccauuagcugcuuccuucuguguguggcccuccugggguuuaucaugugggcuugccagaagggaaacauuagauguaauaucugcaucuga

SEQ ID NO: 193383 - RNA, 1701 nt, Artificial Sequence
  derived and/or modified CDS sequence (opt5) from hemagglutinin__InfluenzaA__ABI92687
augaagaccaucauugcccugagcuacauccucugccugguguucgcucagaaacuucccggcaacgacaauuccacagccacgcugugucucgggcaccaugcggucccuaacggaaccauuguuaagacaaucaccaaugaucaaauugaggugacaaacgcuaccgaacuggugcagucuagcuccacaggcgggaucugcgacucuccgcaccagauccuugauggagagaauuguacccugauugacgcccuccugggcgauccccagugcgacggguuucaaaacaaaaagugggaucuguucgucgaaagaagcaaagccuauuccaauuguuacccuuaugacgugcccgauuacgcuucucuccggagccugguugccuccagcggaacgcuugaguuuaacaaugaaucuuucgacuggaccggcgugacacagaacggcaccuccagcgcuugcaagcgcgggucuaauaaguccuuuuucagcagacugaacuggcucacacaucugaaauauaaguacccugcccuuaaugucaccaugcccaacaaugagaaauuugauaagcuguauaucuggggagugcaccauccuggcacggacucugaucagauuucccucuacgcgcaggccagcgggcggaucacaguuuccaccaaacgcucucaacagacagugauuccgaacaucggaagcagaccccggguccgcgacguguccagcagaauuucuaucuacuggaccaucgugaagccuggcgacauucugcugaucaacuccaccgggaaucucauugcuccccggggauauuucaagauccgcagcggcaaaucuagcauuaugagauccgaugccccuaucggcaaguguaacucugagugcaucacacccaaugggagcauuccgaacgacaaaccuuuucagaaugucaaccggaucacguacggagcuuguccccgcuauguuaagcagaauacccugaaacuugccacaggcaugagaaacgugccugaaaagcaaacccgggggauuuucggagcgaucgccggcuuuauugagaaugggugggaaggaaugguggauggcugguacggcuuccgccaccagaacuccgaggggacaggacaggcugccgaccugaaaagcacccaagcugccaucaaucagaucaacggcaagcucaauagacugauugggaagacgaacgagaaauuucaccagaucgaaaaggaguucucugaagucgagggacggauucaggaucuugaaaaauauguggaggacacaaagaucgaucugugguccuacaaugccgagcuccugguugcucuggaaaaccaacauaccauugaccucaccgauagcgagaugaacaaacuguucgaaagaacaaagcgccagcuucgggagaaugcggaagacaugggcaacgggugcuuuaagaucuaucacaaaugugauaaugccugcauuggcucuaucagaaacggaaccuacgaccaugacguguaccgcgaugaggcucugaauaaccgguuccagaucaagggcgucgagcucaaauccggguauaaggacuggauucuguggaucagcuuugccauuuccugcuuccuucuguguguggcccuccugggauuuaucaugugggcuugccagaaaggcaauauuagauguaacaucugcaucuga

SEQ ID NO: 193384 - RNA, 1701 nt, Artificial Sequence; identical to SEQ ID NO: 193383
  derived and/or modified CDS sequence (opt5) from hemagglutinin__InfluenzaA__ABI92698

SEQ ID NO: 193385 - RNA, 1701 nt, Artificial Sequence; identical to SEQ ID NO: 192588
  derived and/or modified CDS sequence (opt5) from hemagglutinin__InfluenzaA__ABI92709

SEQ ID NO: 193386 - RNA, 1701 nt, Artificial Sequence
  derived and/or modified CDS sequence (opt5) from hemagglutinin__InfluenzaA__ABI92720
augaagaccaucauugcccugagcuacauccucugccugguguucgcucagaaacuucccggcaacgacaauuccacagccacgcugugucucgggcaccaugcggucccuaacggaaccauuguuaagacaaucaccaaugaucaaauugaggugacaaacgcuaccgaacuggugcagucuagcuccacaggcgggaucugcgacucuccgcaccagauccuugauggagagaauuguacccugauugacgcccuccugggcgauccccagugcgacggguuucaaaacaaaaagugggaucuguucgucgaaagaagcaaagccuauuccaauuguuacccuuaugacgugcccgaucaugcuucucuccggagccugguugccuccagcggaacgcuugaguuuaacaaugaaucuuucgacuggaccggcgugacacagaacggcaccuccagcgcuugcaagcgcagaucuaauaaguccuuuuucagccggcugaacuggcucacacaccugaaauacaaguauccugcccuuaaugucaccaugcccaacaaugagaaauuugauaagcuguacaucuggggagugcaucacccugggacggagucugaccagauuucccucuaugcgcaggccagcggccgcaucacaguuuccaccaaaagaucucaacagacagugauuccgaacaucgggagccggccccgcgucagagauguguccagccggauuucuaucuacuggaccaucgugaagccuggagacauucugcugaucaacuccaccggcaaucucauugcuccccgcggguacuucaagaucagaagcggaaaaucuagcauuaugcgguccgacgccccuaucggcaaguguaacucugaaugcaucacacccaauggcagcauuccgaacgauaaaccuuuucagaaugucaaccgcaucacguauggggcuugucccagauacguuaagcagaauacccugaaacuugccacaggaaugcggaacgugccugagaagcaaacccgcggcauuuucggggcgaucgccggauuuauugaaaauggcugggaggggaugguggacggaugguauggcuucagacaccagaacuccgagggcacagggcaggcugccgaucugaaaagcacccaagcugccaucaaucagaucaacggaaagcucaaucggcugauuggcaagacgaacgaaaaauuucaucagaucgagaaggaguucucugaagucgaagggcgcauucaggaccuugagaaauacguggaggauacaaagaucgaccugugguccuauaaugccgaacuccugguugcucuggagaaccaacacaccauugaucucaccgacagcgaaaugaacaaacuguucgagagaacaaagaagcagcuucgggaaaaugcggaggauaugggaaacggcugcuuuaaaaucuaccauaagugugacaaugccugcauugggucuaucagaaacggcaccuaugaucacgacguguaccgcgacgaggcucugaauaaccgguuccagaucaaaggagucgaacucaaguccggcuacaaagauuggauucuguggaucagcuuugccauuuccugcuuccuucuguguguggcccuccugggguuuaucaugugggcuugccagaagggaaauauuagauguaacaucugcaucuga

SEQ ID NO: 193387 - RNA, 1701 nt, Artificial Sequence
  derived and/or modified CDS sequence (opt5) from hemagglutinin__InfluenzaA__ABI92731
augaagaccaucauugcccugagcuacauccucugccugguguucgcucagaaacuucccggcaacgacaauuccacagccacgcugugucucgggcaccaugcggucccuaacggaaccauuguuaagacaaucaccaaugaucaaauugaggugacaaacgcuaccgaacuggugcagucuagcuccacaggcgggaucugcgacucuccgcaccagauccuugauggagagaauuguacccugauugacgcccuccugggcgauccccagugcgacggguuucaaaacaaaaagugggaucuguucgucgaaagaagcaaagccuauuccaauuguuacccuuaugacgugcccgauuacgcuucucuccggagccugguugccuccagcggaacgcuugaguuuaacaaugaaucuuucgacuggaccggcgugacacagaacggcaccuccagcgcuugcaagcgcagaucuaauaaguccuuuuucagccggcugaacuggcucacacaucugaaauauaaguacccugcccuuaaugucaccaugcccaacaaugagaaauuugauaagcuguauaucuggggagugcaccauccugggacggacucugaucagauuucccucuacgcgcaggccagcggccgcaucacaguuuccaccaaaagaucucaacagacagugauuccgaacaucgggagccggccccgcgucagagacguguccagccggauuucuaucuacuggaccaucgugaagccuggagacauucugcugaucaacuccaccggcaaucucauugcuccccgcggguauuucaagaucagaagcggaaaaucuagcauuaugcgguccgaugccccuaucggcaaguguaacucugagugcaucacacccaauggcagcauuccgaacgacaaaccuuuucagaaugucaaccgcaucacguacggggcuugucccagauauguuaagcagaauacccugaaacuugccacaggaaugcggaacgugccugaaaagcaaacccgcggcauuuucggggcgaucgccggauuuauugagaauggcugggaagggaugguggauggaugguacggcuucagacaccagaacuccgagggcacagggcaggcugccgaccugaaaagcacccaagcugccaucaaucagaucaacggaaagcucaaucggcugauuggcaagacgaacgagaaauuucaccagaucgaaaaggaguucucugaagucgaggggcgcauucaggaucuugaaaaauauguggaggacacaaagaucgaucugugguccuacaaugccgagcuccugguugcucuggaaaaccaacauaccauugaccucaccgauagcgagaugaacaaacuguucgaaagaacaaagcggcagcuuagagagaaugcggaagacaugggaaacggcugcuuuaagaucuaucacaaaugugauaaugccugcauugggucuauccgcaacggcaccuacgaccaugacguguaccgggaugaggcucugaauaacagauuccagaucaagggagucgagcucaaauccggcuauaaggacuggauucuguggaucagcuuugccauuuccugcuuccuucuguguguggcccuccugggguuuaucaugugggcuugccagaaaggaaauauucgcuguaacaucugcaucuga

SEQ ID NO: 193388 - RNA, 1701 nt, Artificial Sequence
  derived and/or modified CDS sequence (opt5) from hemagglutinin__InfluenzaA__ABI92742
augaagaccaucauugcccugagcuacauccucugccugguguucucccagaaacuucccggcaacgacaauucuacagcuacgcugugucucgggcaccaugccgucccuaacggaaccauuguuaagacaaucaccaaugaucaaauugaggugacaaacgcgaccgaacuggugcagagcuccucuacaggcgggaucugcgacagcccgcaccagauccuugauggagagaauuguacccugauugacgcucuccugggcgauccccagugcgacggguuucaaaacaaaaagugggaucuguucgucgaaagauccaaagccuauucuaauuguuacccuuaugacgugcccgaucaugccagccuccggucccugguugcuagcucuggaacgcuugaguuuaacaaugaauccuucgacuggaccggcgugacacagaacggcaccagcucugccugcaagcgcagauccaauaagagcuuuuucucucggcugaacuggcucacacaccugaaauacaaguauccugcucuuaaugucaccaugcccaacaaugagaaauuugauaagcuguacaucuggggagugcaucacccugggacggacuccgaucagauuagccucuaugcccaggcguccggccgcaucacaguuucuaccaaaagaagccaacagacagugauuccgaacaucgggucccggccccgcgucagagacgugagcucucggauuuccaucuacuggaccaucgugaagccuggagacauucugcugaucaacagcaccggcaaucucauugcccccagaggguacuucaagaucagaucuggaaaaagcuccauuaugcggucugaugcuccuaucggcaaguguaacagcgagugcaucacacccaauggcuccauuccgaacgacaaaccuuuucagaaugucaaccgcaucacguauggggccugucccagauacguuaagcagaauacccugaaacuugcuacaggaaugcggaacgugccugaaaagcaaacccgcggcauuuucggggccaucgcgggauuuauugagaauggcugggaagggaugguggauggaugguauggcuucagacaccagaacagcgagggcacagggcaggccgcugaccugaaaucuacccaagccgcuaucaaucagaucaacggaaagcucaaucggcugauuggcaagacgaacgagaaauuucaucagaucgaaaaggaguucuccgaagucgaggggcgcauucaggaucuugaaaaauacguggaggacacaaagaucgaucuguggagcuauaaugccgagcuccugguugcccuggaaaaccaacacaccauugaccucaccgauucugagaugaacaaacuguucgaacgcacaaagaagcagcuucgggagaaugcugaagacaugggaaacggcugcuuuaaaaucuaccauaagugugauaaugcgugcauuggguccaucagaaacggcaccuaugaccacgacguguaccgcgaugaggcccugaauaaccgguuccagaucaaaggagucgagcucaagagcggcuacaaagacuggauucuguggaucuccuuugcuauuucuugcuuccuucuguguguggcccuccugggguuuaucaugugggccugccagaagggaaauauuagauguaacaucugcaucuga

SEQ ID NO: 193389 - RNA, 1701 nt, Artificial Sequence
  derived and/or modified CDS sequence (opt5) from hemagglutinin__InfluenzaA__ABI92753
augaagaccaucauugcccugagcuacauccucugccugguguucgcucagaaacuucccggcaacgacaauuccacagccacgcugugucucgggcaccaugcggucccuaacggaaccauuguuaagacaaucaccaaugaucaaauugaggugacaaacgcuaccgaacuggugcagucuagcuccacaggcgggaucugcgacucuccgcaccagauccuugauggagagaauuguacccugauugacgcccuccugggcgauccccagugcgacggguuucaaaacaaaaagugggaucuguucgucgaaagaagcaaagccuauuccaauuguuacccuuaugacgugcccgauuacgcuuaucuccggucucugguugccagcuccggaacgcuugaguuuaacaaugaaucuuucgacuggaccggcgugacacagaacggcaccucuuccgcuugcaagcgcagaagcaauaagagcuuuuucucccggcugaacuggcucacacaucugaaauacaaguauccugcccuuaaugucaccaugcccaacaaugagaaauuugauaagcuguacaucuggggagugcaccauccugggacggacagcgaucagauuucucucuacgcgcaggccuccggccgcaucacaguuagcaccaaaagaucccaacagacagugauuccgaacaucgggucucggccccgcgucagagacgugagcucccggauuagcaucuauuggaccaucgugaagccuggagacauucugcugaucaacucuaccggcaaucucauugcuccccgcggguacuucaagaucagauccggaaaaagcucuauuaugcggagcgaugccccuaucggcaaguguaacuccgagugcaucacacccaauggcucuauuccgaacgacaaaccuuuucagaaugucaaccgcaucacguauggggcuugucccagauacguuaagcagaauacccugaaacuugccacaggaaugcggaacgugccugaaaagcaaacccgcggcauuuucggggcgaucgccggauuuauugagaauggcugggaagggaugguggauggaugguauggcuucagacaccagaacagcgagggcacagggcaggcugccgaccugaaauccacccaagcugccaucaaucagaucaacggaaagcucaaucggcugauuggcaagacgaacgagaaauuucaccagaucgaaaaggaguucagcgaagucgaggggcgcauucaggaucuugaaaaauacguggaggacacaaagaucgaucuguggucuuauaaugccgagcuccugguugcucuggaaaaccaacauaccauugaccucaccgauuccgagaugaacaaacuguucgaaagaacaaagcggcagcuuagagagaaugcggaagacaugggaaacggcugcuuuaagaucuaccacaaaugugauaaugccugcauugggagcauccgcaacggcaccuacgaccaugacguguaucgggaugaggcucugaauaacagauuccagaucaagggagucgagcucaaaucuggcuacaaggacuggauucuguggaucuccuuugccauuagcugcuuccuucuguguguggcccuccugggguuuaucaugugggcuugccagaaaggaaauauucgcuguaacaucugcaucuga

SEQ ID NO: 193390 - RNA, 1701 nt, Artificial Sequence
  derived and/or modified CDS sequence (opt5) from hemagglutinin__InfluenzaA__ABI92764
augaagaccaucauugcccugagcuacauccucugccugguguucgcucagaaacuucccggcaacgacaauuccacagccacgcugugucucgggcaccaugcggucccuaacggaaccauuguuaagacaaucaccaaugaucaaauugaggugacaaacgcuaccgaacuggugcagucuagcuccacaggcgagaucugcgacucuccgcaccagauccuugauggggaaaauuguacccugauugacgcccuccugggagauccccagugcgacggcuuucaaaacaaaaagugggaucuguucgucgagagaagcaaagccuauuccaauuguuacccuuaugacgugcccgauuacgcuucucuccggagccugguugccuccagcgggacgcuugaauuuaacaaugagucuuucgacuggaccggagugacacagaacggcaccuccagcgcuugcaagcgcggcucuaauaaguccuuuuucagcagacugaacuggcucacacaucugaaauauaaguacccugcccuuaaugucaccaugcccaacaaugagaaauuugauaagcuguauaucuggggagugcaccauccugggacggacucugaucagauuucccucuacgcgcaggccagcggccggaucacaguuuccaccaaacgcucucaacagacagugauuccgaacaucgggagcagaccccggguccgcgacguguccagcagaauuucuaucuacuggaccaucgugaagccuggagacauucugcugaucaacuccaccggcaaucucauugcuccccggggguauuucaagauccgcagcggaaaaucuagcauuaugagauccgaugccccuaucggcaaguguaacucugaaugcaucacacccaauggcagcauuccgaacgacaaaccuuuucagaaugucaaccggaucacguacggggcuuguccccgcuauguuaagcagaauacccugaaacuugccacaggaaugagaaacgugccugagaagcaaacccggggcauuuucggggcgaucgccggauuuauugaaaauggcugggaggggaugguggauggaugguacggcuuccgccaccagaacuccgagggcacagggcaggcugccgaccugaaaagcacccaagcugccaucaaucagaucaacggaaagcucaauagacugauuggcaagacgaacgaaaaauuucaccagaucgagaaggaguucucugaagucgaagggcggauucaggaucuugagaaauauguggaggacacaaagaucgaucugugguccuacaaugccgaacuccugguugcucuggagaaccaacauaccauugaccucaccgauagcgaaaugaacaaacuguucgagagaacaaagcgccagcuucgggaaaaugcggaggacaugggaaacggcugcuuuaagaucuaucacaaaugugauaaugccugcauugggucuaucagaaacggcaccuacgaccaugacguguaccgcgaugaggcucugaauaaccgguuccagaucaagggagucgaacucaaauccggcuauaaggacuggauucuguggaucagcuuugccauuuccugcuuccuucuguguguggcccuccugggguuuaucaugugggcuugccagaaaggaaauauuagauguaacaucugcaucuga

SEQ ID NO: 193391 - RNA, 1701 nt, Artificial Sequence; identical to SEQ ID NO: 193383
  derived and/or modified CDS sequence (opt5) from hemagglutinin__InfluenzaA__ABI92775

SEQ ID NO: 193392 - RNA, 1701 nt, Artificial Sequence; identical to SEQ ID NO: 192315
  derived and/or modified CDS sequence (opt5) from hemagglutinin__InfluenzaA__ABI92786

SEQ ID NO: 193393 - RNA, 1701 nt, Artificial Sequence
  derived and/or modified CDS sequence (opt5) from hemagglutinin__InfluenzaA__ABI92797
augaagaccaucauugcccugagcuacauccucugccugguguucgcucagaaacuucccggcaacgacaauuccacagccacgcugugucucgggcaccaugcggucccuaacggaaccauuguuaagacaaucaccaaugaucaaauugaggugacaaacgcuaccgaacuggugcagucuagcuccacaggcgggaucugcgacucuccgcaccagauccuugauggagagaauuguacccugauugacgcccuccugggcgauccccagugcgacggguuucaaaacaaaaagugggaucuguucgucgaaagaagcaaagccuauuccaauuguuacccuuaugacgugcccgauuacgcuucucuccggagccugguugccuccagcggaacgcuugaguuuaacaaugaaucuuucaacuggaccggcgugacacagaauggcaccuccagcgcuugcaagcgcagaucuaacaauuccuuuuucagccggcugaacuggcucacacaucugaaguuuaaauauccugcccuuaaugucaccaugcccaacaacgagaaguucgacaaacuguacaucuggggagugcaccauccugggacggauaaugaccagauuucucucuaugcgcaggccuccggccgcaucacaguuagcaccaagagaucccaacagacagugauuucuaacaucgggagccggccgcgcgucagagauauucccucccggaucagcaucuacuggaccauugugaaaccuggagacauccugcugauuaauucuaccggcaaccucaucgcuccccgcggguacuuuaagauuagauccggaaagagcucuaucaugcggagcgacgccccuaucggcaaauguaauuccgagugcauuacacccaacggcucuaucccgaaugauaagccuuuccagaacgugaaucgcauuacguauggggcuugucccagauacgucaaacagaacacccugaaacuugccacaggaaugcggaauguuccugaaaagcaaacccgcggcaucuuuggggcgauugccggauucaucgagaacggcugggaagggaugguggacggaugguauggcuuuagacaccagaauagcgagggcaucgggcaggcugccgaucugaaguccacacaagcugccauuaaccagaucaauggaaaacucaaccggcugauuggcaagaccaacgagaaguuccaccagaucgaaaaagaguucagcgaaguggaggggcgcauucaggaccuugaaaaguacgucgaggauacgaaaaucgaccuguggucuuauaaugccgagcuccugguggcucuggaaaaccaacauacaauugaucucaccgacuccgagaugaauaagcuguuugaaagaaccaaaaagcagcuucgggagaacgcggaagauaugggaaauggcugcuucaagaucuaccacaaaugugacaacgccugcaucgggagcauuagaaauggcacauaugaucaugacguuuaccgcgacgaggcucugaacaaucgguuucagaucaagggaguggagcucaaaucuggcuacaaggauuggauucuguggaucuccuucgccauuagcugcuuucuucugugugucgcccuccugggguucaucaugugggcuugccagaaaggaaacaucagauguaauauuugcaucuga

SEQ ID NO: 193394 - RNA, 1701 nt, Artificial Sequence; identical to SEQ ID NO: 192315
  derived and/or modified CDS sequence (opt5) from hemagglutinin__InfluenzaA__ABI92808

SEQ ID NO: 193395 - RNA, 1701 nt, Artificial Sequence; identical to SEQ ID NO: 192315
  derived and/or modified CDS sequence (opt5) from hemagglutinin__InfluenzaA__ABI92819

SEQ ID NO: 193396 - RNA, 1701 nt, Artificial Sequence; identical to SEQ ID NO: 192315
  derived and/or modified CDS sequence (opt5) from hemagglutinin__InfluenzaA__ABI92841

SEQ ID NO: 193397 - RNA, 1701 nt, Artificial Sequence
  derived and/or modified CDS sequence (opt5) from hemagglutinin__InfluenzaA__ABI92852
augaagaccaucauugcccugagcuacauccucugccugguguucgcucagaaacuucccggcaacgacaauuccacagccacgcugugucucgggcaccaugcggucccuaacggaaccauuguuaagacaaucaccaaugaucaaauugaggugacaaacgcuaccgaacuggugcagucuagcuccacaggcgggaucugcgacucuccgcaccagauccuugauggagagaauuguacccugauugacgcccuccugggcgauccccagugcgacggguuucaaaacaaaaagugggaucuguucgucgaaagaagcaaagccuauuccaauuguuacccuuaugacgugcccgauuacgcuucucuccggagccugguugccuccagcggaacgcuugaguuuaacaaugaaucuuucaacuggaccggcgugacacagaauggcaccuccagcgcuugcaagcgcagaucuaacaauuccuuuuucagccggcugaacuggcucacacaucugaaguuuaaauauccugcccuuaaugucaccaugcccaacaacgagaaguucgacaaacuguacaucuggggagugcaccauccugggacggauaaugaccagauuucucucuaugcgcaggccuccggccgcaucacaguuagcaccaagagaucccaacagacagugauuccgaacaucggguaccggccccgcgucagagauauuccuucucggaucagcaucuacuggaccauugugaaacccggagacauccugcugauuaauuccaccggcaaccucaucgcuccucgcggguauuuuaagauuagaagcggaaagucuuccaucaugcggagcgacgcccccaucggcaaauguaauucugagugcauuacaccgaacggcagcaucccuaaugauaagcccuuccagaacgugaaucgcauuacguacggggcuuguccuagauaugucaaacagaacacccugaaacuugccacaggaaugcggaauguucccgaaaagcaaacccgcggcaucuuuggggcgauugccggauucaucgagaacggcugggaagggaugguggacggaugguacggcuuuagacaccaaaauuccgagggcaucgggcaggcugccgaucugaagucuacacaggcugccauuaaccagaucaauggaaaacucaaccggcugauuggcaagaccaacgagaaguuccaccagaucgaaaaagaguucagcgaaguggaggggcgcauucaggaccuugaaaaguaugucgaggauacgaaaaucgaccugugguccuacaaugccgagcuccugguggcucuggaaaaccaacauacaauugaucucaccgacagcgagaugaauaagcuguuugaaagaaccaaaaagcagcuucgggagaacgcggaagauaugggaaauggcugcuucaagaucuaucacaaaugugacaacgccugcaucgggucuauuagaaauggcacauacgaucaugacguuuaccgcgacgaggcucugaacaaucgguuucagaucaagggaguggagcucaaauccggcuauaaggauuggauucuguggaucagcuucgccauuucuugcuuucuucugugugucgcccuccugggguucaucaugugggcuugccagaaaggaaacaucagauguaauauuugcaucuga

SEQ ID NO: 193398 - RNA, 1701 nt, Artificial Sequence
  derived and/or modified CDS sequence (opt5) from hemagglutinin__InfluenzaA__ABI92863
augaagaccaucauugcccugagcuacauccucugccugguguucgcucagaaacuucccggcaacgacaauuccacagccacgcugugucucgggcaccaugcggucccuaacggaaccauuguuaagacaaucaccaaugaucaaauugaggugacaaacgcuaccgaacuggugcagucuagcuccacaggcgggaucugcgacucuccgcaccagauccuugauggagagaauuguacccugauugacgcccuccugggcgauccccagugcgacggguuucaaaacaaaaagugggaucuguucgucgaaagaagcaaagcccauuccaauuguuauccuuacgacgugcccgauuaugcuucucuccggagccugaucgccuccagcggaacgcuugaguuuaacaaugaaucuuucaacuggaccggcguuacacagaauggcaccuccagcgcuugcaagcgcagaucuaaccaguccuuuuucagccggcugaauuggcucacacaccugaaguuuaaauacccugcccuuaacgugaccaugcccaauaacgagaaguucgacaaacuguauauuuggggaguccaucacccugggacggauucugaccagaucucccucuacgcgcaagccccgggccgcauuacagugagcaccaagagaucccagcagacaguuauccccaacauugggucucggccucgcgugagagauaucagcucccggaucagcauuuauuggaccaucgucaaacccggagacauucugcugaucaauucuaccggcaaccucauugcuccucgcggguacuuuaagaucagauccggaaagagcucuaucaugaaaagcgacgcccccauuggccgguguaauuccgagugcaucacaccgaacggcucuauuccuaaugauaagcccuuccagaacgugaaucgcaucacguacggggcuuguccuagauaugugaaacaaaacacccugaaacuugccacaggaaugcggaauguccccgaaaaacagacccgcggcauuuuuggggcgaucgccggauucaucgagaacggcugggaagggaugguugacggaugguacggcuuuagacaccagaauagcgagggcacagggcaagcugccgaucugaaguccacccaggcugccauuaaccagaucaauggaaaacucaaccggcugauuggcaagacgaaugagaaguuccaucagaucgaaaaagaguucagcgaaguggaggggcgcauucaagaccuugaaaaguauguggaggauacaaaaaucgaccuguggucuuacaacgccgagcuccuggucgcucuggaaaaccagcacaccauugaucucaccgacuccgagaugaauaagcuguuugaaagaacaaagaagcagcuucgggagaacgcggaagauaugggaaauggcugcuucaagaucuaucauaaaugugacaacgccugcaucgggagcauuagaaauggcaccuacgaucacgacguguaucgcgacgaggcucugaacaaucgguuucagaucaagggaguugagcucaaaucuggcuacaaggauuggauucuguggaucuccuucgccauuagcugccuucugcucuguguggcccugcugggguuuaucaugugggcuugccaaaaaggaaacaucagauguaauauuugcaucuga

SEQ ID NO: 193399 - RNA, 1701 nt, Artificial Sequence; identical to SEQ ID NO: 192315
  derived and/or modified CDS sequence (opt5) from hemagglutinin__InfluenzaA__ABI92874

SEQ ID NO: 193400 - RNA, 1701 nt, Artificial Sequence; identical to SEQ ID NO: 192315
  derived and/or modified CDS sequence (opt5) from hemagglutinin__InfluenzaA__ABI92885

SEQ ID NO: 193401 - RNA, 1701 nt, Artificial Sequence
  derived and/or modified CDS sequence (opt5) from hemagglutinin__InfluenzaA__ABI92907
augaagaccaucauugcccugagcuacauccucugccugguguucgcucagaaacuucccggcaacgacaauuccacagccacgcugugucucgggcaccaugcggucccuaacggaaccauuguuaagacaaucaccaaugaucaaauugaggugacaaacgcuaccgaacuggugcagucuagcuccacaggcgggaucugcgacucuccguaucagauccuugauggagagaauuguacccugauugacgcccuccugggcgauccccagugcgacggguuucaaaacaaaaagugggaucuguucgucgaaagaagcaaagccuacuccaauuguuauccuuacgacgugcccgauuauguuucucuccggagccugguggcuuccagcggaacgcuugaguuuaacaaugaaucuuucaacuggaccggcgucacacagaauggcaccuccagcgccugcaagcgcagaucuaacaauuccuuuuucagccggcugaacuggcucacacaccugaaguuuaaauacccugcucuuaaugugaccaugcccaacaacgagaaguucgacaaacuguauaucuggggaguucaucacccugggacggauaaugaccagauuucucucuacgcccaggcguccggccgcaucacagugagcaccaagagaucccaacagacagucauuccgaacaucgggucucggccccgcgugagagauauuccuagccggaucuccaucuacuggaccauugugaaacccggagacauccugcugauuaauagcaccggcaaccucaucgccccucgcggguauuuuaagauuagaucuggaaaguccagcaucaugcggucugacgcucccaucggcaaauguaauagcgagugcauuacaccgaacggcuccaucccuaaugauaagcccuuccagaacgucaaucgcauuacguacggggccuguccuagauauguuaaacagaacacccugaagcuggcuacaggaaugcggaaugugcccgaaaaacaaacccgcggcaucuuuggggccauugcgggauucaucgagaacggcugggaagggaugguggacggaugguacggcuuuagacaucaaaauucugagggcaucgggcaggccgcugaucuuaagagcacacaggccgcuauuaaccagaucaauggaaaacucaaccggcugauuggcaagaccaacgagaaguuccaccagaucgaaaaagaguucuccgaagucgaggggcgcauucaggaccuugaaaaguauguggaggauacgaaaaucgaccuguggagcuacaaugccgagcuccugguugcccuggaaaaccaacacacaauugaucucaccgacucugagaugaauaagcuguuugaaagaaccaaaaagcagcuucgggagaacgcugaagauaugggaaauggcugcuucaagaucuaucauaaaugugacaacgcgugcaucggguccauuagaaauggcacauacgaucacgacguguaccgcgacgaggcccugaacaaucgguuucagaucaagggagucgagcucaaaagcggcuauaaggauuggauucuguggaucucuuucgcuauuuccugcuuucuucuguguguggcccuccugggguucaucaugugggccugccagaaaggaaacaucagauguaauauuugcaucuga

SEQ ID NO: 193402 - RNA, 1701 nt, Artificial Sequence; identical to SEQ ID NO: 192315
  derived and/or modified CDS sequence (opt5) from hemagglutinin__InfluenzaA__ABI92918

SEQ ID NO: 193403 - RNA, 1701 nt, Artificial Sequence; identical to SEQ ID NO: 193401
  derived and/or modified CDS sequence (opt5) from hemagglutinin__InfluenzaA__ABI92929

SEQ ID NO: 193404 - RNA, 1701 nt, Artificial Sequence
  derived and/or modified CDS sequence (opt5) from hemagglutinin__InfluenzaA__ABI92940
augaagaccaucauugccuucaacuacauccugugccucguguuugcucagaaacugcccggcaaugacaacagcacagccacgcuuugucuggggcaccaugcggucccuaauggaaccauuguuaagacaaucaccaacgaucaaauugaggugacaaaugcuaccgaacucgugcaguccucuagcacaggcgggaucugcgacuccccgcaccagauccuggauggagagaacuguacccuuauugacgcccugcucggcgauccccagugcgacggguuccaaaauaaaaagugggaucuguuugucgaaagaucuaaagccuauagcaacuguuacccuuaugacgugcccgauuacgcuucccugcggucucucguugccagcuccggaacgcuggaguucaauaacgaaaucuuuaauuggaccggcgugacacagaacggcaccagcucugcuugcaagcgcagauccaauaacagcuucuuuucucggcuuaauuggcugacacaucucaaguucaaauauccugcccugaacgucaccaugcccaacaaugagaaguuugacaaacuuuacauuuggggagugcaccauccugggacggauaacgaccagaucucccuguaugcgcaggccagcggccgcauuacaguuucuaccaagagaucccaacagacagugaucccgaauauugggagccggccccgcgucagagauaucccuucccggaucucuauuuacuggaccaucgugaaacccggagacauucuccugaucaacagcaccggcaaucugauugcuccucgcggguacuucaagaucagauccggaaagagcucuaucaugcgguccgacgcccccauuggcaaauguaacagcgagugcaucacaccgaauggcucuauuccuaacgauaagcccuuucagaaugugaaccgcaucacguauggggcuuguccuagauacgucaaacagaauacccucaagcuggccacaggaaugcggaacguucccgaaaaacaaacccgcggcauuuucggggcgaucgccggauuuaucgagaauggcugggaagggaugguggacggaugguauggcuucagacaccagaacagcgagggcacagggcaggcugccgaucuuaaguccacccaagcugccauuaaucagaucaacggaaaacugaaccggcucauuggcaagacgaaugagaaguuccaccagaucgaaaaagaguuuucugaaguggaggggcgcauucaggaccuggaaaaguacgucgaggauacaaaaaucgaccuuuggagcuauaacgccgagcugcucguggcucuggaaaaucaacauaccauugaucugaccgacuccgagaugaacaaacucuucgaaagaacaaagaagcagcugcgggagaaugcggaagauaugggaaacggcugcuuuaagaucuaccacaaaugugacaaugccugcaucgggagcauuagaaacggcaccuaugaucaugacguuuaccgcgacgaggcucuuaauaaccgguuccagaucaagggaguggagcugaaaucuggcuacaaggauuggauucucuggaucuccuuugccauuagcugcuuccugcuuugugucgcccugcucggguuuaucaugugggcuugccagaaaggaaauaucagauguaacauuugcaucuga

SEQ ID NO: 193405 - RNA, 1701 nt, Artificial Sequence
  derived and/or modified CDS sequence (opt5) from hemagglutinin__InfluenzaA__ABI92951
augaagaccaucauugcccugagcuacauccucugccugguguucgcucagaaacuucccggcaacgacaauuccacagccacgcugugucucgggcaccaugcggucccuaacggaaccauuguuaagacaaucaccaaugaucaaauugaggugacaaacgcuaccgaacuggugcagucuagcuccacaggcgggaucugcgacucuccgcaccagauccuugauggagagaauuguacccugauugacgcccuccugggcgauccccagugcgacggguuucaaaacaaaaagugggaucuguucgucgaaagaagcaaagccuauuccaauuguuacccuuaugacgugcccgauuacgcuucucuccggagccugaucgccuccagcggaacgcuugaguuuaacaaugaaucuuucaacuggaccggcguuacacagaauggcaccuccagcgcuugcaagcgcagaucuaacuccagcuuuuucucucggcugaauuggcucacacaucugaaguuuaaauauccugcccuuaacgugaccaugcccaauaacgaggaguucgacaagcuguacauuuggggaguccaccauccugggacguauaacgaucagaucucccucuacgcgcaggccagcggccgcauuacaguguccaccaaaagaucucaacagacaguuaucccgaauauugggagccggccccgcgugagagacaucccuucccggaucagcauuuacuggaccaucgucaagcccggagauauucugcugaucaacucuaccggcaaucucauugcuccucgcggguauuuuaaaaucagauccggaaagagcucuaucaugcggagcgacgcccccauuggcaaguguaacuccgaaugcaucacaccgaauggcucuauuccuaacgacaaacccuuccagaaugugaaccgcaucacguacggggcuuguccuagauaugugaagcagaauacccugaaacuugccacaggaaugcggaacguccccgagaagcaaacccgcggcauuuuuggggcgaucgccggauucaucgaaaauggcugggaggggaugguugauggaugguacggcuuuagacaccagaacagcgagggcauugggcaggcugccgaccugaaauccacacaagcugccaucgaucagauuaauggaaagcucaaccggcugaucggcaaaaccaaugaaaaguuccaccagauugagaaggaguucagcgaaguggaagggagaauccaggaccuugagaaauauguggaggauacgaagauugaccuguggucuuacaacgccgaacuccuggucgcucuggagaaccaacauacaaucgaucucaccgacuccgaaaugaauaaacuguuugagcgcaccaagaaacagcuucgggaaaacgcggaggauaugggaaauggcugcuucaagaucuaucacaagugugacaacagcugcauugggucuaucagaaauggcacauacgaucaugacguguaccgcgacgaggcccugaacaaucgguuucagauuaaaggaguugaacucaaguccggcuauaaagauuggauccuguggauuagcuucgcuaucuccugcuuucuucuguguguggcccuccugggguucaucaugugggccugccagaagggaaacauuagauguaauaucugcauuuga

SEQ ID NO: 193406 - RNA, 1701 nt, Artificial Sequence
  derived and/or modified CDS sequence (opt5) from hemagglutinin__InfluenzaA__ABI92962
augaagaccaucauugcccugagcuacauccucugccugguguucgcucagaaacuucccggcaacgacaauuccacagccacgcugugucucgggcaccaugcggucccuaacggaaccauuguuaagacaaucaccaaugaucaaauugaggugacaaacgcuaccgaacuggugcagucuagcuccacaggcgggaucugcgacucuccgcaccagauccuugauggagagaauuguacccugauugacgcccuccugggcgauccccagugcgacggguuucaaaacaaaaagugggaucuguucgucgaaagaaauaaagccuauagcaacuguuacccuuaugacgugcccgauuacgcuucccuccggucucugaucgccagcuccggaacgcuugaguuuaauaacgaaucuuucaauuggaccggcguuacacagaacggcaccucuuccgcuugcaagcgcagaagcaauucuuccuuuuucagccggcugaacuggcucacacaucugaaguuuaaauauccugcccuuaaugugaccaugcccaacaacgaggaguucgacaagcuguacauuuggggaguccaccauccugggacguauaaugaucagaucucucucuacgcgcaggccuccggccgcauuacagugagcaccaaaagaucccaacagacaguuaucccgaacauugggucucggccccgcgugagagacaucccuagccggaucuccauuuacuggaccaucgucaagcccggagauauucugcugaucaauagcaccggcaaccucauugcuccucgcggguauuuuaaaaucagaucuggaaaguccagcaucaugcggucugacgcccccauuggcaaguguaauagcgaaugcaucacaccgaacggcuccauuccuaaugacaaacccuuccagaacgugaaucgcaucacguacggggcuuguccuagauaugugaagcagaacacccugaaacuugccacaggaaugcggaauguccccgagaagcaaacccgcggcauuuuuggggcgaucgccggauucaucgaaaacggcugggaggggaugguugauggaugguacggcuuuagacaccagaauagcgagggcauugggcaggcugccgaccugaaaagcacacaagcugccaucgaucagauuaacggaaagcucaaucggcugaucggcaaaaccaacgaaaaguuccaccagauugagaaggaguucuccgaaguggaagggagaauccaggaccuugagaaauauguggaggauacgaagauugaccuguggagcuacaacgccgaacuccuggucgcucuggagaaucaacauacaaucgaucucaccgacucugaaaugaacaaacuguuugagcgcaccaagaaacagcuucgggaaaaugcggaggauaugggaaacggcugcuucaagaucuaucacaagugugacaaugccugcauuggguccaucagaaacggcacauacgaucaugacguguaccgcgacgaggcucugaauaaccgguuucagauuaaaggaguugaacucaagagcggcuauaaagauuggauccuguggauuucuuucgccaucuccugcuuucuucuguguguggcccuccugggguucaucaugugggcuugccagaagggaaauauuagauguaacaucugcauuuga

SEQ ID NO: 193407 - RNA, 1701 nt, Artificial Sequence; identical to SEQ ID NO: 192705
  derived and/or modified CDS sequence (opt5) from hemagglutinin__InfluenzaA__ABI92973

SEQ ID NO: 193408 - RNA, 1701 nt, Artificial Sequence; identical to SEQ ID NO: 192705
  derived and/or modified CDS sequence (opt5) from hemagglutinin__InfluenzaA__ABI92984

SEQ ID NO: 193409 - RNA, 1701 nt, Artificial Sequence
  derived and/or modified CDS sequence (opt5) from hemagglutinin__InfluenzaA__ABI92995
augaagaccaucauugcccugagcuacauccucugccugguguucgcucagaaacuucccggcaacgacaauuccacagccacgcugugucucgggcaccaugcggucccuaacggaaccauuguuaagacaaucaccaaugaucaaauugaggugacaaacgcuaccgaacuggugcagucuagcuccacaggcgggaucugcgacucuccgcaccagauccuugauggagagaauuguacccugauugacgcccuccugggcgauccccagugcgacggguuucaaaacaaaaagugggaucuguucgucgaaagaagcaaagccuauuccaauuguuacccuuaugacgugcccgauuacgcuucucuccggagccugaucgccuccagcggaacgcuugaguuuaacaaugaaucuuucaacuggaccggcguuacacagaauggcaccuccagcgcuugcaagcgcagaucuaacuccagcuuuuucucucggcugaauuggcucacacaucugaaguuuaaauauccugcccuuaacgugaccaugcccaauaacgaggaguucgacaagcuguacauuuggggaguccaccauccugggacguauaacgaucagaucucccucuacgcgcaggccagcggccgcauuacaguguccaccaaaagaucucaacagacaguuaucccgaauauugggagccggccccgcaucagagacaucccuucccggauuagcaucuacuggaccauugugaagcccggagauauccugcugauuaacucuaccggcaaucucaucgcuccucgcggguauuuuaaaaucagauccggaaagagcucuauuaugcggagcgacgcccccaucggcaaguguaacuccgaaugcauuacaccgaauggcucuaucccuaacgacaaacccuuccagaaugucaaccgcauuacguacggggcuuguccuaaguaugugaaacagaauacccugaaacuugccacaggaaugagaaacgugcccgagaagcaaacccggggcaucuuuggggcgaucgccggauucauugaaaauggcugggaggggauggucgauggaugguacggcuuucgccaccagaacagcgagggcaucgggcaggcugccgaccugaaguccacacaagcugccauugaucagaucaauggaaaacucaacagacugauuggcaagaccaaugaaaaguuccaccagaucgagaaagaguucagcgaaguugaagggcggauucaggaccuugagaaguauguggaggauacgaaaaucgaccuguggucuuacaacgccgaacuccugguggcucuggagaaccaacauacaaucgaucucaccgacuccgaaaugaauaagcuguuugagagaaccaaaaagcagcuucgcgaaaacgcggaggauaugggaaauggcugcuucaagauuuaucacaaaugugacaacgccugcaucgggagcauucggaauggcacauacgaucaugacgucuacagagacgaggcucugaacaaucgcuuucagaucaagggaguggaacucaaaucuggcuauaaggauuggauucuguggaucuccuucgccaucagcugcuuucuucuguguguugcccuccugggguucauuaugugggcuugccagaaaggaaacauccgguguaauauuugcaucuga

SEQ ID NO: 193410 - RNA, 1701 nt, Artificial Sequence; identical to SEQ ID NO: 192705
  derived and/or modified CDS sequence (opt5) from hemagglutinin__InfluenzaA__ABI93006

SEQ ID NO: 193411 - RNA, 1701 nt, Artificial Sequence; identical to SEQ ID NO: 192705
  derived and/or modified CDS sequence (opt5) from hemagglutinin__InfluenzaA__ABI93017

SEQ ID NO: 193412 - RNA, 1698 nt, Artificial Sequence; identical to SEQ ID NO: 193304
  derived and/or modified CDS sequence (opt5) from hemagglutinin__InfluenzaA__ABI93028

SEQ ID NO: 193413 - RNA, 1701 nt, Artificial Sequence; identical to SEQ ID NO: 193038
  derived and/or modified CDS sequence (opt5) from hemagglutinin__InfluenzaA__ABI93039

SEQ ID NO: 193414 - RNA, 1701 nt, Artificial Sequence
  derived and/or modified CDS sequence (opt5) from hemagglutinin__InfluenzaA__ABI93061
augaagaccaucauugcccugagcuacauccucugccugguguucgcucagaaacuucccggcaacgacaauuccacagccacgcugugucucgggcaccaugcggucccuaacggaacccugguuaagacaauuaccaaugaucaaaucgaggugacaaacgcuaccgaacuugugcagucuagcuccacaggcagaauuugcgacucuccgcaccagauccuggauggggagaauuguacccucaucgacgcccugcugggagauccccauugcgacggcuuucagaacaaagaaugggaucucuucgucgagcggagcaaggccuauuccaauuguuacccuuaugacgugcccgauuacgcuucucugcgcagccuuguugccuccagcgggacgcuggaauuuaacaaugagucuuucaacuggaccggaguggcucaaaauggcacauccagcgccugcaaaagacggucuaacaaguccuuuuucagccgccucaauuggcugcaccagcuuaaguauaaauacccugcgcugaacgucaccaugcccaauaacgagaaguuugacaaacucuauauuuggggcgugcaucacccuucuacagauuccgaccagaucagccuguacgcccaggcuuccgggagaguuaccgugucuacgaagcggagccaacagacagucauuccgaacaucggaucccgccccugggugagaggcgugagcucucggauuuccaucuacuggaccauugucaaaccuggggauauccugcucaucaauagcacaggaaaccugauugcccccagaggcuauuucaagaucagaucugggaagucuuccauuaugcggucugacgcuagcaucggaaaauguaauuccgaaugcauuaccccuaacggcagcauccccaaugacaagccguuucagaacguuaaucgcaucaccuacggcgccuguccuagauaugugaaacagaacacacuuaagcuggcgacggggaugcggaaugugcccgagaaacaaacccgcggaauuuucggcgccaucgcuggguuuauugaaaacggaugggagggcauggucgaugggugguacggauucagacaccagaauagcgagggcacaggccaggccgcugaccucaaguccacccaagccgccaucaaccagauuaaugggaaacugaaccggcuuaucgaaaagacaaaugagaaguuucaucagaucgaaaaagaguucagcgaaguggagggacgcauucaggaucuggagaaguauguugaagacaccaaaaucgaucucuggucuuacaacgcugagcugcugguggcgcucgaaaaccaacacacgauugaccugacagauuccgagaugaauaaacuuuucgaacgcaccaagaagcagcugcgggagaacgccgaggacaugggcaaugggugcuuuaagaucuaucauaaaugugauaacgcuugcauuggaagcaucagaaauggcaccuacgaccacgaugucuaccgcgacgaagcccucaacaaucgguuccagauuaaggggguggagcugaaauccggcuauaaggacuggauccuuuggaucucuuuugccauuagcugcuuccugcucuguguugugcugcugggauuuaucaugugggcuugccagaaaggcaacauuagauguaauaucugcauuuga

SEQ ID NO: 193415 - RNA, 1701 nt, Artificial Sequence; identical to SEQ ID NO: 192722
  derived and/or modified CDS sequence (opt5) from hemagglutinin__InfluenzaA__ABI93072

SEQ ID NO: 193416 - RNA, 1701 nt, Artificial Sequence; identical to SEQ ID NO: 192722
  derived and/or modified CDS sequence (opt5) from hemagglutinin__InfluenzaA__ABI93083

SEQ ID NO: 193417 - RNA, 1701 nt, Artificial Sequence; identical to SEQ ID NO: 192722
  derived and/or modified CDS sequence (opt5) from hemagglutinin__InfluenzaA__ABI93094

SEQ ID NO: 193418 - RNA, 1701 nt, Artificial Sequence; identical to SEQ ID NO: 192722
  derived and/or modified CDS sequence (opt5) from hemagglutinin__InfluenzaA__ABI93105

SEQ ID NO: 193419 - RNA, 1701 nt, Artificial Sequence
  derived and/or modified CDS sequence (opt5) from hemagglutinin__InfluenzaA__ABI93116
augaagaccaucauugcccugagcuacauccucugccugguguucgcucagaaacuucccggcaacgacaauuccacagccacgcugugucucgggcaccaugcggucccuaacggaacccugguuaagacaauuaccaaugaucaaaucgaggugacaaacgcuaccgaacuugugcagucuagcuccacaggcgggauuugcgacucuccgcaccagauccuggauggagagaauuguacccucaucgacgcccugcugggcgauccccauugcgacggguuucagaacaaagaaugggaucucuucgucgagagaagcaaggccuauuccaauuguuacccuuaugacgugcccgauuacgcuucucugcggagccuuguugccuccagcggaacgcuggaauuuaacaaugagucuuucaacuggaccggcguggcucaaaauggcacauccagcgccugcaaacgcagaucuaacaaguccuuuuucagccggcucaauuggcugcaccagcuuaaguauaaauacccugcgcugaacgucaccaugcccaauaacgagaaguuugacaaacucuauauuuggggagugcaucacccuucuacagauuccgaccagaucagccuguacgcccaggcuccggggcgcguuaccguguccacgaagagaucucaacagacagucauucccaacaucggcagccggccuugggugcgcgggguguccagcagaauuucuaucuacuggaccauugucaaacccggagauauccugcucaucaauuguacaggcaaccugauugccccucggggguauuucaagaugcgcuccggaaagagcucuaucaugagaagcgacgcuuccauuggcaaaugcaauucugaauguaucacccccaacggcagcauuccgaaugacaagccuuuucagaacguuaaucggaucaccuacggggccugcccccgcuaugugaaacagaacacacuuaagcuggcgacgggaaugagaaaugugccugagaaacaaacccggggcaucuucggggccauugcuggauuuaucgaaaacggcugggaggggauggucgauggaugguacggcuuccgccaccaaaauuccgagggcacagggcaggccgcugaccucaagagcacccaggccgccauuaaccagaucaauggaaaacugaacagacuuauugaaaagacaaaugagaaguuucaucagaucgaaaaagaguucucugaaguggagggccggauccaggaucuggagaaguauguugaagacaccaaaauugaucucugguccuacaacgcugagcugcugguggcgcucgaaaaccaacacacgaucgaccugacagauagcgagaugaauaaacuuuucgaaagaaccaagaagcagcugcgcgagaacgccgaggacauggggaauggauguuuuaagauuuaucauaaaugcgauaacgcuugcaucggcucuauucggaaugggaccuacgaccacggcgucuacagagaugaagcccucaacaaucgcuuccagaucaagggaguggagcugaaauccggcuauaaggacuggauucuuuggaucagcuuugccaucuccuguuuccugcucugcguugugcugcugggguuuauuaugugggcuugucagaaaggaaacauccggugcaauauuuguaucuga

SEQ ID NO: 193420 - RNA, 1689 nt, Artificial Sequence
  derived and/or modified CDS sequence (opt5) from hemagglutinin__InfluenzaA__ABI94581
augaacacccagauccugguguucgcccucgucgcuagcauucccacaaaugccgacaagaucugccugggccaccaugcgguuuccaacgggacgaaagugaauacccuuacagagagaggaguggaagucgugaacgcuaccgagacaguugaacggaccaaugugccucgcauuuguucuaagggcaaaagaacagucgaucuggggcaaugcggacuccugggcaccaucacggggccgccccagugugaccaguuucuugaguucagcgccgaucugauuaucgaacggcgcgagggauccgacgugugcuacccuggcaaguuuguuaacgaggaagcccucagacagauccugcgggagucuggcgggauugauaaagaaaccaugggauucacauauagcggcauccgcaccaaugggacaaccuccgcuuguagacggucuggaagcuccuuuuacgccgagaugaaguggcugcucagcaacacggacaaugcugccuucccccaaaugacaaagucuuauaaaaacacccgcaaggauccugcgcugauuaucuggggcauucaccauuccgggagcacaaccgagcagaccaaacuuuacggaucuggcaauaagcugaucacagugggcuccagcaacuaucagcagucuuuuguccccuccccuggggccagaccgcaagugaauggacagagcggccggauugacuuccacuggcucauccugaaccccaaugauacggugaccuuuuccuucaacggggcuuuuaucgccccugaccgcgcuucuuuccuuagaggaaaaagcaugggcauucaguccgaaguccagguugaugccaacugcgagggggacuguuaccauagcggaggcacaaucauuucuaaucugcccuuucaaaacaucaauucccgggcggugggcaagugcccucgcuaugugaagcaggaaagccuccugcuggccaccgggaugaaaaacguccccgagauuccgaagagacggagacgcggacucuucggcgcuaucgccggguucaucgaaaauggaugggagggccugauugaugggugguacggcuuucggcaccagaacgcucaaggagagggcacagccgccgacuacaaaucuacccagagcgcuaucgaccagauuacggggaaacuuaauagacugaucgaaaagacaaaccagcaauucgagcucauugauaaugaauuuaccgagguggaaaagcagaucggaaacguuaucaauuggacccgcgacuccaugacagagguguggucuuauaacgcggagcugcuugucgccauggaaaaucagcacaccauugaucuggcugacagcgagaugaacaaacucuacgaacgggugaagagacagcugcgcgagaaugccgaagaggauggcacaggguguuucgagaucuuucauaagugcgacgaugacuguauggccuccauucggaacaacacguaugaucacagcaaauacagagaagaggcuauccaaaaucgcauucagaucgacccuguuaagcugucuuccggauauaaagaugugauucucugguucagcuuuggcgccucuugcuucauccugcuugcgaucgcuauggggcuggucuuuauuugcgugaagaacggcaauaugcgguguaccaucugcauuuga

SEQ ID NO: 193421 - RNA, 1701 nt, Artificial Sequence; identical to SEQ ID NO: 192838
  derived and/or modified CDS sequence (opt5) from hemagglutinin__InfluenzaA__ABI95228

SEQ ID NO: 193422 - RNA, 1701 nt, Artificial Sequence
  derived and/or modified CDS sequence (opt5) from hemagglutinin__InfluenzaA__ABI95239
augaagaccaucauugcccugagcuacauccucugccugguguucgcucagaaacuucccggcaacgacaauuccacagccacgcugugucucgggcaccaugcggucccuaacggaaccauuguuaagacaaucaccaaugaucaaauugaggugacaaacgcuaccgaacuggugcagucuagcuccacaggcgggaucugcgacucuccgcaccagauccuugauggagagaauuguacccugauugacgcccuccugggcgauccccagugcgacggguuucaaaacaaaaagugggaucuguucgucgaaagaagcaaagccuauuccaauuguuacccuuaugacgugcccgauuacgcuucucuccggagccugguugccuccagcggaacgcuugaguuuaacaaugaaucuuucaacuggaccggcgugacacagaauggcaccuccagcgcuugcaagcgcagaucuaacaauuccuuuuucagccggcugaacuggcucacacaucugaaguuuaaauauccugcccuuaaugucaccaugcccaacaacgagaaguucgacaaacuguacaucuggggagugcaccauccugggacggauaaugaccagauuucucucuaugcgcaggccuccggccgcaucacaguuagcaccaagagaucccaacagacagugauuccgaacaucgggucucggccccgcgucagagauauuccuagccggaucuccaucuacuggaccauugugaaacccggagacauccugcugauuaauagcaccggcaaccucaucgcuccucgcggguacuuuaagauuagaucuggaaaguccagcaucaugcggucugacgcccccaucggcaaauguaauagcgagugcauuacaccgaacggcuccaucccuaaugauaagcccuuccagaacgugaaucgcauuacguauggggcuuguccuagauacgucaaacagaacacccugaagcuggccacaggaaugcggaauguucccgaaaaacaaacccgcggcaucuuuggggcgauugccggauucaucgagaacggcugggaagggauggugaauggaugguauggcuuuagacaccagaacucugagggcaucgggcaggcugccgaccuuaagagcacacaagcugccauuaaucagaucaacggaaaacucaaccggcugauuggcaagaccaaugagaaguuccaccagaucgaaaaagaguucuccgaaguggaggggcgcauucaggaucuugaaaaguacgucgaggacacgaaaaucgaucuguggagcuauaacgccgagcuccugguggcucuggaaaaucaacauacaauugaccucaccgauucugagaugaacaagcuguuugaaagaaccaaaaagcagcuucgggagaaugcggaagacaugggaaacggcugcuucaagaucuaccacaaaugugauaaugccugcaucggguccauuagaaacggcacauaugaccaugauguuuaccgcgacgaggcucugaauaaccgguuucagaucaagggaguggagcucaaaagcggcuacaaggacuggauucuguggaucucuuucgccauuuccugcuuucuucugugugucgcccuccugggguucaucaugugggcuugccagaaaggaaauaucagauguaacauuugcaucuga

SEQ ID NO: 193423 - RNA, 1698 nt, Artificial Sequence
  derived and/or modified CDS sequence (opt5) from hemagglutinin__InfluenzaA__ABI95250
augaaggccaaacugcucgugcugcuuugcaccuucacagcuacguacgccgacaccaucugugucggcuaucacgcgaacaauagcacagauaccguugacacagugcuggagaagaacgugaccgucacacauuccgugaaucuccuggaagauucucacaacgggaaacuuugccugcucaagggaauugcuccccugcagcugggcaauuguagcguugccggguggauccucggaaacccugagugcgaaucccugauuucuaaagagagcugguccuacaucguggaaaccccgaaucccgagaacggcacguguuauccuggguacuuugccgacuaugaggaacuuagagagcaacugucuagcgucuccagcuucgaacgguuugagauuuuccccaaggagucuuccuggccuaaucauaccgugacaggaguuagcgcuucuugcucccacaacggcaagagcucuuuuuaccgcaaucuccuguggcuuaccgagaaaaacggccuguaucccaaucucuccaagagcuacgugaacaauaaagaaaaggaaguccuggugcuguggggagugcaucacccuuccaacaucggggaucagagagccaucuaccacacagagaacgcuuaugucucuguugugagcucccauuacagccggcgcuucaccccggaaauugccaaaagacccaaggugcggggccaggaggggcgcaucaauuauuacuggacgcuccuggagccuggagacacaauuaucuuugaagcgaacggcaaucuuauugcccccugguaugcuuucgcccugucuagaggguuuggauccggcaucauuaccagcaacgcuccuaugaaugagugugaugccaagugccagacaccccaaggcgcgaucaacucuagccucccguuccagaauguccacccugugaccaucggggaaugucccaaauacguucgguccgccaagcugcgcauggugaccggacuuagaaacauuccuucuauccagagccggggccuguuuggggcuauugccggauucaucgagggcggguggacaggaaugauugacggcugguauggcuaccaucaccagaaugaacaaggguccggauacgcugccgaucagaaaagcacgcagaacgccaucaauggcaucaccaacaaggucaauucugugauugagaaaaugaacacacaguuuaccgcuguugggaaggaguucaauaaacucgaacgcagaauggagaaccugaacaagaagguggacgauggauuccuggacaucuggacauauaaugcggaacuccugguccuucuggagaacgaacggacccucgauuuucacgacuccaaugugaaaaaccuguacgagaaggucaaaagccaacuuaagaauaacgccaaagagauuggcaaugggugcuucgaauuuuaucauaaguguaacaaugagugcauggaaucugugaagaacggcacguacgacuaucccaaauacuccgaggagagcaagcugaaucgcgagaaaaucgauggaguuaagcucgaauccaugggcguguaucagauucuggcuaucuacucuacagucgccagcucccuggugcuccugguuucucuuggggccaucagcuucuggaugugcuccaacggaagccugcaguguagaauuugcaucuga

SEQ ID NO: 193424 - RNA, 1698 nt, Artificial Sequence
  derived and/or modified CDS sequence (opt5) from hemagglutinin__InfluenzaA__ABI95261
augaaggccaaacugcucgugcugcuuugcaccuucacagcuacguacgccgacaccaucuguauuggcuaucacgcgaacaauagcacagauaccgucgacacaguucuggagaagaacgugaccgugacacauuccgucaaucuccuggaagauucucacaacgggaaacuuugccugcucaagggaaucgcuccccugcagcugggcaauuguagcguggccggguggauucucggaaacccugagugcgaaucccugaucucuaaagagagcugguccuacauuguugaaaccccgaaucccgagaacggcacguguuauccuggguacuuugccgacuaugaggaacuuagagagcaacugucuagcguguccagcuucgaacgguuugagaucuuccccaaggagucuuccuggccuaaucauaccgucacaggagugagcgcuucuugcucccacaacggcaagagcucuuuuuaccgcaaucuccuguggcuuaccgagaaaaacggccuguaucccaaucucuccaagagcuacguuaacaauaaagaaaaggaagugcugguccuguggggagugcaucacccuuccaacaucggggugcagagagccauuuaccacacagagaacgcuuaugucucuguugugagcucccauuacagccggcgcuucaccccggaaaucgccaaaagacccaaggugcgggaucaggagggccgcauuaauuauuacuggacgcuccuggagccuggggacacaaucauuuuugaagcgaacggaaaucuuaucgcccccugguaugcuuucgcccugucuagaggcuuugaguccgggauuaucaccagcaacgcuccuaugaaugaaugugaugccaagugccagacaccccaaggagcgaucaacucuagccucccguuccagaauguccacccugugaccauuggcgagugucccaaauacguucgguccgccaagcugcgcauggugaccggccuuagaaacaucccuucuauucagagccgggggcuguuuggagcuaucgccggcuucauugaagggggauggacaggcaugaucgacgggugguauggauaccaucaccagaaugagcaaggcuccggcuacgcugccgaucagaaaagcacgcagaacgccaucaaugggauuaccaacaaggucaauucugugaucgagaaaaugaacacacaguuuaccgcuguuggaaaggaguucaauaaacucgaacgcagaauggaaaaccugaacaagaagguggacgauggcuuccuggacauuuggacauauaaugcggagcuccugguccuucuggaaaacgagcggacccucgauuuucacgacuccaaugugaaaaaccuguacgagaaggucaaaagccaacuuaagaauaacgccaaagaaaucgggaauggaugcuucgaguuuuaucauaaguguaacaaugaaugcauggagucugugaagaacggcacguacgacuaucccaaauacuccgaggaaagcaagcugaaucgcgagaaaauugaugggguuaagcucgaauccaugggcguguaucagauccuggcuaucuacucuacagucgccagcucccuggugcuccugguuucucuuggagccauuagcuucuggaugugcuccaacggcagccugcaguguagaaucugcauuuga

SEQ ID NO: 193425 - RNA, 1698 nt, Artificial Sequence; identical to SEQ ID NO: 193304
  derived and/or modified CDS sequence (opt5) from hemagglutinin__InfluenzaA__ABI95272

SEQ ID NO: 193426 - RNA, 1698 nt, Artificial Sequence; identical to SEQ ID NO: 193304
  derived and/or modified CDS sequence (opt5) from hemagglutinin__InfluenzaA__ABI95283

SEQ ID NO: 193427 - RNA, 1698 nt, Artificial Sequence; identical to SEQ ID NO: 192368
  derived and/or modified CDS sequence (opt5) from hemagglutinin__InfluenzaA__ABI95294

SEQ ID NO: 193428 - RNA, 1698 nt, Artificial Sequence
  derived and/or modified CDS sequence (opt5) from hemagglutinin__InfluenzaA__ABI96104
augaaggugaaacugcucauccugcuuugcaccuucacagccacguacgcugacaccauuuguaucggcuaucacgccaacaauagcacagauaccgucgacacaguucuggagaagaacgugaccgugacacauuccgucaaucuccuggaagauucucacaacgggaaacuuugccugcucaagggaauugcgccccugcagcugggcaauuguagcguggcuggguggauccucggaaacccugagugcgaacugcuuauuuccaaagagucuuggagcuacaucguugaaaccccgaaucccgagaacggcgccuguuauccuggguacuuugccgacuaugaggaacugagagagcaacucuccucugugagcuccuucgaacgguuugagaucuuccccaaggagagcucuuggccuaaucauacggucaccggaguguccgcuagcugcucucacaacggcaaguccagcuuuuaccgcaaucugcuuuggcugacaggcaaaaacgggcucuaucccaaucugauuaagucuuacgccaacaauaaagaaaaggagguucugauccucuggggagugcaucacccuccgaacauuggcgaucagagaacccuguaccacacagaaaacgcuuaugucuccguggugagcucccauuacucucggcgcuucacccccgagaucacgaaaagaccuaagguccgggaccaggaagggcgcauuaauuauuacuggacacuucuggagcccggagauaccaucauuuuugaggccaacggcaaucucaucgcgccuugguaugccuucgcucugagcagaggguuuggauccggcaucauuacaagcaacgcccccauggacgaaugugaugcuaagugccagaccccgcaaggcgccaucaauucuucccuuccuuuccagaacguucaccccgugaccauuggggaguguccuaaauacgugcggagcgcgaagcugcgcauggucacaggacucagaaauauccccucuauucagagccggggccuguuuggggccaucgcuggauucaucgaaggcggguggacgggaaugguggacggcugguauggcuaccaucaccagaacgagcaaggguccggauacgccgcugaucagaaaucuacccagaaugccauuaacggcaucacaaauaagguuaacagcgugauugaaaagaugaauacccaguuuacagccgucgggaaagaguucaacaaacuggagcgcagaauggaaaaucucaacaagaagguggacgauggauuccuggacaucuggaccuauaacgcugagcuucugguucuccuggaaaaugagcggacgcuugacuuucacgauuccaacgugaaaaaucuguacgaaaaggucaaaagccaacucaagaacaaugcgaaagagauuggcaacgggugcuucgaguuuuaucauaaguguaauaacgaaugcauggagucugugaagaauggcacauacgacuaucccaaauacuccgaagagagcaagcugaaccgcgagaaaaucgauggagucaagcuggacucuaugggcguguaucagauccucgccauuuacuccaccguugcuagcucccuggugcuucuggucucucucggggccaucagcuucuggaugugcuccaauggaucucugcaguguagaauuugcaucuga

SEQ ID NO: 193429 - RNA, 1701 nt, Artificial Sequence; identical to SEQ ID NO: 192722
  derived and/or modified CDS sequence (opt5) from hemagglutinin__InfluenzaA__ABJ09107

SEQ ID NO: 193430 - RNA, 1701 nt, Artificial Sequence
  derived and/or modified CDS sequence (opt5) from hemagglutinin__InfluenzaA__ABJ09140
augaagaccaucauugcccugagcuacauccucugccugguguucgcucagaaacuucccggcaacgacaauuccacagccacgcugugucucgggcaccaugcggucccuaacggaacccugguuaagacaauuaccaaugaucaaaucgaggugacaaacgcuaccgaacuugugcagucuagcuccacaggcagaauuugcgacucuccgcaccggauccuggaugggaaaaauuguacccucaucgacgcccugcugggagauccccauugcgacggcuuucagaacaaggagugggaucucuucgucgaacgcagcaaagccuauuccaauuguuacccuuaugacgugcccgauuacgcuucucugagaagccuuguugccuccagcgggacgcuggaguuuauuaacgaagacuucaauuggaccggaguggcucaggauggcaagucuuauuccugcaagcggggcagcgucaacucuuucuucucccgccucaauuggcugcacaaacuugaguacaaguauccugcccugaacgugacaaugcccaauaacgggaaauuugacaagcucuacaucuggggaguucaucacccuagcaccgauucugaccaaacaucccuguacgugagagcgagcggccgggucaccguguccacgaaacgcucucagcagacagugauuccgaauaucggguucagacccuggguccggggacugagcucccgcauuagcaucuauuggaccauuguuaagccuggcgacauccuccugaucaacucuacagggaaccuuauugcccccagaggauacuuuaagauccggaauggcaaauccagcauuaugcgcucugaugcuccuaucggcaacuguagcuccgagugcauuacccccaaugggucuaucccgaacgacaagccuuuccagaaugugaacagaaucaccuauggagccuguccccgguacgugaaacaaaauacacugaagcucgcuacgggcaugcgcaacgucccugaaaaacagaccagagggauuuuuggagccaucgcgggcuucauugagaaugggugggaaggaaugguggauggcugguauggcuuucggcaccagaacagcgaggggacaggacaggccgcugaccugaaguccacccaagccgcuaucgaucagauuaauggcaaacuuaacagacugaucgagaagacaaaugaaaaguuccaucagaucgagaaagaauuuagcgagguugaagggcgcauucaagaccucgagaaguacguggaggauaccaaaaucgaccuguggucuuauaacgccggacugcucgucgcccuggaaaaucagcacacgauugaucuuacagacuccgagaugaacaagcuguuugaacggaccagaaaacagcuccgcgagaacgcugaagauaugggcaaugggugcuucaagaucuaccauaagugugacaacgcgugcauuggcagcauccggaauggaaccuacgaccacgauguguauagagacgaggcccugaacaaucgcuuucagauuaaaggcguugagcuuaagucuggguacaaagauuggauccuguggaucuccuucgcuauuagcugcuuucuccugugugugguccugcucggauucaucaugugggccugccaaaagggcaacauucgguguaauaucugcauuuga

SEQ ID NO: 193431 - RNA, 1698 nt, Artificial Sequence
  derived and/or modified CDS sequence (opt5) from hemagglutinin__InfluenzaA__ABJ09151
augaaggccaaacugcucgugcugcuuugcaccuucacagcuacguacgccgacaccaucuguauuggcuaucacgcgaacaauagcacagauaccgucgacacaguucuggagaagaacgugaccgugacacauuccgucaaucuccuggaagauucucacaacgggaaacuuugccugcucaagggaaucgcuccccugcagcugggcaauuguagcguggccggguggauucucggaaacccugagugcgaacugcuuaucuccaaagagucuuggagcuacauuguugaaaccccgaaucccgagaacggcacguguuauccuggguacuuugccgacuaugaggaacugagagagcaacucuccucugugagcuccuucgaacgguuugagaucuuccccaagggaagcucuuggccuaaucauaccgucacaggcguguccgcuagcugcucucacaacggcaaguccagcuuuuaccgcaaucugcuuuggcugaccgggaaaaacggacucuaucccaaucugucuauguccuacguuaacaauaagggcaaagaggugcugguccucuggggagugcaucacccuccgaacaucggggaucagagagcccuguaccacacagaaaacgcuuaugugagcgucguuuccucucauuacagccggcgcuucacccccgagauugccaagagaccuaaagugcgggaccaggaaggccgcaucaauuauuacuggacgcuucuggagcccggggauacaauuaucuuugaagcgaacggaaaucucauugccccuugguaugcuuucgcccuguccagaggcuuuggcagcgggaucauuaccucuaacgcucccaugggagagugugacgccaagugccagacaccgcaaggcgcgaucaauuccagccuuccuuuccagaacgugcaccccgucaccaucggggaguguccuaaguacgugcggucugccaaacugcgcaugguuaccggacucagaaauauucccagcauccagucccggggccuguuuggggcuauugccggauucaucgaaggcggcuggacagggaugguggauggaugguauggcuaccaucaccagaacgagcaagggucuggauacgcugccgaccaaaagagcacgcagaaugccauuaacggcaucaccaauaaagucaacuccgugaucgaaaagaugaauacacaguuuaccgcuguugggaaagaguucaacaagcuggaacgcagaauggagaaucucaacaaaaagguggaugacggcuuccuggauauuuggacauauaacgcggagcuucugguccuccuggaaaaugagcggacccuugacuuucacgacagcaacgugaagaaucuguacgaaaaagucaagucucagcucaaaaacaaugccaaggagaucggaaacggcugcuucgaauuuuaucauaaauguaauaacgagugcauggaguccgugaagaaugggacguacgauuaucccaaguacagcaaagaaucuaagcugaaccgcgagaaaauugacggaguuaagcuggaauccaugggcguguaucagauccucgcuauuuacagcacagucgccuccucucuggugcuucugguuagccucggggccaucuccuucuggaugugcucuaauggaagccugcaguguagaaucugcauuuga

SEQ ID NO: 193432 - RNA, 1701 nt, Artificial Sequence
  derived and/or modified CDS sequence (opt5) from hemagglutinin__InfluenzaA__ABJ09162
augaagaccaucauugcccugagcuacauccucugccugguguucgcucagaaacuucccggcaacgacaauuccacagccacgcugugucucgggcaccaugcggucccuaacggaaccauuguuaagacaaucaccaaugaucaaauugaggugacaaacgcuaccgaacuggugcagucuagcuccacaggcgggaucugcgacucuccgcaccagauccuugauggagagaauuguacccugauugacgcccuccugggcgauccccagugcgacggguuucaaaacaaaaagugggaucuguucgucgaaagaagcaaagccuauuccaauuguuacccuuaugacgugcccgauuacgcuucucuccggagccugguugccuccagcggaacgcuugaguuuaacaaugaaucuuucaacuggaccggcgugacacagaauggcaccuccagcgcuugcaagcgcagaucuaacaauuccuuuuucagccggcugaacuggcucacacaucugaaguuuaaauauccugcccuuaaugucaccaugcccaacaacgagaaguucgacaaacuguacaucuggggagugcaccauccugggacgaauaacgaucagauuucucucuaugcgcaggccuccggccgcaucacaguuagcaccaagagaucccaacagacagugauuccgaauaucgggucucggccccgcgucagagacauuccuagccggaucuccaucuacuggaccauugugaaacccggagauauccugcugauuaacagcaccggcaaucucaucgcuccucgcggguacuuuaagauuagaucuggaaaguccagcaucaugcggucugacgcccccaucggcaaauguaacagcgagugcauuacaccgaauggcuccaucccuaacgacaagcccuuccagaaugugaaccgcauuacguauggggcuuguccuagauacgucaaacagaauacccugaagcuggccacaggaaugcggaacguucccgaaaaacaaacccgcggcaucuuuggggcgauugccggauucaucgagaauggcugggaagggaugguggauggaugguauggcuuuagacaccagaacucugagggcaucgggcaggcugccgaccuuaagagcacacaagcugccauuaaucagaucaacggaaaacucaaccggcugauuggcaagaccaaugagaaguuccaccagaucgaaaaagaguucuccgaaguggaggggcgcauucaggaucuugaaaaguacgucgaggacacgaaaaucgaucuguggagcuauaacgccgagauucucguggcucuggaaaaucaacauacaaucgaccugaccgauucugagaugaacaagcucuuugaaagaaccaaaaagcagcugcgggagaaugcggaagacaugggaaacggcugcuucaagaucuaccacaaaugugauaaugccugcauuggguccaucagaaacggcacauaugaccaugauguuuaccgcgacgaggcucuuaauaaccgguuucagauuaagggaguggagcugaaaagcggcuacaaggacuggauccucuggauuucuuucgccaucuccugcuuucugcuuugugucgcccugcucggguucaucaugugggcuugccagaaaggaaauauuagauguaacaucugcauuuga

SEQ ID NO: 193433 - RNA, 1701 nt, Artificial Sequence; identical to SEQ ID NO: 192315
  derived and/or modified CDS sequence (opt5) from hemagglutinin__InfluenzaA__ABJ09173

SEQ ID NO: 193434 - RNA, 1698 nt, Artificial Sequence
  derived and/or modified CDS sequence (opt5) from hemagglutinin__InfluenzaA__ABJ09184
augaaggugaaacugcucguccugcuuugcaccuucacagccacguacgcugacaccaucuguauuggcuaucacgccaacaauagcacagauaccguugacacagugcuggagaagaacgugaccgucacacauuccgugaaucuccuggaagauucucacaacgggaaacuuugccugcucaagggaaucgcgccccugcagcugggcaauuguagcguugcuggguggauucucggaaacccugagugcgaacugcuuaucuccaaagagucuuggagcuacauuguggaaaccccgaaucccgagaacggcacguguuauccuggguacuuugccgacuaugaggaacugagagagcaacucuccucugucagcuccuucgaacgguuugagaucuuccccaaggagagcucuuggccuaaucauaccgugacaggaguuuccgccagcugcucucacaacggcaaguccagcuuuuaccgcaaucugcuuuggcugaccggcaaaaacgggcucuaucccaaucugucuaaguccuacgcuaacaauaaagaaaaggaggugcugguccucuggggagugcaucacccuccgaacaucggcgaucagagagcccuguaccacacagaaaacgcuuaugugagcgucguuuccucucauuacagccggcgcuucacccccgagauugccaaaagaccuaaggugcgggaccaggaagggcgcaucaauuauuacuggacgcuucuggaggcgggagauacaauuaucuuugaggccaacggcaaucucauugcucccagauucgccuuugcucugucccggggguucggaagcggcaucauuaccucuaacgccccuauggacgaaugugaugcgaagugccagacaccccaaggcgccaucaauuccagccuuccguuucagaacgugcacccugucaccaucggggagugucccaaauaugugcgcucugcuaagcugagaauggccaccggacuccggaauauuccuagcauccagucccgcggccuguucggggcuauugccggauuuaucgaaggcggguggacaggaaugguugacggcugguacggcuaucaucaccagaacgagcaagggucuggauacgccgcugaucagaaaagcacgcagaaugcgauuaacggcaucaccaauaaggugaacuccgucaucgaaaagaugaauacacaguucaccgccguggggaaagaguucagcaaacuggagagacggauggaaaaccucaauaagaagguugacgauggauuucuggacauuuggacauacaacgcugagcuucuggugcuccuggaaaacgagcgcacccuugacuuccacgauucuaaugucaaaaaccuguaugaaaaggugaaaucccaacucaagaauaacgccaaagagaucggcaaugggugcuuugaguucuaccauaaguguaacgacgaaugcauggagagcgucaagaauggcacguaugauuaccccaaauauucugaagaguccaagcugaacagagagaaaauugacggagugaagcuggaaagcaugggcguuuaccagauccucgccauuuauuccacaguggcuucuagccugguccuucuggugucccucggggccaucucuuuuuggaugugcagcaauggaucccugcagugucggaucugcauuuga

SEQ ID NO: 193435 - RNA, 1701 nt, Artificial Sequence; identical to SEQ ID NO: 192705
  derived and/or modified CDS sequence (opt5) from hemagglutinin__InfluenzaA__ABJ09195

SEQ ID NO: 193436 - RNA, 1701 nt, Artificial Sequence; identical to SEQ ID NO: 192705
  derived and/or modified CDS sequence (opt5) from hemagglutinin__InfluenzaA__ABJ09206

SEQ ID NO: 193437 - RNA, 1701 nt, Artificial Sequence; identical to SEQ ID NO: 193285
  derived and/or modified CDS sequence (opt5) from hemagglutinin__InfluenzaA__ABJ09217

SEQ ID NO: 193438 - RNA, 1701 nt, Artificial Sequence; identical to SEQ ID NO: 192722
  derived and/or modified CDS sequence (opt5) from hemagglutinin__InfluenzaA__ABJ09228

SEQ ID NO: 193439 - RNA, 1701 nt, Artificial Sequence
  derived and/or modified CDS sequence (opt5) from hemagglutinin__InfluenzaA__ABJ09239
augaagaccaucauugcccugagcuacauccucugccugguguucgcucagaaacuucccggcaacgacaauuccacagccacgcugugucucgggcaccaugcggucccuaacggaacccugguuaagacaauuaccaaugaucaaaucgaggugacaaacgcuaccgaacuugugcagucuagcuccacaggcgggauuugcgacucuccgcaccagauccuggauggagagaauuguacccucaucgacgcccugcugggcgauccccauugcgacggguuucagaacaaagaaugggaucucuucgucgagagaagcaaggccuauuccaauuguuacccuuaugacgugcccgauuacgcuucucugcggagccuuguugccuccagcggaacgauggaauuuaacaaugagucuuucaacuggaccggcguggcucaaaauggcacauccagcgccugcaaacgcagaucuaacaaguccuuuuucagccggcugaauuggcuccaccagcugaaguauaaauacccugcgcuuaacgucaccaugcccaauaacgagaaguuugacaaacuguauauuuggggagugcaucacccuucuacagauuccgaccagaucagccucuacgcccaggcuccggggcgcguuaccguguccacgaagagaucucaacagacagucauucccaacaucggcagccggccuugggugcgcgggguguccagcagaauuucuaucuacuggaccauugucaaacccggagauauccugcugaucaauuguacaggcaaccucauugccccucggggguauuucaagauccgcuccggaaagagcucuauuaugagaagcgacgcuuccaucggcaaaugcaauucugaauguauuacccccaacggcagcaucccgaaugacaagccuuuucagaacguuaaucggaucaccuacggggccugcccccgcuaugugaaacagaacacacugaagcuggcgacgggaaugagaaaugugccugagaaacaaacccggggcauuuucggggccaucgcuggauuuauugaaaacggcugggaggggauggucgauggaugguacggcuuccgccaccaaaauuccgagggcacagggcaggccgcugaccuuaagagcacccaggccgccaucaaccagauuaauggaaaacucaacagacugaucgaaaagacaaaugagaaguuucaucagaucgaaaaagaguucucugaaguggagggccggauucaggaucuugagaaguauguugaagacaccaaaaucgaucugugguccuacaacgcugagcuccugguggcgcuggaaaaccaacacacgauugaccucacagauagcgagaugaauaagcuguucgaaagaaccaaaaagcagcuucgcgagaacgccgaggacauggggaauggauguuuuaagaucuaucauaaaugcgauaacgcuugcauuggcucuauccggaaugggaccuacgaccacgaugucuacagagacgaagcccugaacaaucgcuuccagauuaagggcguggagcucaaauccggauauaaggacuggauccuguggaucagcuuugccauuuccuguuuccuucugugcguugugcuccugggcuuuaucaugugggcuugucagaaagggaacauucggugcaauaucuguauuuga

SEQ ID NO: 193440 - RNA, 1701 nt, Artificial Sequence
  derived and/or modified CDS sequence (opt5) from hemagglutinin__InfluenzaA__ABJ09250
augaagaccaucauugcccugagcuacauccucugccugguguucgcucagaaacuucccggcaacgacaauuccacagccacgcugugucucgggcaccaugcggucccuaacggaacccugguuaagacaauuaccaaugaucaaaucgaggugacaaacgcuaccgaacuugugcagucuagcuccacaggcagaauuugcgacucuccgcaccagauccuggauggggagaauuguacccucaucgacgcccugcugggagauccccauugcgacggcuuucagaacaaagaaugggaucucuucgucgagcggagcaaggccuauuccaauuguuacccuuaugacgugcccgauuacgcuucucugcgcagccuuguugccuccagcgggacgcuggaauuuaacaaugagucuuucaacuggaccggaguggcucaaaauggcacauccagcgccugcaaaagacggucuaacaaguccuuuuucagccgccucaauuggcugcaccagcuuaaguauaaauacccugcgcugaacgucaccaugcccaauaacgagaaguuugacaaacucuauauuuggggcauccaucacccuucuacagauuccgaccagauuagccuguacgcccaggcuuccgggagagugaccguuucuacgaagcggagccaacagacagugaucccgaacauuggaucccgccccugggucagaggcgugagcucucggaucuccauuuacuggaccaucgugaaaccuggggauauccugcucauuaauagcacaggaaaccugaucgcuccccgcggcuauuucaagauuagaucuggaaagagcuccaucaugcggucugacgccccuauugggaaauguaauagcgaaugcaucacccccaacggcuccaucccgaaugacaagccuuuucagaacgucaaucgcauuaccuacggcgccugucccagauauguuaaacagaacacacuuaagcuggcgacggggaugcggaaugugccugagaaacaaacccgcggaaucuucggcgccauugcuggguuuaucgaaaacggaugggagggcaugguggaugggugguacggauucagacaccagaauagcgagggcacaggccaggccgcugaccucaagucuacccaagccgccauuaaccagaucaaugggaaacugaaccggcuuaucgaaaagacaaaugagaaguuucaucagauugaaaaagaguucuccgaagucgagggaagaauccaggaucuggagaaguauguggaagacaccaaaauugaucucuggagcuacaacgcugagcugcugguugcgcucgaaaaccaacacacgaucgaccugacagauucugagaugaauaaacuuuucgaacgcaccaagaagcagcugcgggagaacgccgaggacaugggcaaugggugcuuuaagauuuaucauaaaugugauaacgcuugcaucggauccauuagaaaugaaaccuacgaccacgauguguaccgcgacgaggcccucaacaaucgguuccagaucaagggcgucgaacugaaaagcggguauaaggacuggauccuuuggauuuccuuugccaucucuugcuuccugcucugugugguucugcugggcuuuauuaugugggcuugccagaaaggaaacaucagauguaauauuugcaucuga

SEQ ID NO: 193441 - RNA, 1701 nt, Artificial Sequence
  derived and/or modified CDS sequence (opt5) from hemagglutinin__InfluenzaA__ABJ09261
augaagaccaucauugcccugagcuacauccucugccugguguucgcucagaaacuucccggcaacgacaauuccacagccacgcugugucucgggcaccaugcggucccuaacggaacccugguuaagacaauuaccaaugaucaaaucgaggugacaaacgcuaccgaacuugugcagucuagcuccacaggcaaaauuugcgacucuccgcaccagauccuggauggggagaauuguacccucaucgacgcccugcugggagauccccauugcgacggcuuucagaacaaggaaugggaucucuucgucgagagaagcaaagccuauuccaauuguuacccuuaugacgugcccgauuacgcuucucugcggagccuuguugccuccagcgggacgcuggaauuuaacaaugagucuuucaacuggaccggaguggcucaaaauggcacauccagcgccugcaagcgcagaucuauuaaguccuuuuucagccggcucaacuggcugcaccagcuuaaauauaaguacccugcgcugaaugucaccaugcccaacaaugagaaauuugacaagcucuauaucuggggcgugcaucacccuucuacagauuccgaccagaccagccuguacgcccaggcuuccgggcgcguuacggugucuacaaaaagaagccaacagaccgucauuccgaacaucggaucccggcccugggugcgcggcgugagcucuagaauuuccaucuacuggacaauugucaagccuggggauauccugcucaucaacagcaccggaaaucugauugcuccccggggcuauuucaagauccgcucugggaaaagcuccauuaugagaucugacgccccuaucggaaaguguaacagcgaaugcauuacccccaauggcuccaucccgaacgacaaaccuuuucagaauguuaaccggaucacauacggcgccuguccccgcuaugugaagcagaauacgcuuaaacuggcgaccgggaugagaaacgugccugagaagcaaacacggggaauuuucggcgccaucgcuggguuuauugaaaauggaugggagggcauggucgaugggugguacggauuccgccaccagaacagcgagggcaccggccaggccgcugaccucaaaucuacacaagccgccaucaaucagauuaacgggaagcugaauagacuuaucgaaaagaccaacgagaaauaucaucagaucgaaaaggaguuuuccgaaguggagggacggauucaggaucuggagaaauacguugaagacacgaagaucgaucucuggagcuauaaugcugagcugcugguggcgcucgaaaaccaacacacaauugaccugaccgauucugagaugaacaaacuuuucgaaagaacccgcaagcagcugcgggagaaugccgaggacaugggcaacgggugcuucaagaucuaccauaaaugugauaaugcuugcauuggauccaucagaaacggcacauacgaccacgaugucuaucgcgacgaagcccucaauaaccgguuucagauuaaggggguggagcugaaaagcggcuacaaggacuggauccuuuggaucuccuucgccauuucuugcuuucugcucuguguugugcugcugggauucaucaugugggcuugccagaaaggcaauauuagauguaacaucugcauuuga

SEQ ID NO: 193442 - RNA, 1701 nt, Artificial Sequence
  derived and/or modified CDS sequence (opt5) from hemagglutinin__InfluenzaA__ABJ09272
augaagaccaucauugcccugagcuacauccucugccugguguucgcucagaaacuucccggcaacgacaauuccacagccacgcugugucucgggcaccaugcggucccuaacggaacccugguuaagacaauuaccaaugaucaaaucgaggugacaaacgcuaccgaacuugugcagucuagcuccacaggcagaauuugcaauucuccgcaccagauccuggacggggagaacuguacccucaucgaugcccugcugggagacccccauugcgauggcuuucagaauaaagaaugggaccucuucgucgagcggcgcaaggccuauagcaacuguuacccuuaugaugugcccgacuacgcuucccugagaucucuuguugccagcuccgggacgcuggaauuuaauaacgagagcuucaauuggaccggaguggcucaaaacggcacaucuuccgccugcaaacggcgcagcauuaaguccuuuuucucuagacucaauuggcugcaccagcuuaaguauaaauacccugcgcugaacgucaccaugcccaauaacgagaaguuugauaaacucuauaucuggggcgugcaucacccuagcacagacucugaucagauuucccuguacgcccaggcuagcgggcggguuaccguguccacgaagcgcucucaacagacagucaucccgaacauuggaagcagacccugggugcggggcguguccagccgcaucucuauuuacuggaccaucgucaaaccuggggacauccugcucauuaauuccacaggaaaccugaucgcccccagaggcuauuucaagauucggagcgggaagucuagcaucaugcgcuccgaugcuccuauuggaaaauguaauucugaaugcaucacccccaacggcagcaucccgaaugacaagccuuuucagaacguuaauagaauuaccuacggcgccuguccccgguaugugaaacagaacacacuuaagcuggcgacggggaugcgcaaugugccugagaaacaaaccagaggaaucuucggcgccauugcuggguuuaucgaaaacggaugggagggcauggucgacgggugguacggauuccggcaccaaaauuccgagggcacaggccaggccgcugaucucaagagcacccaggccgccauuaaccagaucaaugggaaacugaacagacuuaucgaaaagacaaaugagaaguuucaucagauugaaaaagaguucucugaaguggagggacgcauccaggaccuggagaaggauguugaagacaccaaaauugaucucugguccuauaacgcugagcugcugguggcgcucgaaaaccaacacacgaucgaccugacagauagcgagaugaauaaacuuuucgaacggaccaagaagcagcugagagagaacgccgaggacaugggcaaugggugcuuuaagauuuaccauaaaugugauaacgcuugcaucggaucuauucgcaauggcaccuaugaccacgaugucuaccgggacgaagcccucaacaauagauuccagaucaaggggguggagcugaaauccggcuacaaggacuggauccuuuggauuagcuuugccaucuccugcuuccugcucuguguugugcugcugggauuuauuaugugggcuugccagaaaggcaacauccgcuguaauauuugcaucuga

SEQ ID NO: 193443 - RNA, 1701 nt, Artificial Sequence; identical to SEQ ID NO: 192144
  derived and/or modified CDS sequence (opt5) from hemagglutinin__InfluenzaA__ABJ09294

SEQ ID NO: 193444 - RNA, 1701 nt, Artificial Sequence
  derived and/or modified CDS sequence (opt5) from hemagglutinin__InfluenzaA__ABJ09305
augaagaccaucauugcccugagcuacauccucugccugguguucgcucagaaacuucccggcaacgacaauuccacagccacgcugugucucgggcaccaugcggucccuaacggaacccugguuaagacaauuaccaaugaucaaaucgaggugacaaacgcuaccgaacuugugcagucuagcuccacaggcagaauuugcgacucuccgcaccagauccuggauggggagaauuguacccucaucgacgcccugcugggagauccccauugcgacggcuuucagaacaaagaaugggaucucuucgucgagcggagcaaggccuauuccaauuguuacccuuaugacgugcccgauuacgcuucucugcgcagccuuguugccuccagcgggacgcuggaauuuaacaaugagucuuucaacuggaccggaguggcucaaaauggcacauccagcgccugcaaaagacggucuaacaaguccuuuuucagccgccucaauuggcugcaccagcuuaaguauaaauacccugcgcugaacgucaccaugcccaauaacgagaaguuugacaaacucuauauuuggggcgugcaucacccuucuacagauuccgaccagaucagccuguacgcccaggcuuccgggagaguuaccgugucuacgaagcggagccaacagacagucauuccgaacaucggaucccgccccugggugagaggcgugagcucucggauuuccaucuacuggaccauugucaaaccuggggauauccugcucaucaauagcacaggaaaccugauugcccccagaggcuauuucaagaucagaucuggaaagagcuccauuaugcggucugacgcuccuaucgggaaauguaauagcgaaugcauuacccccaacggcuccaucccgaaugacaagccuuuucagaacguuaaucgcaucaccuacggcgccugucccagauaugugaaacagaacacacuuaagcuggcgacggggaugcggaaugugccugagaaacaaacccgcggaauuuucggcgccaucgcuggguuuauugaaaacggaugggagggcauggucgaugggugguacggauucagacaccagaauagcgagggcacaggccaggccgcugaccucaagucuacccaagccgccaucaaccagauuaaugggaaacugaaccggcuuaucgaaaagacaaaugagaaguuucaucagaucgaaaaagaguucuccgaaguggagggacgcauucaggaucuggagaaguauguugaagacaccaaaaucgaucucuggagcuacaacgcugagcugcugguggcgcucgaaaaccaacacacgauugaccugacagauucugagaugaauaaacuuuucgaacgcaccaagaagcagcugcgggagaacgccgaggacaugggcaaugggugcuuuaagaucuaucauaaaugugauaacgcuugcauuggauccaucagaaaugaaaccuacgaccacgaugucuaccgcgacgaggcccucaacaaucgguuccagauuaagggcguggaacugaaaagcggguauaaggacuggauccuuuggaucuccuuugccauuucuugcuuccugcucuguguugugcugcugggcuuuaucaugugggcuugccagaaaggaaacauuagauguaauaucugcauuuga

SEQ ID NO: 193445 - RNA, 1701 nt, Artificial Sequence
  derived and/or modified CDS sequence (opt5) from hemagglutinin__InfluenzaA__ABJ09316
augaagaccaucauugcccugagcuacauccucugccugguguucgcucagaaacuucccggcaacgacaauuccacagccacgcugugucucgggcaccaugcggucccuaacggaacccugguuaagacaauuaccaaugaucaaaucgaggugacaaacgcuaccgaacuugugcagucuagcuccacaggcagaauuugcgacucuccgcaccagauccuggauggggagaauuguacccucaucgacgcccugcugggagauccccauugcgacggcuuucagaacaaagaaugggaucucuucgucgagcggagcaaggccuauuccaauuguuacccuuaugacgugcccgauuacgcuucucugcgcagccuuguugccuccagcgggacgcuggaauuuaacaaugagucuuucaacuggaccggaguggcucaaaauggcacauccagcgccugcaaaagacggucuaacaaguccuuuuucagccgccucaauuggcugcaccagcuuaaguauaaauacccugcgcugaacgucaccaugcccaauaacgagaaguuugacaaacucuauauuuggggcgugcaucacccuucuacagauuccgaccagaucagccuguacgcccaggcuuccgggagaguuaccgugucuacgaagcggagccaacagacagucauuccgaacaucggaucccgccacugggugagaggcgugagcucucggauuuccaucuacuggaccauugucaaacccggggauauccugcucaucaauagcacaggaaaccugauugccccucgcggcuauuucaagaucagaucugggaagucuuccauuaugcggucugacgcuagcaucggaaaauguaauuccgaaugcauuacccccaacggcagcaucccuaaugacaagcccuuucagaacguuaaucgcaucaccuacggcgccuguccgagauaugugaaacagaacacacuuaagcuggcgacggggaugcggaaugugccugagaaacaaacccgcggaauuuucggcgccaucgcuggguuuauugaaaacggaugggagggcauggucgaugggugguacggauucagacaucagaauagcgagggcacaggccaggccgcugaccucaaguccacccaagccgccaucaaccagauuaaugggaaacugaaccggcuuaucgaaaagacaaaugagaaguuucaccagaucgaaaaagaguucagcgaaguggagggacgcauucaggaucuggagaaguauguugaagacaccaaaaucgaucucuggucuuacaacgcugagcugcugguggcgcucgaaaaccaacauacgauugaccugacagauuccgagaugaauaaacuuuucgaaagaaccaagaagcagcugcgggagaacgccgaggacaugggcaaugggugcuuuaagaucuaucacaaaugugauaacgcuugcauuggaagcaucagaaauggcaccuacgaccacgaugucuaccgcgacgaagcccucaacaaucgguuccagauuaaggggguggagcugaaauccggcuauaaggacuggauccuuuggaucucuuuugccauuagcugcuuccugcucuguguugugcugcugggauuuaucaugugggcuugccagaaaggcaacauuagauguaauaucugcauuuga

SEQ ID NO: 193446 - RNA, 1701 nt, Artificial Sequence; identical to SEQ ID NO: 192722
  derived and/or modified CDS sequence (opt5) from hemagglutinin__InfluenzaA__ABJ09338

SEQ ID NO: 193447 - RNA, 1701 nt, Artificial Sequence
  derived and/or modified CDS sequence (opt5) from hemagglutinin__InfluenzaA__ABJ09349
augaagaccaucauugcccugagcuacauccucugccugguguucgcucagaaacuucccggcaacgacaauuccacagccacgcugugucucgggcaccaugcggucccuaacggaacccugguuaagacaauuaccaaugaucaaaucgaggugacaaacgcuaccgaacuuauucagucuagcuccacaggcgggaucugcgacucuccgcaccagauccuggauggagagaauuguacccucauugacgcccugcugggcgauccccauugcgacggguuucagaacaaagaaugggaucucuucguggagagaagcaaggccuauuccaauuguuacccuuaugacguccccgauuacgcuucucugcggagccuuguggccuccagcggaacgcuggaauuuaacaaugagucuuucaacuggaccggcguugcucaaaauggcacauccagcgccugcaaacgcagaucuaacaaguccuuuuucagccggcucaauuggcugcaccagcuuaaguauaaauacccugcgcugaacgugaccaugcccaauaacgagaaguuugacaaacucuauaucuggggaguccaucacccuucuacagauuccgaccagauuagccuguacgcccaggcuccggggcgcgugaccguuuccacgaagagaucucaacagacagugauccccaacauuggcagccggccuuggguccgcgggguguccagcagaaucucuauuuacuggaccaucgugaaacccggagauauccugcucauuaauuguacaggcaaccugaucgccccucggggguauuucaagauucgcuccggaaagagcucuaucaugagaagcgacgcuuccauuggcaaaugcaauucugaauguaucacccccaacggcagcaucccgaaugacaagccuuuucagaacgucaaucggauuaccuacggggccugcccccgcuauguuaaacagaacacacuuaagcuggcgacgggaaugagaaaugugccugagaaacaaacccggggcaucuucggggccauugcuggauuuaucgaaaacggcugggaggggaugguggauggaugguacggcuuccgccaccaaaauuccgagggcacagggcaggccgcugaccucaagagcacccaggccgccauuaaccagaucaauggaaaacugaacagacuuaucgaaaagacaaaugagaaguuucaucagauugaaaaagaguucucugaagucgagggccggauccaggaucuggagaaguauguggaagacaccaaaauugaucucugguccuacaacgcugagcugcugguugcgcucgaaaaccaacacacgaucgaccugacagauagcgagaugaauaaacuuuucgaaagaaccaagaagcagcugcgcgagaacgccgaggacauggggaauggauguuuuaagauuuaucauaaaugcgauaacgcuugcaucggcucuauucggaaugggaccuacgaccacgauguguacagagacgaagcccucaacaaucgcuuccagaucaagggcgucgagcugaaauccggauauaaggacuggauccuuuggauuagcuuugccaucuccuguuuccugcucugcgugguucugcugggcuuuauuaugugggcuugucagaaagggaacauccggugcaauauuuguaucuga

SEQ ID NO: 193448 - RNA, 1701 nt, Artificial Sequence; identical to SEQ ID NO: 192722
  derived and/or modified CDS sequence (opt5) from hemagglutinin__InfluenzaA__ABJ09360

SEQ ID NO: 193449 - RNA, 1701 nt, Artificial Sequence
  derived and/or modified CDS sequence (opt5) from hemagglutinin__InfluenzaA__ABJ09371
augaagaccaucauugcccugagcuacauccucugccugguguucgcucagaaacuucccggcaacgacaauuccacagccacgcugugucucgggcaccaugcggucccuaacggaaccauuguuaagacaaucaccaaugaucaaauugaggugacaaacgcuaccgaacuggugcagucuagcuccacaggcgggaucugcgacucuccgcaccagauccuugauggagagaauuguacccugauugacgcccuccugggcgauccccagugcgacggguuucaaaacaaaaagugggaucuguucgucgaaagaagcaaagccuauuccaauuguuacccuuaugacgugcccgauuacgcuucucuccggagccugaucgccuccagcggaacgcuugaguuuaacaaugaaucuuucaacuggaccggcguuacacagaauggcaccuccagcgcuugcaagcgcagaucuaacuccagcuuuuucucucggcugaauuggcucacacaucugaaguuuaaauauccugcccuuaacgugaccaugcccaauaacgaggaguucgacaagcuguacauuuggggaguccaccauccugggacguauaacgaucagaucucccucuacgcgcaggccagcggccgcauuacaguguccaccaaaagaucucaacagacaguuaucccgaauauugggagccggcugcgcgugagagacauccccucccggaucagcauuuacuggaccaucgucaagccuggagauauucugcucaucaacucuaccggcaaucugauugcuccccgcggguauuuuaaaaucagauccggaaagagcucuaucaugcggagcgacgccccuauuggcaaguguaacuccgaaugcaucacacccaauggcucuauuccgaacgacaaaccuuuccagaaugugaaccgcaucacguacggggcuugucccagauaugugaagcagaauacccuuaaacuggccacaggaaugcggaacgucccugagaagcaaacccgcggcauuuuuggggcgaucgccggauucaucgaaaauggcugggaggggaugguugauggaugguacggcuuuagacaccagaacagcgagggcauugggcaggcugccgaccucaaauccacacaagcugccaucgaucagauuaauggaaagcugaaccggcuuaucggcaaaaccaaugaaaaguuccaccagauugagaaggaguucagcgaaguggaagggagaauccaggaccuggagaaauauguggaggauacgaagauugaccucuggucuuacaacgccgaacugcuggucgcucucgagaaccaacauacaaucgaucugaccgacuccgaaaugaauaaacuuuuugagcgcaccaagaaacagcugcgggaaaacgcggaggauaugggaaauggcugcuucaagaucuaucacaagugugacaacgccugcauugggagcaucagaaauggcacauacgaucaugacguguaccgcgacgaggcucucaacaaucgguuucagauuaaaggaguugaacugaagucuggcuauaaagauuggauccuuuggauuuccuucgccaucagcugcuuucugcucuguguggcccugcugggguucaucaugugggcuugccagaagggaaacauuagauguaauaucugcauuuga

SEQ ID NO: 193450 - RNA, 1701 nt, Artificial Sequence; identical to SEQ ID NO: 192705
  derived and/or modified CDS sequence (opt5) from hemagglutinin__InfluenzaA__ABJ09382

SEQ ID NO: 193451 - RNA, 1701 nt, Artificial Sequence
  derived and/or modified CDS sequence (opt5) from hemagglutinin__InfluenzaA__ABJ16587
augaagaccaucauugcccugagcuacaucuccugccucguguucgcucagaaacugcccggcaacgacaauucuacagccacgcuuugucuggggcaccaugcggucccuaacggaacccucguuaagacaauuaccaaugaucaaaucgaggugacaaacgcuaccgaacuggugcagagcuccucuacaggcagaauuugcgacagcccgcaccagauccuugauggggagaauuguacccugaucgacgcccuccugggagauccccauugcgacggcuuucagaacaaagaaugggaucuguucgucgagcgguccaaggccuauucuaauuguuacccuuaugacgugcccgauuacgcuagccuccgcucccugguugccagcucugggacgcuugaauuuaacaaugaguccuucaacuggaccggaguggcucaaaauggcacaagcucugccugcaaaagacgguccauuaagagcuuuuucucucgccugaacuggcuccaccagcugaaguauagauacccugcgcuuaaugucaccaugcccaacaaugacaaauuugauaagcuguauaucuggggcgugcaucacccuuccacagacagcgaucagaccucccucuacgcccaggcuucugggcggguuacggugagcacaaaacgcucccaacagaccgucauuccgaacaucggaagcagacccugggugcggggcgugucuucccgcauuagcaucuacuggacaauugucaagccuggggacauccugcugaucaacucuaccggaaaucucauugcccccagaggcuauuucaaaauccggagcgggaaguccucuauuaugcgcagcgacgcuccuaucggaaaguguaacuccgagugcauuacccccaauggcagcaucccgaacgauaaaccuuuucagaauguuaacagaaucacauacggcgccuguccccgguaugugaagcagaauacgcugaaacuugcgaccgggaugcgcaacgugccugaaaagcaaacaagaggaauuuucggcgccaucgcuggguuuauugagaauggaugggaaggcaugauggacgggugguacggauuccggcaccagaacucugagggcaccggccaggccgcugaucugaaauccacacaagccgccaucaaucagauuaacgggaagcucaauagacugaucgagaaaaccaacgaaaaguuucaucagaucgagaaggaguucagcgaagucgaaggacgcauucaggaccuugagaaauauguggaggauacgaagaucgaccuguggucuuacaaugcugaacuccugguugcgcuggagaaccaacacacaauugaucucaccgacuccgaaaugaacaaacuguucgagcggaccagaaagcagcuucgcgaaaaugccgaggauaugggcaacgggugcuuuaaaaucuaucauaagugugacaaugcuugcauuggaagcauccggaacggcacauacgaucacgacguguacagagacgaggcccugaauaaccgcuuccagauuaagggggucgaacucaaauccggcuauaaggauuggauccuguggaucucuuuugccauuagcugcuuccuucugugugugguucuccugggauuuaucaugugggcuugccagaaaggcaauauucgguguaacaucugcauuuga

SEQ ID NO: 193452 - RNA, 1701 nt, Artificial Sequence
  derived and/or modified CDS sequence (opt5) from hemagglutinin__InfluenzaA__ABJ16598
augaagaccaucauugcccugagcuacauccucugccugguguucgcucagaaacuucccggcaacgacaauuccacagccacgcugugucucgggcaccaugcggucccuaacggaacccugguuaagacaauuaccaaugaucaaaucgaggugacaaacgcuaccgaacuugugcagucuagcuccacaggcagaauuugcaauucuccgcaccagauccuggacggggagaacuguacccucaucgaugcccugcugggagacccccauugcgauggcuuucagaauaaagaaugggaccucuucgucgagcggagcaaggccuauuccaacuguuacccuuaugaugugcccgacuacgcuucucugcgcagccuuguugccuccagcgggacgcuggaauuuaauaacgagucuuucaauuggaccggaguggcucaaaacggcacauccagcgccugcaaaagacggucuauuaaguccuuuuucagccgccucaauuggcugcaccagcuuaaguauaaauacccugcgcugaacgucaccaugcccaauaacgagaaguuugauaaacucuauaucuggggcgugcaucacccuucuacagacuccgaucagauuagccuguacgcccaggcuuccgggagaguuaccgugucuacgaagcggagccaacagacagucaucccgaacauuggaucccgccccugggugagaggcgugagcucucggaucuccauuuacuggaccaucgucaaaccuggggacauccugcucauuaauagcacaggaaaccugaucgcuccccgcggcuauuucaagauuagaucuggaaagagcuccaucaugcggucugaugccccuauugggaaauguaauagcgaaugcaucacccccaacggcuccaucccgaaugacaagccuuuucagaacguuaaucgcauuaccuacggcgccugucccagauaugugaaacagaacacacuuaagcuggcgacggggaugcggaaugugccugagaaacaaacccgcggaaucuucggcgccauugcuggguuuaucgaaaacggaugggagggcauggucgacgggugguacggauucagacaccagaauagcgagggcacaggccaggccgcugaucucaagucuacccaagccgccauuaaccagaucaaugggaaacugaaccggcuuaucgaaaagacaaaugagaaguuucaucagauugaaaaagaguucuccgaaguggagggaagaauccaggaccuggagaaguauguugaagauaccaaaauugaccucuggagcuacaacgcugagcugcugguggcgcucgaaaaccaacacacgaucgaucugacagacucugagaugaauaaacuuuucgaacgcaccaagaagcagcugcgggagaacgccgaggauaugggcaaugggugcuuuaagauuuaucauaaaugugacaacgcuugcaucggauccauuagaaauggcaccuacgaucacgacgucuaccgcgaugaagcccucaacaaucgguuccagaucaaggggguggagcugaaaagcggcuauaaggacuggauccuuuggauuuccuuugccaucucuugcuuccugcucuguguugugcugcugggauuuauuaugugggcuugccagaaaggcaacaucagauguaauauuugcaucuga

SEQ ID NO: 193453 - RNA, 1701 nt, Artificial Sequence
  derived and/or modified CDS sequence (opt5) from hemagglutinin__InfluenzaA__ABJ16620
augaagaccaucauugcccugagcuacauccucugccugguguucgcucagaaacuucccggcaacgacaauuccacagccacgcugugucucgggcaccaugcggucccuaacggaacccugguuaagacaauuaccaaugaucaaaucgaggugacaaacgcuaccgaacuugugcagucuagcuccacaggcagaauuugcaauucuccgcaccagauccuggacggggagaacuguacccucaucgaugcccugcugggagacccccauugcgauggcuuucagaauaaagaaugggaccucuucgucgagcggaacaaggccuauagcaauuguuacccuuaugaugugcccgacuacgcuucccugcgcucucuuguugccagcuccgggacgcuggaauuuaacaaugagagcuucaacuggaccggaguggcucaaaauggcacaucuuccgccugcaaaagacggagcauuaagucuuucuucucccgccucaacuggcugcaccagcuuaaguauaaauacccugcgcugaaugucaccaugcccaacaacgagaaguuugauaaacucuauaucuggggcgugcaucacccuagcacagacucugaucagauuucccuguacgcccaggcuagcgggagaguuaccguguccacgaagcggucucaacagacagucaucccgaauauuggaagccgccccugggugagaggcguguccagccggaucucuauuuacuggaccaucgucaaaccuggggacauccugcucauuaacuccacaggaaaucugaucgcuccccgcggcuauuucaagauuagaagcgggaagucuagcaucaugcgguccgaugccccuauuggaaaauguaacucugaaugcaucacccccaauggcagcaucccgaacgacaagccuuuucagaauguuaaccgcauuaccuacggcgccugucccagauaugugaaacagaauacacuuaagcuggcgacggggaugcggaacgugccugagaaacaaacccgcggaaucuucggcgccauugcuggguuuaucgaaaauggaugggagggcauggucgacgggugguacggauucagacaccagaacuccgagggcacaggccaggccgcugaucucaagagcacccaagccgccauuaaucagaucaacgggaaacugaaucggcuuaucgaaaagacaaacaagaaauuucaucagauugagaaggaauuuucugagguggaaggaagaauccaggaccuggagaaauauguugaggauaccaagauugaccucugguccuacaacgcugaacugcugguggcgcucgagaaucaacacacgaucgaucugacagacagcgaaaugaacaaacuuuucgagcgcaccaagaagcagcugcgggaaaaugccgaggauaugggcaacgggugcuuuaaaauuuaucauaagugugacaaugcuugcaucggaucuauuagaaacggcaccuacgaucacgacgucuaccgcgaugaggcccucaauaaccgguuccagaucaaagggguggaacugaaguccggcuauaaagacuggauccuuuggauuagcuuugccaucuccugcuuccugcucuguguugugcugcugggauuuauuaugugggcuugccagaagggcaauaucagauguaacauuugcaucuga

SEQ ID NO: 193454 - RNA, 1701 nt, Artificial Sequence
  derived and/or modified CDS sequence (opt5) from hemagglutinin__InfluenzaA__ABJ16631
augaagaccaucauugcccugagcuacauccucugccugguguucgcucagaaacuucccggcaacgacaauuccacagccacgcugugucucgggcaccaugcggucccuaacggaaccauuguuaagacaaucaccaaugaucaaauugaggugacaaacgcuaccgaacuggugcagucuagcuccacaggcgggaucugcgacucuccgcaccagauccuugauggagagaauuguacccugauugacgcccuccugggcgauccccagugcgacggguuucaaaacaaaaagugggaucuguucgucgaaagaagcaaagccuauuccaauuguuacccuuaugacgugcccgauuacgcuucucuccggagccugaucgccuccagcggaacgcuugaguuuaacaaugaaucuuucaacuggaccggcguuacacagaauggcaccuccagcgcuugcaagcgcagaucuaacuccagcuuuuucucucggcugaauuggcucacacaucugaaguuuaaauauccugcccuuaacgugaccaugcccaauaacgaggaguucgacaagcuguacauuuggggaguccaccauccugggacguauaacgaucagaucucccucuacgcgcaggccagcggccgcauuacaguguccaccaaaagaucucaacagacaguuaucccgaauauugggagccggccccgcgugagagacaucccuucccggaucagcauuuacuggaccaucgucaagcccggagauauucugcugaucaacucuaccggcaaucucauugcuccucgcggguauuuuaaaaucagauccggaaagagcucuaucaugcggagcgacgcccccauuggcaaguguaacuccgaaugcaucacaccgaauggcucuauuccuaacgacaaacccuuccagaaugugaaccgcaucacguacggggcuuguccuagauaugugaagcagaauacccugaaacuugccacaggaaugcggaacguccccgagaagcaaacccgcggcauuuuuggggcgaucgccggauucaucgaaaauggcugggaggggaugguugauggaugguacggcuuuagacaccagaacagcgagggcauugggcaggcugccgaccugaaauccacacaagcugccaucgaucagauuaauggaaagcucaaccggcugaucggcaaaaccaaugaaaaguuccaccagauugagaaggaguucagcgaaguggaagggagaauccaggaccuugagaaauauguggaggauacgaagauugaccuguggucuuacaacgccgaacuccuggucgcucuggagaaccaacauacaaucgaucucaccgacuccgaaaugaauaaacuguuugagaagaccaaaaagcagcuucgcgaaaacgcggaggauaugggaaauggcugcuucaagaucuaucacaaaugugacaacgccugcauugggagcauccggaauggcacauacgaucaugacguguacagagacgaggcucugaacaaucgcuuucagauuaagggaguugaacucaaaucuggcuauaaggauuggauccuguggauuuccuucgccaucagcugcuuucuucuguguguggcccuccugggguucaucaugugggcuugccagaaaggaaacauucgguguaauaucugcauuuga

SEQ ID NO: 193455 - RNA, 1698 nt, Artificial Sequence
  derived and/or modified CDS sequence (opt5) from hemagglutinin__InfluenzaA__ABJ16664
augaaggugaaacugcucguccugcuuugcaccuucacagccacguacgcugacaccaucuguauuggcuaucacgccaacaauagcacagauaccguugacacagugcuggagaagaacgugaccgucacacauuccgugaaucuccuggaagauucucacaacgggaaacuuugccugcucaagggaaucgcgccccugcagcugggcaauuguagcguugcuggguggauucucggaaacccugagugcgaacugcuuaucuccaaagagucuuggagcuacauuguggaaaccccgaaucccgagaacggcacguguuauccugggcauuuugccgacuacgaggaacugagagagcaacucuccucugucagcuccuucgaacgguuugagaucuuccccaaggagagcucuuggccuaaucacaccgugacaggaguuuccgccagcugcucucauaacggcaaguccagcuuuuaucgcaaucugcuuuggcugaccggcaaaaacgggcucuaccccaaucugucuaaguccuaugcuaacaauaaagaaaaggaggugcugguccucuggggagugcaccacccuccgaacaucggcgaucagagagcccuguaccauacagaaaacgcuuacgugagcgucguuuccucucacuauagccggcgcuucacccccgagauugccaaaagaccuaaggugcgggaccaggaagggcgcaucaauuacuauuggacgcuucuggagcccggagauacaauuaucuuugaggcgaacggcaaucucauugccccuagauucgcuuuugcccugucccggggguucggaagcggcaucauuaccucuaacgcucccauggacgaaugugaugccaagugccagacaccgcaaggcgcgaucaauuccagccuuccuuuucagaacgugcaucccgucaccaucggggaguguccuaaauacgugcgcucugccaagcugagaaugguuaccggacuccggaauauucccagcauccagucccgcggccuguucggggcuauugccggauuuaucgaaggcggguggacaggaaugguggacggcugguauggcuaccaccaccagaacgagcaagggucuggauaugcugccgaucagaaaagcacgcagaaugccauuaacggcaucaccaauaaggucaacuccgugaucgaaaagaugaauacacaguucaccgcuguugggaaagaguucaacaaacuggagagacggauggaaaaucucaacaagaagguggacgauggauuucuggacauuuggacauacaacgcggagcuucugguccuccuggaaaaugagcgcacccuugacuuccaugauagcaacgugaaaaaucuguacgaaaaggucaaaucucaacucaagaacaaugccaaagagaucggcaacgggugcuuugaguucuaucacaaguguaaugacgaaugcauggaguccgugaagaacggcacguacgauuaucccaaauacagcgaagagucuaagcugaauagagagcggauugacggaguuaaacuggaauccaugggcguguaucagauccucgcuauuuacagcacagucgccuccucucuggugcuucugguuagccucggggccaucuccuuuuggaugugcucuaacggaagccugcaguguagaaucugcauuuga

SEQ ID NO: 193456 - RNA, 1698 nt, Artificial Sequence; identical to SEQ ID NO: 193276
  derived and/or modified CDS sequence (opt5) from hemagglutinin__InfluenzaA__ABJ16675

SEQ ID NO: 193457 - RNA, 1698 nt, Artificial Sequence
  derived and/or modified CDS sequence (opt5) from hemagglutinin__InfluenzaA__ABJ16686
augaaggugaaacugcucguccugcuuugcaccuucacagccacguacgcugacaccaucuguauuggcuaucacgccaacaauagcacagauaccguugacacagugcuggagaagaacgugaccgucacacauuccgugaaucuccuggaagauucucacaacgggaaacuuugccugcucaagggaaucgcgccccugcagcugggcaauuguagcguugcuggguggauucucggaaacccugagugcgaacugcuuaucuccaaagagucuuggagcuacauuguggaaaccccgaaucccgagaacggcacguguuauccuggguacuuugccgacuaugaggaacugagagagcaacucuccucugucagcuccuucgaacgguuugagaucuuccccaaggagagcucuuggccuaaucauaccgugacaggaguuuccgccagcugcucucacaacggcaaguccagcuuuuaccgcaaucugcuuuggcugaccggcaaaaacgggcucuaucccaaucugucuaaguccuacgcuaacaauaaagaaaaggaggugcugguccucuggggagugcaucacccuccgaacaucggcgaucagagagcccuguaccacacagaaaacgcuuaugugagcgucguuuccucucauuacagccggcgcuucacccccgagauugccaaaagaccuaaggugcgggaccaggaagggcgcaucaauuauuacuggacgcuucuggagcccggagauacaauuaucuuugaggcgaacggcaaucucauugccccuagauucgcuuuugcccugucccggggguucggaagcggcaucauuaccucuaacgcucccauggacgaaugugaugccaagugccagacaccgcaaggcgcgaucaauuccagccuuccuuuucagaacgugcaccccgucaccaucggggaguguccuaaauaugugcgcucugccaagcugagaauggcuaccggacuccggaauauucccagcauccagucccgcggccuguucggggccauugcuggauuuaucgaaggcggguggacaggaaugguugacggcugguacggcuaucaucaccagaacgagcaagggucuggauacgccgccgaucagaaaagcacgcagaaugcuauuaacggcaucaccaauaaggugaacuccgucaucgaaaagaugaauacacaguucaccgcgguggggaaagaguucagcaaacuggagagacggauggaaaaccucaauaagaagguugacgauggauuucuggacauuuggacauacaacgccgagcuucuggugcuccuggaaaacgagcgcacccuugacuuccacgauucuaaugucaaaaaccuguaugaaaaggugaaaucccaacucaagaauaacgcuaaagagaucggcaaugggugcuuugaguucuaccauaaguguaacgacgaaugcauggagagcgucaagaauggcacguaugauuaccccaaauauucugaagaguccaagcugaacagagagaaaauugacggagugaagcuggaaagcaugggcguuuaccagauccucgccauuuauuccacaguggccucuagccugguccuucuggugucccucggggcuaucucuuuuuggaugugcagcaauggaucccugcagugucggaucugcauuuga

SEQ ID NO: 193458 - RNA, 1701 nt, Artificial Sequence
  derived and/or modified CDS sequence (opt5) from hemagglutinin__InfluenzaA__ABJ16697
augaagaccaucauugcccugagcuacauccucugccugguguucgcucagaaacuucccggcaacgacaauuccacagccacgcugugucucgggcaccaugcggucccuaacggaacccugguuaagacaauuaccaaugaucaaaucgaggugacaaacgcuaccgaacuugugcagucuagcuccacaggcgggauuugcgacucuccgcaccagauccuggauggagagaauuguacccucaucgacgcccugcugggcgauccccauugcgacggguuucagaacaaagaaugggaucucuucgucgagagaagcaaggccuauuccaauuguuacccuuaugacgugcccgauuacgcuucucugcggagccuuguugccuccagcggaacgcuggaauuuaacaaugagucuuucaacuggaccggcguggcucaaaauggcacauccagcgccugcaaacgcagaucuaacaaguccuuuuucagccggcucaauuggcugcaccagcuuaaguauaaauacccugcgcugaacgucaccaugcccaauaacgagaaguuugacaaacucuauauuuggggagugcaucacccuucuacagauuccgaccagaucagccuguacgcccaggcuccggggcgcguuaccguguccacgaagagaucucaacagacagucauucccaacaucggcagccggccuugggugcgcgggguguccagcagaauuucuaucuacuggaccauugucaaacccggagauauccugcucaucaauuguacaggcaaccugauugccccucggggguauuucaagauccgcuccggaaagagcucuauuaugagaagcgacgcuuccaucggcaaaugcaauucugaauguauuacccccaacggcagcaucccgaaugacaagccuuuucagaacguuaaucggaucaccuacggggccugcccccgcuaugugaaacagaacacacuuaagcuggcgacgggaaugagaaaugugccugagaaacaaacccggggcauuuucggggccaucgcuggauuuauugaaaacggcugggaggggauggucgauggaugguacggcuuccgccaccaaaauuccgagggcacagggcaggccgcugaccucaagagcacccaggccgccaucaaccagauuaauggaaaacugaacagacuuaucgaaaagacaaaugagaaguuucaucagaucgaaaaagaguucucugaaguggagggccggauucaggaucuggagaaguauguugaagacaccaaaaucgaucucugguccuacaacgcugagcugcugguggcgcucgaaaaccaacacacgauugaccugacagauagcgagaugaauaaacuuuucgaaagaaccaagaagcagcugcgcgagaacgccgaggacauggggaauggauguuuuaagaucuaucauaaaugcgauaacgcuugcauuggcucuauccggaaugggaccuacgaccacgaugucuacagagacgaagcccucaacaaucgcuuccagauuaagggcguggagcugaaauccggauauaaggacuggauccuuuggaucagcuuugccauuuccuguuuccugcucugcgcuguucugcugggcuuuaucaugugggccugucagaaagggaacauucggugcaauaucuguauuuga

SEQ ID NO: 193459 - RNA, 1701 nt, Artificial Sequence
  derived and/or modified CDS sequence (opt5) from hemagglutinin__InfluenzaA__ABJ16730
augaaggccaaacugcucgugcugcuuugcgcuuucaccgccacauacgcggacacgaucuguauuggcuaucacgcuaacaauagcaccgauacagucgacaccguucuggagaagaacgugacagugacccauuccgucaaucuccuggaagauucucacaacgggaaacuuugcagacugaagggaacagcuccccuccagcugggcaauuguagcaucgccggguggauucugggaaacccugagugcgaaucccucuuuucuaaagagagcugguccuacaucgccgaaaccccgaaucccaagaacggcacguguuauccuggguacuucgccgacuaugaggagcugcgggaacaacuuucuagcguguccagcuuugagcgcuucgaaauuuuucccaaggauucuuccuggccuaaucauaccguuacaaaaggagugaccgcuagcugcucucacaacggcaaguccagcuucuacaaaaaucugcucuggcugacagagaagaacggccuuuaucccaaucugucuaaauccuacgucaacaagaaggggaaagaggugcucguucuguggggagugcaucacccuagcaauaugggcgaccagagagccaucuaccacaaggaaaacgcguaugucuccgugcugucuagccauuacucccggcgcuuuaccccggagaucgccagacggcccaaagugcgcgaucaggaagggagaauuaacuauuacuggacgcuccuggagccuggagacacaaucauuuucgaagcuaauggcaaccuuaucgcccccugguaugcuuuugcccugagccggggguucggaucuggcauuaucauuuccaaugcgagcaugggcgagugugaugccaagugccagaccccucaaggggcuaucaacucuagccuccccuuucagaauguccacccgguuacaaucggagaguguccuaaauacgugcgcuccaccaagcugagaauggugaccggccuucggaacguccccucuauucagagccgcgggcuguucggagccaucgcuggcuuuauugaagggggauggacaggcaugaucgacggcugguauggguaccaucaccagaaugagcaaggauccggcuacgccgccgaucagaaaagcacgcagaacgcuauuaaugggaucaccaacaagguuaauucuaucauugaaaagaugaacacacaguucaccgcggugggaaaagaguucaauaagcucgaaagacggauggagaaccugaauaaaaagguggacgauggcuuucuggacaucuggacauauaacgccgagcuccugguccuucuggaaaacgagcgcacccucgacuuccacgauuccaaugugaaaaaccuguacgaaaagguuaagaaucaacuuaaaaacaaugcuaaggagauugggaacggcugcuuugaguucuaucauaaauguaauaacgaaugcauggagagcgugaagaauggaacguacgacuauccuaaauacucuaaggaauccaagcugaacagagagaaaaucgauggcgucaagcucgaaagcauggggguguaucagauucuggccaucuacuccacagucgccucuagccuggugcuccugguuucccuuggagcuaucucuuuuuggaugugcagcaauggcucccugcagugucggauuugcaucuga

SEQ ID NO: 193460 - RNA, 1701 nt, Artificial Sequence
  derived and/or modified CDS sequence (opt5) from hemagglutinin__InfluenzaA__ABJ16741
augaagaccaucauugcccugagcuacauccucugccugguguucgcucagaaacuucccggcaacgacaauuccacagccacgcugugucucgggcaccaugcggucccuaacggaacccugguuaagacaauuaccaaugaucaaaucgaggugacaaacgcuaccgaacuugugcagucuagcuccacaggcgggauuugcgacucuccgcaccagauccuggauggagagaauuguacccucaucgacgcccugcugggcgauccccauugcgacggguuucagaacaaagaaugggaucucuucgucgagagaagcaaggccuauuccaauuguuacccuuaugacgugcccgauuacgcuucucugcggagccuuguugccuccagcggaacgcuggaauuuaacaaugagucuuucaacuggaccggcguggcucaaaauggcacauccagcgccugcaaacgcagaucuaacaagggguuuuucucccggcucaauuggcugcaccagcuuaaguauaaauacccugcgcugaacgucaccaugcccaauaacgagaaguuugacaaacucuauauuuggggagugcaucacccuagcacagauucugaccagaucucccuguacgcccaggcuccgggccgcguuaccgugagcacgaagagaucccaacagacagucauucccaacaucgggucucggccuugggugcgcggagugagcuccauuaucagcauuuacuggaccaucgucaaacccggcgauauccugcucauuaauuguacagggaaccugaucgccccuagaggauauuucaagauucggucuggcaaguccagcaucaugcgcucugacgcuagcauuggcaaaugcaauuccgaauguaucacccccaacgggucuaucccgaaugacaagccuuuucagaacguuaauagaauuaccuacggagccugcccccgguaugugaaacagaacacacuuaagcuggcgacgggcaugcgcaaugugccugagaaacaaaccagagggaucuucggagccauugcuggcuuuaucgaaaacgggugggagggaauggucgauggcugguacggcuuccggcaccagaauagcgaggggacaggacaggccgcugaccucaaguccacccaagccgccauuaaccagaucaauggcaaacugaaccgccuuaucgggaagacaaaugaaaaguuucaucagauugagaaagaguucagcgaaguggaaggaagaauccaggaucuggagaaguauguugaggacaccaaaauugaucucuggucuuacaacgcugaacugcugguggcgcucgagaaccaacacacgaucgaccugacagauuccgaaaugaauaaacuuuucgagcggaccaagaagcagcugagagaaaacgccgaggacaugggcaauggguguuuuaagauuuaucauaaaugcgauaacgcuugcaucggcagcauucgcaauggaaccuacgaccacgaugucuaccgggacgaggcccucaacaauagauuccagaucaagggcguggaacugaaaucuggguauaaggacuggauccuuuggauuuccuuugccaucagcuguuuccugcucugcguugugcugcugggauuuauuaugugggcuugucagaaaggcaacauccgcugcaauauuuguaucuga

SEQ ID NO: 193461 - RNA, 1701 nt, Artificial Sequence
  derived and/or modified CDS sequence (opt5) from hemagglutinin__InfluenzaA__ABJ16752
augaagaccaucauugcccugagcuacauccucugccugguguucgcucagaaacuucccggcaacgacaauuccacagccacgcugugucucgggcaccaugcggucccuaacggaacccugguuaagacaauuaccaaugaucaaaucgaggugacaaacgcuaccgaacuugugcagucuagcuccacaggcgggauuugcgacucuccgcaccagauccuggauggagagaauuguacccucaucgacgcccugcugggcgauccccauugcgacggguuucagaacaaagaaugggaucucuucgucgagagaagcaaggccuauuccaauuguuacccuuaugacgugcccgauuacgcuucucugcggagccuuguugccuccagcggaacgcuggaauuuaacaaugagucuuucaacuggaccggcguggcucaaaauggcacauccagcgccugcaaacgcagaucuaacaaguccuuuuucagccggcucaauuggcugcaccagcuuaaguauaaauacccugcgcugaacgucaccaugcccaauaacgagaaguuugacaaacucuauauuuggggagugcaucacccuucuacagauuccgaccagaucagccuguacgcccaggcuccggggcgcguuaccguguccacgaagagaucucaacagacagucauucccaacaucggcagccggccuugggugcgcgggguguccagcggaauuucuaucuacuggaccauugucaaacccggcgauauccugcucaucaauuguacagggaaccugauugccccuagaggauauuucaagauccgguccggcaagagcucuauuaugcgcagcgacgcuuccaucggcaaaugcaauucugaauguauuacccccaacgggagcaucccgaaugacaagccuuuucagaacguuaauagaaucaccuacggagccugcccccgguaugugaaacagaacacacuuaagcuggcgacgggcaugcgcaaugugccugagaaacaaaccagagggauuuucggagccaucgcuggcuuuauugaaaacgggugggagggaauggucgauggcugguacggcuuccggcaccaaaauuccgaggggacaggacaggccgcugaccucaagagcacccaggccgccaucaaccagauuaauggcaaacugaaccgccuuaucgaaaagacaaaugagaaguuucaucagaucgaaaaagaguucucugaaguggaggggcggauucaggaucuggagaaguauguugaagacaccaaaaucgaucucugguccuacaacgcugagcugcugguggcgcucgaaaaccaacacacgauugaccugacagauagcgagaugaauaaacuuuucgaaagaaccaagaagcagcugagagagaacgccgaggacaugggaaauggcuguuuuaagaucuaucauaaaugcgauaacgcuugcauugggucuauccgcaauggcaccuacgaccacgaugucuaccgggacgaagcccucaacaauagauuccagauuaagggaguggagcugaaauccggcuauaaggacuggauccuuuggaucagcuuugccauuuccuguuuccugcucugcguugugcugcugggguuuaucaugugggcuugucagaaaggaaacauucgcugcaauaucuguauuuga

SEQ ID NO: 193462 - RNA, 1701 nt, Artificial Sequence
  derived and/or modified CDS sequence (opt5) from hemagglutinin__InfluenzaA__ABJ16763
augaagaccaucauugcccugagcuacauccucugccugguguucgcucagaaacuucccggcaacgacaauuccacagccacgcugugucucgggcaccaugcggucccuaacggaacccugguuaagacaauuaccaaugaucaaaucgaggugacaaacgcuaccgaacuugugcagucuagcuccacaggcgggauuugcgacucuccgcaccagauccuggauggagagaauuguacccucaucgacgcccugcugggcgauccccauugcgacggguuucagaacaaagaaugggaucucuucgucgagagaagcaaggccuauuccaauuguuacccuuaugacgugcccgauuacgcuucucugcggagccuuguugccuccagcggaacgcuggaauuuaacaaugagucuuucaacuggaccggcguggcucaaaauggcacauccagcgccugcaaacgcagaucuaacaaguccuuuuucagccggcucaauuggcugcaccagcuuaaguauaaauacccugcgcugaacgucaccaugcccaauaacgagaaguuugacaaacucuauauuuggggagugcaucacccuucuacagauuccgaccagaucagccuguacgcccaggcuccggggcgcguuaccguguccacgaagagaucucaacagacagucauucccaacaucggcagccggcacugggugcgcgggguguccagcagaauuucuaucuacuggaccauugucaaaccuggagauauccugcucaucaauuguacaggcaaccugauugcuccccggggguauuucaagauccgcuccggaaagagcucuauuaugagaagcgacgccuccaucggcaaaugcaauucugaauguauuaccccuaacggcagcauccccaaugacaagccguuucagaacguuaaucggaucaccuacggggccugcccucgcuaugugaaacagaacacacuuaagcuggcgacgggaaugagaaaugugcccgagaaacaaacccggggcauuuucggggccaucgcuggauuuauugaaaacggcugggaggggauggucgauggaugguacggcuuccgccaucaaaauuccgagggcacagggcaggccgcugaccucaagagcacccaggccgccaucaaccagauuaauggaaaacugaacagacuuaucgaaaagacaaaugagaaguuucaccagaucgaaaaagaguucucugaaguggagggccggauucaggaucuggagaaguauguugaagacaccaaaaucgaucucugguccuacaacgcugagcugcugguggcgcucgaaaaccaacauacgauugaccugacagauagcgagaugaauaaacuuuucgaaagaaccaagaagcagcugcgcgagaacgccgaggacauggggaauggauguuuuaagaucuaucacaaaugcgauaacgcuugcauuggcucuauccggaaugggaccuacgaccacgaugucuacagagacgaagcccucaacaaucgcuuccagauuaagggcguggagcugaaauccggauauaaggacuggauccuuuggaucagcuuugccauuuccuguuuccugcucugcguugugcugcugggcuuuaucaugugggcuugucagaaagggaacauucggugcaauaucuguauuuga

SEQ ID NO: 193463 - RNA, 1701 nt, Artificial Sequence
  derived and/or modified CDS sequence (opt5) from hemagglutinin__InfluenzaA__ABJ16774
augaagaccaucauugcccugagcuacauccucugccugguguucgcucagaaacuucccgucaacgacaauuccacagccacgcugugucucggccaccaugcgguuccuaacgggacccuggugaagacaauuaccaaugaucacaucgaggugacaaacgcuaccgaacuuguccaaucuagcccgacaggaagaauuugcgacucuccccaucagauccuggauggcgagaauuguacccucaucgacgcccugcugggggauccucacugcgacggauuucagaacaaagaaugggaucucuucguggagcggucuacggccuauagcaauuguuaccccuaugacguuccugauuacgcuucccugcgcucucuuguggccagcuccggcacccuggaauuuaacaaugagagcuucaacuggacaggggucgcucagaauggaaccucuuccgccugcaagagacggagcauuaaauccuuuuucucccgccucaacuggcugcaucaacuuaaguauaaguaccccgcgcugaaugugacaaugccuaacaaugagaaauuugacaagcucuauaucuggggcguucaccacccgagcaccgauucugaccagauuucccuguacgcccaggcuagcggcagagugacggucuccacaaaacggucucagcaaaccgugauccccaacauugggagcggaccuugggugcgcggcgucuccagcagaaucucuauuuacuggacaaucguuaagcccggggauauccugcucauuaacuccaccggaaaucugaucgccccucggggcuauuucaaaauucgcaacgggaaaagcucuaucaugagaagcaauacccccauuggaaaguguaacuccgaaugcaucacaccgaauggcucuaucccuaacgacaaacccuuucagaaugugaaccggauuacguacggcgcuuguccucgcuaugugaagcagaauacccuuaaacuggccacagggaugagaaacguccccgagaagcagacccggggaaucuucggcgcgauugccggguuuaucgaaaauggaugggagggcaugguggacgggugguacggauuccgccaucaaaacagcgagggcacaggccaggcugccgaucucaaauccacccaggcugccauuaaucaaaucaacgggaagcugaauagacuuaucgaaaagacgaacgagaaguuucaccagauugaaaaggaguucagcgaaguugagggacggauccaggaccuggagaaauauguggaagauacaaagauugaccucuggucuuacaacgccgagcugcuggucgcucucgaaaaucagcauaccaucgaucugaccgacuccgagaugaacaaacuuuucgaaagaacacgcaagcaacugcgggagaaugcggaggauaugggcaacgggugcuuuaaaauuuaucacaagugugacaaugccugcaucggaagcauuagaaacggcaccuacgaucacgacguguaccgcgaugaagcucucaauaaccgguuccagaucaaggggguugagcugaaaucuggcuauaaggacuggauccuuuggauuuccuuugccaucagcugcuuccugcucugugugguccugcugggauuuauuaugugggccugccagaaaggcaauaucagauguaacauuugcaucuga

SEQ ID NO: 193464 - RNA, 1701 nt, Artificial Sequence
  derived and/or modified CDS sequence (opt5) from hemagglutinin__InfluenzaA__ABJ16785
augaagaccaucauugcccugagcuacauccucugccugguguucgcucagaaacuucccggcaacgacaauuccacagccacgcugugucucgggcaccaugcggucccuaacggaacccugguuaagacaauuaccaaugaucaaaucgaggugacaaacgcuaccgaacuugugcagucuagcuccacaggcgggauuugcgacucuccgcaccagauccuggauggagagaauuguacccucaucgacgcccugcugggcgauccccauugcgacggguuucagaacaaagaaugggaucucuucgucgagagaagcaaggccuauuccaauuguuacccuuaugacgugcccgauuacgcuucucugcggagccuuguugccuccagcggaacgcuggaauuuaacaaugagucuuucaacuggaccggcguggcucaaaauggcacauccuaugccugcaaacgcagaagcaacaaguccuuuuucucucggcucaauuggcugcaccagcuuaaguacaaauauccugcgcugaacgucaccaugcccaauaacgagaaguuugacaaacucuacauuuggggagugcaucacccuagcacagauucugaccagaucucccuguacgcccaggcuccggggcgcguuaccgugagcacgaagagaucccaacagacagucauucccaacaucggcucucggccuugggugcgcggggugagcuccagaauuagcaucuauuggaccauugucaaacccggagauauccugcucaucaauuguacaggcaaccugauugccccucggggguacuucaagauccgcucuggaaaguccagcauuaugagaucugacgcuagcaucggcaaaugcaauuccgaauguauuacccccaacggcucuaucccgaaugacaagccuuuucagaacguuaaucggaucaccuauggggccugcccccgcuacgugaaacagaacacacuuaagcuggcgacgggaaugagaaaugugccugagaaacaaacccggggcauuuucggggccaucgcuggauuuauugaaaacggcugggaggggauggucgauggaugguauggcuuccgccaccagaauagcgagggcacagggcaggccgcugaccucaaguccacccaagccgccaucaaccagauuaauggaaaacugaacagacuuaucgaaaagacaaaugagaaguuucaucagaucgaaaaagaguucagcgaaguggagggccggauucaggaucuggagaaguacguugaagacaccaaaaucgaucucuggucuuauaacgcugagcugcugguggcgcucgaaaaccaacacacgauugaccugacagauuccgagaugaauaaacuuuucgaaagaaccaagaagcagcugcgcgagaacgccgaggacauggggaauggauguuuuaagaucuaccauaaaugcgauaacgcuugcauuggcagcauccggaaugggaccuacgaccacgaugucuauagagacgaagcccucaacaaucgcuuccagauuaagggcguggagcugaaaucuggauacaaggacuggauccuuuggaucuccuuugccauuagcuguuuccugcucugcguugugcugcugggcuuuaucaugugggcuugucagaaagggaacauucggugcaauaucuguauuuga

SEQ ID NO: 193465 - RNA, 1701 nt, Artificial Sequence; identical to SEQ ID NO: 192982
  derived and/or modified CDS sequence (opt5) from hemagglutinin__InfluenzaA__ABJ53438

SEQ ID NO: 193466 - RNA, 1698 nt, Artificial Sequence; identical to SEQ ID NO: 192814
  derived and/or modified CDS sequence (opt5) from hemagglutinin__InfluenzaA__ABJ53449

SEQ ID NO: 193467 - RNA, 1701 nt, Artificial Sequence
  derived and/or modified CDS sequence (opt5) from hemagglutinin__InfluenzaA__ABJ53471
augaagaccaucauugcccugagcuacauccucugccugguguucgcucagaaaauucccggcaacgacaauuccacagccacgcuuugucuggggcaccaugcggucccuaacggaaccaucguuaagacaauuaccaaugaucaaaucgaggugacaaacgcuaccgaacucgugcagucuagcuccacaggcgggaucugcgacucuccgcaccagauucuggauggagagaauuguacccuuaucgacgcccugcucggcgauccccagugcgacggguuucaaaacaaaaagugggaucuguucgucgaaagaagcaaagccuauuccaauuguuacccuuaugacgugcccgauuacgcuucucugcggagccucguugccuccagcggaacgcuggaguuuaacaaugaaucuuucaacuggaccggcgugacacagaauggcaccuccagcgcuugcaagcgcgggucuaacaauuccuuuuucagcagacuuaacuggcugacacaucucaaguuuaaauauccugcccugaaugucaccaugcccaacaacgagaaguucgacaaacuuuacauuuggggagugcaccauccuggcacggauaaugaccagaucuuucuguaugcgcaggccucugggcggauuacaguuuccaccaagcgcagccaacagacagugaucccgaacauuggauccagaccccggguccgcaauaucccuucuagaaucagcauuuacuggaccaucgugaaacccggcgauauucuccugaucaacuccaccgggaaucugauugcuccucggggauacuucaagauccgcagcggcaagucuuccaucaugagaagcgacgcccccauuggcaaauguaacucugagugcaucacaccgaaugggagcauuccuaacgacaagcccuuucagaaugugaaccggaucacguauggagcuuguccucgcuacgucaaacagaauacccucaagcuggccacaggcaugagaaacguucccgaaaaacaaacccgggggauuuucggagcgaucgccggcuuuaucgagaaugggugggaaggaaugguggauggcugguauggcuuccgccaccagaacuccgaggggauuggacaggcugccgaccuuaagucuacacaagcugccaucaaucagauuaacggcaaacugaacagacucaucgggaagaccaaugagaaguuccaccagauugaaaaagaguuuagcgaaguggagggacggauccaggaucuggaaaaguacgucgaggacacgaaaauugaucuuugguccuauaacgccgagcugcucguggcucuggaaaaucaacauacaaucgaccugaccgauagcgagaugaacaaacucuucgaaagaaccaagaagcagcugcgcgagaaugcggaagacaugggcaacgggugcuuuaagaucuaccacaaaugugauaaugccugcauuggcucuauccggaacggaacauaugaccaugauguuuacagagacgaggcucuuaauaaccgcuuccagauuaagggcguggagcugaaauccggguacaaggacuggauccucuggauuagcuuugccaucucuugcuuccugcuuugugucgcccugcucggauuuaucaugugggcuugccagaaaggcaauauucgguguaacaucugcauuuga

SEQ ID NO: 193468 - RNA, 1701 nt, Artificial Sequence
  derived and/or modified CDS sequence (opt5) from hemagglutinin__InfluenzaA__ABJ53482
augaagaccaucauugcccugagcuacauccucugccugguguucgcucagaaacuucccggcaacgacaauuccacagccacgcugugucucgggcaccaugcggucccuaacggaaccauuguuagaacaaucaccaaugaucaaauugaggugacaaacgcuaccgaacuggugcagucuagcuccacaggcgagaucugcgacucuccgcaccagauccuugauggggaaaauuguacccugauugacgcccuccugggagauccccagugcgacggcuuucaaaacaagaaaugggaucuguucgucgagcggagcaaggccuauuccaauuguuacccuuaugacgugcccgauuacgcuucucuccgcagccugguugccuccagcgggacgcuugaauuuaacaaugagucuuucaacuggaccggagugacacagaauggcaccuccagcgcuugcaaaagacggucuaacaauuccuuuuucagccgccugaacuggcucacacaucugaaguuuaaguauccugcccuuaaugucaccaugcccaacaacgagaaauucgacaagcuguacaucuggggcgugcaccauccugggacggauaaugaccagauuuuucucuaugcgcaggccucuggaagaaucacaguuuccaccaaacggagccaacagacagugauuccgaacaucggcucccgccccagaguccggaauauuccuucucgcaucagcaucuacuggaccauugugaagcccggggauauccugcugauuaacuccaccggaaaucucaucgcuccuagaggcuacuucaaaauucggagcgggaagucuuccaucaugcgcagcgacgcccccaucggaaaguguaacucugaaugcauuacaccgaauggcagcaucccuaacgacaaacccuuucagaaugugaacagaauuacguauggcgcuuguccucgguacgucaagcagaauacccugaaacuugccacagggaugcgcaacguucccgagaagcaaaccagaggaaucuucggcgcgauugccggguuuaucgaaaauggaugggagggcaugguggaugggugguauggauuccggcaccagaacuccgagggcaucggccaggcugccgaccugaaaucuacacaagcugccauuaaucagaucaacgggaagcucaacagacugauuggaaaaaccaaugaaaaguuccaccagaucgagaaggaauuuagcgagguggaaggccgcauucaggaucuugagaaauacgucgaggacacgaagaucgaucugugguccuauaacgccgaacuccugguggcucuggagaaucaacauacaauugaccucaccgauagcgaaaugaacaaacuguucgagcggaccaagaaacagcuuagagaaaaugcggaggacauggggaacggaugcuuuaagaucuaccacaagugugauaaugccugcaucggcucuauucgcaacgggacauaugaccaugauguuuaccgggacgaggcucugaauaacagauuccagaucaaaggcguggaacucaaguccggauacaaagacuggauucuguggaucagcuuugccauuucuugcuuccuucugugugucgcccuccugggcuuuaucaugugggcuugccagaaggggaauauccgcuguaacauuugcaucuga

SEQ ID NO: 193469 - RNA, 1698 nt, Artificial Sequence; identical to SEQ ID NO: 193304
  derived and/or modified CDS sequence (opt5) from hemagglutinin__InfluenzaA__ABJ53493

SEQ ID NO: 193470 - RNA, 1698 nt, Artificial Sequence
  derived and/or modified CDS sequence (opt5) from hemagglutinin__InfluenzaA__ABJ53504
augaaggccaaacugcucgugcugcuuugcaccuucacagcuacguacgccgacaccaucuguauuggcuaucacgcgaacaauagcacagauaccgucgacacaguucuggagaagaacgugaccgugacacauuccgucaaucuccuggaagauucucacaacgggaaacuuugccugcucaagggaaucgcuccccugcagcugggcaauuguagcguggccggguggauucucggaaacccugagugcgaaucccugaucucuaaagagagcugguccuacauuguugaaaccccgaaucccgagaacggcacguguuauccuggguacuuugccgacuaugaggaacuuagagagcaacugucuagcguguccagcuucgaacgguuugagaucuuccccaaggagucuuccuggccuaaucauaccgucacaggagugagcgcuucuugcucccacaacggcaagagcucuuuuuaccgcaaucuccuguggcuuaccgaaaagaacggccuguaucccaaucucuccaagagcuacguuaacaauaaagagaaggaagugcugguccuguggggagugcaucacccuuccaacaucggggugcagagagccauuuaccacacagagaacgcuuaugucucuguugugagcucccauuacagccggcgcuucaccccggaaaucgccaaaagacccaaggugcgggaucaggagggccgcauuaauuauuacuggacgcuccuggagccuggggacacaaucauuuuugaagcgaacggaaaucuuaucgcccccugguaugcuuucgcccugucuagaggcuuugaguccgggauuaucaccagcaacgcuccuaugaaugaaugugaugccaagugccagacaccccucggagcgaucaacucuagccugccguuccaaaauguccacccugugaccauuggcgagugucccaaauacguucgguccgccaaacuucgcauggugaccggccugagaaacaucccuucuauucagagccgggggcucuuuggagcuaucgccggcuucauugaagggggauggacaggcaugaucgacgggugguauggauaccaucaccagaaugagcagggcuccggcuacgcugccgaucagaaaagcacgcaaaacgccaucaaugggauuaccaacaaggucaauucugugaucgagaaaaugaacacacaguuuaccgcuguuggaaaggaguucaauaaacuggaacgcagaauggaaaaccugaacaagaagguggacgauggcuuccucgacauuuggacauauaaugcggagcugcuuguccugcucgaaaacgagcggacccuggauuuucacgacuccaaugugaaaaaccuuuacgagaaggucaaaagccagcugaagaauaacgccaaagaaaucgggaauggaugcuucgaguuuuaucauaaguguaacaaugaaugcauggagucugugaagaacggcacguacgacuaucccaaauacuccgaggaaagcaagcucaaucgcgagaaaauugaugggguuaagcuggaauccaugggcguguaucaaauccuggcuaucuacucuacagucgccagcucccucgugcugcuuguuucucugggagccauuagcuucuggaugugcuccaacggcagccuccaguguagaaucugcauuuga

SEQ ID NO: 193471 - RNA, 1701 nt, Artificial Sequence; identical to SEQ ID NO: 193459
  derived and/or modified CDS sequence (opt5) from hemagglutinin__InfluenzaA__ABJ53515

SEQ ID NO: 193472 - RNA, 1701 nt, Artificial Sequence
  derived and/or modified CDS sequence (opt5) from hemagglutinin__InfluenzaA__ABK39962
augaagaccaucauugcccugagcuacauccucugccugguguucgcucagaaacuucccggcaacgacaauuccacagccacgcugugucucgggcaccaugcggucccuaacggaacccugguuaagacaauuaccaaugaucaaaucgaggugacaaacgcuaccgaacuugugcagucuagcuccacaggcagaauuugcgacucuccgcaccagauccuggauggggagaauuguacccucaucgacgcccugcugggagauccccauugcgacggcuuucagaacaaagaaugggaucucuucgucgagcggagcaaggccuauuccaauuguuacccuuaugacgugcccgauuacguuucucugcgcagccuuguggcuuccagcgggacgcuggaauuuaacaaugagucuuucaacuggaccggagucgcccaaaauggcacauccagcgcuugcaaaagacggucugacaaguccuuuuucagccgccucaacuggcugcaccagcuuaaguauaaauacccugcccugaaugugaccaugcccaacaaugagaaguuugauaaacucuauauuuggggcguucaucacccugggacagacucugaucagaucucccuguacgcgcaggccagcggaagagugaccgucuccacgaagcggucucaacagacagugauuccgaacaucggcagccgccccugggugagaggggucuccagccggauuucuaucuacuggaccauuguuaaaccuggagacauccugcucaucaacuccacaggcaaucugauugcuccccgcggguauuucaagaucagaagcggaaagucuagcauuaugcgguccgacgccccuaucggcaaauguaacucugaaugcauuacccccaauggcagcaucccgaacgauaagccuuuucagaaugugaaccgcaucaccuacggggcuugucccagauaugugaaacagaagacacuuaaacuggccacgggaaugcggaaugucccugagaagcaaacccgcggcauuuucggggcgaucgccggauuuauugaaaacggcugggaggggaugauggacggaugguacggcuucagacaccaaaauuccgagggcacagggcaggcugccgaucucaaaagcacccaggcugccaucaaccagauuaauggaaagcugaaccggcuuaucgaaaagacaaaugagaaauuucaucagaucgaaaaggaguucucugaaguggagggccgcauucaggaccuggagaaauauguugaagauaccaagaucgaccucugguccuacaacgccgagcugcugguggcucucgaaaaucaacacacgauugaucugacagacagcgagaugaacaaacuuuucgaaagaaccaagaagcagcugcgggagaacgcggaggauauggggaauggaugcuuuaaaaucuaucauaagugugacaacgccugcauuggcucuaucagaaaugggaccuacgaucacgacgucuaccgcgacgaagcucucaacaaucgguuccagauuaaaggcguggagcugaaguccggauauaaagauuggauccuuuggaucagcuuugccauuuccugcuuccugcucuguaucguucugcugggcuuuauuaugugggccugccagaaggggaacaucagauguaauauuugcaucuga

SEQ ID NO: 193473 - RNA, 1701 nt, Artificial Sequence; identical to SEQ ID NO: 192702
  derived and/or modified CDS sequence (opt5) from hemagglutinin__InfluenzaA__ABK39973

SEQ ID NO: 193474 - RNA, 1701 nt, Artificial Sequence
  derived and/or modified CDS sequence (opt5) from hemagglutinin__InfluenzaA__ABK39984
augaagaccaucauugcccugagcuacauccucugccugguguucgcucagaaacuucccggcaacgacaauuccagagccacacugugucucgggcaccaugcggucccuaacggaacgauuguuaagaccaucacaaaugaucaaauugaggugaccaacgcuacagaacuggugcagucuagcuccaccggcgggaucugcgacucuccgcaccagauccuugauggagagaauuguacacugauugacgcccuccugggcgauccccagugcgacggguuucaaaacaaaaagugggaucuguucgucgaacggagcaaagccuauuccaauuguuacccuuaugacgugcccgauuacgcuucucuccgcagccugguugccuccagcggaacccuugaguuuaacaaugaaucuuucaacuggacgggcgugacccagaauggcacauccagcgcuugcaagagacggucuaacaauuccuuuuucagccgccugaacuggcucacccaucugaaguuuaaauauccugcccuuaaugucacaaugcccaacaacgagaaguucgacaaacuguacaucuggggagugcaccauccugggaccgauaaugaccagauuuuucucuaugcgcaggccucuggcagaaucacgguuuccacaaagcggagccaacagaccgugauuccgaacaucgggucccgccccagaguccggaauauuccuucucgcaucagcaucuacuggacaauugugaaacccggagauauccugcugauuaacuccaccggcaaucucaucgcuccuagaggguacuucaagauucggagcggaaagucuuccaucaugcgcagcgacgcccccaucggcaaauguaacucugagugcauuaccccgaauggcagcaucccuaacgacaagcccuuucagaaugugaacagaauuacauauggggcuuguccucgguacgucaaacagaauacgcugaaacuugccaccggaaugcgcaacguucccgaaaagcaaacaagaggcaucuucggggcgauugccggauuuaucgagaauggcugggaagggaugguggauggaugguauggcuuccggcaccagaacuccgagggcaucgggcaggcugccgaccugaagucuacccaagcugccauugaucagaucaauggaaaacucaacagacugauuggcaagacaaacgagaaguuccaccagaucgaaaaagaguuuagcgaaguggaggggcgcauucaggaccuugaaaaguacgucgaggauaccaaaaucgaccugugguccuauaaugccgagcuccugguggcucuggaaaaccaacauacgauugaucucacagacagcgagaugaauaagcuguucgaacggaccaaaaagcagcuuagagagaacgcggaagauaugggaaauggcugcuuuaagaucuaccacaaaugugacaacgccugcaucgggucuauucgcaauggcaccuaugaucaugacguuuaccgggacgaggcucugaacaauagauuccagaucaagggaguggagcucaaauccggcuacaaggauuggauucuguggaucagcuuugccauuucuugcuuccuucugugugucgcccuccugggguuuaucaugugggcuugccagaaaggaaacauccgcuguaauauuugcaucuga

SEQ ID NO: 193475 - RNA, 1698 nt, Artificial Sequence
  derived and/or modified CDS sequence (opt5) from hemagglutinin__InfluenzaA__ABK39995
augaaggugaaacugcucauccugcuuugcaccuucacagccacguacgcugacaccauuuguaucggcuaucacgccaacaauagcacagauaccgucgacacaguucuggagaagaacgugaccgugacacauuccgucaaucuccuggaagauucucacaacgggaaacuuugccugcucaagggaauugcgccccugcagcugggcaauuguagcguggcuggguggauccucggaaacccugagugcgaacugcuuauuuccaaagagucuuggagcuacaucguugaaaccccgaaucccgagaacggcgccuguuauccuggguacuuugccgacuaugaggaacugagagagcaacucuccucuguguacagcuucgaacgguuugagaucuuccccaaggaguccagcuggccuaaucauacggucaccggagugucugcuuccugcagccacaacggcaagucuuccuuuuaucgcaaucugcuuuggcugacaggcaaaaacgggcucuaccccaaucugagcaagucuuacgccaacaauaaagaaaaggagguucugauucucuggggagugcaucacccuccgaacaucggcaaccagagaacccuguaucacacagaaaaugcuuacgucuccguggugagcucccauuauucucggcgcuucacccccgagauuacgaaaagaccuaagguccgggaucaggaagggcgcaucaacuacuauuggacacuucuggagcccggagacaccauuaucuuugaggccaauggcaaccucauugcgccuugguacgccuucgcucugagcagaggguuuggauccggcaucaucacaagcaaugcccccauggaugaaugugacgcuaagugccagaccccgcaaggcgccauuaacucuucccuuccuuuccagaauguucaccccgugaccaucggggaguguccuaaauaugugcggagcgcgaagcugcgcauggucacaggacucagaaacauucccucuauccagagccggggccuguuuggggccauugcuggauucaucgaaggcggguggacgggaaugguggauggcugguacggcuaccaucaccagaaugagcaaggguccggauaugccgcugaccagaaaucuacccagaacgccaucaauggcauuacaaacaagguuaauagcgugaucgaaaagaugaacacccaguuuacagccgucgggaaagaguucaauaaacuggagcgcagaauggaaaaccucaacaagaagguggaugacggauuccuggauauuuggaccuacaaugcugagcuucugguucuccuggaaaacgagcggacgcuugacuuucacgacuccaaugugaaaaaccuguaugaaaaggucaaaagccaacucaagaauaacgcgaaagagaucggcaaugggugcuucgaguuuuaccauaaguguaacaaugaaugcauggagucugugaagaacggcacauaugauuaccccaaauauuccgaagagagcaagcugaaucgcgagaaaauugacggagucaagcuggauucuaugggcguguaccagauccucgccaucuacuccaccguugcuagcucccuggugcuucuggucucucucggggccauuagcuucuggaugugcuccaacggaucucugcaguguagaaucugcauuuga

SEQ ID NO: 193476 - RNA, 1701 nt, Artificial Sequence
  derived and/or modified CDS sequence (opt5) from hemagglutinin__InfluenzaA__ABK40017
augaagaccaucauugcccugagcuacauccucugccugguguucgcucagaaacuucccggcaacgacaauuccacagccacgcugugucucgggcaccaugcggucccuaacggaaccauuguuaagacaaucaccaaugaucaaauugaggugacaaacgcuaccgaacuggugcagucuagcuccacaggcgggaucugcgacucuccgcaccagauccuugauggagagaauuguacccugauugacgcccuccugggcgauccccagugcgacggguuucaaaacaaaaagugggaucuguucgucgaaagaagcaaagccuauuccaauuguuacccuuaugacgugcccgauuacgcuucucuccggagccugguugccuccagcggaacgcuugaguuuaacaaugaaucuuucaacuggaccggcgugacacagaauggcaccuccagcgcuugcaagcgcagaucuaacaauuccuuuuucagccggcugaacuggcucacacaucugaaguuuaaauauccugcccuuaaugucaccaugcccaacaacaagaaauucgacaagcuguacaucuggggagugcaccauccugggacggauaaugaccagauuucucucuaugcgcaggccuccggccgcaucacaguuagcaccaaaagaucccaacagacagugauuccgaacaucgggucucggccccgcgucagagauauuccuagccggaucuccaucuacuggaccauugugaagcccggagacauccugcugauuaauagcaccggcaaccucaucgcuccucgcggguacuuuaagauuagaucuggaaaauccagcaucaugcggucugacgcccccaucggcaaguguaauagcgagugcauuacaccgaacggcuccaucccuaaugauaaacccuuccagaacgugaaucgcauuacguauggggcuuguccuagauacgucaagcagaacacccugaaacuugccacaggaaugcggaauguucccgagaagcaaacccgcggcaucuuuggggcgauugccggauucaucgaaaacggcugggaggggaugguggacggaugguauggcuuuagacaccaaaauucugaaggcaucgggcaggcugccgaucugaaaagcacacaggcugccauuaaccagaucaauggaaagcucaaccggcugauuggcaagaccaacgagaaauuccaccagaucgagaaggaguucuccgaaguggaagggcgcauucaggaccuugagaaauacgucgaagauacgaagaucgaccuguggagcuauaaugccgagcuccugguggcucuggagaaccaacauacaauugaucucaccgacucugaaaugaauaaacuguuugagagaaccaagaagcagcuucgggaaaacgcggaggauaugggaaauggcugcuucaaaaucuaccacaagugugacaacgccugcaucggguccauuagaaauggcacauaugaucaugacguuuaccgcgacgaagcucugaacaaucgguuucagaucaaaggaguggagcucaagagcggcuacaaagauuggauucuguggaucucuuucgccauuuccugcuuucuucugugugucgcccuccugggguucaucaugugggcuugccagaagggaaacaucagauguaauauuugcaucuga

SEQ ID NO: 193477 - RNA, 1701 nt, Artificial Sequence
  derived and/or modified CDS sequence (opt5) from hemagglutinin__InfluenzaA__ABK40028
augaaggccaaacugcucgugcugcuuugcgcuuucaccgccacauacgcggacacgaucuguauuggcuaucacgcuaacaauagcaccgauacagucgacaccguucuggagaagaacgugacagugacccauuccgucaaucuccuggaagauucucacaacgggaaacuuugcagacugaagggaacagcuccccuccagcugggcaauuguagcaucgccggguggauucugggaaacccugagugcgaaucccucuuuucuaaagagagcugguccuacaucgccgaaaccccgaaucccaagaacggcacguguuauccuggguacuucgccgacuaugaggagcugcgggaacaacuuucuagcguguccagcuuugagcgcuucgaaauuuuucccaaggauucuuccuggccuaaucauaccguuacaaaaggagugaccgcuagcugcucucacaacggcaaguccagcuucuacaaaaaucugcucuggcugacagagaagaacggccuuuaucccaaucugucuaaauccuacgucaacaagaaggggaaagaggugcucguucuguggggagugcaucacccuagcaauaugggcgaccagagagccaucuaccacaaggaaaacgcguaugucaccgugcuguccucucauuacagccggcgcuuuacgccggagaucgccagacggcccaaagugcgcgaucaggaagggagaauuaacuauuacuggacacuccuggagccuggagacaccaucauuuucgaagcuaauggcaaccuuaucgcccccugguaugcuuuugcccugucccggggguucggaagcggcauuaucauuucuaaugcguccaugggcgagugugaugccaagugccagacaccucaaggggcuaucaacagcucucuccccuuucagaauguccacccgguuaccaucggagaguguccuaaauacgugcgcagcaccaagcugagaauggugacaggccuucggaacguccccuccauucagucucgcgggcuguucggagccaucgcuggcuuuauugaagggggauggacgggcaugaucgacggcugguauggguaccaucaccagaaugagcaaggaagcggcuacgccgccgaucagaaauccacccagaacgcuauuaaugggaucacaaacaaggugaauagcaucauugaaaagaugaacacccaguucacagcgguuggaaaagaguucaauaagcucgaaagacggauggagaaccugaauaaaaagguggacgauggcuuucuggacaucuggaccuauaacgccgagcuccugguccuucuggaaaacgagcgcacgcucgacuuccacgauucuaaugugaaaaaccuguacgaaaagguuaagaaucaacuuaaaaacaaugcuaaggagauugggaacggcugcuuugaguucuaucauaaauguaauaacgaaugcauggaguccgugaagaauggaacauacgacuauccuaaauacagcaaggaaucuaagcugaacagagagaaaaucgauggcgucaagcucgaauccauggggguguaucagauucuggccaucuacagcaccgucgccuccucucuggugcuccugguuagccuuggagcuaucuccuuuuggaugugcucuaauggcagccugcagugucggauuugcaucuga

SEQ ID NO: 193478 - RNA, 1701 nt, Artificial Sequence; identical to SEQ ID NO: 193459
  derived and/or modified CDS sequence (opt5) from hemagglutinin__InfluenzaA__ABK40039

SEQ ID NO: 193479 - RNA, 1701 nt, Artificial Sequence; identical to SEQ ID NO: 193459
  derived and/or modified CDS sequence (opt5) from hemagglutinin__InfluenzaA__ABK40050

SEQ ID NO: 193480 - RNA, 1701 nt, Artificial Sequence; identical to SEQ ID NO: 192722
  derived and/or modified CDS sequence (opt5) from hemagglutinin__InfluenzaA__ABK40061

SEQ ID NO: 193481 - RNA, 1701 nt, Artificial Sequence; identical to SEQ ID NO: 192722
  derived and/or modified CDS sequence (opt5) from hemagglutinin__InfluenzaA__ABK40075

SEQ ID NO: 193482 - RNA, 1701 nt, Artificial Sequence; identical to SEQ ID NO: 192993
  derived and/or modified CDS sequence (opt5) from hemagglutinin__InfluenzaA__ABK40510

SEQ ID NO: 193483 - RNA, 1701 nt, Artificial Sequence; identical to SEQ ID NO: 192993
  derived and/or modified CDS sequence (opt5) from hemagglutinin__InfluenzaA__ABK40534

SEQ ID NO: 193484 - RNA, 1701 nt, Artificial Sequence
  derived and/or modified CDS sequence (opt5) from hemagglutinin__InfluenzaA__ABK40546
augaaggccaaacugcucgugcugcuuugcgcucugagcgccaccgacgcggauacaaucuguauuggcuaccacgcuaacaauuccacggacaccgucgauacaguucucgagaagaacgugaccgugacacauucugucaaucugcuugaagacaaccacaaugggaaacugugcaagcucaaaggaaucgcuccccugcagcugggcaaguguagcauugccggguggauccucggaaacccugagugcgaaucccuguucucuaauaagagcugguccuauauugccgagaccccgaacucugaaaauggcacauguuaccccggguauuuugccgauuacgaggagcuuagagaacaacugagcuccgugagcucuuucgagcgguuugaaaucuucccuaaagaguccagcuggcccaagcauaacguuaccaaaggagugacggcuucuugcucccacaagggcaaaagcucuuuuuaucgcaaucuccuguggcuuaccgagaagaacggcuccuacccuaaucugagcaaguccuaugucaacaauaaagaaaaggaggugcucguucuguggggagugcaucaccccucuaacaucgaagaccagaaaacaauuuacagaaaggagaacgccuacgucagcgugguguccagccacuauaaucggcgcuucaccccugaaaucgcgaaaagaccgaagguccggaaccaggaggggcgcauuaauuacuauuggacacugcucgagcccggcgauaccaucauuuuugaagccaacgggaaucugaucgcuccuugguacgccuucgcucuuucuagaggauuuggcuccgggauuaucacgagcaacgccucuauggacgagugugaugcgaaaugccagacaccccaaggagccaucaauagcucccugccuuuccagaacguucaucccgugaccauuggcgaauguccgaaguaugugcggucuacaaagcuccgcauggucaccggccugagaaauaucccuagcauucagucccgggggcuuuuuggagcuaucgccggcuucauugaagggggauggaccggcaugaucgacgggugguacggauaucaccaucagaacgagcaaggcagcggcuacgcugccgaucagaaaucuacacagaaugccaucaacgggauuacgaauaaggugaacuccaucauugagaaaaugaauacccaguuuacagcuguuggaaaggaguucaacaaacuggaaaagcgcauggagaaccucaauaagaaaguggacgauggcuuccuggacaucuggaccuacaacgcggaacugcucguccugcuugagaaugaaagaacacuggacuuucacgauagcaacgugaagaaucucuaugagaaaguuaagucucaacugaaaaacaaugccaaggagauugggaacggaugcuucgaauuuuaccacaaguguaauaacgagugcauggaauccgugaaaaauggcaccuaugacuaccccaaguauagcgaggaguccaaacuuaaccgggaaaagaucgauggggucaaacuggagucuaugggcguguaccagauccucgcuauuuauagcacggucgccuccucucuggugcugcucguuagccugggagccaucuccuucuggaugugcagcaauggcucucuucagugucgcauuugcaucuga

SEQ ID NO: 193485 - RNA, 1701 nt, Artificial Sequence; identical to SEQ ID NO: 192993
  derived and/or modified CDS sequence (opt5) from hemagglutinin__InfluenzaA__ABK40557

SEQ ID NO: 193486 - RNA, 1701 nt, Artificial Sequence; identical to SEQ ID NO: 192993
  derived and/or modified CDS sequence (opt5) from hemagglutinin__InfluenzaA__ABK40568

SEQ ID NO: 193487 - RNA, 1701 nt, Artificial Sequence; identical to SEQ ID NO: 192993
  derived and/or modified CDS sequence (opt5) from hemagglutinin__InfluenzaA__ABK40579

SEQ ID NO: 193488 - RNA, 1701 nt, Artificial Sequence
  derived and/or modified CDS sequence (opt5) from hemagglutinin__InfluenzaA__ABK40590
augaaggccaaacugcucgugcugcuuugcgcucugagcgccaccgacgcggauacaaucuguauuggcuaccacgcuaacaauuccacggacaccgucgauacaguucucgagaagaacgugaccgugacacauucugucaaucugcuugaagacaaccacaaugggaaacugugcaagcucaaaggaaucgccccgcugcagcugggcaaguguagcauugccggguggauccucggaaacccugagugcgaaucccuguucucuaagaaaagcugguccuauauugcugagacccccaauucugaaaacggcacauguuaccccggguauuuugccgauuacgaggagcuuagagaacaacugagcuccgugagcucuuucgagcgguuugaaaucuucccuaaggaguccagcuggcccaaacauaauguuaccaagggagugacggcuucuugcucccacaaaggcaagagcucuuuuuaucgcaaccuccuguggcuuaccgagaagaauggcuccuacccuaaccugagcaaauccuaugucaauaacaaggaaaaagaggugcucguucuguggggagugcaucaccccucuaauaucgaagaccagaagacaauuuacagaaaagagaacgccuacgucagcgugguguccagccacuauaaccggcgcuucaccccugaaaucgcgaagagaccgaaaguccggaaucaggaggggcgcauuaacuacuauuggacacugcucgagcccggcgauaccaucauuuuugaagccaaugggaaccugaucgcuccuugguacgccuucgcucuuucuagaggauuuggcuccgggauuaucacgagcaaugccucuauggacgagugugaugcgaagugccagacaccccaaggagccaucaacagcucccugccuuuccagaauguucaucccgugaccauuggcgaauguccgaaguaugugcggucuacaaaacuccgcauggucaccggccugagaaacaucccuagcauucagucccgggggcuuuuuggagcuaucgccggcuucauugaagggggauggaccggcaugaucgacgggugguacggauaucaccaucagaaugaacaaggcagcggcuacgcugccgaucagaagucuacacagaacgccaucaaugggauuacgaacaaaguuaauuccaucauugagaagaugaacacccaguuuacagcugugggaaaagaguucaauaagcuggaaaagcgcauggagaaccucaacaaaaagguggacgauggcuuccuggacaucuggaccuacaaugcggaacugcucguccugcuugagaacgaaagaacacuggacuuucacgauagcaaugugaaaaaccucuaugagaagguuaaaaaucaacugaagaacaaugccaaggagauugggaacggaugcuucgaauuuuaccacaaauguaauaacgagugcauggaaucugugaagaauggcaccuaugacuaccccaaauauuccgaggagagcaaacuuaaccgggagaagaucgauggggucaagcuggaguccaugggcguguaccagauccucgcuauuuauucuacggucgccagcucccuggugcugcucguuucucugggagccaucagcuucuggaugugcuccaauggcagccuucagugucgcauuugcaucuga

SEQ ID NO: 193489 - RNA, 1701 nt, Artificial Sequence; identical to SEQ ID NO: 192993
  derived and/or modified CDS sequence (opt5) from hemagglutinin__InfluenzaA__ABK40601

SEQ ID NO: 193490 - RNA, 1701 nt, Artificial Sequence; identical to SEQ ID NO: 192722
  derived and/or modified CDS sequence (opt5) from hemagglutinin__InfluenzaA__ABK40612

SEQ ID NO: 193491 - RNA, 1701 nt, Artificial Sequence
  derived and/or modified CDS sequence (opt5) from hemagglutinin__InfluenzaA__ABK40623
augaagaccaucauugcccugagcuacauccucugccugguguucgcucagaaacuucccgucaacgacaauuccacagccacgcugugucucggccaccaugcgguuccuaacgggacccuggugaagacaauuaccaaugaucacaucgaggugacaaacgcuaccgaacuuguccaaucuagcuccacaggaagaauuugcgacucuccgcaucagauccuggauggcgagaauuguacccucaucgacgcccugcugggggauccccacugcgacggauuucagaacaaagaaugggaucucuucguggagcggagcacggccuauuccaauuguuacccuuaugacguucccgauuacgcuucucugcgcagccuuguggccuccagcggcacccuggaauuuaacaaugagucuuucaacuggacaggggucgcucagaauggaaccuccagcgccugcaagagacggucuauuaaauccuuuuucagccgccucaacuggcugcaucaacuuaaguauaaguacccugcgcugaaugugacaaugcccaacaaugagaaauuugacaagcucuauaucuggggcguucaccacccuucuaccgauuccgaccagauuagccuguacgcccaggcuuccggcagagugacggucucuacaaaacggagccagcaaaccgugaucccgaacauugggucccgccccugggugagaggagucagcucucggaucuccauuuacuggacaaucguuaagccuggcgauauccugcucauuaacagcaccgggaaucugaucgcuccccgcggauauuucaaaauuagaucuggcaagagcuccaucaugcggucuaacgccccuauugggaaguguaauagcgaaugcaucacccccaacggauccaucccgaaugacaaaccuuuucagaacgugaaucgcauugccuacggcgcgugucccagauaugugaagcagaacacacuuaaacuggccacgggcaugcggaaugucccugagaagcagacccgcgggaucuucggagcuauugccggcuuuaucgaaaacgggugggagggaaugguggacggcugguacggguucagacaucucaauagcgagggaacaggccaagcugccgaucugaaaucuacccaggccgcuauuaaccagaucaauggcaaacuuaaccggcugaucgaaaagacaaaugagaaguuucaccaaauugaaaaggaguucuccgaaguugaggggagaauccaggaccucgagaaauaugugaaggauaccaaaauugaccuguggagcuacaacgcggaacugcucgucgcccuggagaaccagcauacgaucgaucuuacagacucugaaaugaauaagcuguucgagcgcacccggaaacagcucagagaaaacgcugaggaugugggaaauggcugcuuuaagauuuaucacaagugugacaacgccugcaucggguccauucgcaauggaaccuacgaucacgacguuuaccgggaugaggcccugaacaauagauuccaaaucaaaggcguggaacuuaagagcggguauaaagacuggauccuguggauuuccuuugcuaucucuugcuuccuccugugugucgugcugcucggcuuuauuaugugggccugccagaagggaaacauccgcuguaauauuugcaucuga

SEQ ID NO: 193492 - RNA, 1701 nt, Artificial Sequence; identical to SEQ ID NO: 193056
  derived and/or modified CDS sequence (opt5) from hemagglutinin__InfluenzaA__ABK40645

SEQ ID NO: 193493 - RNA, 1701 nt, Artificial Sequence
  derived and/or modified CDS sequence (opt5) from hemagglutinin__InfluenzaA__ABK40656
augaagaccaucauugcccugagcuacauccucugccugguguucgcucagaaacuucccggcaacgacaauuccacagccacgcugugucucgggcaccaugcggucccuaacggaacccugguuaagacaauuaccaaugaucaaaucgaggugacaaacgcuaccgaacuugugcagucuagcccgacaggcagaauuugcgacucuccccaccggauccuggaugggaaaaauuguacccucaucgacgcccugcugggagauccucauugcgacggcuuucagaacaaggagugggaucucuucgucgaacgcuccaaagccuauagcaauuguuaccccuaugacgugccugauuacgcuucccugagaucucuuguugccagcuccgggacgcuggaguuuaccaacgaaaauuucaacuggacaggaguggcucaggacggcaagagcuauucuugcaagcggggcuccgucaauagcuuuuucucucgccucaacuggcugcacaaacuugaguacaaguaucccgcccugaaugugaccaugccuaacaaugggaaauuugauaagcucuacauuuggggaguucaucacccguccacagacagcgaucaaaccucucuguacgugagagcguccggcaaagucacggugagcacaaagcggucccagcagaccgugauccccgacauuggguaucgcccuugggucagaggacugucuagccggaucuccauuuacuggacaaucguuaagcccggcgacauucuccugaucaacagcaccgggaaccuuaucgccccucgcggauauuucaaaauuagaaauggcaagucuuccaucaugcggagcgaugcucccauuggcaacuguucuagcgagugcaucaccccgaauggguccauuccuaacgacaaacccuuucagaaugugaaccgcaucacauacggaacguguccuagauaugugaagcaaaauacccugaaacucgccacaggcaugcggaacguccccgaaaagcagacccgcgggaucuucggagcuauugccggcuuuaucgagaaugggugggaaggaaugguggauggcugguacggcuucagacaccagaacucugaggggacaggacaggcggccgaccugaaaagcacccaagcugccauugaucagaucaauggcaaacuuaaccggcugguugagaagacgaaugaaaaguuucaucagauugagaaggaguucuccgaaguggaagggagaauccaagaccucgagaaauaugucgaggauacaaagaucgaccuguggagcuacaacgcugaacugcucguggcccuggagaaucagcacaccauugaucuuaccgacucugaaaugaacaaacuguucgagcgcacacggaagcagcucagagaaaacgccgaggauaugggaaauggcugcuuuaagaucuaccauaaaugugacaacgcuugcauuggguccauccgcaauggcaccuaugaccacgauguuuaccgggacgaggcgcugaacaauagauuccagauuaagggaguggaacuuaaaagcggcuauaaggauuggauccuguggauuucuuuugccaucuccugcuuccuccugugugucgugcugcucggguuuaucaugugggcuugccaaaaaggaaacauucgcuguaauaucugcauuuga

SEQ ID NO: 193494 - RNA, 1701 nt, Artificial Sequence
  derived and/or modified CDS sequence (opt5) from hemagglutinin__InfluenzaA__ABK40667
augaagaccaucauugcccugagcuacauccucugccugguguucgcucagaaacuucccggcaacgacaauuccacagccacgcugugucucgggcaccaugcggucccuaacggaacccugguuaagacaauuaccaaugaucaaaucgaggugacaaacgcuaccgaacuugugcagucuagcuccacaggcagaauuugcgacucuccgcaccggauccuggaugggaaaaauuguacccucaucgacgcccugcugggagauccccauugcgacggcuuucagaacaaggagugggaucucuucgucgaacgcagcaaagccuauuccaauuguuacccuuaugacgugcccgauuacgcuucucugagaagccuuguugccuccagcgggacgcuggaguuuaccaacgaaggauucaauuggacaggcguggcucaggacggcaagucuuaugccugcaagcggggguccgucaacagcuuuuucucucgccucaauuggcugcacaaacuugaguacaaguauccugcgcugaacgugaccaugcccaauaacgauaaauuugacaagcucuacauuuggggaguucaucacccuuccacagauagcgaccaaaccucucuguacgugcaggccuccggcagagucacggugagcacaaaacggucccagcagaccgugaucccgaauauugggucucgccccugggucagaggaaucagcucccggauuagcaucuauuggacaauuguuaagccuggcgacauccugcucaucaacucuaccgggaaccugauugcuccccgcggauacuucaagcugagaaauggcaaauccagcaucaugcggucugaugccccuauugacaacuguaauagcgagugcaucacccccaacggcuccauuccgaaugauaagccuuuucaaaacgugaaucgcaucacauauggggcuugucccagauacgugaaacagaacacgcugaagcucgccaccggaaugcggaaugucccugaaaaacagacacgcggcaucuucggggcgauugccggauuuaucgagaacggcugggaagggaugguggacggaugguauggcuucagacaccaaaauucugagggcaccgggcaggcugccgaucuuaagagcacacaggcugccauugaccagaucaacggaaaacuuaaucggcugaccgagaagacgaacgaaaaguuucaucaaauugagaaagaguucuccgaaguugaaggcagaauccaggaucucgagaaguacguggaggacacaaaaaucgaucuguggagcuauaaugccgaacugcucgucgcucuggagaaccagcacaccauugaccuuaccgauucugaaaugaacaagcuguucgagcgcacacggaaacagcucagagaaaaugcggaggacauggggaacggaugcuuuaagaucuaccauaagugugacaaugccugcauuggcuccauccgcaacgggaccuacaaucacgauguguaucgggacgaggcucugaacaauagauuccaaauuaaaggcguugaacuuaagagcggauacaaagauuggauccuguggauuucuuuugccaucuccugcuuccuccugugugugguccugcucggcuuuaucaugugggccugccagaaggggaacauucgcuguaauaucugcauuuga

SEQ ID NO: 193495 - RNA, 1701 nt, Artificial Sequence; identical to SEQ ID NO: 193138
  derived and/or modified CDS sequence (opt5) from hemagglutinin__InfluenzaA__ABK40678

SEQ ID NO: 193496 - RNA, 1698 nt, Artificial Sequence
  derived and/or modified CDS sequence (opt5) from hemagglutinin__InfluenzaA__ABK40689
augaaggugaaacugcucguccugcuuugcaccuucacagccacguacgcugacaccaucuguauuggcuaucacgccaacaauagcacagauaccguugacacagugcuggagaagaacgugaccgucacacauuccgugaaucuccuggaagauucucacaacgggaaacuuugccugcucaagggaaucgcgccccugcagcugggcaauuguagcguugcuggguggauucucggaaacccugagugcgaacugcuuaucuccaaagagucuuggagcuacauuguggaaaccccgaaucccgagaacggcacguguuauccuggguacuuugccgacuaugaggaacugagagagcaacucuccucugucagcuccuucgaacgguuugagaucuuccccaaggagagcucuuggccuaaucauaccgugacaggaguuuccgccagcugcucucacaacggcaaguccagcuuuuaccgcaaucugcuuuggcugaccggcaaaaacgggcucuaucccaaucugucuaaguccuacgcuaacaauaaagaaaaggaggugcugguccucuggggagugcaucacccuccgaacaucggcaaccagagagcccuguaccacacagaaaaugcuuaugugagcgucguuuccucucauuacagccggcgcuucacccccgagauugccaaaagaccuaaggugcgggaucaggaagggcgcaucaacuauuacuggacgcuucuggagcccggagacacaauuaucuuugaggcgaauggcaaccucauugccccuagauucgcuuuugcccugucccggggguucggaagcggcaucauuaccucuaaugcucccauggaugaaugugacgccaagugccagacaccgcaaggcgcgaucaacuccagccuuccuuuucagaaugugcaccccgucaccaucggggaguguccuaaauaugugcgcucugccaagcugagaauggcuaccggacuccggaacauucccagcauccagucccgcggccuguucggggccauugcuggauuuaucgaaggcggguggacaggaaugguugauggcugguacggcuaucaucaccagaaugagcaagggucuggauacgccgccgaccagaaaagcacgcagaacgcuauuaauggcaucaccaacaaggucaauuccgugaucgaaaagaugaacacacaguucaccgcgguggggaaagaguucagcaaacuggagagacggauggaaaaucucaacaagaagguugaugacggauuucuggauauuuggacauacaacgccgagcuucuggugcuccuggaaaaugagcgcacccuugacuuccacgacucuaacgucaaaaaucuguaugaaaaggugaaaucccaacucaagaacaaugcuaaagagaucggcaacgggugcuuugaguucuaccauaaguguaaugaugaaugcauggagagcgucaagaacggcacguaugacuaccccaaauauucugaagaguccaagcugaauagagagaaaauugauggagugaagcuggaaagcaugggcguuuaccagauccucgccauuuauuccacaguggccucuagccugguccuucuggugucccucggggcuaucucuuuuuggaugugcagcaacggaucccugcagugucggaucugcauuuga

SEQ ID NO: 193497 - RNA, 1701 nt, Artificial Sequence; identical to SEQ ID NO: 192722
  derived and/or modified CDS sequence (opt5) from hemagglutinin__InfluenzaA__ABK40700

SEQ ID NO: 193498 - RNA, 1701 nt, Artificial Sequence; identical to SEQ ID NO: 192722
  derived and/or modified CDS sequence (opt5) from hemagglutinin__InfluenzaA__ABK40711

SEQ ID NO: 193499 - RNA, 1701 nt, Artificial Sequence
  derived and/or modified CDS sequence (opt5) from hemagglutinin__InfluenzaA__ABK40722
augaagaccaucauugcccugagcuacauccucugccugguguucgcucagaaacuucccggcaacgacaauuccacagccacgcugugucucgggcaccaugcggucccuaacggaacccugguuaagacaauuaccaaugaucaaaucgaggugacaaacgcuaccgaacuugugcagucuagcuccacaggcgggauuugcgacucuccgcaccagauccuggauggagagaauuguacccucaucgacgcccugcugggcgauccccauugcgacggguuucagaacaaagaaugggaucucuucgucgagagaagcaaggccuauuccaauuguuacccuuaugacgugcccgauuacgcuucucugcggagccuuguugccuccagcggaacgcuggaauuuaacaaugagucuuucaacuggaccggcguggcucaaaauggcacauccagcgccugcaaacgcagaucuaacaaguccuuuuucagccggcucaauuggcugcaccagcuuaaguauaaauacccugcgcugaacgucaccaugcccaauaacgagaaguuugacaaacucuauauuuggggagugcaucacccuucuacagauaacgaccagaucucccuguacgcccaggcuccggggcgcguuaccgugagcacgaagagaucccaacagacagucauucccaauaucggcucucggccuugggugcgcggggugagcuccagaauuagcaucuacuggaccauugucaaacccggagauauccugcucaucaacuguacaggcaaucugauugccccucggggguauuucaagauccgcucuggaaaguccagcauuaugagaucugacgcuagcaucggcaaaugcaacuccgaauguauuacccccaauggcucuaucccgaacgacaagccuuuucagaauguuaaccggaucaccuacggggccugcccccgcuaugugaaacagaauacacuuaagcuggcgacgggaaugagaaacgugccugagaaacaaacccggggcauuuucggggccaucgcuggauuuauugaaaauggcugggaggggauggucgauggaugguacggcuuccgccaccagaacagcgagggcacagggcaggccgcugaccucaaguccacccaagccgccaucaaucagauuaacggaaaacugaauagacuuaucgaaaagacaaacgagaaguuucaucagaucgaaaaagaguucagcgaaguggagggccggauucaggaucuggagaaguauguugaagacaccaaaaucgaucucuggucuuacaacgcugagcugcugguggcgcucgaaaaucaacacacgauugaccugacagauuccgagaugaacaaacuuuucgaaagaaccaagaagcagcugcgcgagaaugccgaggacauggggaacggauguuuuaagaucuaucauaaaugcgauaaugcuugcauuggcagcauccggaacgggaccuacgaccacgaugucuacagagacgaagcccucaauaaccgcuuccagauuaagggcguggagcugaaaucuggauauaaggacuggauccuuuggaucuccuuugccauuagcuguuuccugcucugcguugugcugcugggcuuuaucaugugggcuugucagaaagggaauauucggugcaacaucuguauuuga

SEQ ID NO: 193500 - RNA, 1701 nt, Artificial Sequence; identical to SEQ ID NO: 192722
  derived and/or modified CDS sequence (opt5) from hemagglutinin__InfluenzaA__ABK40733

SEQ ID NO: 193501 - RNA, 1701 nt, Artificial Sequence; identical to SEQ ID NO: 193377
  derived and/or modified CDS sequence (opt5) from hemagglutinin__InfluenzaA__ABK40744

SEQ ID NO: 193502 - RNA, 1701 nt, Artificial Sequence; identical to SEQ ID NO: 192987
  derived and/or modified CDS sequence (opt5) from hemagglutinin__InfluenzaA__ABK79948

SEQ ID NO: 193503 - RNA, 1698 nt, Artificial Sequence; identical to SEQ ID NO: 193276
  derived and/or modified CDS sequence (opt5) from hemagglutinin__InfluenzaA__ABK79959

SEQ ID NO: 193504 - RNA, 1701 nt, Artificial Sequence
  derived and/or modified CDS sequence (opt5) from hemagglutinin__InfluenzaA__ABK79970
augaaggccaaacugcucgugcugcuuugcgcuuucaccgccacauacgcggacacgaucuguauuggcuaucacgcuaacaauagcaccgauacagucgacaccguucuggagaagaacgugacagugacccauuccgucaaucuccuggaagauucucacaacgggaaacuuugcagacugaagggaacagcuccccuccagcugggcaauuguagcaucgccggguggauucugggaaacccugagugcgaaucccucuuuucuaaaaagagcugguccuacaucgccgagaccccgaaucccaagaacggcacguguuauccuggguacuucgccgacuaugaagaacugcgggagcaacuuucuagcguguccagcuuugaacgcuucgagauuuuucccaaagauucuuccuggccuaaucauaccguuacaaagggagugaccgcuagcugcucucacaacggcaaauccagcuucuacaagaaucugcucuggcugacagagaaaaacggccuuuaucccaaucugucuaaguccuacgucaacaagaaagggaaggaggugcucguucuguggggagugcaucacccuagcaauaugggcgaccagagagccaucuaccacaaagagaacgcguaugucuccgugcugucuagccauuacucccggcgcuuuaccccggaaaucgccagacggcccaaggugcgcgaucaggaggggagaauuaacuauuacuggacgcuccuggaaccuggagacacaaucauuuucgaggcuaauggcaaccuuaucgcccccugguaugcuuuugcccugagccggggguucggaucuggcauuaucauuuccaaugcgagcaugggcgaaugugaugccaaaugccagaccccucaaggggcuaucaacucuagccuccccuuucagaauguccacccgguuacaaucggagaguguccuaaguacgugcgcuccaccaaacugagaauggugaccggccuucggaacguccccucuauucagagccgcgggcuguucggagccaucgcuggcuuuauugaagggggauggacaggcaugaucgacggcugguauggguaccaucaccagaaugaacaaggauccggcuacgccgccgaucaaaagagcacgcagaacgcuauuaaugggaucaccaacaagguuaauucuaucauugagaaaaugaacacacaguucaccgcggugggaaaggaguucaauaaacucgagagacggauggaaaaccugaauaagaaaguggacgauggcuuucuggacaucuggacauauaacgccgagcuccugguccuucuggagaacgaacgcacccucgacuuccacgauuccaaugugaagaaccuguacgagaagguuaaaaaucagcuuaagaacaaugcuaaagaaauugggaacggcugcuuugaguucuaucauaaguguaauaacgaaugcauggagagcgugaaaaauggaacguacgacuauccuaaguacucuaaggaguccaaacugaacagagaaaagaucgauggcgucaaacucgagagcauggggguguaucagauucuggccaucuacuccacagucgccucuagccuggugcuccugguuucccuuggagcuaucucuuuuuggaugugcagcaauggcucccugcagugucggauuugcaucuga

SEQ ID NO: 193505 - RNA, 1701 nt, Artificial Sequence
  derived and/or modified CDS sequence (opt5) from hemagglutinin__InfluenzaA__ABK79981
augaagaccaucauugcccugagcuacauccucugccugguguucacacagaaacuucccggcaacgacaauuccacggcuacccugugucucgggcaccaugccgucccuaacggaacacugguuaagaccauuacaaaugaucaaaucgaggugaccaacgcgacagaacuugugcagucuagcuccaccggcgggauuugcgacucuccgcaccagauccuggauggagagaauuguacgcucaucgacgcucugcugggcgauccccauugcgacggguuucagaacaaagaaugggaucucuucgucgagagaagcaaggccuauuccaauuguuacccuuaugacgugcccgauuacgccucucugcggagccuuguugcuuccagcggaacccuggaauuuaacaaugagucuuucaacuggacaggcguggcccaaaauggcaccuccagcgcuugcaaacgcagaucuaacaaguccuuuuucagccggcucaauuggcugcaccagcuuaaguauaaauacccugcccugaacgucacaaugcccaauaacgagaaguuugacaaacucuauauuuggggagugcaucacccuucuaccgauuccgaccagaucagccuguacgcgcaggccccggggcgcguuacgguguccacaaagagaucucaacagaccgucauucccaacaucggcagccggccuugggugcgcgggguguccagcagaauuucuaucuacuggacaauugucaaacccggagauauccugcucaucaauuguaccggcaaccugauugcuccucggggguauuucaagauccgcuccggaaagagcucuauuaugagaagcgacgccuccaucggcaaaugcaauucugaauguauuacccccaacggcagcaucccgaaugacaagccuuuucagaacguuaaucggaucacauacggggcuugcccccgcuaugugaaacagaacacgcuuaagcuggccaccggaaugagaaaugugccugagaaacaaacacggggcauuuucggggcgaucgccggauuuauugaaaacggcugggaggggauggucgauggaugguacggcuuccgccaccaaaauuccgagggcaccgggcaggcugccgaccucaagagcacacaggcugccaucaaccagauuaauggaaaacugaacagacuuaucgaaaagaccaaugagaaguuucaucagaucgaaaaagaguucucugaaguggagggccggauucaggaucuggagaaguauguugaagacacgaaaaucgaucucugguccuacaacgccgagcugcugguggcucucgaaaaccaacacacaauugaccugaccgauagcgagaugaauaaacuuuucgaaagaaccaagaagcagcugcgcgagaacgcggaggacauggggaauggauguuuuaagaucuaucauaaaugcgauaacgccugcauuggcucuauccggaaugggacauacgaccacgaugucuacagagacgaagcucucaacaaucgcuuccagauuaagggcguggagcugaaauccggauauaaggacuggauccuuuggaucagcuuugccauuuccuguuuccugcucugcguugugcugcugggcuuuaucaugugggccugucagaaagggaacauucggugcaauaucuguauuuga

SEQ ID NO: 193506 - RNA, 1701 nt, Artificial Sequence; identical to SEQ ID NO: 192722
  derived and/or modified CDS sequence (opt5) from hemagglutinin__InfluenzaA__ABK79992

SEQ ID NO: 193507 - RNA, 1701 nt, Artificial Sequence; identical to SEQ ID NO: 192993
  derived and/or modified CDS sequence (opt5) from hemagglutinin__InfluenzaA__ABK80025

SEQ ID NO: 193508 - RNA, 1701 nt, Artificial Sequence; identical to SEQ ID NO: 192993
  derived and/or modified CDS sequence (opt5) from hemagglutinin__InfluenzaA__ABK80036

SEQ ID NO: 193509 - RNA, 1701 nt, Artificial Sequence; identical to SEQ ID NO: 192993
  derived and/or modified CDS sequence (opt5) from hemagglutinin__InfluenzaA__ABK80047

SEQ ID NO: 193510 - RNA, 1701 nt, Artificial Sequence; identical to SEQ ID NO: 192838
  derived and/or modified CDS sequence (opt5) from hemagglutinin__InfluenzaA__ABK80058

SEQ ID NO: 193511 - RNA, 1701 nt, Artificial Sequence
  derived and/or modified CDS sequence (opt5) from hemagglutinin__InfluenzaA__ABK80069
augaagaccaucauugcccugagcuacauccucugccugguguucgcucagaaacuucccgucaacgacaauuccacagccacgcugugucucggccaccaugcgguuccuaacgggacccuggugaagacaauuaccaaugaucacaucgaggugacaaacgcuaccgaacuuguccaaucuagcuccacaggaagaauuugcgacucuccgcaucagauccuggauggcgagaauuguacccucaucgacgcccugcugggggauccccacugcgacggauuucagaacaaagaaugggaucucuucguggagcggagcacggccuauuccaauuguuacccuuaugacguucccgauuacgcuucucugcgcagccuuguggccuccagcggcacccuggaauuuaacaaugagucuuucaacuggacaggggucgcucagaauggaaccuccagcgccugcaagagacggucuauuaaauccuuuuucagccgccucaacuggcugcaucaacuuaaguauaaguacccugcgcugaaugugacaaugcccaacaaugagaaauuugacaagcucuauaucuggggcguucaccacccuucuaccgauuccgaccagauuagccuguacgcccaggcuuccggcagagugacggucucuacaaaacggagccagcaaaccgugaucccgaacauugggucccgccccuggaucagaggagugagcucucggauuuccaucuacuggacaaucgucaagccuggcgauauucugcucaucaacagcaccgggaaucugauugcccccagaggauauuucaaaaucagaucuggcaagagcuccauuaugcggucuaacgcuccuaucgggaaguguaauagcgaaugcaucacccccaacggauccauuccgaaugacaaaccuuuucagaacguuaaucgcaucgccuacggcgcgugucccagauaugugaagcagaacacacuuaaacuggccacgggcaugcggaaugugccugagaagcagacccgcgggauuuucggagcuaucgccggcuuuauugaaaacgggugggagggaauggucgacggcugguacggguucagacaucucaauagcgagggaacaggccaagcugccgaucugaaaucuacccaggccgcuaucaaccagaucaauggcaaacuuaaccggcugauugaaaagacaaaugagaaguuucaccaaaucgaaaaggaguucuccgaaguggaggggcgcauucaggaccucgagaaauauguugaagauaccaagaucgaccuguggagcuacaacgcggagcugcucguggcccuggaaaaccagcauacgauugaucuuacagacucugagaugaauaaacuguucgaacgcacccggaagcagcucagagagaacgcugaggaugucggaaauggcugcuuuaaaaucuaucacaagugugacaacgccugcauuggguccauccgcaauggaaccuacgaucacgacguguaccgggaugaagcccugaacaauagauuccaaaucaagggcguugagcuuaaaagcggguauaaggacuggauucuguggaucuccuuugcuauuucuugcuuccuccugugugugguccugcucggcuuuaucaugugggccugccagaaaggaaacauucgcuguaauaucugcaucuga

SEQ ID NO: 193512 - RNA, 1701 nt, Artificial Sequence
  derived and/or modified CDS sequence (opt5) from hemagglutinin__InfluenzaA__ABK80080
augaagaccaucauugcccugagcuacauccucugccugguguucgcucagaaacuucccgucaacgacaauuccacagccacgcugugucucggccaccaugcgguuccuaacgggacccuggugaagacaauuaccaaugaucacaucgaggugacaaacgcuaccgaacuuguccaaucuagcuccacaggaagaauuugcgacucuccgcaucagauccuggauggcgagaauuguacccucaucgacgcccugcugggggauccccacugcgacggauuucagaacaaagaaugggaucucuucguggagcggagcacggccuauuccaauuguuacccuuaugacguucccgauuacgcuucucugcgcagccuuguggccuccagcggcacccuggaauuuaacaaugagucuuucaacuggacaggggucgcucagaauggaaccuccagcgccugcaagagacggucuauuaaauccuuuuucagccgccucaacuggcugcaucaacuuaaguauaaguacccugcgcugaaugugacaaugcccaacaaugagaaauuugacaagcucuauaucuggggcguucaccacccuucuaccgauuccgaccagauuagccuguacgcccaggcuuccggcagagugacggucucuacaaaacggagccagcaaaccgugaucccgaacauugggucccgccccugggugagaggagucagcucucggaucuccauuuacuggacaaucguuaagccuggcgauauccugcucauuaacagcaccgggaaucugaucgcuccccgcggauauuucaaaauuagaucuggcaagagcuccaucaugcggucuaacgccccuauugggaaguguaauagcgaaugcaucacccccaacggauccaucccgaaugacaaaccuuuucagaacgugaaucgcauuacauacggcgccugucccagauaugugaagcagaacacgcuuaaacuggcgaccggcaugcggaaugucccugagaagcagacacgcgggaucuucggagccauugcuggcuuuaucgaaaacgggugggagggaaugguggacggcugguacggguucagacaucaaaauagcgagggaaccggccaggccgcugaucucaaaucuacacaggccgccauuaaccaaaucaauggcaagcugaaccggcuuaucgagaaaaccaaugaaaaguuucaccagauugaaaaggaguucuccgaaguugaggggagaauccaggaccuggagaaauauguggaagauacgaagauugaccucuggagcuacaacgcugagcugcuggucgcgcucgaaaaccagcauacaaucgaucugaccgacucugagaugaauaaacuuuucgaacgcacccggaagcaacugagagagaacgccgaggauaugggaaauggcugccucaaaauuuaucacaagugugacaacgcuugcaucggguccauucgcaauggaacauacgaucacgacguguaccgggaugaagcccugaacaauagauuucagaucaagggcguugagcuuaaaagcggguauaaggacuggauccuguggauuuccuucgccaucucuugcuuucuccugugugugguccugcucggcuucauuaugugggcuugccagaaaggaaacauccgcuguaauauuugcaucuga

SEQ ID NO: 193513 - RNA, 1701 nt, Artificial Sequence; identical to SEQ ID NO: 192722
  derived and/or modified CDS sequence (opt5) from hemagglutinin__InfluenzaA__ABK80091

SEQ ID NO: 193514 - RNA, 1701 nt, Artificial Sequence; identical to SEQ ID NO: 192722
  derived and/or modified CDS sequence (opt5) from hemagglutinin__InfluenzaA__ABK80102

SEQ ID NO: 193515 - RNA, 1701 nt, Artificial Sequence; identical to SEQ ID NO: 192123
  derived and/or modified CDS sequence (opt5) from hemagglutinin__InfluenzaA__ABK80113

SEQ ID NO: 193516 - RNA, 1701 nt, Artificial Sequence
  derived and/or modified CDS sequence (opt5) from hemagglutinin__InfluenzaA__ABK80124
augaagaccaucauugcccugagcuacauccucugccugguguucgcucagaaacuucccggcaacgacaauuccacagccacgcugugucucgggcaccaugcggucccuaacggaacccugguuaagacaauuaccaaugaucaaaucgaggugacaaacgcuaccgaacuugugcagucuagcuccacaggcagaauuugcgacucuccgcaccagauccuggauggggagaauuguacccucaucgacgcccugcugggagauccccauugcgacggcuuucagaacaaagaaugggaucucuucgucgagcggagcaaggccuauuccaauuguuacccuuaugacgugcccgauuacguuucucugcgcagccuuguggcuuccagcgggacgcuggaauuuaacaaugagucuuucaacuggaccggagucgcccaaaauggcacauccagcgcuugcaaaagacggucugacaaguccuuuuucagccgccucaacuggcugcaccagcuuaaguauaaauacccugcccugaaugugaccaugcccaacaaugagaaguuugauaaacucuauauuuggggcguucaucacccugggacagacucugaucagaucucccuguacgcgcaggccagcggaagagugaccgucuccacgaagcggucucaacagacagugauuccgaacaucggcagccgccccugggugagaggggucuccagccggauuucuaucuacuggaccauuguuaaaccuggagacauccugcucaucaacuccacaggcaaucugauugcuccccgcggguauuucaagaucagaagcggaaagucuagcauuaugcgguccgacgccccuaucggcaaauguaacucugaaugcauuacccccaauggcagcaucccgaacgauaagccuuuucagaaugugaaccgcaucaccuacgggcccuguccuagauaugugaaacagaauacacuuaagcuggcuacgggaaugcggaacguccccgagaaacaaacccgcggcauuuucggggccaucgcgggauuuauugaaaauggcugggaggggaugauggacggaugguacggcuucagacaccagaacuccgagggcacagggcaggccgcugaucucaagagcacccaagccgcuaucaaucagauuaacggaaaacugaaucggcuuaucgaaaagacaaacgagaaguuucaucagaucgaaaaagaguucucugaaguggagggccgcauucaggaccuggagaaguauguugaagauaccaaaaucgaccucugguccuacaaugccgagcugcugguggcccucgaaaaccaacacacgauugaucugacagacagcgagaugaacaaacuuuucgaaagaaccaagaagcagcugcgggagaaugcugaggauauggggaacggaugcuuuaagaucuaucauaaaugugacaaugcgugcauuggcucuaucagaaacgggaccuacgaucacgacgucuaccgcgacgaagcccucaauaaccgguuccagauuaagggcguggagcugaaauccggauauaagaauuggauccuuuggaucagcuuugcuauuuccugcuuccugcucuguaucguucugcugggcuuuauuaugugggccugccagaaagggaacaucagauguaauauuugcaucuga

SEQ ID NO: 193517 - RNA, 1701 nt, Artificial Sequence; identical to SEQ ID NO: 192123
  derived and/or modified CDS sequence (opt5) from hemagglutinin__InfluenzaA__ABK80135

SEQ ID NO: 193518 - RNA, 1701 nt, Artificial Sequence; identical to SEQ ID NO: 192123
  derived and/or modified CDS sequence (opt5) from hemagglutinin__InfluenzaA__ABK80146

SEQ ID NO: 193519 - RNA, 1701 nt, Artificial Sequence; identical to SEQ ID NO: 192123
  derived and/or modified CDS sequence (opt5) from hemagglutinin__InfluenzaA__ABK80157

SEQ ID NO: 193520 - RNA, 1701 nt, Artificial Sequence; identical to SEQ ID NO: 192634
  derived and/or modified CDS sequence (opt5) from hemagglutinin__InfluenzaA__ABK80168

SEQ ID NO: 193521 - RNA, 1701 nt, Artificial Sequence
  derived and/or modified CDS sequence (opt5) from hemagglutinin__InfluenzaA__ABK80179
augaagaccaucauugcccugagcuacauccucugccugguguucgcucagaaacuucccggcaacgacaauuccacagccacgcugugucucgggcaccaugcggucccuaacggaacccugguuaagacaauuaccaaugaucaaaucgaggugacaaacgcuaccgaacuugugcagucuagcuccacaggcagaauuugcgacucuccgcaccagauccuggauggggagaauuguacccucaucgacgcccugcugggagauccccauugcgacggcuuucagaacaaagaaugggaucucuucgucgagcggagcaaggccuauuccaauuguuacccuuaugacgugcccgauuacguuucucugcgcagccuuguggcuuccagcgggacgcuggaauuuaacaaugagucuuucaacuggaccggagucgcccaaaauggcacauccagcgcuugcaaaagacggucugacaaguccuuuuucagccgccucaacuggcugcaccagcuuaaguauaaauacccugcccugaaugugaccaugcccaacaaugagaaguuugauaaacucuauauuuggggcguucaucacccugggacagacucugaucagaucucccuguacgcgcaggccagcggaagagugaccgucuccacgaagcggucucaacagacagugauuccgaacaucggcagccgccccugggugagaggggucuccagccggauuucuaucuacuggaccauuguuaaaccuggagacauccugcucaucaacuccacaggcaaucugauugcuccccgcggguauuucaagaucagaagcggaaagucuagcauuaugcgguccgacgccccuaucggcaaauguaacucugaaugcauuacccccaauggcagcgugccgaacgauaagccuuuucagaaugugaaccgcaucaccuacggggcuugucccagauaugucaaacagaauacacuuaagcuggccacgggaaugcggaacgugccugagaaacaaacccgcggcaucuucggggcgauugccggauuuaucgaaaauggcugggaggggaugauggacggaugguacggcuucagacaccagaacuccgagggcacagggcaggcugccgaucucaagagcacccaagcugccauuaaucagaucaacggaaaacugaaucggcuuauugaaaagacaaacgagaaguuucaucagaucgaaaaagaguucucugaaguugagggcagaauccaggaccuggagaaguauguggaagauaccaaaauugaccucugguccuacaaugccgagcugcuggucgcucucgaaaaccaacacacgaucgaucugacagacagcgagaugaacaaacuuuucgaacgcaccaagaagcagcugcgggagaaugcggaggauauggggaacggaugcuuuaagauuuaucauaaaugugacaaugccugcaucggcucuauuagaaacgggaccuacgaucacgacguguaccgcgacgaagcucucaauaaccggcugcagaucaagggcguugagcuuaaauccggauauaaggauuggauucuguggaucagcuucgccaucuccugcuuucuccuguguauugugcugcucggcuucaucaugugggccugccagaaagggaauauuagauguaacaucugcauuuga

SEQ ID NO: 193522 - RNA, 1701 nt, Artificial Sequence; identical to SEQ ID NO: 192634
  derived and/or modified CDS sequence (opt5) from hemagglutinin__InfluenzaA__ABK80190

SEQ ID NO: 193523 - RNA, 1701 nt, Artificial Sequence; identical to SEQ ID NO: 193377
  derived and/or modified CDS sequence (opt5) from hemagglutinin__InfluenzaA__ABK80201

SEQ ID NO: 193524 - RNA, 1701 nt, Artificial Sequence
  derived and/or modified CDS sequence (opt5) from hemagglutinin__InfluenzaA__ABK80212
augaagaccaucauugcccugagcuacauccucugccugguguucgcucagaaacuucccggcaacgacaauuccacagccacgcugugucucgggcaccaugcggucccuaacggaaccauuguuaagacaaucaccaaugaucaaauugaggugacaaacgcuaccgaacuggugcagucuagcuccacaggcgggaucugcgacucuccgcaccagauccuugauggagagaauuguacccugauugacgcccuccugggcgauccccagugcgacggguuucaaaacaaaaagugggaucuguucgucgaaagaagcaaagccuauuccaauuguuacccuuaugacgugcccgauuacgcuucucuccggagccugguugccuccagcggaacgcuugaguuuaacaaugaaucuuucgacuggaccggcgugacacagaacggcaccuccagcgcuugcaagcgcagaucuaauaaguccuuuuucagccggcugaacuggcucacacaucugaaauauaaguacccugcccuuaaugucaccaugcccaacaaugagaaauuugauaagcuguauaucuggggagugcaccauccugggacggacucugaucagauuucccucuacgcgcaggccagcggccgcaucacaguuuccaccaaaagaucucaacagacagugauuccgaacaucgggagccggccccgcgucagagacguguccagccggauuucuaucuacuggaccaucgugaagccuggagacauucugcugaucaacuccaccggcaaucucauugcuccccgcggguauuucaagaucagaagcggaaaaucuagcauuaugcgguccgaugccccuaucggcaaguguaacucugagugcaucacacccaauggcagcauuccgaacgacaaaccuuuucagaaugucaaccgcaucacguacggggcuugucccagauauguuaagcagaauacccugaaacuugccacaggaaugcggaacgugccugaaaagcaaacccgcggcauuuucggggcgaucgccggauuuauugagaauggcugggaagggaugguggauggaugguacggcuucagacaccagaacuccgagggcacagggcaggcugccgaccugaaaagcacccaagcugccaucaaucagaucaacggaaagcucaaucggcugauuggcaagacgaacgagaaauuucaccagaucgaaaaggaguucucugaagucgaggggcgcauucaggaucuugaaaaauauguggaggacacaaagaucgaucugugguccuacaaugccgagcuccugguugcucuggaaaaccaacauaccauugaccucaccgauagcgagaugaacaaacuguucgaaagaacaaagaagcagcuucgggagaaugcggaagacaugggaaacggcugcuuuaaaaucuaucacaagugugauaaugccugcauugggucuaucagaaacggcaccuacgaccaugacguguaccgcgaugaggcucugaauaaccgguuccagaucaaaggagucgagcucaaguccggcuauaaaaauuggauucuguggaucagcuuugccauuuccugcuuccuucuguguguggcccuccugggguuuaucaugugggcuugccagaagggaaacauuagauguaauaucugcaucuga

SEQ ID NO: 193525 - RNA, 1701 nt, Artificial Sequence; identical to SEQ ID NO: 192588
  derived and/or modified CDS sequence (opt5) from hemagglutinin__InfluenzaA__ABK80223

SEQ ID NO: 193526 - RNA, 1701 nt, Artificial Sequence
  derived and/or modified CDS sequence (opt5) from hemagglutinin__InfluenzaA__ABK80234
augagaaccaucauugcccugagcuacauccucugccugguguucgcucagaagcugcccggcaacgacaauuccacagccacgcugugucucgggcaccaugcggucccuaacggaaccauuguuaaaacaaucaccaaugaucaaauugaggugacaaacgcuaccgaacuggugcagucuagcuccacaggcgggaucugcgacucuccgcaccagauccuugauggagagaauuguacccugauugacgcccuccugggcgauccccagugcgacggguuucaaaacaagaaaugggaucuguucgucgaacggagcaaggccuauuccaauuguuacccuuaugacgugcccgaucaugcuucucuccgcagccugguugccuccagcggaacgcuugaguuuaacaaugaaucuuucgacuggaccggcgugacacagaacggcaccuccagcgcuugcaaaagacggucuaauaaguccuuuuucagccgccugaacuggcucacacaccugaaguacaaauauccugcccuuaaugucaccaugcccaacaaugagaaguuugauaaacuguacaucuggggagugcaucacccugggacggacucugaucagauuucccucuaugcgcaggccagcggcagaaucacaguuuccaccaagcggucucaacagacagugauuccgaacaucgggagccgccccagaguccgggacguguccagccgcauuucuaucuacuggaccaucgugaaaccuggagacauucugcugaucaacuccaccggcaaucucauugcucccagaggguacuucaagauccggagcggaaagucuagcauuaugcgcuccgaugccccuaucggcaaauguaacucugagugcaucacacccaauggcagcauuccgaacgacaagccuuuucagaaugucaacagaaucacguauggggcuuguccccgguacguuaaacagaauacccugaaacuugccacaggaaugcgcaacgugccugaaaaacaaaccagaggcauuuucggggcgaucgccggauuuauugagaauggcugggaagggaugguggauggaugguauggcuuccggcaccagaacuccgagggcacagggcaggcugccgaccuuaagagcacccaagcugccaucaaucagaucaacggaaaacucaauagacugauuggcaagacgaacgagaaguuucaucagaucgaaaaagaguucucugaagucgaggggcgcauucaggaucuugaaaaguacguggaggacacaaaaaucgaucugugguccuauaaugccgagcuccugguugcucuggaaaaccaacacaccauugaccucaccgauagcgagaugaacaagcuguucgaacggacaaagaagcagcuuagagagaaugcggaagacaugggaaacggcugcuuuaagaucuaccauaaaugugauaaugccugcauugggucuauccgcaacggcaccuaugaccacgacguguaccgggaugaggcucugaauaacagauuccagaucaagggagucgagcucaaauccggcuacaaggacuggauucuguggaucagcuuugccauuuccugcuuccuucuguguguggcccuccugggguuuaucaugugggcuugccagaaaggaaauauucgcuguaacaucugcaucuga

SEQ ID NO: 193527 - RNA, 1701 nt, Artificial Sequence
  derived and/or modified CDS sequence (opt5) from hemagglutinin__InfluenzaA__ABK80245
augaagaccaucauugcccugagcuacauccucugccugguguucgcucagaaacuucccggcaacgacaauuccacagccacgcugugucucgggcaccaugcggucccuaacggaaccauuguuaagacaaucaccaaugaucaaauugaggugacaaacgcuaccgaacuggugcagucuagcuccacaggcgggaucugcgacucuccgcaccagauccuugauggagagaauuguacccugauugacgcccuccugggcgauccccagugcgacggguuucaaaacaaaaagugggaucuguucgucgaaagaagcaaagcccauuccaauuguuauccuuacgacgugcccgauuaugcuucucuccggagccugaucgccuccagcggaacgcuugaguuuaacaaugaaucuuucaacuggaccggcguuacacagaauggcaccuccagcgcuugcaagcgcagaucuaaccaguccuuuuucagccggcugaauuggcucacacaccugaaguuuaaauacccugcccuuaacgugaccaugcccaauaacgagaaguucgacaaacuguauauuuggggaguccaucacccugggacggauucugaccagaucucccucuacgcgcaagccccgggccgcauuacagugagcaccaagagaucccagcagacaguuauccccaacauugggucucggccucgcgugagagauaucagcucccggaucagcauuuauuggaccaucgucaaacccggagacauucugcugaucaauucuaccggcaaccucauugcuccucgcggguacuuuaagaucagauccggaaagagcucuaucaugaaaagcgacgcccccauuggcaaguguaauuccgagugcaucacaccgaacggcucuauuccuaaugauaaacccuuccagaacgugaaucggaucacguacggggcuuguccucgcuaugugaagcaaaacacccugaaacuugccacaggaaugagaaauguccccgaaaagcagacccggggcauuuuuggggcgaucgccggauucaucgagaacggcugggaagggaugguugacggaugguacggcuuucgccaccagaauagcgagggcacagggcaagcugccgaucugaaauccacccaggcugccauuaaccagaucaauggaaagcucaacagacugauuggcaagacgaaugagaaauuccaucagaucgaaaaggaguucagcgaaguggaggggcggauucaagaccuugaaaaauauguggaggauacaaagaucgaccuguggucuuacaacgccgagcuccuggucgcucuggaaaaccagcacaccauugaucucaccgacuccgagaugaauaaacuguuugaaagaacaaagaagcagcuucgcgagaacgcggaagauaugggaaauggcugcuucaaaaucuaucauaagugugacaacgccugcaucgggagcauucggaauggcaccuacgaucacgacguguauagagacgaggcucugaacaaucgcuuucagaucaaaggaguugagcucaagucuggcuacaaagauuggauucuguggaucuccuucgccauuagcugccuucugcucuguguggcccugcugggguuuaucaugugggcuugccaaaagggaaacauccgguguaauauuugcaucuga

SEQ ID NO: 193528 - RNA, 1701 nt, Artificial Sequence; identical to SEQ ID NO: 193527
  derived and/or modified CDS sequence (opt5) from hemagglutinin__InfluenzaA__ABK80256

SEQ ID NO: 193529 - RNA, 1701 nt, Artificial Sequence; identical to SEQ ID NO: 192684
  derived and/or modified CDS sequence (opt5) from hemagglutinin__InfluenzaA__ABK80267

SEQ ID NO: 193530 - RNA, 1701 nt, Artificial Sequence; identical to SEQ ID NO: 192705
  derived and/or modified CDS sequence (opt5) from hemagglutinin__InfluenzaA__ABK80278

SEQ ID NO: 193531 - RNA, 1701 nt, Artificial Sequence
  derived and/or modified CDS sequence (opt5) from hemagglutinin__InfluenzaA__ABK80289
augaagaccaucauugcccugagcuacauccucugccugguguucgcucagaaacuucccggcaacgacaauuccacagccacgcugugucucgggcaccaugcggucccuaacggaaccauuguuaagacaaucaccaaugaucaaauugaggugacaaacgcuaccgaacuggugcagucuagcuccacaggcgggaucugcgacucuccgcaccagauccuugauggagagaauuguacccugauugacgcccuccugggcgauccccagugcgacggguuucaaaacaaaaagugggaucuguucgucgaaagaagcaaagccuauuccaauuguuacccuuaugacgugcccgauuacgcuucucuccggagccugguugccuccagcggaacgcuugaguuuaacaaugaaucuuucaacuggaccggcgugacacagaauggcaccuccagcgcuugcaagcgcagaucuaacaauuccuuuuucagccggcugaacuggcucacacaucugaaguuuaaauauccugcccuuaaugucaccaugcccaacaacgagaaguucgacaaacuguacaucuggggagugcaccauccugggacggauaaugaccagauuuuucucuaugcgcaggccucuggccgcaucacaguuuccaccaagagaagccaacagacagugauuccgaacaucgggucccggccccgcgucagaaauauuccuucucggaucagcaucuacuggaccauugugaaacccggagauauccugcugauuaacuccaccggcaaucucaucgcuccucgcggguacuucaagauuagaagcggaaagucuuccaucaugcggagcgacgcccccaucggcaaauguaacucugagugcauuacaccgaauggcagcaucccuaacgacaagcccuuucagaaugugaaccgcauuacguauggggcuuguccuagauacgucaaacagaauacccugaaacuugccacaggaaugcggaacguucccgaaaaacaaacccgcggcaucuucggggcgauugccggauuuaucgagaauggcugggaagggaugguggauggaugguauggcuucagacaccagaacuccgagggcacagggcaggcugccgaccugaagucuacccaagcugccaucaaucagauuaacggaaaacucaaccggcugaucggcaagacgaaugagaaguuccaccagauugaaaaagaguuuagcgaaguggaggggagaauccaggaucuugaaaaguacgucgaggacacaaaaauugaucugugguccuauaacgccgagcuccugguggcucuggaaaaucaacauaccaucgaccucaccgauagcgagaugaacaagcuguucgaacgcacaaagaagcagcuucgggagaaugcggaagacaugggaaacggcugcuuuaagauuuaccacaaaugugauaaugccugcaucgggucuaucagaaacggcaccuaugaccaugauguuuaccgcgacgaggcucugaauaaccgguuccagauuaagggaguggagcucaaauccggcuacaaggacuggauccuguggauuagcuuugccaucucuugcuuccuucugugugucgcccuccugggguuuauuaugugggcuugccagaaaggaaauaucagauguaacaucugcauuuga

SEQ ID NO: 193532 - RNA, 1701 nt, Artificial Sequence; identical to SEQ ID NO: 192123
  derived and/or modified CDS sequence (opt5) from hemagglutinin__InfluenzaA__ABK80300

SEQ ID NO: 193533 - RNA, 1701 nt, Artificial Sequence; identical to SEQ ID NO: 192123
  derived and/or modified CDS sequence (opt5) from hemagglutinin__InfluenzaA__ABK80311

SEQ ID NO: 193534 - RNA, 1707 nt, Artificial Sequence
  derived and/or modified CDS sequence (opt5) from hemagglutinin__InfluenzaA__ABL07019
auggagaagaucgugcugcuccugagcauugucucccuuguuaaaucugaccagaucugcauuggcuaccacgccaacaauagcaccgaacaaguggauacaaucauggagaagaacgugacggucacccaugcucaggacauucuggaaaagacacacaaugggaagcucugugaucuggacggagugaaaccccuuauccugagagauugcuccguugccggcuggcuccuggggaacccuaugugugacgaguucaucaaugugccggaauggucuuauauugucgagaaggcgaaccccaccaaugaucugugcuacccuggcagcuuuaacgacuaugaggaacucaagcaucugcuuucccggaucaaucacuucgagaaaauucagaucauucccaagucuagcugguccgaucaugaagcuagcucuggaguguccagcgccuguccuuaccuggggucucccuccuuuuuccgcaacguuguguggcucaccaaaaagaauagcacauauccuacaaucaaaaagucuuacaacaauaccaaccaggaggaccugcuuguccuguggggcauucaccacccgaauaacgaggccgaacaaacgagacucuaucagaaccccaccacauacaucuccaucggaaccagcacacugaaucagcggcuggugccuaagauugcuacccgcuccaaagugaacggccagucugggagaauggaguuuuucuggacgauccucaagcccaaugaugccauuaacuuugaaagcaauggaaacuucaucgcuccugaguacgccuauaaaauugucaagaaaggcgacuccgcgaucaugaaaagcgaacuggaguacucuaauugcaacacaaaaugucaaacccccaugggggccaucaauuccagcaugccguuucauaacauucacccucuuacaaucggagagugccccaaguauguuaagucuaaucggcuggugcucgcuaccggccugcgcaacagcccucagagagaaucccggcgcaaaaagagagggcuuuucggagccauugcuggcuuuaucgagggcggguggcagggaaugguggauggcugguacggguaucaucacucuaaugaacagggaagcggcuacgccgcggacaaagaguccacccaaaaggccauugacggggucacaaacaaagugaauagcaucaucgauaagaugaacacgcaguucgaagcuguuggacgggaguuuaacaaucuggagcgcagaauugaaaaccucaauaagaaaauggaggacggcuuccuggauguguggaccuauaacgccgaacugcucguccugauggagaaugaacggacacuugacuuccacgauucuaacgugaagaaucuguacgacaaaguucgccuccagcugagagauaacgcuaaggagcuuggcaauggguguuuugaguucuaccauaaaugcgacaacgaauguauggaguccauccggaauggaaccuauaacuacccccaauauagcgaagaggccagacugaagcgcgaggaaauuucuggcgugaagcucgaguccaucgggacauaccagauucugagcaucuauuccaccgucgccucuagccuggcucucgcgauuaugaucgccggacugucccuuuggaugugcucuaauggcagccugcagugccggaucuguauuuga

SEQ ID NO: 193535 - RNA, 1707 nt, Artificial Sequence
  derived and/or modified CDS sequence (opt5) from hemagglutinin__InfluenzaA__ABL07030
auggagaagaucgugcugcuccuggccauugucagccuuguuaaauccgaccagaucugcauuggcuaccacgcuaacaauucuaccgaacaaguggauacaaucauggagaagaacgugacggucacccaugcccaggacauucuggaaaagacacacaaugggaaacucugugaucuggacggagugaaaccccuuauccugagagauugcagcguugcgggcuggcuccuggggaacccuaugugugacgaguucaucaaugugccggaaugguccuauauugucgagaaggcuaaccccaccaaugaucugugcuacccuggaucuuuuaacgacuaugaggaacucaagcaucugcuuagccggaucaaucacuucgagaaaauucagaucauucccaaguccucuuggagcgaucaugaagccuccagcggcgugucuuccgccuguccuuaccuggggagccccuccuuuuuccgcaacguuguguggcucaucaaaaagaacucuacauauccuaccauuaaaaagagcuacaauaauacaaaccaggaggaccugcuuguccuguggggaauccaccacccgaaugaugcugccgagcaaaccagacucuaucagaaccccacgaccuacaucucuauuggcacauccacccugaaccagcggcuggugccuaagaucgcuacacgcagcaaagugaauggccaguccgggagaauggaauuuuucugggccauucucaagcccaacgacgcgaucaauuuugagucuaacggaaauuucauugccccugaauacgcuuauaaaaucgucaagaaaggcgauagcgccaucaugaaguccgagcuggaauacgggaacugcaauaccaaaugucaaacgcccaugggagcuauuaacagcucuaugccguuucauaauauccacccucuuacaauuggcgagugccccaaguauguuaaguccaaccggcuggugcucgccaccgggcugcgcaauagcccucagagagagucucggcgcaaaaagagaggacuuuucggcgcgaucgccggcuuuauugaagggggauggcagggcaugguggacgggugguacggauaucaucacagcaacgagcagggcuccggguacgcugccgacaaagaaucuacacaaaaggcuaucgauggagucaccaauaaagugaacagcaucauugacaagaugaauacccaguucgaggccguuggccgggaauuuaacaaccuggagcgcagaaucgagaaucucaacaagaaaauggaagauggcuuccuggacguguggacauauaaugccgagcugcucguccugauggaaaacgagcggacgcuugauuuccacgacuccaaugugaagaaccuguacgauaaaguucgccuccagcugagagacaaugcuaaggaacuugggaacggauguuuugaguucuaccauaaaugcgauaaugaguguauggaaagcauucggaacggcaccuauaauuacccccaauauucugaggaagcgagacugaagcgcgaggagaucuccggggugaagcucgaaagcauuggaacauaccagauccugucuauuuauuccaccgucgccagcucccuggcucucgccaucaugaucgccggccugucucuuuggaugugcagcaacgggucccugcagugccggauuuguaucuga

SEQ ID NO: 193536 - RNA, 1707 nt, Artificial Sequence
  derived and/or modified CDS sequence (opt5) from hemagglutinin__InfluenzaA__ABL10088
auggagaagaucgugcuccuguucgccauugucagccugguuaaauccgaccagaucugcauuggcuaccacgcuaacaauucuaccgaacaaguggauacaaucauggagaagaacgugacggucacccaugcccaggacauucuugagaaaacacacaaugggaagcugugugaucucgacggagugaaaccccugauccuuagagauugcagcguugcgggcuggcugcucgggaacccuaugugugacgaguuuaucaaugugccggaaugguccuauauugucgagaaggcuaaccccgugaaugaucugugcuacccuggagacuucaacgauuaugaggaacugaagcaucuccugucucggaucaaucacuuugagaaaauucagaucauucccaagagcuccuggucuagccaugaagccucccuuggcguuagcucugccuguccuuaccaggggaaauccagcuucuuucgcaacguggucuggcugaucaagaaaaauucuaccuaucccacaauuaagagauccuacaacaauaccaaccaagaggaccuccuggugcuuuggggaauccaccacccuaaugaugcugccgagcagacaaagcuguaucagaacccgaccacguacaucagcgugggcaccucuacacucaaccagcggcuggucccccgcauugcuaccagauccgaaguuaauggccaaagcgggcggauggaguucuuuuggacaauccugaaaccuaacgacgccauuaauuucgaauccaacggaaauuuuguggcgcccgaguacgccuauaagaucgugaaaaagggcgauucuaccauuaugaaaagcgaacucgaguacgggaacugcaauacgaagugucagacaccuaugggagcuaucaacuccagcaugcccuuccauaauauccacccgcugaccauuggcgagugcccuaaauaugucaagucuaaccgccuugugcuggccacagggcucagaaauagcccccagcgggaacgcagacggaagaaacgcggacuguuuggcgcuaucgccggcuucauugaagggggauggcagggcaugguugacgggugguacggauaucaucacuccaacgaacaaggcucuggguacgcggccaauaaggagagcacccagaaagcuaucgacggagugaccaacaaggucaauuccauuaucgauaaaaugaacacacaguuugaagccgugggcagagaguucaacaaucuugagcggcgcaucgaaaaccugaauaagaagauggaggacggcuuccucgauguuuggacguauaacgcugaacugcuggugcucauggagaaugaaagaacccuggacuuucacgauucuaacgucaaaaaucuuuacgacaaggugcggcugcaacucagagauaacgccaaagagcuggggaauggauguuucgaguuuuaccauaagugcgacaacgaauguauggagagcguccgcaauggcacauaugauuacccucaguauuccgaagaggcccggcuuaaaagagaggaaauuagcggggugaagcuggagucuaucggaauuuaccagauccucuccauuuauagcaccguugcuucuucccuggcgcuggccaucaugguggcuggccucagccuguggaugugcuccaacgggucucuucagugccgcauuuguaucuga

SEQ ID NO: 193537 - RNA, 1707 nt, Artificial Sequence
  derived and/or modified CDS sequence (opt5) from hemagglutinin__InfluenzaA__ABL31766
auggagaagaucgugcugcuccuggccauugucagcuucguuaaauccgaccagaucugcauuggcuaccacgcuaacaauucuaccgaacaaguggauacaaucauggagaagaacgugacggucacccaugcccaggacauucuugagaaaacacacaaugggaagcugugugaucucgacggagugaaaccccugauccuuagagauugcagcguugcgggcuggcugcucgggaacccuaugugugacgaauuuaucaaugugccggaaugguccuauauugucgagaaggcuaaccccaccaaugaucugugcuacccuggaucuuucaacgacuaugaggaacugaagcaucuccugagccggaucaaucacuuugagaaaauucagaucauucccaaguccucuuggagcgaucaugaagccuccagcggcgugucuuccgccuguccuuaccuugggagccccucuuucuuucgcaacguuguguggcugaucaaaaagaacuccacauauccuaccauuaaaaagagcuacaauaauacaaaccaggaggaccuccugguccuuuggggaauccaccacccgaaugaugcugccgagcaaaccagacuguaucagaaccccacgaccuacaucucuauuggcacauccacccucaaccagcggcuggugccuaagaucgcuacacgcagcaaagugaauggccaguccgggagaauggaguucuuuugggccauucugaagcccaacgacgcgaucaauuucgaaucuaacggaaauuuuauugccccugaauacgcuuauaaaaucgucaagaaaggcgauagcgccaucaugaaguccgagcucgaauacgggaacugcaauaccaaaugucaaacgcccaugggagcuauuaacagcucuaugccguuccauaauauccacccucugacaauuggcgagugccccaaguauguuaaguccaaccggcuugugcuggccaccgggcuccgcaauagcccucagagagagucucggcgcaaaaagagaggacuguuuggcgcgaucgccggcuucauugaagggggauggcagggcaugguggacgggugguacggauaucaucacagcaacgagcagggcuccggguacgcugccgacaaagaaucuacacaaaaggcuaucgauggagucaccaauaaagugaacagcaucauugacaagaugaauacccaguuugaggccguuggccgggaguucaacaaccuugaacgcagaaucgagaaucugaacaagaaaauggaagauggcuuccucgacguguggacauauaaugccgagcugcugguccucauggaaaacgagcggacgcuggauuuucacgacuccaaugugaagaaccuuuacgauaaaguucgccugcagcucagagacaaugcuaaggaacuggggaacggauguuucgaguuuuaccauaaaugcgauaaugaguguauggaaagcauucggaacggcaccuauaauuacccccaauauucugaggaagcgagacuuaagcgcgaggagaucuccggggugaagcuggaaagcauuggaacauaccagauccucucuauuuauuccaccgucgccagcucccuggcucuggccaucaugaucgccggccucucucuguggaugugcagcaacgggucccuucagugccggauuuguaucuga

SEQ ID NO: 193538 - RNA, 1707 nt, Artificial Sequence
  derived and/or modified CDS sequence (opt5) from hemagglutinin__InfluenzaA__ABL31780
auggagaagaucgugcugcuccugagcauugucucccuuguuaaaucugaccagaucugcauuggcuaccacgccaacaauagcaccgaacaaguggauacaaucauggagaagaacgugacggucacccaugcucaggacauucuggagaaaacacacaaugggaagcucugugaucuggacggagugaaaccccuuauccugagagauugcuccguugccggcuggcuccuggggaacccuaugugugacgaguucaucaaugugccggaauggucuuauauugucgagaaggcgaaccccaccaaugaucugugcuacccuggaucuuuuaacgacuaugaggaacucaagcaucugcuuucccggaucaaucacuucgagaaaauucagaucauucccaagggcucuuggagcgaucaugaggcuuccagcggggugucuuccgccuguccuuaccugcgcagccccagcuuuuucagaaacguuguguggcucaucaaaaagaacuccacauauccuaccauuaaaaagagcuacaauaauacaaaccaggaagaccugcuuguccuguggggaauccaccacccgaauaacgaggccgaacaaacccggcucuaucagaaccccacgaccuacaucucuauuggcacauccacccugaaucagcgccuggugccuaagaucgcuacaagaagcaaagugaacggccaguccgggcggauggaguuuuucuggaccauucucaagcccaaugaugccaucaacuuugaaucuaauggaaacuucauugcuccugaguacgccuauaaaaucgucaagaaaggcgacagcgcgaucaugaaguccgaacuggaguacgggaauugcaacacgaaaugucaaacacccaugggagccauuaauagcucuaugccguuucauaacauccacccucuuaccauuggcgagugccccaaguauguuaaguccaaucgccuggugcucgcuacagggcugagaaacagcccucagcgggaaucucgccggaaaaagagaggacuuuucggcgccaucgcuggcuuuauugaagggggauggcagggcaugguggaugggugguacggauaucaucacagcaaugaacagggcuccggguacgccgcggacaaagagucuacccaaaaggccaucgacggagucaccaacaaagugaauagcaucauugauaagaugaacacacaguucgaagcuguuggccgcgaguuuaacaaucuggagagacggaucgaaaaccucaauaagaaaauggaggacggcuuccuggauguguggacguauaacgccgaacugcucguccugauggagaaugaacgcacccuugacuuccacgauuccaacgugaagaaucuguacgacaaaguuagacuccagcugcgggauaacgcuaaggagcuugggaauggauguuuugaguucuaccauaaaugcgacaacgaauguauggagagcauuagaaauggcacauauaacuacccccaauauucugaagaggcccgccugaagcgggaggaaaucuccggggugaagcucgagagcauuggaaccuaccagauccugucuauuuauuccacagucgccagcucccuggcucucgcgaucaugaucgccggccugucucuuuggaugugcagcaaugggucccugcagugcagaauuuguaucuga

SEQ ID NO: 193539 - RNA, 1701 nt, Artificial Sequence
  derived and/or modified CDS sequence (opt5) from hemagglutinin__InfluenzaA__ABL67165
augaagaccaucauugcccugagcuacauccucugccugguguucgcucagaaacuucccggcaacgacaauuccacagccacgcugugucucgggcaccaugcggucccuaacggaaccauuguuaagacaaucaccaaugaucaaauugaggugacaaacgcuaccgaacuggugcagucuagcuccacaucuggcaucugcgacagcccgcaccagauccuugauggggagaauuguacccugauugacgcccuccugggagauccccagugcgacggcuuucaaaacaaaaagugggaucuguucgucgaaagauccaaagccuauucuaauuguuacccuuaugacgugcccgaucaugcuagccuccggucccugguugccagcucugggacgcuugaguuuaacaaugaauccuucgacuggaccggagugacacagaacggcaccagcucugcuugcaagcgcagauccaauaagagcuuuuucucucggcugaacuggcucacacaccugaaauacaaguauccugcccuuaaugucaccaugcccaacaaugagaaauuugauaagcuguacaucuggggcgugcaucacccugggacggacuccgaucagauuagccucuaugcgcaggccuccggacgcaucacaguuucuaccaaaagaagccaacagacagugauuccgaacaucggcucccggccccgcgucagagacgugagcucucggauuuccaucuacuggaccaucgugaagccuggggacauucugcugaucaacagcaccggaaaucucauugcuccccgcggcuacuucaagaucagaucugggaaaagcuccauuaugcggucugaugccccuaucggaaaguguaacagcgagugcaucacacccaauggcuccauuccgaacgacaaaccuuuucagaaugucaaccgcaucacguauggcgcuugucccagauacguuaagcagaauacccugaaacuugccacagggaugcggaacgugccugaaaagaaaacccgcggaauuuucggcgcgaucgccggguuuauugagaauggaugggaaggcaugguggaugggugguauggauucagacaccaaaacagcgagggcacaggccaggcugccgaccugaagucuacccaggcugccaucaaucaaaucaacgggaagcucaaucggcugauuggaaaaacgaacgagaaguuucaucagaucgaaaaagaguucuccgaagucgagggccgcauucaggaucuugaaaaguacguggaggacacaaaaaucgaucuguggagcuauaaugccgagcuccugguugcucuggaaaaccagcacaccauugaccucaccgauucugagaugaacaagcuguucgaaagaacaaagaaacaacuucgggagaaugcggaagacauggggaacggaugcuuuaagaucuaccauaaaugugauaaugccugcauuggcuccaucagaaacgggaccuaugaccacgacguguaccgcgaugaggcucugaauaaccgguuccagaucaagggcgucgagcucaaaagcggauacaaggacuggauucuguggaucuccuuugccauuucuugcuuccuucuguguguggcccuccugggcuuuaucaugugggcuugccagaaggggaauauuagauguaacaucugcaucuga

SEQ ID NO: 193540 - RNA, 1701 nt, Artificial Sequence
  derived and/or modified CDS sequence (opt5) from hemagglutinin__InfluenzaA__ABL67176
augaagaccaucauugcccugagcuacauccucugccugguguucacacagaaacuucccggcaacgacaauuccacggcuacccugugucucgggcaccaugccgucccuaacggaacacugguuaagaccauuacaaaugaucaaaucgaggugaccaacgcgacagaacuugugcagucuagcuccaccggcgggauuugcgacucuccgcaccagauccuggauggagagaauuguacgcucaucgacgcucugcugggcgauccccauugcgacggguuucagaacaaagaaugggaucucuucgucgagagaagccgggccuauuccaauuguuacccuuaugacgugcccgauuacgccucucugcgcagccuuguugcuuccagcggaacccuggaauuuaacaaugagucuuucaacuggacaggcguggcccaaaauggcaccuccagcgcuugcaagagacggucuaacaaauccuuuuucagccgccucaauuggcugcaccagcuuaaguauaaguacccugcccugaacgucacaaugcccaauaacgagaaauuugacaagcucuauauuuggggagugcaucacccuucuaccgauuccgaccagaucagccuguacgcgcaggccccggggagaguuacgguguccacaaaacggucucaacagaccgucauucccaacaucggcagccgcccuugggugagagggguguccagccggauuucuaucuacuggacaauugucaagcccggagauauccugcucaucaauuguaccggcaaccugauugcuccucgcggguauuucaaaaucagauccggaaagagcucuauuaugcggagcgacgccuccaucggcaagugcaauucugaauguauuacccccaacggcagcaucccgaaugacaaaccuuuucagaacguuaaucgcaucacauacggggcuugccccagauaugugaagcagaacacgcuuaaacuggccaccggaaugcggaaugugccugagaagcaaacacgcggcauuuucggggcgaucgccggauuuauugaaaacggcugggaggggauggucgauggaugguacggcuucagacaccaaaauuccgagggcaccgggcaggcugccgaccucaaaagcacacaggcugccaucaaccagauuaauggaaagcugaaccggcuuaucgagaaaaccaaugaaaaguuucaucagaucgaaaaggaguucucugaaguggagggccgcauucaggaucuggagaaauauguugaagacacgaagaucgaucucugguccuacaacgccgagcugcugguggcucucgaaaaccaacacacaauugaccugaccgauagcgagaugaauaaacuuuucgaaagaaccaagaaacagcugcgggagaacgcggaggacauggggaauggauguuuuaagaucuaucauaagugcgauaacgccugcauuggcucuaucagaaaugggacauacgaccacgaugucuaccgcgacgaagcucucaacaaucgguuccagauuaaaggcguggagcugaaguccggauauaaagacuggauccuuuggaucagcuuugccauuuccuguuuccugcucugcguugugcugcugggcuuuaucaugugggccugucagaaggggaacauuagaugcaauaucuguauuuga

SEQ ID NO: 193541 - RNA, 1701 nt, Artificial Sequence; identical to SEQ ID NO: 193504
  derived and/or modified CDS sequence (opt5) from hemagglutinin__InfluenzaA__ABL67187

SEQ ID NO: 193542 - RNA, 1701 nt, Artificial Sequence; identical to SEQ ID NO: 193459
  derived and/or modified CDS sequence (opt5) from hemagglutinin__InfluenzaA__ABL67209

SEQ ID NO: 193543 - RNA, 1701 nt, Artificial Sequence; identical to SEQ ID NO: 192993
  derived and/or modified CDS sequence (opt5) from hemagglutinin__InfluenzaA__ABL67253

SEQ ID NO: 193544 - RNA, 1701 nt, Artificial Sequence
  derived and/or modified CDS sequence (opt5) from hemagglutinin__InfluenzaA__ABL67264
augaaggccaagcugcucgugcugcuuugcgcucugagcgccaccgacgcggauacaaucuguauuggcuaccacgcuaacaauuccacggacaccgucgauacaguucucgagaagaacgugaccgugacacauucugucaaucugcuugaagacaaccacaaugggaaacugugcaagcucaaaggaaucgccccgcugcagcugggcaaguguagcauugccggguggauccucggaaacccugagugcgaaucccuguucucuaagaaaagcugguccuauauugcugagacccccaauucugaaaacggcacauguuaccccggguauuuugccgauuacgaggagcuuagagaacaacugagcuccgugagcucuuucgagcgguuugaaaucuucccuaaggaguccagcuggcccaaacauaauguuaccaagggagugacggcuucuugcucccacaaaggcaagagcucuuuuuaucgcaaccuccuguggcuuaccgagaagaauggcuccuacccuaaccugagcaaauccuaugucaauaacaaggaaaaagaggugcucguucuguggggagugcaucaccccucuaauaucgaagaccagaagacaauuuacagaaaagagaacgccuacgucagcgugguguccagccacuauaaccggcgcuucaccccugaaaucgcgaagagaccgaaaguccggaaucaggaggggcgcauuaacuacuauuggacacugcucgagcccggcgauaccaucauuuuugaagccaaugggaaccugaucgcuccuugguacgccuucgcucuuucuagaggauuuggcuccgggauuaucacgagcaaugccucuauggacgagugugaugcgaagugccagacaccccaaggagccaucaacagcuccuucccuuuucagaauguucaucccgugaccauuggcgaauguccgaaguaugugcggucuacaaaacugcgcauggucaccggccucagaaacaucccuagcauucagucccgggggcuguucggagcuaucgccggcuuuauugaagggggauggaccggcaugaucgacgggugguacggauaucaccaucagaaugaacaaggcagcggcuacgcugccgaucagaagucuacacagaacgccaucaaugggauuacgaacaaaguuaauuccaucauugagaagaugaacacccaguucacagcugugggaaaagaguucaauaaacuugaaaagcgcauggagaaccugaacaaaaagguggacgauggcuuucucgacaucuggaccuacaaugcggaacugcugguccuccuggagaacgaaagaacacuugacuuccacgauagcaaugugaaaaaccuguaugagaagguuaaaucucaacucaagaauaacgccaaggagauugggaauggaugcuuugaguucuaccacaaauguaacaaugagugcauggaauccgugaagaacggcaccuaugacuaccccaaauauagcgaggaguccaagcugaaucgggaaaagaucgauggggucaaacuugagucuaugggcguguaccagauccuggcuauuuauagcacggucgccuccucucucgugcugcugguuagccucggagccaucuccuuuuggaugugcagcaacggcucucugcagugucgcauuugcaucuga

SEQ ID NO: 193545 - RNA, 1701 nt, Artificial Sequence
  derived and/or modified CDS sequence (opt5) from hemagglutinin__InfluenzaA__ABL67275
augaagaccaucauugcccugagcuacauccucugccugguguucgcucagaaacuucccgucaacgacaauuccacagccacgcugugucucggccaccaugcgguuccuaacgggacccuggugaagacaauuaccaaugaucacaucgaggugacaaacgcuaccgaacuuguccaaucuagcuccacaggaagaauuugcgacucuccgcaucagauccuggauggcgagaauuguacccucaucgacgcccugcugggggauccccacugcgacggauuucagaacaaagaaugggaucucuucguggagcggagcacggccuauuccaauuguuacccuuaugacguucccgauuacgcuucucugcgcagccuuguggccuccagcggcacccuggaauuuaacaaugagucuuucaacuggacaggggucgcucagaauggaaccuccagcgccugcaagagacggucuauuaaauccuuuuucagccgccucaacuggcugcaucaacuuaaguauaaguacccugcgcugaaugugacaaugcccaacaaugagaaauuugacaagcucuauaucuggggcguucaccacccuucuaccgauuccgaccagauuagccuguacgcccaggcuuccggcagagugacggucucuacaaaacggagccagcaaaccgugaucccgaacauugggucccgccccugggugagaggagucagcucucggaucuccauuuacuggacaaucguuaagccuggcgauauccugcucauuaacagcaccgggaaucugaucgcuccccgcggauauuucaaaauuagaucuggcaagagcuccaucaugcggucuaacgccccuauugggaaguguaauagcgaaugcaucacccccaacggauccaucccgaaugacaaaccuuuucagaacgugaaucgcauuacauacggcgccugucccagauaugugaagcagaacacgcuuaaacuggcgaccggcaugcggaaugucccugagaagcagacacgcgggaucuucggagccauugcuggcuuuaucgaaaacgggugggagggaaugguggacggcugguacggguucagacaucaaaauagcgagggaaccggccaggccgcugaucucaaaucuacacaggccgccauuaaccaaaucaauggcaagcugaaccggcuuaucgaaaagaccaaugagaaguuucaccagauugaaaaggaguucuccgaaguugaggggagaauccaggaccuggagaaauauguggaagauacgaagauugaccucuggagcuacaacgcugagcugcuggucgcgcucgaaaaccagcauacaaucgaucugaccgacucugagaugaauaaacuuuucgaacgcacccggaagcaacugagagagaacgccgaggaugugggaaauggcugcuuuaaaauuuaucacaagugugacaacgcuugcaucggguccauucgcaauggaacauacgaucacgacguuuaccgggaugaagcccucaacaauagauuccagaucaagggcgugaaacugaaaagcggguauaaagacuggauccuuuggauuuccuuugccaucucuugcuuccugcucugugucgugcugcugggcuuuauuaugugggcuugccagaagggaaacauccgcuguaauauuugcaucuga

SEQ ID NO: 193546 - RNA, 1701 nt, Artificial Sequence
  derived and/or modified CDS sequence (opt5) from hemagglutinin__InfluenzaA__ABL67286
augaagaccaucauugcccugagcuacauccucugccugguguucgcucagaaacuucccggcaacgacaauuccacagccacgcugugucucgggcaccaugcggucccuaacggaacccugguuaagacaauuaccaaugaucaaaucgaggugacaaacgcuaccgaacuugugcagucuagcuccacaggcagaauuugcgacucuccgcaccagauccuggauggggagaauuguacccucaucgacgcccugcugggagauccccauugcgacggcuuucagaacaaagaaugggaucucuucgucgagcggagcaaggccuauuccaauuguuacccuuaugacgugcccgauuacguuucucugcgcagccuuguggcuuccagcgggacgcuggaauuuaacaaugagucuuucaacuggaccggagucgcccaaaauggcacauccagcgcuugcaaaagacggucugacaaguccuuuuucagccgccucaacuggcugcaccagcuuaaguauaaauacccugcccugaaugugaccaugcccaacaaugagaaguuugauaaacucuauauuuggggcguucaucacccugggacagacucugaucagaucucccuguacgcgcaggccagcggaagagugaccgucuccacgaagcggucucaacagacagugauuccgaacaucggcagccgccccugggugagaggggucuccagccggauuucuaucuacuggaccauuguuaaauccggagacauccugcucaucaacagcacaggcaaucugauugcuccucgcggguauuucaagaucagaucuggaaagagcuccauuaugcggucugacgcccccaucggcaaauguaacagcgaaugcauuaccccuaauggcuccauccccaacgauaagccguuucagaaugugaaccgcaucaccuacgggccuugucccagauaugugaaacagaauacacuuaagcuggcuacgggaaugcggaacgucccugagaaacaaacccgcggcauuuucggggccaucgcgggauuuauugaaaauggcugggaggggaugauggacggaugguacggcuucagacaccagaacagcgagggcacagggcaggccgcugaucucaagucuacccaagccgcuaucaaucagauuaacggaaaacugaaucggcuuaucgaaaagacaaacgagaaguuucaucagaucgaaaaagaguucuccgaaguggagggccgcauucaggaccuggagaaguauguugaagauaccaaaaucgaccucuggagcuacaaugccgagcugcugguggcccucgaaaaccaacacacgauugaucugacagacucugagaugaacaaacuuuucgaaagaaccaagaagcagcugcgggagaaugcugaggauauggggaacggaugcuuuaagaucuaucauaaaugugacaaugcgugcauuggcuccaucagaaacgggaccuacgaucacgacgucuaccgcgacgaagcccucaauaaccgguuccagauuaagggcguggagcugaaaagcggauauaaggauuggauccuuuggaucuccuuugcuauuucuugcuuccugcucuguaucguucugcugggcuuuauuaugugggccugccagaaagggaauaucagauguaacauuugcaucuga

SEQ ID NO: 193547 - RNA, 1701 nt, Artificial Sequence; identical to SEQ ID NO: 193077
  derived and/or modified CDS sequence (opt5) from hemagglutinin__InfluenzaA__ABL67297

SEQ ID NO: 193548 - RNA, 1701 nt, Artificial Sequence
  derived and/or modified CDS sequence (opt5) from hemagglutinin__InfluenzaA__ABL67308
augaagaccaucauugcccugagcuacauccucugccugguguucgcucagaaacuucccggcaacgacaauuccauggccacacugugucucgggcaccaugcggucccuaacggaacgcugguuaagaccauuacaaaugaucaaaucgaggugaccaacgcuacagaacuugugcagucuagcuccaccggcagaauuugcgacucuccgcaccagauccuggauggggagaauuguacacucaucgacgcccugcugggagauccccauugcgacggcuuucagaacaaagaaugggaucucuucgucgagcggagcaaggccuauuccucuuguuacccuuaugacgugcccgauuacguuagccugcgcucccuuguggcuagcucugggacccuggaauuuaauaacgaguccuucaauuggacgggagucgcccaaaacggcaccagcucugcuugcaaaagacgguccgacaagagcuuuuucucucgccucaauuggcugcaccagcuuaaguauaaauacccugcccugaacgugacaaugcccaauaacgagaaguuugauaaacucuauauuuggggcguucaucacccugggaccgacuccgaucagaucagccuguacgcgcaggccuccggaagagugacagucucuaccaagcggagccaacagacggugauuccgaauaucggcucccgccccugggugagaggggucagcucucggauuuccaucuacuggacaauuguuaaaccuggagacauccugcucaucaacagcaccggcaaccugauugcuccccgcggguauuucaagaucagaucuggaaagagcuccauuaugcggucugacgccccuaucgauaaauguaauagcgaaugcauuacacccaacggcuccaucccgaaugacaagccuuuucagaacgugaaucgcaucaccuacggccuuugucccagauaugugaaacagaacacccugaagcucgcuacagggaugcggaaugucccugagaaacaaacgcgcggaauuuucggcgccaucgcgggguuuauugaaaacggaugggagggcaugauggaugggugguacggauucagacaccagaauagcgagggcaccggccaggccgcugaccugaagucuacacaagccgcuaucaaccagauuaaugggaaacuuaaccggcugaucgaaaagaccaaugagaaguuucaucagaucgaaaaagaguucuccgaaguggagggacgcauucaggaucucgagaaguauguugaagacacaaaaaucgaucuguggagcuacaacgccgagcugcucguggcccuggaaaaucaacacaccauugaccuuacggauucugagaugaacaagcuguucgaaagaaccaaaaagcagcuccgggagaacgcugaggacaugggcaaugggugcuuuaagaucuaucauaaaugugauaacgcgugcauuggauccaucagaaauggcacauacgaccacgacgucuaccgcgaugaagcccugaacaaucgguuccagauuaaggggguggagcuuaaaagcggcuauaaggacuggauccuguggaucuccuuugcuauuucuugcuuccuccuguguaucguucugcucggauuuauuaugugggccugccagaaaggcaacgugagauguaauaucugcauuuga

SEQ ID NO: 193549 - RNA, 1701 nt, Artificial Sequence; identical to SEQ ID NO: 192634
  derived and/or modified CDS sequence (opt5) from hemagglutinin__InfluenzaA__ABL67319

SEQ ID NO: 193550 - RNA, 1701 nt, Artificial Sequence; identical to SEQ ID NO: 193377
  derived and/or modified CDS sequence (opt5) from hemagglutinin__InfluenzaA__ABL67330

SEQ ID NO: 193551 - RNA, 1701 nt, Artificial Sequence; identical to SEQ ID NO: 192588
  derived and/or modified CDS sequence (opt5) from hemagglutinin__InfluenzaA__ABL67341

SEQ ID NO: 193552 - RNA, 1701 nt, Artificial Sequence; identical to SEQ ID NO: 192588
  derived and/or modified CDS sequence (opt5) from hemagglutinin__InfluenzaA__ABL67352

SEQ ID NO: 193553 - RNA, 1701 nt, Artificial Sequence; identical to SEQ ID NO: 192104
  derived and/or modified CDS sequence (opt5) from hemagglutinin__InfluenzaA__ABL67363

SEQ ID NO: 193554 - RNA, 1701 nt, Artificial Sequence
  derived and/or modified CDS sequence (opt5) from hemagglutinin__InfluenzaA__ABL67374
augaagaccaucauugcccugagcuacauccucugccugguguucgcucagaaacuucccggcaacgacaauuccacagccacgcugugucucgggcaccaugcggucccuaacggaaccauuguuaagacaaucaccaaugaucaaauugaggugacaaacgcuaccgaacuggugcagucuagcuccacaggcgggaucugcgacucuccgcaccagauccuugauggagagaauuguacccugauugacgcccuccugggcgauccccagugcgacggguuucaaaacaaaaagugggaucuguucgucgaaagaagcaaagcccauuccaauuguuauccuuacgacgugcccgauuaugcuucucuccggagccugaucgccuccagcggaacgcuugaguuuaacaaugaaucuuucaacuggaccggcguuacacagaauggcaccuccagcgcuugcaagcgcagaucuaaccaguccuuuuucagccggcugaauuggcucacacaccugaaguuuaaauacccugcccuuaacgugaccaugcccaauaacgagaaguucgacaaacuguauauuuggggaguccaucacccugggacggauucugaccagaucucccucuacgcgcaagccccgggccgcauuacagugagcaccaagagaucccagcagacaguuauccccaacauugggucucggccucgcgugagagauaucagcucccggaucagcauuuauuggaccaucgucaaacccggagacauucugcugaucaauucuaccggcaaccucauugcuccucgcggguacuuuaagaugagauccggaaagagcucuaucaugaaaagcgacgcccccaucggcaaguguaauuccgagugcauuacaccgaacggcucuaucccuaaugauaaacccuuccagaacgugaaucggauuacguacggggcuuguccucgcuaugugaagcaaaacacccugaaacuugccacaggaaugagaaauguccccgaaaagcagacccggggcaucuuuggggcgauugccggauucaucgagaacggcugggaagggaugguugacggaugguacggcuuucgccaccagaauagcgagggcacagggcaagcugccgaucugaaauccacccaggcugccaucaaccagauuaauggaaagcucaacagacugaucggcaagacgaaugagaaauuccaucagauugaaaaggaguucagcgaaguggaggggcggauccaagaccuugaaaaauauguggaggauacaaagauugaccuguggucuuacaacgccgagcuccuggucgcucuggaaaaccagcacaccaucgaucucaccgacuccgagaugaauaaacuguuugaaagaacaaagaagcagcuucgcgagaacgcggaagauaugggagacggcugcuucaaaauuuaucauaagugugauaaugccugcaucgggagcauccggaacggcaccuacgaccacgacguguauagagaugaggcucugaauaaccgcuuucagauuaaaggaguugagcucaagucuggcuacaaagacuggauccuguggauuuccuucgccaucagcugccuucugcucuguguggcccugcugggguuuauuaugugggcuugccaaaagggaaauauccgguguaacaucugcauuuga

SEQ ID NO: 193555 - RNA, 1701 nt, Artificial Sequence; identical to SEQ ID NO: 192354
  derived and/or modified CDS sequence (opt5) from hemagglutinin__InfluenzaA__ABL67385

SEQ ID NO: 193556 - RNA, 1701 nt, Artificial Sequence; identical to SEQ ID NO: 192684
  derived and/or modified CDS sequence (opt5) from hemagglutinin__InfluenzaA__ABL67396

SEQ ID NO: 193557 - RNA, 1701 nt, Artificial Sequence; identical to SEQ ID NO: 192702
  derived and/or modified CDS sequence (opt5) from hemagglutinin__InfluenzaA__ABL67407

SEQ ID NO: 193558 - RNA, 1701 nt, Artificial Sequence
  derived and/or modified CDS sequence (opt5) from hemagglutinin__InfluenzaA__ABL67418
augaagaccaucauugcccugagcuacauccucugccugguguucgcucagaaacuucccggcaacgacaauuccacagccacgcugugucucgggcaccaugcggucccuaacggaaccauuguuaagacaaucaccaaugaucaaauugaggugacaaacgcuaccgaacuggugcagucuagcuccacaggcgggaucugcaauucuccgcaccagauccuugacggagagaacuguacccugauugaugcccuccugggcgacccccagugcgauggguuucaaaauaaaaagugggaccuguucgucgaaagaagcaaagccuauuccaacuguuacccuuaugaugugcccgacuacgcuucucuccggagccugguugccuccagcggaacgcuugaguuuaauaacgaaucuuucaauuggaccggcgugacacagaacggcaccuccagcgcuugcaagcgcagaucuaauaacuccuuuuucagccggcugaauuggcucacacaucugaaguuuaaauauccugcccuuaacgucaccaugcccaacaaugagaaguucgauaaacuguacaucuggggagugcaccauccugggacggacaacgaucagauuuuucucuaugcgcaggccucuggccgcaucacaguuuccaccaagagaagccaacagacagugauuccgaauaucgggucccggccccgcgucagaaacauuccuucucggaucagcaucuacuggaccauugugaaacccggagacauccugcugauuaauuccaccggcaaccucaucgcuccucgcggguacuucaagauuagaagcggaaagucuuccaucaugcggagcgaugcccccaucggcaaauguaauucugagugcauuacaccgaacggcagcaucccuaaugacaagcccuuucagaacgugaaucgcauuacguauggggcuuguccuagauacgucaaacagaacacccugaaacuugccacaggaaugcggaauguucccgaaaagcaaacccgcggcaucuucggggcgauugccggauuuaucgagaacggcugggaagggaugguggacggaugguauggcuucagacaccaaaauuccgagggcaucgggcaggcugccgaucugaagucuacacaggcugccauuaaccagaucaacggaaaacucaaucggcugauuggcaagaccaacgagaaguuccaccagaucgaaaaagaguuuagcgaaguggaggggcgcauucaggaccuugaaaaguacgucgaggauacgaaaaucgaccugugguccuauaaugccgagcuccugguggcucuggaaaaccaacauacaauugaucucaccgacagcgagaugaauaagcuguucgaaagaaccaaaaagcagcuucgggagaacgcggaagauaugggaaauggcugcuuuaagaucuaccacaaaugugacaacgccugcaucgggucuauuagaaauggcacauaugaucaugacguuuaccgcgaugaggcucugaacaaucgguuccagaucaagggaguggagcucaaauccggcuacaaggacuggauucuguggaucagcuuugccauuucuugcuuccuucugugugucgcccuccugggguuuaucaugugggcuugccagaaaggaaacaucagauguaauauuugcaucuga

SEQ ID NO: 193559 - RNA, 1707 nt, Artificial Sequence; identical to SEQ ID NO: 192100
  derived and/or modified CDS sequence (opt5) from hemagglutinin__InfluenzaA__ABL67781

SEQ ID NO: 193560 - RNA, 1707 nt, Artificial Sequence
  derived and/or modified CDS sequence (opt5) from hemagglutinin__InfluenzaA__ABL67794
auggagaagaucgugcuccuguucgccauugucagccugguuaaauccgaccagaucugcauuggcuaccacgcuaacaauucuaccgaacaaguggauacaaucauggagaagaacgugacggucacccaugcccaggacauucuugaaaagacacacaaugggaagcugugugaucucgacggagugaaaccccugauccuuagagauugcagcguugcgggcuggcugcucgggaacccuaugugugacgaguuuaucaaugugccggaaugguccuauauugucgagaaggcuaaccccgugaaugaucugugcuacccuggagacuucaacgauuaugaggaacugaagcaucuccugucucggaucaaucacuuugagaaaauucagaucauucccaagagcuccuggucuagccaugaagccucccuuggcguuagcucugccuguccuuaccaggggaaauccagcuucuuucgcaacguggucuggcugaucaagaaaaauucuaccuaucccacaauuaagagauccuacaacaauaccaaccaagaggaccuccuggugcuuuggggaauccaccacccuaaugaugcugccgagcagacaaagcuguaucagaacccgaccacguacaucagcgugggcaccucuacacucaaccagcggcuggucccccgcauugcuaccagauccaaaguuaauggccaaagcgggcggauggaguucuuuuggacaauccugaagccuaacgacgccauuaauuucgaauccaacggaaauuuuaucgcgcccgaauacgccuauaaaauugugaagaaaggcgauucuaccaucaugaaaagcgagcucgaauacgggaacugcaauacgaaaugucagacaccuaugggagcuaucaacuccagcaugcccuuccauaauauucacccgcugaccaucggcgagugcccuaaguaugugaagucuaaccgccuuguccuggccacagggcucagaaauagcccccagcgggagaaacgcagaaagaaacggggacuguuuggcgcuauugccggcuucaucgaagggggauggcagggcaugguggacgggugguacggauaucaucacuccaacgagcaaggcucuggguacgcggccgacaaggaaagcacccagaaagcuauugauggaguuaccaauaaggugaacuccaucaucgacaagaugaauacacaguuugaggccgucggccgcgaguucaacaaccuugaaagacggauugagaaucugaacaaaaagauggaagauggcuuccucgacguguggacguauaaugcugagcugcugguucucauggaaaacgagcgcacccuggauuuucacgacucuaaugugaaaaaccuuuacgauaaggucagacugcaacuccgggacaaugccaaagaacuggggaacggauguuucgaguuuuaccauaagugcgauaaugaguguauggaaagcgugagaaacggcacauaugacuacccucaguauuccgaggaagcccgccuuaagcgggaggagaucagcggggucaaacuggaaucuauuggaaucuaccagauucucuccaucuauagcaccguggcuucuucccuggcgcuggccauuaugguugcuggccucagccuguggaugugcuccaaugggucucuucagugcagaaucuguaucuga

SEQ ID NO: 193561 - RNA, 1707 nt, Artificial Sequence
  derived and/or modified CDS sequence (opt5) from hemagglutinin__InfluenzaA__ABL67816
auggagaagaucgugcuccuguucgccauugucagccugguuaaauccgaccagaucugcauuggcuaccacgcuaacaauucuaccgaacaaguggauacaaucauggagaagaacgugacggucacccaugcccaggacauucuugaaaagacacacaaugggaagcugugugaucucgacggagugaaaccccugauccuuagagauugcagcguugcgggcuggcugcucgggaacccuaugugugacgaguuuaucaaugugccggaaugguccuauauugucgagaaggcuaaccccgugaaugaucugugcuacccuggagacuucaacgauuaugaggaacugaagcaucuccugucucggaucaaucacuuugagaaaauucagaucauucccaagagcuccuggucuagccaugaagccucccuuggcguuagcucugccuguccuuaccaggggaaauccagcuucuuucgcaacguggucuggcugaucaagaaaaauucuaccuaucccacaauuaagagauccuacaacaauaccaaccaagaggaccuccuggugcuuuggggaauccaccacccuaaugaugcugccgagcagacaaagcuguaucagaacccgaccacguacaucagcgugggcaccucuacacucaaccagcggcuggucccccgcauugcuaccagauccaaaguuaauggccaaagcgggcggauggaguucuuuuggacaauccugaagccuaacgacgccauuaauuucgaauccaacggaaauuuuaucgcgcccgaauacgccuauaaaauugugaagaaaggcgauucuaccaucaugaaaagcgagcucgaauacgggaacugcaauacgaaaugucagacaccuaugggagcuaucaacuccagcaugcccuuccauaauauucacccgcugaccaucggcgagugcccuaaguaugugaagucuaaccgccuuguccuggccacagggcucagaaauagcccccagcgggagcgcagacggaaaaagcgcggacuguuuggcgcuauugccggcuucaucgaagggggauggcagggcaugguggacgggugguacggauaucaucacuccaacgagcaaggcucuggguacgcggccgacaaagaaagcacccagaaggcuauugauggaguuaccaauaaagugaacuccaucaucaauaagaugaacacacaguuugaggccgucggcagagaguucaacaaucuugaacggcgcauugagaaccugaauaagaaaauggaagacggcuuccucgauguguggacguauaacgcugagcugcugguucucauggaaaaugagagaacccuggacuuucacgauucuaacgugaagaaucuuuacgacaaaguccggcugcaacucagagauaacgccaaggaacuggggaauggauguuucgaguuuuaccauaaaugcgacaacgaguguauggaaagcgugcgcaauggcacauaugauuacccucaguauuccgaggaagcccggcuuaagagagaggagaucagcggggucaagcuggaaucuauuggaaucuaccagauucucuccaucuauagcaccguggcuucuucccuggcgcuggccauuaugguugcuggccucagccuguggaugugcuccaacgggucucuucagugccgcaucuguaucuga

SEQ ID NO: 193562 - RNA, 1707 nt, Artificial Sequence
  derived and/or modified CDS sequence (opt5) from hemagglutinin__InfluenzaA__ABL67827
auggagaagaucgugcuccuguucgccauugucagccugguuaaauccgaccacaucugcauuggcuaccaugcuaacaauucuaccgaacagguggauacaaucauggagaagaacgugacggucacccacgcccaagacauucuugagaaaacacauaaugggaagcugugugaucucgacggagugaaaccccugauccuuagagauugcagcguugcgggcuggcugcucgggaacccuaugugugacgaguuuaucaaugugccggaaugguccuauauugucgagaaggcuaaccccgugaaugaucugugcuacccuggagacuucaacgauuaugaggaacugaagcaccuccugucucggaucaaucauuuugagaaaauucagaucauucccaagagcuccuggucuagccacgaagccucccuuggcguuagcucugccuguccuuaccaggggaaauccagcuucuuucgcaacguggucuggcugaucaagaaaaauucuaccuaucccacaauuaagagauccuacaacaauaccaaccaggaggaccuccuggugcuuuggggaauccaccauccuaaugaugcugccgagcaaacaaagcuguaucagaacccgaccacguacaucagcgugggcaccucuacacucaaccagcggcuggucccccgcauugcuaccagauccaaaguuaauggccagagcgggcggauggaguucuuuuggacaauccugaagccuaacgacgccauuaauuucgaauccaacggaaauuuuaucgcgcccgaauacgccuaugagauugugaaaaagggcgauucuaccaucaugaaaagcgaacucgaguacgggaacugcaauacgaagugucaaacaccuaugggagcuaucaacuccagcaugcccuuccacaauauucauccgcugaccaucggcgagugcccuaaauaugugaagucuaaccgccuuguccuggccacagggcucagaaauagcccccagauugaacggcgcagaaagaaacggggacuguuuggcgcuaucgccggcuuccuugaagggggauggcagggcaugguggacgggugguacggauaucaccacuccaacgaacagggcucuggguacgcggccgacaaggagagcacccaaaaagcuauugauggaguuaccaauaaggugaacuccaucaucaauaaaaugaacacacaguuugaagccgucggccgcgaguucaacaaucuggagagacggauugaaaaccucaauaagaagauggaggacggcuuccuggauguguggacguauaacgcugaacugcucguucugauggagaaugaacgcacccuugacuuucaugauucuaacgugaaaaaucuguacgacaaggucagacuccagcugcgggauaacgccaaagagcuugggaauggauguuucgaguuuuaccacaagugcgacaacgaauguauggagagcgugagaaauggcacauaugauuacccucaauauuccgaagaggcccgccugaaacgggaggaaaucagcggggucaagcucgagucuauuggaaucuaccagauucuguccaucuauagcaccguggcuucuucccuggcgcucgccauuaugguugcuggccugagccuuuggaugugcuccaacgggucucugcagugcagaaucuguaucuga

SEQ ID NO: 193563 - RNA, 1701 nt, Artificial Sequence
  derived and/or modified CDS sequence (opt5) from hemagglutinin__InfluenzaA__ABM22015
augaagaccaucauugcccugagcuacauccucugccugguguucgcucagaaacuucccggcaacgacaauuccacagccacgcugugucucgggcaccaugcggucccuaacggaaccauuguuaagacaaucaccaaugaucaaauugaggugacaaacgcuaccgaacuggugcagucuagcuccacaggcgggaucugcgacucuccgcaccagauccuugauggagagaauuguacccugauugacgcccuccugggcgauccccagugcgacggguuucaaaacaaaaagugggaucuguucgucgaaagaagcaaagccuauuccaauuguuacccuuaugacgugcccgauuacgcuucucuccggagccugguugccuccagcggaacgcuugaguuuaacaaugaaucuuucaacuggaccggcgugacacagaauggcaccuccagcgcuugcaagcgcagaucuaacaauuccuuuuucagccggcugaacuggcucacacaucugaaguuuaaauauccugcccuuaaugucaccaugcccaacaacgagaaguucgacaaacuguacaucuggggagugcaccauccugggacggauaaugaccagauuuuucucuaugcgcaggccucuggccgcaucacaguuuccaccaagagaagccaacagacagugauuccgaacaucgggucccggccccgcgucagaaauauuccuucucggaucagcaucuacuggaccauugugaaacccggagauauccugcugauuaacuccaccggcaaucucaucgcuccucgcggguacuucaagauuagaagcggaaagucuuccaucaugcggagcgacgcccccaucggcaaauguaacucugagugcauuacaccgaauggcagcaucccuaacgacaagcccuuucagaaugugaaccgcauuacguauggggcuuguccuagauacgucaaacagaauacccugaaacuugccacaggaaugcggaacguucccgaaaagcaaacccgcggcaucuucggggcgauugccggauuuaucgagaauggcugggaagggaugguggauggaugguauggcuucagacaccagaacuccgagggcaucgggcaggcugccgaccugaagucuacacaagcugccauuaaucagaucaacggaaaacucaaccggcugauuggcaagaccaaugagaaguuccaccagaucgaaaaagaguuuagcgaaguggaggggcgcauucaggaucuugaaaaguacgucgaggacacgaaaaucgaucugugguccuauaacgccgagcuccugguggcucuggaaaaucaacauacaauugaccucaccgauagcgagaugaacaagcuguucgaaagaaccaaaaagcagcuucgggagaaugcggaagacaugggaaacggcugcuuuaagaucuaccacaaaugugauaaugccugcaucgggucuauuagaaacggcacauaugaccaugauguuuaccgcgacgaggcucugaauaaccgguuccagaucaagggaguggagcucaaauccggcuacaaggacuggauucuguggaucagcuuugccauuucuugcuuccuucugugugucgcccuccugggguuuaucaugugggcuugccagaaaggaaauaucagaugugauauuugcaucuga

SEQ ID NO: 193564 - RNA, 1701 nt, Artificial Sequence
  derived and/or modified CDS sequence (opt5) from hemagglutinin__InfluenzaA__ABM22026
augaaggccaaacugcucgugcugcuuugcgcuuucaccgccacauacgcggacacgaucuguauuggcuaucacgcuaacaauagcaccgauacagucgacaccguucuggagaagaacgugacagugacccauuccgucaaucuccuggaagauucucacaacgggaaacuuugcagacugaagggaacagcuccccuccagcugggcaauuguagcaucgccggguggauucugggaaacccugagugcgaaucccucuuuucuaaagagagcugguccuacaucgccgaaaccccgaaucccaagaacggcacguguuauccuggguacuucgccgacuaugaggagcugcgggaacaacuuucuagcguguccagcuuuaagcgcuucgagauuuuucccaaagauucuuccuggccuaaucauaccguuacaaagggagugaccgcuagcugcucucacaacggcaaauccagcuucuacaagaaucugcucuggcugacagaaaagaacggccuuuaucccaaucugucuaaguccuacgucaacaagaaagggaaggaggugcucguucuguggggagugcaucacccuagcaauaugggcgaccagagagccaucuaccacaaagagaacgcguaugucuccgugcugucuagccauuacucccggcgcuuuaccccggaaaucgccagacggcccaaggugcgcgaucaggaggggagaauuaacuauuacuggacgcuccuggaaccuggagacacaaucauuuucgaggcuaauggcaaccuuaucgcccccugguaugcuuuugcccugagccggggguucggaucuggcauuaucauuuccaaugcgagcaugggcgaaugugaugccaaaugccagaccccucaaggggcuaucaacucuagccuccccuuucagaauguccacccgguuacaaucggagaguguccuaaguacgugcgcuccaccaaacugagaauggugaccggccuucggaacguccccucuauucagagccgcgggcuguucggagccaucgcuggcuuuauugaagggggauggacaggcaugaucgacggcugguauggguaccaucaccagaaugaacaaggauccggcuacgccgccgaucagaaaagcacgcagaacgcuauuaaugggaucaccaacaagguuaauucuaucauugagaaaaugaacacacaguucaccgcggugggaaaggaguucaauaaacucgagagacggauggaaaaccugaauaagaaaguggacgauggcuuucuggacaucuggacauauaacgccgagcuccugguccuucuggagaacgaacgcacccucgacuuccacgauuccaaugugaagaaccuguacgagaagguuaaaaaucaacuuaagaacaaugcuaaagaaauugggaacggcugcuuugaguucuaucauaaguguaauaacgaaugcauggagagcgugaaaaauggaacguacgacuauccuaaguacucuaaggaguccaaacugaacagagaaaagaucgauggcgucaaacucgagagcauggggguguaucagauucuggccaucuacuccacagucgccucuagccuggugcuccugguuucccuuggagcuaucucuuuuuggaugugcagcaauggcucccugcagugucggauuugcaucuga

SEQ ID NO: 193565 - RNA, 1701 nt, Artificial Sequence; identical to SEQ ID NO: 192705
  derived and/or modified CDS sequence (opt5) from hemagglutinin__InfluenzaA__ABM22037

SEQ ID NO: 193566 - RNA, 1701 nt, Artificial Sequence; identical to SEQ ID NO: 192123
  derived and/or modified CDS sequence (opt5) from hemagglutinin__InfluenzaA__ABM22059

SEQ ID NO: 193567 - RNA, 1701 nt, Artificial Sequence; identical to SEQ ID NO: 193377
  derived and/or modified CDS sequence (opt5) from hemagglutinin__InfluenzaA__ABM22070

SEQ ID NO: 193568 - RNA, 1701 nt, Artificial Sequence
  derived and/or modified CDS sequence (opt5) from hemagglutinin__InfluenzaA__ABM22081
augaagaccaucauugcccugagcuacauccucugccugguguucgcucagaaacuucccggcaacgacaauuccacagccacgcugugucucgggcaccaugcggucccuaacggaaccauuguuaagacaaucaccaaugaucaaauugaggugacaaacgcuaccgaacuggugcagucuagcuccacaggcgggaucugcgacucuccgcaccagauccuugauggagagaauuguacccugauugacgcccuccugggcgauccccagugcgacggguuucaaaacaaaaagugggaucuguucgucgaaagaagcaaagccuauuccaauuguuacccuuaugacgugcccgaucaugcuucucuccggagccugguugccuccagcggaacgcuugaguuuaacaaugaaucuuucgacuggaccggcgugacacagaacggcaccuccagcgcuugcaagcgcagaucuaauaaguccuuuuucagccggcugaacuggcucacacaccugaaauacaaguauccugcccuuaaugucaccaugcccaacaaugagaaauuugauaagcuguacaucuggggagugcaucacccugggacggacucugaucagauuucccucuaugcgcaggccagcggccgcaucacaguuuccaccaaaagaucucaacagacagugauuccgaacaucgggagccggccccgcgucagagacguguccagccggauuucuaucuacuggaccaucgugaagccuggagacauucugcugaucaacuccaccggcaaucucauugcuccccgcggguacuucaagaucagaagcggaaaaucuagcauuaugcgguccgaugccccuaucggcaaguguaacucugagugcaucacacccaauggcagcauuccgaacgacaaaccuuuucagaaugucaaccgcaucacguauggggcuugucccagauacguuaagcagaauacccugaaacuugccacaggaaugcggaacauuccugaaaagcaaacccgcggcaucuucggggcgauugccggauuuaucgagaauggcugggaagggaugguggauggaugguauggcuucagacaccagaacuccgagggcacagggcaggcugccgaccugaaaagcacccaagcugccaucaaucagauuaacggaaagcucaaucggcugaucggcaagacgaacgagaaauuucaucagauugaaaaggaguucucugaaguggaggggagaauccaggaucuugaaaaauacgucgaggacacaaagauugaucugugguccuauaaugccgagcuccugguggcucuggaaaaccaacacaccaucgaccucaccgauagcgagaugaacaaacuguucgaacgcacaaagaagcagcuucgggagaaugcggaagacaugggaaacggcugcuuuaaaauuuaccauaagugugauaaugccugcaucgggucuaucagaaacggcaccuaugaccacgacguuuaccgcgaugaggcucugaauaaccgguuccagauuaaaggaguggagcucaaguccggcuacaaagacuggauccuguggauuagcuuugccaucuccugcuuccuucugugugucgcccuccugggguuuauuaugugggcuugccagaagggaaauaucagauguaacaucugcauuuga

SEQ ID NO: 193569 - RNA, 1701 nt, Artificial Sequence
  derived and/or modified CDS sequence (opt5) from hemagglutinin__InfluenzaA__ABM22092
augaagaccaucauugcccugagcuacauccucugccugguguucgcucagaaacuucccggcaacgacaauuccacagccacgcugugucucgggcaccaugcggucccuaacggaaccauuguuaagacaaucaccaaugaucaaauugaggugacaaacgcuaccgaacuggugcagucuagcuccacaggcgagaucugcgacucuccgcaccagauccuugauggggaaaauuguacccugauugacgcccuccugggagauccccagugcgacggcuuucaaaacaaaaagugggaucuguucgucgagagaagcaaagccuauuccaauuguuacccuuaugacgugcccgaucaugcuucucuccggagccugguugccuccagcgggacgcuugaauuuaacaaugagucuuucgacugggcuggagugacccagaacggcacauccagcgccugcaagcgcagaucuaauaaguccuuuuucagccggcugaacuggcucacccaccugaaauacaaguauccugcgcuuaaugucacaaugcccaacaaugagaaauuugauaagcuguacaucuggggcgugcaucacccugggaccgacucugaucagauuucccucuaugcccaggcuagcggacgcaucacgguuuccacaaaaagaucucaacagaccgugauuccgaacaucggcagccggccccgcgucagagacguguccagccggauuucuaucuacuggacaaucgugaagccuggggacauucugcugaucaacuccaccggaaaucucauugcccccagaggcuacuucaagaucagaagcgggaaaucuagcauuaugcgguccgaugcuccuaucggaaaguguaacucugaaugcaucacccccaauggcagcauuccgaacgacaaaccuuuucagaaugucaaccgcaucacauauggcgccugucccagauacguuaagcagaauacgcugaaacuugcgaccgggaugcggaacgugccugagaagcaaacacgcggaauuuucggcgccaucgcuggguuuauugaaaauggaugggagggcaugguggaugggugguauggauucagacaccagaacuccgagggcaccggccaggccgcugaccugaaaagcacacaagccgccaucaaucagaucaacgggaagcucaaucggcugauuggaaagaccaacgaaaaauuucaucagaucgagaaggaguucucugaagucgaaggccgcauucaggaucuugagaaauacguggaggacacgaagaucgaucugugguccuauaaugcugaacuccugguugcgcuggagaaccaacacacaauugaccucaccgauagcgaaaugaacaaacuguucgagcgcaccaagaagcagcuucgggaaaaugccgaggacauggggaacggaugcuuuaaaaucuaccauaagugugauaaugcuugcauuggcucuaucagaaacgggacauaugaccacgacguguaccgcgaugaggcccugaauaaccgguuccagaucaaaggcgucgaacucaaguccggauacaaagacuggauucuguggaucagcuuugccauuuccugcuuccuucuguguguggcucuccugggcuuuaucaugugggccugccagaaggggaauauuagauguaacaucugcaucuga

SEQ ID NO: 193570 - RNA, 1701 nt, Artificial Sequence; identical to SEQ ID NO: 193382
  derived and/or modified CDS sequence (opt5) from hemagglutinin__InfluenzaA__ABM22103

SEQ ID NO: 193571 - RNA, 1701 nt, Artificial Sequence; identical to SEQ ID NO: 192588
  derived and/or modified CDS sequence (opt5) from hemagglutinin__InfluenzaA__ABM22114

SEQ ID NO: 193572 - RNA, 1701 nt, Artificial Sequence; identical to SEQ ID NO: 193527
  derived and/or modified CDS sequence (opt5) from hemagglutinin__InfluenzaA__ABM22125

SEQ ID NO: 193573 - RNA, 1701 nt, Artificial Sequence
  derived and/or modified CDS sequence (opt5) from hemagglutinin__InfluenzaA__ABM22136
augaagaccaucauugcccugagcuacauccucugccugguguucgcucagaaacuucccggcaacgacaauuccacagccacgcugugucucgggcaccaugcggucccuaacggaaccauuguuaagacaaucaccaaugaucaaauugaggugacaaacgcuaccgaacuggugcagucuagcuccacaggcgggaucugcgacucuccgcaccagauccuugauggagagaauuguacccugauugacgcccuccugggcgauccccagugcgacggguuucaaaacaaaaagugggaucuguucgucgaaagaagcaaagccuauuccaauuguuacccuuaugacgugcccgauuacgcuucucuccggagccugguugccuccagcggaacgcuugaguuuaacaaugaaucuuucaacuggaccggcgugacacagaauggcaccuccagcgcuugcaagcgcagaucuaacaauuccuuuuucagccggcugaacuggcucacacaucugaaguuuaaauauccugcccuuaaugucaccaugcccaacaacgagaaguucgacaaacuguacaucuggggagugcaccauccugggacggauaaugaccagauuuuucucuaugcgcaggccucuggccgcaucacaguuuccaccaagagaagccaacagacagugauuccgaacaucgggucccggccccgcgucagaaauauuccuucucggaucagcaucuacuggaccauugugaaacccggagauauccugcugauuaacuccaccggcaaucucaucgcuccucgcggguacuucaagauuagaagcggaaagucuuccaucaugcggagcgacgcccccaucggcaaauguaacucugagugcauuacaccgaauggcagcaucccuaacgacaagcccuuucagaaugugaaccgcauuacguauggggcuuguccuagauacgucaaacagaauacccugaaacuugccaucggaaugcggaacguucccgaaaagcaaacacgcggcauuuucggggcgaucgccggauuuaucgagaauggcugggaagggaugguggauggaugguauggcuucagacaccagaacuccgagggcauugggcaggcugccgaccugaagucuacccaagcugccaucaaucagauuaacggaaaacucaaccggcugaucggcaagacaaaugagaaguuccaccagauugaaaaagaguuuagcgaaguggaggggagaauccaggaucuugaaaaguacgucgaggacaccaaaauugaucugugguccuauaacgccgagcuccugguggcucuggaaaaucaacauacgaucgaccucacagauagcgagaugaacaagcuguucgaacgcaccaaaaagcagcuucgggagaaugcggaagacaugggaaacggcugcuuuaagaucuaccacaaaugugauaaugccugcauugggucuaucagaaacggcaccuaugaccaugauguuuaccgcgacgaggcucugaauaaccgguuccagauuaagggaguggagcucaaauccggcuacaaggacuggauccuguggauuagcuuugccaucucuugcuuccuucugugugucgcccuccugggguuuaucaugugggcuugccagaaaggaaauauuagauguaacaucugcauuuga

SEQ ID NO: 193574 - RNA, 1701 nt, Artificial Sequence; identical to SEQ ID NO: 192705
  derived and/or modified CDS sequence (opt5) from hemagglutinin__InfluenzaA__ABM22147

SEQ ID NO: 193575 - RNA, 1701 nt, Artificial Sequence; identical to SEQ ID NO: 192993
  derived and/or modified CDS sequence (opt5) from hemagglutinin__InfluenzaA__ABM22158

SEQ ID NO: 193576 - RNA, 1701 nt, Artificial Sequence; identical to SEQ ID NO: 192993
  derived and/or modified CDS sequence (opt5) from hemagglutinin__InfluenzaA__ABM22169

SEQ ID NO: 193577 - RNA, 1701 nt, Artificial Sequence; identical to SEQ ID NO: 192993
  derived and/or modified CDS sequence (opt5) from hemagglutinin__InfluenzaA__ABM22180

SEQ ID NO: 193578 - RNA, 1701 nt, Artificial Sequence; identical to SEQ ID NO: 192993
  derived and/or modified CDS sequence (opt5) from hemagglutinin__InfluenzaA__ABM22191

SEQ ID NO: 193579 - RNA, 1701 nt, Artificial Sequence; identical to SEQ ID NO: 192993
  derived and/or modified CDS sequence (opt5) from hemagglutinin__InfluenzaA__ABM22202

SEQ ID NO: 193580 - RNA, 1701 nt, Artificial Sequence; identical to SEQ ID NO: 192993
  derived and/or modified CDS sequence (opt5) from hemagglutinin__InfluenzaA__ABM22213

SEQ ID NO: 193581 - RNA, 1701 nt, Artificial Sequence; identical to SEQ ID NO: 192993
  derived and/or modified CDS sequence (opt5) from hemagglutinin__InfluenzaA__ABM22224

SEQ ID NO: 193582 - RNA, 1701 nt, Artificial Sequence; identical to SEQ ID NO: 192993
  derived and/or modified CDS sequence (opt5) from hemagglutinin__InfluenzaA__ABM22235

SEQ ID NO: 193583 - RNA, 1701 nt, Artificial Sequence
  derived and/or modified CDS sequence (opt5) from hemagglutinin__InfluenzaA__ABM22268
augaaggugaaacugcucguccugcuuugcgccuucaccgcuacauacgccgacacgaucuguauuggcuaucacgcgaacaauagcaccgauacaguugacaccgugcuggagaagaacgugacagucacccauuccgugaaucuccuggaagauucucacaacgggaaacuuugcagacugaagggaacagcuccccuccagcugggcaauuguagcguugccggguggauccugggaaacccugagugcgaaucccucuuuucuaaagagagcugguccuacauugccgaaaccccgaaucccgagaacggcacguguuauccuggguacuucgcugacuaugaggaacugcgggagcaacuuucuagcguguccagcuuugaacgcuucgagaucuuucccaaggagucuuccuggccuaaucauaccgucacaaagggagugaccgccagcugcucucacaacggcaaauccagcuucuacaagaaucugcucuggcugacagaaaagaacggccuuuaucccaaucugucuaaguccuacguuaacaauaaagagaaggaagugcucguccuguggggagugcaucacccuagcaacauuggggaucagagagcuaucuaccacaccgagaacgccuauguguccgucguuucuagccauuacucccggcgcuuuacgccggaaaucgcgaagagacccaaagugcgggaccaggagggccgcauuaauuauuacuggacacugcucgagccuggggauaccaucauuuucgaagccaacggaaaucugaucgcucccugguaugccuuugcucuuagcagaggcuucgggucuggaauuaucacauccaacgccagcaugggcgagugugacgcgaagugccagaccccucaaggcgccauuaauucuagccugcccuuucagaacgugcacccggucaccaucggggaauguccuaaauacgugcgguccacaaagcuccgcaugguuacgggacugagaaauauccccucuauucagagccggggccuuuucggggcuaucgccggauuuauugagggcggguggaccggaaugaucgauggcugguauggcuaccaucaccagaacgaacaaggguccggauacgcugccgaccagaaaagcacacagaaugccauugauggcaucaccaacaaggucaauucugugaucgagaaaaugaacacacaguucaccgcuguggggaaggaguucaauaagcuggaacgcagaauggagaaccucaauaaaaagguugacgauggauuucuggacauuuggacguauaacgcggaacugcucgugcugcuugagaacgaacggacacuggacuuccacgauuccaaugucaaaaaccucuacgagaaggugaaaaaucaacugaagaacaaugccaaggagaucggcaacgggugcuuugaguucuaucauaaauguaauaacgaaugcauggaaagcgucaagaauggcaccuacgacuauccuaaauacucugaggaguccaaacuuaaccgcgagaaaauugauggagugaagcuggaaagcaugggcguuuaucagauccucgcuauuuacuccaccguggccucuagccugguccugcucgugucccugggggccaucucuuuuuggaugugcagcaauggaucccuucaguguagaaucugcauuuga

SEQ ID NO: 193584 - RNA, 1701 nt, Artificial Sequence
  derived and/or modified CDS sequence (opt5) from hemagglutinin__InfluenzaA__ABM22279
augaaggccaaacugcucgugcugcuuugcgcuuucaccgccacauacgcggacacgaucuguauuggcuaucacgcuaacaauagcaccgauacagucgacaccguucuggagaagaacgugacagugacccauuccgucaaucuccuggaagauagacacaacgggaaacuuugccggcugaagggaacagcuccccuccagcugggcaauuguucuguggccggguggauccugggaaacccugagugcgaaagccucuuuuccaaagagucuuggagcuacauugccgaaaccccgaaucccgagaacggcacguguuauccuggguacuucgccgacuaugaggaacugcgcgagcaacuuuccucuguuagcuccuuugaaagauucgagaucuuucccaaggagagcucuuggccuaaucauaccgugacaaagggagucaccgcuuccugcagccacaacggcaaaucuuccuucuacaagaaucugcucuggcugacagagaaaaacggccuuuaucccaaucugagcaagucuuacgugaacaauaaagagaaggaaguucucgugcuguggggaguccaucacccuuccaacauuggggaucagcgggccaucuaccacaccgagaacgcguaugugagcguggucuccucucauuacagccgcagauuuacgccggaaaucgccaagcggcccaaaguucgcgaccaggagggcagaauuaauuauuacuggacacugcucgagccuggggauaccaucauuuucgaagcuaacggaaaucugaucgcccccugguaugcuuuugcccuuucccggggcuucgggagcggaauuaucacaucuaacgcguccaugggcgacugugaugccaagugccagaccccucaaggcgcuauuaauagcucucugcccuuucagaacgugcacccggugaccaucgggggauguccuaaauacguccgcagcacaaagcucagaauggugacgggccugcggaauauccccuccauucagucucgcgggcuuuucggagccaucgcuggcuuuauugaagggggauggaccggcaugaucgacggcugguauggguaccaucaccagaacgaacaaggaagcggcuacgccgccgauaaaaaguccacacagaaugcuauugacgggaucaccaacaaaguuaauagcgugaucgagaagaugaacacacaguucaccgcggucggaaaggaguucaauaaacuggaaagacggauggagaaccucaauaagaaaguggaugacggcuuucuggacauuuggacguauaacgccgaacugcucguucugcuugagaacgaacgcacacuggauuaccacgacucuaaugugaagaaccucuaugagaaagucaagaaucagcugaagaacaaugcuaaagaaaucgggaacggcugcuucgaguuuuaccauaaguguaauaacgagugcauggaauccgugaaaaauggaaccuaugauuacccuaaguauagcgaggaaucuaaacuuaagagagagaagauugacggcgucaaacuggaguccauggggguguaccaaauccucgccauuuacagcaccguugccuccucucuggugcugcucgucagccugggagcuaucuccuucuggaugugcucuaacggcagccuucagugucggaucugcauuuga

SEQ ID NO: 193585 - RNA, 1701 nt, Artificial Sequence
  derived and/or modified CDS sequence (opt5) from hemagglutinin__InfluenzaA__ABM22290
augaaggccaaacugcucgugcugcuuugcgcuuucaccgccacauacgcggacacgaucuguauuggcuaucacgcuaacaauagcaccgauacagucgacaccguucuggagaagaacgugacagugacccauuccgucaaucuccuggaaaacucucacaaugggaaacuuugcagacugaagggaacagcuccccuccagcugggcaacuguagcguggccggguggauccugggaaauccugagugcgaaucccucuuuucuaaagagagcugguccuacauugccgaaaccccgaaccccgagaauggcacguguuauccuggguacuucgccgauuaugaggaacugcgggagcaacuuucuagcguuuccagcuuugaacgcuucgagaucuuucccaaggagucuuccuggccuaaccauaccgugacaaagggagucaccgcuagcugcucucacaauggcaaauccagcuucuacaagaaccugcucuggcugacagaaaagaauggccuuuaucccaaccugucuaaguccuacgugaauaacaaagagaaggaaguucucgugcuguggggaguccaucacccuagcaacauuggggaccagagagccaucuaccacaccgagaaugcguauguguccguggucucuagccauuacucccggcgcuuuacgccggaaaucgccaagagacccaaaguucgggaucaggagggccgcauuaacuauuacuggacacugcucgagccuggggacaccaucauuuucgaagcuaauggaaaccugaucgcccccugguaugcuuuugcccuuagcagaggcuucgggucuggaauuaucacauccaaugcgagcaugggcgagugugaugccaagugccagaccccucaaggcgcuauuaacucuagccugcccuuucagaaugugcacccggugaccaucggggaauguccuaaauacguccgguccacaaagcuccgcauggugacgggacugagaaacauccccucuauucagagccggggccuuuucggggccaucgcuggauuuauugagggcggguggaccggaaugaucgacggcugguauggcuaccaucaccagaaugaacaaggguccggauacgccgccgaucagaaaagcacacagaacgcuauugacggcaucaccaauaagguuaacucugugaucgagaaaaugaauacacaguucaccgcggucgggaaggaguucaacaagcuggaacgcagaauggagaaucucaacaaaaagguggaugacggauuucuggauauuuggacguauaacgccgaacugcucguucugcuugagaaugaacggacacuggacuuccacgacuccaacgugaaaaaucucuacgagaaggucaaaaaccaacugaagaauaacgcuaaggagaucggcaaugggugcuuugaguucuaucauaaauguaacaaugaaugcauggaaagcgugaagaacggcaccuacgauuauccuaaauacucugaggaguccaaacuuaaucgcgagaaaauugacggagucaagcuggaaagcaugggcguguaucagauccucgccauuuacuccaccguugccucuagccuggugcugcucgucucccugggggcuaucucuuuuuggaugugcagcaacggaucccuucaguguagaaucugcauuuga

SEQ ID NO: 193586 - RNA, 1701 nt, Artificial Sequence; identical to SEQ ID NO: 192327
  derived and/or modified CDS sequence (opt5) from hemagglutinin__InfluenzaA__ABM22301

SEQ ID NO: 193587 - RNA, 1701 nt, Artificial Sequence; identical to SEQ ID NO: 192327
  derived and/or modified CDS sequence (opt5) from hemagglutinin__InfluenzaA__ABM22312

SEQ ID NO: 193588 - RNA, 1701 nt, Artificial Sequence; identical to SEQ ID NO: 192327
  derived and/or modified CDS sequence (opt5) from hemagglutinin__InfluenzaA__ABM22323

SEQ ID NO: 193589 - RNA, 1701 nt, Artificial Sequence; identical to SEQ ID NO: 192327
  derived and/or modified CDS sequence (opt5) from hemagglutinin__InfluenzaA__ABM22334

SEQ ID NO: 193590 - RNA, 1701 nt, Artificial Sequence; identical to SEQ ID NO: 192328
  derived and/or modified CDS sequence (opt5) from hemagglutinin__InfluenzaA__ABM22345

SEQ ID NO: 193591 - RNA, 1701 nt, Artificial Sequence; identical to SEQ ID NO: 192328
  derived and/or modified CDS sequence (opt5) from hemagglutinin__InfluenzaA__ABM22356

SEQ ID NO: 193592 - RNA, 1701 nt, Artificial Sequence; identical to SEQ ID NO: 192328
  derived and/or modified CDS sequence (opt5) from hemagglutinin__InfluenzaA__ABM22367

SEQ ID NO: 193593 - RNA, 1698 nt, Artificial Sequence; identical to SEQ ID NO: 192913
  derived and/or modified CDS sequence (opt5) from hemagglutinin__InfluenzaA__ABM66864

SEQ ID NO: 193594 - RNA, 1701 nt, Artificial Sequence; identical to SEQ ID NO: 192993
  derived and/or modified CDS sequence (opt5) from hemagglutinin__InfluenzaA__ABM66886

SEQ ID NO: 193595 - RNA, 1701 nt, Artificial Sequence; identical to SEQ ID NO: 192993
  derived and/or modified CDS sequence (opt5) from hemagglutinin__InfluenzaA__ABM66897

SEQ ID NO: 193596 - RNA, 1701 nt, Artificial Sequence; identical to SEQ ID NO: 192993
  derived and/or modified CDS sequence (opt5) from hemagglutinin__InfluenzaA__ABM66908

SEQ ID NO: 193597 - RNA, 1701 nt, Artificial Sequence; identical to SEQ ID NO: 192328
  derived and/or modified CDS sequence (opt5) from hemagglutinin__InfluenzaA__ABM66919

SEQ ID NO: 193598 - RNA, 1701 nt, Artificial Sequence; identical to SEQ ID NO: 192328
  derived and/or modified CDS sequence (opt5) from hemagglutinin__InfluenzaA__ABM66930

SEQ ID NO: 193599 - RNA, 1701 nt, Artificial Sequence; identical to SEQ ID NO: 192328
  derived and/or modified CDS sequence (opt5) from hemagglutinin__InfluenzaA__ABM66941

SEQ ID NO: 193600 - RNA, 1701 nt, Artificial Sequence; identical to SEQ ID NO: 192328
  derived and/or modified CDS sequence (opt5) from hemagglutinin__InfluenzaA__ABM66952

SEQ ID NO: 193601 - RNA, 1701 nt, Artificial Sequence; identical to SEQ ID NO: 192328
  derived and/or modified CDS sequence (opt5) from hemagglutinin__InfluenzaA__ABM66963

SEQ ID NO: 193602 - RNA, 1701 nt, Artificial Sequence; identical to SEQ ID NO: 192328
  derived and/or modified CDS sequence (opt5) from hemagglutinin__InfluenzaA__ABM66974

SEQ ID NO: 193603 - RNA, 1701 nt, Artificial Sequence; identical to SEQ ID NO: 192328
  derived and/or modified CDS sequence (opt5) from hemagglutinin__InfluenzaA__ABM66985

SEQ ID NO: 193604 - RNA, 1701 nt, Artificial Sequence; identical to SEQ ID NO: 192328
  derived and/or modified CDS sequence (opt5) from hemagglutinin__InfluenzaA__ABM66996

SEQ ID NO: 193605 - RNA, 1701 nt, Artificial Sequence; identical to SEQ ID NO: 192328
  derived and/or modified CDS sequence (opt5) from hemagglutinin__InfluenzaA__ABM67007

SEQ ID NO: 193606 - RNA, 1701 nt, Artificial Sequence; identical to SEQ ID NO: 192328
  derived and/or modified CDS sequence (opt5) from hemagglutinin__InfluenzaA__ABM67018

SEQ ID NO: 193607 - RNA, 1701 nt, Artificial Sequence
  derived and/or modified CDS sequence (opt5) from hemagglutinin__InfluenzaA__ABM67029
augaagaccaucauugcccugagcuacaucauuugccucguguucgcucagaaacugcccggcaacgacaauuccacagccacgcuuugucuggggcaccaugcggucccuaacggaaccaucguuaagacaauuaccaaugaucaaaucgaggugacaaacgcuaccgaacucgugcagucuagcuccacaggcgagaucugcgacucuccgcaccagauucuggauggggaaaauuguacccuuaucgacgcccugcucggagauccccagugcgacggcuuucaaaacaaaaagugggaucuguucgucgagagaagcaaagccuauuccaauuguuacccuuaugacgugcccgauuacgcuucucugcggagccucguugccuccagcgggacgcuggaauuuaacaaugagucuuucaacuggaccggagugacacagaauggcaccuccagcgcuugcaagcgcagaucuaacaauuccuuuuucagccggcuuaacuggcugacacaucucaaguuuaaauauccugcccugaaugucaccaugcccaacaacgagaaguucgacaaacuuuacauuuggggcgugcaccauccugggacggauaaugaccagaucuuucuguaugcgcaggccucuggacgcauuacaguuuccaccaagagaagccaacagacagugaucccgaacauuggcucccggccccgcgucagagauaucccuucucggaucagcauuuacuggaccaucgugaaacccggggacauucuccugaucaauuccaccggaaaccugauugcuccucgcggcuacuucagaauccggagcgggaagucuuccaucaugcgcagcgacgcccccauuggaaaguguaauucugaaugcaucacaccgaacggcagcauuccuaaugauaaacccuuucagaacgugaauagaaucacguauggcgcuuguccucgguacgucaagcagaacacccucaaacuggccacagggaugcgcaauguucccgagaagcaaaccagaggaauuuucggcgcgaucgccggguuuaucgaaaacggaugggagggcaugguggacgggugguauggauuccggcaccaaaauuccgagggcauuggccaggcugccgaucuuaaaucuacacaggcugccaucaaccagauuaaugggaagcugaacagacucaucggaaaaaccaacgaaaaguuccaccagauugagaaggaauuuagcgagguggaaggccgcauccaggaccuggagaaauacgucgaggauacgaagauugaccuuugguccuauaaugccgaacugcucguggcucuggagaaccaacauacaaucgaucugaccgacagcgaaaugaauaaacucuucgagcggaccaagaaacagcugagagaaaacgcggaggauauggggaauggaugcuuuaagaucuaccacaagugugacaacgccugcauuggcucuauccgcaaugggacauaugaucaugacguuuaccgggacgaggcucuuaacaauagauuccagauuaaaggcguggaacugaaguccggauacaaagauuggauccucuggauuagcuuugccaucucuugcuuccugcuuugugucgcccugcucggcuuuaucaugugggcuugccagaaggggaacauucgcuguaauaucugcauuuga

SEQ ID NO: 193608 - RNA, 1698 nt, Artificial Sequence; identical to SEQ ID NO: 192371
  derived and/or modified CDS sequence (opt5) from hemagglutinin__InfluenzaA__ABM67051

SEQ ID NO: 193609 - RNA, 1707 nt, Artificial Sequence
  derived and/or modified CDS sequence (opt5) from hemagglutinin__InfluenzaA__ABM90467
auggagaagaucgugcugcuccugagcauugucucccuuguuaaaucugaccagaucugcauuggcuaccacgccaacaauagcaccgaacaaguggauacaaucauggagaagaacgugacggucacccaugcucaggacauucuggaaaagacacacaaugggaagcucugugaucuggacggagugaaaccccuuauccugagagauugcuccguugccggcuggcuccuggggaacccuaugugugacgaguucaucaaugugccggaauggucuuauauugucgagaaggcgaaccccaccaaugaucugugcuacccugggagcuuuaacgacuaugaggaacucaagcaucugcuuucccggaucaaucacuucgagaaaauucagaucauucccaagucuagcugguccgaucaugaagcuagcucuggcguguccagcgccuguccuuaccuggggucucccuccuuuuuccgcaacguuguguggcucaucaaaaagaauagcacauauccuaccauuaaaaagucuuacaacaauacaaaccaggaggaccugcuuguccuguggggaauccaccacccgaauaacgaggccgaacaaaccagacucuaucagaaccccacgaccuacaucuccauuggcacaagcacccugaaucagcggcuggugccuaagaucgcuacacgcuccaaagugaacggccagucugggagaauggaguuuuucuggaccauucucaagcccaaugaugccaucaacuuugaaagcaauggaaacuucauugcuccugaguacgccuauaaaaucgucaagaaaggcgacuccgcgaucaugaaaagcgaacuggaguacgggaauugcaacacgaaaugucaaacacccaugggagccauuaauucuuccaugccguuucauaacauccacccucuuaccauuggcgagugccccaaguauguuaagagcaaucggcuggugcucgcuacagggcugcgcaacucuccucagagagaaagccggcgcaaaaagagaggacuuuucggcgccaucgcuggcuuuauugagggaggauggcagggcaugguggaugggugguacggauaucaucacuccaaugaacagggcucuggguacgccgcggacaaagagagcacccaaaaggccaucgacggagucaccaacaaaguuaauuccaucauugauaagaugaacacacaguucgaagcugugggccgggaguuuaacaaucuggagcgcagaaucgaaaaccucaauaagaaaauggaggacggcuuccuggauguguggacguauaacgccgaacugcucguccugauggagaaugaacggacccuugacuuccacgauagcaacgugaagaaucuguacgacaaaguucgccuccagcugagagauaacgcuaaggagcuugggaauggauguuuugaguucuaccauaaaugcgacaacgaauguauggagucuauucggaauggcacauauaacuacccccaauauuccgaagaggccagacugaagcgcgaggaaaucagcggggugaagcucgagucuauuggaaccuaccagauccuguccauuuauagcacagucgccuccucucuggcucucgcgaucaugaucgccggccugagccuuuggaugugcuccaaugggucucugcagugccggauuuguaucuga

SEQ ID NO: 193610 - RNA, 1707 nt, Artificial Sequence
  derived and/or modified CDS sequence (opt5) from hemagglutinin__InfluenzaA__ABM90511
auggagaagaucgugcugcuccugagcauugucucccuuguuaaaucugaccagaucugcauuggcuaccacgccaacaauagcaccgaacaaguggauacaaucauugagaagaacgugacggucacccaugcucaggacauccuggagaaaacacacaaugggaagcucugugaucuggacggagugaaaccccuuauccugaaggauugcuccguugccggcuggcuccuggggaacccuaugugugacgaguucauuaaugugccggaauggucuuauaucgucgagaaggcgaaccccaccaaugaucugugcuacccuggauccuuuaacgacuaugaggaacucaaacaucugcuuuccagaauuaaucacuucgagaagauccagauuauccccaaaucuagcugguccgaucaugaagcuagcucuggcguguccagcgccuguccuuaccuggggucucccuccuuuuuccggaacguuguguggcucauuaagaaaaauagcacauauccuaccaucaagaagucuuacaacaauacaaaccaggaggaccugcuuguccuguggggaauccaccacccgaauaacgaggaagaacaaacccgccucuaucagaaccccacgaccuacauuuccaucggcacaagcacccugaaucagagacuggugccuaaaauugccacacgguccaaggugaacggccagucugggcgcauggaauuuuucuggaccauccucaaacccaaugaugcuauuaacuuugagagcaauggaaacuucaucgccccugaauacgcuuauaagaucgucaaaaagggcgacuccgccauuaugaaaagcgagcuggaguacucuaauugcaacacgaagugucaaacacccaugggggcgaucaauuccagcaugccguuucauaacauucacccucuuaccaucggagaaugccccaaguauguuaaaucuagcagacuggugcucgccacaggccugcggaauagcccucagcgcgagucuagacggaagaaacgcgggcuuuucggagcuauugccggcuuuaucgaaggcggguggcagggaaugguggauggcugguacggguaucaucacagcaacgagcagggauccggcuacgcugccgacaaggaaagcacccaaaaagcgaucgacggggucaccaauaaggugaacucuauuaucgauaagaugaauacacaguucgaggccguuggaagagaguuuaacaaccuggaacggcgcauugagaaucucaacaaaaagauggaagacggcuuccuggauguguggacguauaaugcugagcugcucguccugauggaaaacgagagaacccuugacuuccacgauuccaaugugaaaaaccuguacgacaagguucggcuccagcugcgcgauaaugccaaagagcuuggcaacggguguuuugaguucuaccauaagugcgacaaugaauguauggaaagcaucagaaacggaacauauaauuacccccaauauucugaggaggcucggcugaagagagaagagauuuccggcgugaaacucgaaagcaucgggaccuaccagauucuguccaucuauucuacagucgccagcucccuggcccucgcuaucaugauugcgggacugucucuuuggaugugcagcaacggcucccugcagugccgcaucuguauuuga

SEQ ID NO: 193611 - RNA, 1707 nt, Artificial Sequence
  derived and/or modified CDS sequence (opt5) from hemagglutinin__InfluenzaA__ABM90533
auggagaagaucgugcugcuccugagcauugucucccuuguuaaaucugaccagaucugcauuggcuaccacgccaacaauagcaccgaacaaguggauacaaucauggagaagaacgugacggucacccaugcucaggacauucuggagaaaacacacaaugggaagcucugugaucuggacggagugaaaccccuuauccugaaggauugcuccguugccggcuggcuccuggggaacccuaugugugacgaguucaucaaugugccggaauggucuuauauugucgagaaggcgaaccccaccaaugaucugugcuacccuggauccuuuaacgacuaugaggaacucaaacaucugcuuuccagaaucaaucacuucgagaagauucagaucauucccaaaucuagcugguccgaucaugaagcuagcucuggcguguccagcgccuguccuuaccuggggucucccuccuuuuuccggaacguuguguggcucaucaagaaaaauagcacauauccuaccauuaagaagucuuacaacaauacaaaccaggaggaccugcuuguccuguggggaauccaccacccgaauaacgaggaagaacaaacccgccucuaucagaaccccacgaccuacaucuccauuggcacaagcacccugaaucagagacuggugccuaaaaucgccacacgguccaaggugaacggccagucugggcgcauggaauuuuucuggaccauucucaaacccaaugaugcuaucaacuuugagagcaauggaaacuucauugccccugaauacgcuuauaagaucgucaaaaagggcgacuccgccaucaugaaaagcgagcuggaguacucuaauugcaacacgaagugucaaacacccaugggggcgauuaauuccagcaugccguuucauaacauccacccucuuaccauuggagaaugccccaaguauguuaaaucuagcagacuggugcucgccacaggccugcggaauagcccucagcgcgagucuagacggaagaaacgcgggcuuuucggagcuaucgccggcuuuauugaaggcggguggcagggaaugguggauggcugguacggguaucaucacagcaacgagcagggauccggcuacgcugccgacaaggaaagcacccaaaaagcgaucgacggggucaccaauaaggugaacucuaucauugauaagaugaauacacaguucgaggccguuggaagagaguuuaacaaccuggaacggcgcaucgagaaucucaacaaaaagauggaagacggcuuccuggauguguggacguauaaugcugagcugcucguccugauggaaaacgagagaacccuugacuuccacgauuccaaugugaaaaaccuguacgacaagguucggcuccagcugcgcgauaaugccaaagagcuuggcaacggguguuuugaguucuaccauaagugcgacaaugaauguauggaaagcauuagaaacggaacauauaauuacccccaauauucugaggaggcucggcugaagagagaagagaucuccggcgugaaacucgaaagcauugggaccuaccagauccuguccauuuauucuacagucgccagcucccuggcccucgcuaucaugaucgcgggacugucucuuuggaugugcagcaacggcucccugcagugccgcauuuguaucuga

SEQ ID NO: 193612 - RNA, 1707 nt, Artificial Sequence; identical to SEQ ID NO: 193611
  derived and/or modified CDS sequence (opt5) from hemagglutinin__InfluenzaA__ABM90544

SEQ ID NO: 193613 - RNA, 1701 nt, Artificial Sequence
  derived and/or modified CDS sequence (opt5) from hemagglutinin__InfluenzaA__ABN50900
augaaggccaaacugcucgugcugcuuugcgcucugagcgccaccgacgcggauacaaucuguauuggcuaccacgcuaacaauuccacggacaccgucgauacaguucucgagaagaacgugaccgugacacauucugucaaucugcuugaagacagccacaacgggaaacugugcagacucaagggaaucgcuccccugcagcugggcaaauguuccauugccggguggauccucggaaauccugagugcgaaucucuguucagcaagaaguccuggucuuauauugccgagaccccgaacagcgaaaauggcacauguuaccccggguauuuugccgauuacgaggagcuucgggaacaacuguccagcgugucuuccuucgagcgcuuugaaaucuucccuaaagagagcucuuggcccaagcauaacguuaccagaggagugacggcuuccugcagccacaaaggcaagucuuccuuuuaucggaaucuccuguggcuuaccgagaaaaacggcagcuacccuaaucuguccaagucuuaugucaacaauaaggaaaaagaggugcucguucuguggggagugcaucaccccagcaacaucgaagaccagaagacaauuuaccgcaaagagaaugccuacgucuccguggugagcucucacuauaacagacgguucaccccugaaaucgcgaagcgcccgaaagucagagggcaggagggccggauuaacuacuauuggacacugcucgagcccggggauaccaucauuuuugaagccaauggaaaccugaucgcuccuugguacgccuucgcucuuucccgcggcuuugggagcggaauuaucacgucuaaugccagcauggacgagugugaugcgaagugccagacaccccaaggcgccaucaacuccucucugccuuuccagaauguucaucccgugaccauuggcgaauguccgaaauaugugagaagcacaaagcuccggauggucaccgggcugcgcaacaucccuuccauucagagcagaggacuuuuuggcgcuaucgccggguucauugagggaggcuggaccgggaugaucgacggaugguacggcuaucaccaucagaaugaacaaggcucuggguacgcugccgaucagaaguccacacagaacgccaucaauggaauuacgaacaaagugaauagcguuaucgagaagaugaacacccaguuuacagcugugggcaaagaguucaauaagcuggaaaaacggauggagaaccucaauaagaaggucgacgauggguuccuggacauuuggaccuacaacgcggaacugcucgugcugcuugagaacgaacgcacacuggacuuucacgauucuaauguuaaaaaccucuaugagaaggugaaaucccaacugaagaauaacgccaaagagaucggaaauggcugcuucgaauuuuaccacaaguguaacaaugagugcauggaaagcgucaagaacgggaccuaugacuaccccaaauauuccgaggagucuaaacuuaauagagaaaagauugauggcgugaagcuggagagcaugggagucuaccagauccucgcuaucuauuccacgguggccucuagccugguucugcucgugucccugggcgccauuagcuucuggaugugcucuaacgggucccuucagugucggaucugcauuuga

SEQ ID NO: 193614 - RNA, 1701 nt, Artificial Sequence; identical to SEQ ID NO: 192993
  derived and/or modified CDS sequence (opt5) from hemagglutinin__InfluenzaA__ABN50917

SEQ ID NO: 193615 - RNA, 1701 nt, Artificial Sequence
  derived and/or modified CDS sequence (opt5) from hemagglutinin__InfluenzaA__ABN50928
augaaggccaagcugcucauccugcuuugcgcuuucaccgccacagacgcggauacgauuuguaucggcuaccacgcuaacaauagcaccgacacaguggauaccguccuggagaagaacguuacagugacccauuccgugaaucuccuggaagacucucacaacgggaaacuuugcagacugaagggaauugccccgcuccagcugggcaauuguagcaucgccggguggauucugggaaacccugagugcgaaucccucuuuucuaaaaagagcugguccuauaucgcugagacacccaauucugaaaacggcaccuguuaccccggguauuucgccgauuacgaggagcugcgggaacaacuuagcuccgucagcucuuuugagcgcuucgaaaucuuuccuaaggaguccagcuggcccaaucauacggugaccaaaggaguuacagcuucuugcucccacaagggcaaaagcucuuucuauagaaaccugcucuggcugaccgagaagaauggcuccuacccuaaccuuagcaaauccuaugugaauaacaaggaaaaggagguccuggugcucuggggaguucaucaccccucuaauauuggggaccagcgggccaucuaccacacagaaaacgcguacgugagcgucguguccagccauuauaaccgcagauuuaccccugagauugccaaacggccgaaggugcgcggccaggaagggagaaucaauuacuauuggacgcugcuggagcccggagauacaauuaucuucgaggcuaacggcaaucucauugccccuugguacgcuuuugcccugucucggggguucggauccggcaucaucaccagcaacgcgucuauggacgaaugugaugccaaaugccagacaccccaaggcgcuauuaauagcucccuuccuuuucagaacguccaccccguuaccaucggggaguguccgaaguaugugcgcucuaccaaacugagaauggugacaggacuccggaauauuccuagcauccagucccgcggccuguucggggccauugcuggauuuaucgaaggcggguggacgggaaugaucgacggcugguacggcuaucaucaccagaacgagcaagggagcggauacgccgccgaucagaagucuacccagaaugcuauuaacggcaucacaaauaaagucaacuccgugauugaaaagaugaauacccaguucacagcgguugggaaggaguucaacaaacuugagagacggauggaaaaucugaacaagaaaguggacgauggauuucucgacaucuggaccuacaacgccgagcugcugguccuccuggaaaaugagcgcacgcuugacuuccacgauagcaacgugaagaaucuguaugaaaaaguuaagucucaacucaagaacaaugcuaaagagauuggcaacgggugcuuugaguucuaccauaaguguaauaacgaaugcauggaguccgugaaaaauggcacauaugacuaccccaaguauagcgaagaguccaaacugaacagagagaagaucgauggagucaaacuugaaucuaugggcguguaccagauccuggccauuuauagcaccgucgccuccucucucgugcugcugguuagccucggggcuaucuccuuuuggaugugcagcaauggaucucugcagugucggauuugcaucuga

SEQ ID NO: 193616 - RNA, 1701 nt, Artificial Sequence
  derived and/or modified CDS sequence (opt5) from hemagglutinin__InfluenzaA__ABN50940
augaaggccaagcugcucgugcugcuuugcgcuuucaccgccacagacgcggauacgaucuguauuggcuaccacgcuaacaauagcaccgacacagucgauaccguucuggagaagaacgugacagugacccauuccgucaaucuccuggaagacucucacaacgggaaacuuugcagacugaagggaaucgccccgcuccagcugggcaauuguagcauugccggguggauccugggaaacccugagugcgaaucccucuuuucuaaaaagagcugguccuauauugcugagacacccaauucugaaaacggcaccuguuaccccggguauuucagcgauuacgaggagcugcgggaacaacuuuccagcgugucuuccuuugagcgcuucgaaaucuuuccuaaggagagcucuuggcccaaucauacgguuaccaaaggagugacagccuccugcagccacaagggcaaaucuuccuucuauagaaaccugcucuggcugaccgagaagaauggcagcuacccuaaccuuuccaaaucuuaugucaauaacaaggaaaaggaggugcugguucucuggggagugcaucaccccagcaauaucggggaccagcgggcuauuuaccacacagaaaacgccuacgucuccguggugagcucucauuauaaccgcagauuuaccccugagaucgcgaaacggccgaagguccgcgaucaggaaggcagaauuaauuacuauuggacgcugcuggagcccgaggacacaaucauuuucgaagccaacgggaaucucaucgcuccuugguacgccuuugcucugucccggggauucggcagcgggauuaucaccucuaacgccagcauggaugagugugacgcgaaaugccagacaccccaaggagccaucaauuccucucuuccuuuucagaacguucaccccgugaccauuggcgaauguccgaaguaugugcgcagcaccaaacugagaauggucacaggccuccggaauaucccuuccauucagagccgcgggcuguucggagcuaucgccggcuuuauugaagggggauggacgggcaugaucgaugggugguacggauaucaucaccagaacgaacaaggcucuggcuacgcugccgaccagaaguccacccagaaugccaucaacgggauuacaaauaaagugaacagcguuaucgagaagaugaauacccaguucacagcugugggaaaggaguucaacaaacuugaaagacggauggagaaucugaacaagaaagucgaugacggcuuucucgacauuuggaccuacaacgcggaacugcuggugcuccuggagaaugaacgcacgcuugauuuccacgacucuaacguuaagaaucuguaugagaaagugaagucccaacucaagaacaaugccaaagagaucgggaacggaugcuuugaguucuaccauaaguguaauaacgagugcauggaaagcgucaaaaauggcacauaugauuaccccaaguauuccgaggagucuaaacugaacagagaaaagauugacggggugaaacuugagagcaugggcgucuaccagauccuggcuaucuauuccaccguggccucuagccucguucugcuggugucccucggagccauuagcuuuuggaugugcucuaauggcucccugcagugucggaucugcauuuga

SEQ ID NO: 193617 - RNA, 1701 nt, Artificial Sequence; identical to SEQ ID NO: 193583
  derived and/or modified CDS sequence (opt5) from hemagglutinin__InfluenzaA__ABN50951

SEQ ID NO: 193618 - RNA, 1701 nt, Artificial Sequence
  derived and/or modified CDS sequence (opt5) from hemagglutinin__InfluenzaA__ABN50962
augaaggccaaacugcucgugcugcuuugcgcuuucaccgccacauacgcggacacgaucuguauuggcuaucacgcuaacaauagcaccgauacagucgacaccguucuggagaagaacgugacagugacccauuccgucaaucuccuggaagauucucacaacgggaaacuuugcagacugaagggaacagcuccccuccagcugggcaauuguagcguggccggguggauccugggaaacccugagugcgaaucccucuuuucuaaagagagcugguccuacauugccgaaaccccgaaucccgagaacggcacguguuauccuggguacuucgccgacuaugaggaacugcgggagcaacuuucuagcguuuccagcuuugaacgcuucgagaucuuucccaaggagucuuccuggccuaaucauaccgugacaaagggagucaccgcuagcugcucucacaacggcaaauccagcuucuacaagaaucugcucuggcugacagagaaaaacggccuuuaucccaaucugucuaaguccuacgugaacaauaaagaaaaggaaguucucgugcuguggggaguccaucacccuagcaacauuggggaucagagagccaucuaccacaccgagaacgcguauguguccguggucucuagccauuacucccggcgcuuuacgccggaaaucgccaagagacccaaaguucgggaccaggagggccgcauuaauuauuacuggacacugcucgagccuggggauaccaucauuuucgaagcuaacggaaaucugaucgcccccugguaugcuuuugcccuuagcagaggcuucgggucuggaauuaucacauccaacgcgagcaugggcgagugugacgccaagugccagaccccucaaggcgcuauuaauucuagccugcccuuucagaacgugcacccggugaccaucggggaauguccuaaauacguccgguccacaaagcuccgcauggugacgggacugagaaauauccccucuauucagagccggggccuuuucggggccaucgcuggauuuauugagggcggguggaccggaaugaucgauggcugguauggcuaccaucaccagaacgaacaaggguccggauacgccgccgacaaaaagagcacacagaaugcuauugauggcaucaccaacaaaguuaauucugugaucgagaagaugaacacacaguucaccgcggucgggaaggaguucaauaaacuggaacgcagaauggagaaccucaauaagaaaguggacgauggauuucuggacauuuggacguauaacgccgaacugcucguucugcuugagaacgaacggacacuggacuuccacgauuccaaugugaagaaccucuacgagaaagucaagaaucagcugaagaacaaugcuaaagagaucggcaacgggugcuuugaguucuaucauaaguguaauaacgaaugcauggaaagcgugaaaaauggcaccuacgacuauccuaaguacucugaggaguccaaacuuaagcgcgaaaagauugauggagucaaacuggagagcaugggcguguaucaaauccucgccauuuacuccaccguugccucuagccuggugcugcucgucucccugggggcuaucucuuuuuggaugugcagcaacggaucccuucaguguagaaucugcauuuga

SEQ ID NO: 193619 - RNA, 1701 nt, Artificial Sequence; identical to SEQ ID NO: 192982
  derived and/or modified CDS sequence (opt5) from hemagglutinin__InfluenzaA__ABN50973

SEQ ID NO: 193620 - RNA, 1701 nt, Artificial Sequence; identical to SEQ ID NO: 192327
  derived and/or modified CDS sequence (opt5) from hemagglutinin__InfluenzaA__ABN50984

SEQ ID NO: 193621 - RNA, 1701 nt, Artificial Sequence; identical to SEQ ID NO: 192328
  derived and/or modified CDS sequence (opt5) from hemagglutinin__InfluenzaA__ABN50995

SEQ ID NO: 193622 - RNA, 1701 nt, Artificial Sequence
  derived and/or modified CDS sequence (opt5) from hemagglutinin__InfluenzaA__ABN51043
augaagaccaucauugcccugagcuacauccucugccugguguucgcucagaaacuucccggcaacgacaauuccacagccacgcugugucucgggcaccaugcggucccuaacggaaccauuguuaagacaaucaccaaugaucaaauugaggugacaaacgcuaccgaacuggugcagucuagcuccacaggcgagaucugcgacucuccgcaccagauccuugauggggaaaauuguacccugauugacgcccuccugggagauccccagugcgacggcuuucaaaacaaaaagugggaucuguucgucgagagaagcaaagccuauuccaauuguuacccuuaugacgugcccgauuacgcuucucuccggagccugguugccuccagcgggacgcuugaauuuaacaaugagucuuucaacuggaccggagugacacagaauggcaccuccagcgcuugcaagcgcagaucuaacaauuccuuuuucagccggcugaacuggcucacacaucugaaguuuaaauauccugcccuuaaugucaccaugcccaacaacgagaaguucgacaaacuguacaucuggggcgugcaccauccugggacggauaaugaccagauuuuucucuaugcgcaggccucuggacgcaucacaguuuccaccaagagaagccaacagacagugauuccgaacaucggcucccggccccgcgucagagauauuccuucucggaucagcaucuacuggaccauugugaaacccggggacauccugcugauuaauuccaccggaaaccucaucgcuccucgcggcuacuucaagauuagaagcgggaagucuuccaucaugcggagcgacgcccccaucggaaaauguaauucugaaugcauuacaccgaacggcagcaucccuaaugauaagcccuuucagaacgugaaucgcauuacguauggcgcuuguccuagauacgucaaacagaacacccugaaacuugccacagggaugcggaauguucccgagaagcaaacccgcggaaucuucggcgcgauugccggguuuaucgaaaacggaugggagggcaugguggacgggugguauggauucagacaccaaaauuccgagggcaucggccaggcugccgaucugaagucuacacaggcugccauuaaccagaucaaugggaaacucaaccggcugauuggaaagaccaacgaaaaguuccaccagaucgagaaagaauuuagcgagguggaaggccgcauucaggaccuugagaaguacgucgaggauacgaaaaucgaccugugguccuauaaugccgaacuccugguggcucuggagaaccaacauacaauugaucucaccgacagcgaaaugaauaagcuguucgagagaaccaaaaagcagcuucgggaaaacgcggaggauauggggaauggaugcuuuaagaucuaccacaaaugugacaacgccugcaucggcucuauuagaaaugggacauaugaucaugacguuuaccgcgacgaggcucugaacaaucgguuccagaucaagggcguggaacucaaauccggauacaaggauuggauucuguggaucagcuuugccauuucuugcuuccuucugugugucgugcuccugggcuuuaucaugugggccugccagaaagggaacaucagauguaauauuugcaucuga

SEQ ID NO: 193623 - RNA, 1701 nt, Artificial Sequence; identical to SEQ ID NO: 193468
  derived and/or modified CDS sequence (opt5) from hemagglutinin__InfluenzaA__ABN51054

SEQ ID NO: 193624 - RNA, 1701 nt, Artificial Sequence
  derived and/or modified CDS sequence (opt5) from hemagglutinin__InfluenzaA__ABN51066
augaaggccaaacugcucgugcugcuuugcgcuuucaccgccacauacgcggacacgaucuguauuggcuaucacgcuaacaauagcaccgauacagucgacaccguucuggagaagaacgugacagugacccauuccgucaaucuccuggaagauucucacaacgggaaacuuugcagacugaagggaacagcuccccuccagcugggcaauuguagcguggccggguggauccugggaaacccugagugcgaaucccucuuuucuaaagagagcugguccuacauugccgaaaccccgaaucccgagaacggcacguguuauccuggguacuucgccgacuaugaggaacugcgggagcaacuuucuagcguuuccagcuuugaacgcuucgagaucuuucccaagaagucuuccuggccuaaucauaccgugacaaaaggagucaccgcuagcugcucucacaacggcaaguccagcuucuacaaaaaucugcucuggcugacagagaagaacggccuuuaucccaaucugucuaaauccuacgugaacaauaaggaaaaggagguucucgugcuguggggaguccaucacccuagcaacauuggggaucagagaaccaucuaccacacggaaaacgccuauguguccguggucucuagccauuacucccggcgcuuuacaccggagaucgcgaaaagacccaagguucgggaccaggaaggccgcauuaauuauuacuggacccugcucgagccuggggauacaaucauuuucgaggccaacggaaaucugaucgcucccugguaugccuuugcucuuagcagaggcuucgggucuggaauuaucaccuccaacgccagcaugggcgacugugaugcgaaaugccagaccccucaaggcgccauuaauucuagccugcccuuucagaacgugcacccggugacaaucggggaauguccuaaguacguccgguccacgaaacuccgcauggugaccggacugagaaauauccccucuauucagagccggggccuuuucggggcuaucgccggauuuauugagggcggguggacaggaaugaucgacggcugguauggcuaccaucaccagaacgaacaaggguccggauacgcugccgauaagaaaagcacccagaaugccauugacggcaucacaaacaagguuaauucugugaucgagaagaugaacacccaguucacggcugucgggaaagaguucaauaagcuggaacgcagaauggagaaccucaauaaaaagguggaugacggauuucuggacauuuggacauauaacgcggaacugcucguucugcuugagaacgaacggacccuggauuuccacgacuccaaugugaaaaaccucuacgagaaggucaagaaucagcugaaaaacaaugccaaggaaaucggcaacgggugcuuugaguucuaucauaaauguaauaacgagugcauugaaagcgugaagaauggcaccuacgauuauccuaaauacucugaggaauccaaacuuaagcgcgagaagaucgacggagucaagcuggagagcaugggcguguaucaaauucucgcuaucuacuccacaguugccucuagccuggugcugcucgucucccugggggccaucggauuuuggaugugcucuaacggcagccuucaguguagaauuugcaucuga

SEQ ID NO: 193625 - RNA, 1698 nt, Artificial Sequence; identical to SEQ ID NO: 192368
  derived and/or modified CDS sequence (opt5) from hemagglutinin__InfluenzaA__ABN51077

SEQ ID NO: 193626 - RNA, 1698 nt, Artificial Sequence; identical to SEQ ID NO: 192371
  derived and/or modified CDS sequence (opt5) from hemagglutinin__InfluenzaA__ABN51088

SEQ ID NO: 193627 - RNA, 1701 nt, Artificial Sequence
  derived and/or modified CDS sequence (opt5) from hemagglutinin__InfluenzaA__ABN51099
augaagaccaucauugcccugagcuacaucuucugccucgcucugggccaggaccuucccgggaacgauaauuccacagccacgcugugucucggacaccaugcggugccuaacggcacccuggucaaaacaauuaccaaugaccaaaucgagguuacaaacgcuaccgaacuugugcagucuagcuccacagggaagauuugcaauaacccgcacagaauccuggauggaaucgacuguacccucauugaugcccugcugggcgacccccauugcgauguguuucagaaugagacgugggaccucuucgucgaacggucuaaagccuuuagcaacuguuauccuuacgaugugcccgacuaugcuucccugcgcucucuuguugccagcuccgggacccuggaguucaucacagaaggauuuaccuggacaggcgugacccagaauggcgggagcaacgcuugcaagagaggaccuggcucuggguucuuuucccggcucaauuggcugacgaaaagcggaucuacauaccccguccuuaacgugaccaugccuaauaacgauaauuucgacaagcuguauauuuggggcguucaccauccguccacaaaccaagagcagaccagccucuacgugcaggccucugggcgcgucaccguguccacaagacggagccagcaaacgaucauucccaacaucggaucccgcccuugggugagaggccugucuagccggauuuccaucuauuggaccaucgucaagcccggcgauguucuggugauuaauagcaacgggaaucucaucgcgccucgcggauacuuuaaaaugagaacaggcaagucuuccauuaugcggagcgacgcccccaucgacaccuguauuucugagugcaucacaccgaacgggagcaucccuaaugauaaacccuuccagaacgugaauaagauuaccuacggagcuuguccuaaauaugucaagcagaacacgcugaaacuugccacaggcaugcgcaaugugcccgaaaagcagaccagagggcuguuuggagcuaucgccggcuucauugagaacggcugggaagggaugaucgacggaugguacggcuuucggcaccaaaauuccgaggggaccggacaggcggccgaucucaagucuacacaggcugccauugaccaaaucaacggcaaacugaaucgcguuaucgagaagaugaacgaaaaauuccaccagauugagaaggaguucagcgaaguggaagggagaauccaggaucuugagaaauaugucgaggacaccaagauugaucugugguccuacaaugcugaacuccugguggcccuggagaaccagcauacaaucgaccucacggauagcgaaaugaacaagcuguuugagaaaacccggagacaacuucgcgaaaaugccgaggacaugggcaacggaugcuucaagauuuaucacaaaugugauaaugcuugcaucgagucuauucggaacggcacauacgaccaugacguuuauagagaugaagcgcugaauaaccgcuuucagaucaaggggguggagcucaaauccggauacaaggacuggauccuguggauuagcuucgccaucucuugcuuucuucugugugucgugcuccugggcuucauuaugugggcuugccagcgggggaauaucagauguaacauuugcaucuga

SEQ ID NO: 193628 - RNA, 1701 nt, Artificial Sequence
  derived and/or modified CDS sequence (opt5) from hemagglutinin__InfluenzaA__ABN51110
augaagaccaucauugcccugagcuacaucuucugccucgcucugggccaggaccuucccgggaacgauaauuccacagccacgcugugucucggacaccaugcggugccuaacggcacccuggucaaaacaauuaccgacgaucaaaucgagguuacaaaugcuaccgaacuugugcagucuagcuccacagggaagauuugcaacaauccgcacagaauccuggacggaaucaacuguacccucauugaugcccugcugggcgacccccauugcgauguguuucaggacgagacgugggaucucuucgucgaacggucuaaagccuuuagcaauuguuauccuuacgacgugcccgauuaugcuucccugcgcucucuuguugccagcuccgggacccuggaguucaucacagaaggauuuaccuggacaggcgugacccagaacggcgggagcaaugcuugcaagagaggaccuggcucuggguucuuuucccggcucaacuggcugacgaaaagcggaucuacauaccccguccuuaaugugaccaugccuaacaaugacaacuucgauaagcuguauauuuggggcguucaccauccguccacaaaucaagagcagaccagccucuacgugcaggccucugggcgcgucaccguguccacaagacggagccagcaaacgaucauucccaacaucggaucccgcccuugggugagaggccugucuagccggauuuccaucuauuggaccaucgucaagcccggcgacguucuggugauuaacagcaaugggaaccucaucgcgccucgcggauacuuuaaaaugagaacaggcaagucuuccauuaugcggagcgacgcccccaucgauaccuguauuucugagugcaucacaccgaaugggagcaucccuaacgacaaacccuuccagaaugugaacaagauuaccuacggagcuuguccuaaauaugucaagcagaauacgcugaaacuugccacaggcaugcgcaacgugcccgaaaagcagaccagagggcuguuuggagcuaucgccggcuucauugagaauggcugggaagggaugaucgauggaugguacggcuuucggcaccaaaacuccgaggggaccggacaggcggccgaccucaagucuacacaggcugccauugaucaaaucaauggcaaacugaaccgcguuaucgagaagaccaaugaaaaauuccaccagauugagaaggaguucagcgaaguggaagggagaauccaggaccuugagaaauaugucgaggauacaaagauugaccugugguccuacaacgcugaacuccugguggcccuggagaaucagcauacgaucgaucucaccgacagcgaaaugaacaagcuguuugagaaaacacggagacaacuucgcgaaaacgccgaggauaugggcaauggaugcuucaagauuuaucacaaaugugacaacgcuugcaucgagucuauucggaauggcaccuacgaccaugauguuuauagagacgaagcgcugaacaaucgcuuucagaucaaggggguggagcucaaauccggauacaaggauuggauccuguggauuagcuucgccaucucuugcuuucuucugugugucgugcuccugggcuucauuaugugggcuugccagcgggggaacaucagauguaauauuugcaucuga

SEQ ID NO: 193629 - RNA, 1701 nt, Artificial Sequence
  derived and/or modified CDS sequence (opt5) from hemagglutinin__InfluenzaA__ABN51121
augaagaccaucauugcccugagcuacaucuucugccucgcucugggccaggaccuucccgggaacgauaauuccacagccacgcugugucucggacaccaugcggugccuaacggcacccuggucaaaacaauuaccgacgaucaaaucgagguuacaaaugcuaccgaacuugugcagucuagcuccacagggaagauuugcaacaauccgcacagaauccuggacggaaucaacuguacccucauugaugcccugcugggcgacccccauugcgauguguuucaggacgagacgugggaucucuucgucgaacggucuaaagccuuuagcaauuguuauccuuacgacgugcccgauuaugcuucccugcgcucucuuguugccagcuccgggacccuggaguucaucacagaaggauuuaccuggacaggcgugacccagaacggcgggagcaaugcuugcaagagaggaccuggcucuggguucuuuucccggcucaacuggcugacgaaaagcggaucuacauaccccguccuuaaugugaccaugccuaacaaugacaacuucgauaagcuguauauuuggggcguucaccauccguccacaaaucaagagcagaccagccucuacgugcaggccucugggcgcgucaccguguccacaagacggagccagcaaacgaucauucccaacaucggaucccgcccuugggugagaggccugucuagccggauuuccaucuauuggaccaucgucaagcccggcgacguucuggugauuaacagcaaugggaaccucaucgcgccucgcggauacuuuaaaaugagaacaggcaagucuuccauuaugcggagcgacgcccccaucgauaccuguauuucugagugcaucacaccgaaugggagcaucccuaacgacaaacccuuccagaaugugaacaagauuaccuacggaacguguccuaaauaugucaagcagaauacacugaaacuugcuaccggcaugcgcaacgugcccgaaaagcagaccagagggcuguuuggagccaucgcuggcuucauugagaauggcugggaagggaugaucgauggaugguacggcuuucggcaccaaaacuccgaggggacaggacaggccgcggaccucaagucuacccaggccgcuauugaucaaaucaauggcaaacugaaccgcguuaucgagaagacaaaugaaaaauuccaccagauugagaaggaguucagcgaaguggaagggagaauccaggaccuugagaaauaugucgaggauacgaagauugaccugugguccuacaacgccgaacuccugguggcucuggagaaucagcauaccaucgaucucacagaccuggaaaugaacaaacuuuuugagaagacccggagacaacugcgcgaaaacgccgaggauaugggcaauggaugcuucaagauuuaucacaaaugugacaacgccugcaucgagagcauucggaauggcacauacgaccaugauguuuauagagacgaagcucucaacaaucgcuuucagaucaaggggguggagcugaaaucuggauacaaggauuggauccuuuggauuuccuucgcgaucagcugcuuucugcucugugucgugcugcugggcuucauuaugugggccugccagcgggggaacaucagauguaauauuugcaucuga

SEQ ID NO: 193630 - RNA, 1701 nt, Artificial Sequence
  derived and/or modified CDS sequence (opt5) from hemagglutinin__InfluenzaA__ABN51132
augaagaccaucauugcccugagcuacaucuucugccucgcucugggccaggaccuucccgggaacgauaauuccacagccacgcugugucucggacaccaugcggugccuaacggcacccuggucaaaacaauuaccgacgaucaaaucgagguuacaaaugcuaccgaacuugugcagucuagcuccacagggaagauuugcaacaauccgcacagaauccuggacggaaucaacuguacccucauugaugcccugcugggcgacccccauugcgauguguuucaggacgagacgugggaucucuucgucgaacggucuaaagccuuuagcaauuguuauccuuacgacgugcccgauuaugcuucccugcgcucucuuguugccagcuccgggacccuggaguucaucacagaaggauuuaccuggacaggcgugacccagaacggcgggagcaaugcuugcaagagaggaccuggcucuggguucuuuucccggcucaacuggcugacgaaaagcggaucuacauaccccguccuuaaugugaccaugccuaacaaugacaacuucgauaagcuguauauuuggggcguucaccauccguccacaaaucaagagcagaccagccucuacgugcaggccucugggcgcgucaccguguccacaagacggagccagcaaacgaucauucccaacaucggaucccgcccuugggugagaggccugucuagccggauuuccaucuauuggaccaucgucaagcccggcgacguucuggugauuaacagcaaugggaaccucaucgcgccucgcggauacuuuaaaaugagaacaggcaagucuuccauuaugcggagcgacgccucuaucgauaccuguauuagcgagugcaucacacccaauggguccaucccgaacgacaaaccuuuccagaaugugaacaagauuaccuacggagcuugucccaaauaugucaagcagaauacgcugaaacuugccacaggcaugcgcaacgugccugaaaagcagaccagagggcuguuuggagcuaucgccggcuucauugagaauggcugggaagggaugaucgauggaugguacggcuuucggcaccaaaacucugaggggaccggacaggcggccgaccucaagagcacacaggcugccauugaucaaaucaauggcaaacugaaccgcguuaucgagaagaccaaugaaaaauuccaccagauugagaaggaguucuccgaaguggaagggagaauccaggaccuugagaaauaugucgaggauacaaagauugaccuguggagcuacaacgcugaacuccugguggcccuggagaaucagcauacgaucgaucucaccgacucugaaaugaacaagcuguuugagaaaacacggagacaacuucgcgaaaacgccgaggauaugggcaauggaugcuucaagauuuaucacaaaugugacaacgcuugcaucgaguccauucggaauggcaccuacgaccaugauguuuauagagacgaagcgcugaacaaucgcuuucagaucaaggggguggagcucaaaagcggauacaaggauuggauccuguggauuucuuucgccaucuccugcuuucuucugugugucgugcuccugggcuucauuaugugggcuugccagcgggggaacaucagauguaauauuugcaucuga

SEQ ID NO: 193631 - RNA, 1698 nt, Artificial Sequence; identical to SEQ ID NO: 192872
  derived and/or modified CDS sequence (opt5) from hemagglutinin__InfluenzaA__ABN51143

SEQ ID NO: 193632 - RNA, 1701 nt, Artificial Sequence
  derived and/or modified CDS sequence (opt5) from hemagglutinin__InfluenzaA__ABN51154
augaagaccaucauugcccugagcuacauccucugccugguguucacacagaaacuucccggcaacgacaauuccacggcuacccugugucucgggcaccaugccgucccuaacggaacacugguuaagaccauuacaaaugaucaaaucgaggugaccaacgcgacagaacuugugcagucuagcuccaccggcagaauuugcgacucuccgcaccagauccuggauggggagaauuguacgcucaucgacgcucugcugggagauccccauugcgacggcuuucagaacaaagaaugggaucucuucgucgagcggagcaaggccuauuccaauuguuacccuuaugacgugcccgauuacguuucucugcgcagccuuguggccuccagcgggacccuggaauuuaacaaugagucuuucaacuggacaggagucgcucaaaauggcaccuccagcgccugcaaaagacggucugacaaguccuuuuucagccgccucaacuggcugcaccagcuuaaguauaaauacccugcucugaaugugacaaugcccaacaaugagaaguuugauaaacucuauauuuggggcguucaucacccugggaccgacucugaucagaucucccuguacgcccaggcgagcggaagagugacggucuccacaaagcggucucaacagaccgugauuccgaacaucggcagcgggcccugggugcgcggagucuccagcagaauuucuaucuacuggacaauuguuaaaccuggcgacauccugcucaucaacuccaccgggaaucugauugcuccccggggauauuucaagauccgcagcggcaagucuagcauuaugagauccgacgccccuaucggcaaauguaacucugaaugcauuacccccaaugggagcaucccgaacgauaagccuuuucagaaugugaaccggaucacauacggacccuguccucgcuaugugaaacagaauacgcuuaagcuggccaccggcaugagaaacguccccgagaaacaaacacgggggauuuucggagcuaucgccggcuuuauugaaaaugggugggagggaaugauggacggcugguacggcuuccgccaccagaacuccgaggggaccggacaggcggccgaucucaagagcacacaagcugccaucaaucagauuaacggcaaacugaauagacuuaucgaaaagaccaacgagaaguuucaucagaucgaaaaagaguucucugaaguggaggggcggauucaggaccuggagaaguauguugaagauacgaaaaucgaccucugguccuacaaugcugagcugcugguggcccucgaaaaccaacacacaauugaucugaccgacagcgagaugaacaaacuuuucgaaagaaccaagaagcagcugcgcgagaaugccgaggauaugggaaacggcugcuuuaagaucuaucauaaaugugacaaugcuugcauugggucuauccggaacggcacauacgaucacgacgucuacagagacgaagcgcucaauaaccgcuuccagauuaagggaguggagcugaaauccggcuauaaggauuggauccuuuggaucagcuuugccauuuccugcuuccugcucuguaucguucugcugggguuuauuaugugggcuugccagaaaggaaauauccgguguaacauuugcaucuga

SEQ ID NO: 193633 - RNA, 1701 nt, Artificial Sequence
  derived and/or modified CDS sequence (opt5) from hemagglutinin__InfluenzaA__ABN59390
augaagaccaucauugcccugagcuacaucauuugccucguguucgcucagaaacugcccggcaacgacaauuccacagccacgcuuugucuggggcaccaugcggucccuaacggaaccaucguuaagacaauuaccaaugaucaaaucgaggugacaaacgcuaccgaacucgugcagucuagcuccacaggcgagaucugcgacucuccgcaccagauucuggauggggaaaauuguacccuuaucgacgcccugcucggagauccccagugcgacggcuuucaaaacaaaaagugggaucuguucgucgagagaagcaaagccuauuccaauuguuacccuuaugacgugcccgauuacgcuucucugcggagccucguugccuccagcgggacgcuggaauuuaacaaugagucuuucaacuggaccggagugacacagaauggcaccuccagcgcuugcaagcgcagaucuaacaauuccuuuuucagccggcuuaacuggcugacacaucucaaguuuaaauauccugcccugaaugucaccaugcccaacaacgagaaguucgacaaacuuuacauuuggggcgugcaccauccugggacggauaaugaccagaucuuucuguaugcgcaggccucuggacgcauuacaguuuccaccaagagaagccaacagacagugaucccgaacauuggcucccggccccgcgucagaaauaucccuucucggaucagcauuuacuggaccaucgugaaacccggggauauucuccugaucaacuccaccggaaaucugauugcuccucgcggcuacuucagaauccggagcgggaagucuuccaucaugcgcagcgacgcccccauuggaaaguguaacucugaaugcaucacaccgaauggcagcauuccuaacgacaaacccuuucagaaugugaacagaaucacguauggcgcuuguccucgguacgucaagcagaauacccucaaacuggccacagggaugcgcaacguucccgagaagcaaaccagaggaauuuucggcgcgaucgccggguuuaucgaaaauggaugggagggcaugguggaugggugguauggauuccggcaccagaacuccgagggcauuggccaggcugccgaccuuaaaucuacacaagcugccaucaaucagauuaacgggaagcugaacagacucaucggaaaaaccaaugaaaaguuccaccagauugagaaggaauuuagcgagguggaaggccgcauccaggaucuggagaaauacgucgaggacacgaagauugaucuuugguccuauaacgccgaacugcucguggcucuggagaaucaacauacaaucgaccugaccgauagcgaaaugaacaaacucuucgagcggaccaagaaacagcugagagaaaaugcggaggacauggggaacggaugcuuuaagaucuaccacaagugugauaaugccugcauuggcucuauccgcaacgggacauaugaccaugauguuuaccgggacgaggcucuuaauaacagauuccagauuaaaggcguggaacugaaguccggauacaaagacuggauccucuggauuagcuuugccaucucuugcuuccugcuuugugucgcccugcucggcuuuaucaugugggcuugccagaaggggaauauucgcuguaacaucugcauuuga

SEQ ID NO: 193634 - RNA, 1701 nt, Artificial Sequence
  derived and/or modified CDS sequence (opt5) from hemagglutinin__InfluenzaA__ABN59401
augaaggccaaacugcucgugcugcuuugcgcucugagcgccaccgacgcggauacaaucuguauuggcuaccacgcuaacaauuccacggacaccgucgauacaguucucgagaagaacgugaccgugacacauucugucaaucugcuugaagacagccacaacgggaaacugugcagacucaagggaaucgccccgcugcagcugggcaaauguaauauugccggguggauccucggaaacccugagugcgaaucccuguucucuaaaaagagcugguccuauauugcugagacccccaauucugaaaacggcacauguuaccccggguauuuugccgauuacgaggagcuucgggaacaacugagcuccgugagcucuuucgagcgcuuugaaaucuucccuaaggagagauccuggcccaagcauaauaucacccggggaguuacggcugccugcagccacaaaggcaagucuuccuuuuaucgcaaccuccuguggcuuaccgagaaaaauggcagcuacccuaaccugaauaagucuuaugugaacaauaaggaaaaagagguccucgugcuguggggaguucaucaccccuccaacauugaagaccagaagacacuguacagaaaagagaacgcguacgugagcgucguguccucuaauuauaaccggcgcuucaccccugaaaucgccgagagaccgaaggugcgggggcaggcuggccgcauuaauuacuauuggacacuccuggagcccggggauaccaucauuuuugaagccaacggaaaucuuaucgcuccuuggcacgccuucgcgcugagcagaggcuuuggguccggaauuaucacgagcaacgccucuauggacgagugugauacaaaaugccagacaccccaaggcgcuaucaauuccagccucccuuuccagaacauucaucccgucaccaucggcgaauguccgaaguacguucggucuaccaaacugcgcauggugaccgggcuuagaaauauuccuagcauccagucccggggacuguuuggcgccauugcuggguucaucgagggaggcuggacagggaugaucgacggaugguauggcuaccaccaucagaacgaacaaggcucuggguaugccgccgaucaaaagagcacgcagaaugcuauuaacggaaucaccaauaaggugaacuccgucauugagaaaaugaauacacaguuuaccgcggugggcaaggaguucaacaaacucgaaaagcgcauggagaaccugaauaaaaagguugacgauggguuccuggacaucuggacauacaacgccgaacuccuggugcuucuggagaaugaaagaacccucgacuuucacgauagcaacgucaagaaucuguacgagaaagugaagucucagcuuaaaaacaaugcuaaggagauuggaaacggcugcuucgaauuuuaucacaaauguaauaacgagugcauggaauccguuaagaaugggacguacgacuaucccaaguacagcgaggagucuaaacugaaccgggaaaagaucgauggcgugaaacucgaguccaugggagucuaucagauccuggccauuuacagcacaguggccuccucucugguccuccuggugagccuuggcgcuaucuccuucuggaugugcucuaaugggagccugcaguguagaauuugcaucuga

SEQ ID NO: 193635 - RNA, 1698 nt, Artificial Sequence
  derived and/or modified CDS sequence (opt5) from hemagglutinin__InfluenzaA__ABN59412
augaaggccaaccugcucgugcugcuuugcgcucuggccgcggcugacgccgauaccaucuguauuggcuaccacgccaauaacagcacagacacggucgauaccguucucgagaaaaaugugacagugacccauuccgucaaccugcuugaagacucucacaaugggaagcugugcagacucaaaggaaucgcuccccugcagcugggcaaguguaacauugccggguggcuccugggaaauccugagugcgauccgcuucugcccgugcggagcugguccuauaucguugaaacaccuaacucugagaauggcauuuguuaccccggggacuucaucgauuaugaagaacuccgcgagcaacugagcuccgugucuagcuuugaaagauucgagaucuuuccuaaagaauccagcuggcccaaccauaauaccaacggagucacagcugccugcucucacgagggcaaguccagcuucuaccggaaucuucuguggcucaccgagaaggaaggcucuuauccuaaacugaagaacuccuacgugaauaaaaaggggaaagagguucuggugcucuggggcauucaucacccgcccaacagcaaggaacagcagaaccuguaucagaaugagaacgcguacgucucuguggugacguccaauuacaaccgcagauuuaccccugaaaucgccgagcggcccaagguccgcgaccaagcuggaagaaugaauuauuacuggacacuucugaaaccuggggauaccauuaucuucgaggccaacggaaaucucauugcucccauguaugccuuugcgcugagccggggcuucggguccggaaucauuacaucuaacgccagcaugcacgaauguaauaccaagugccagacgccgcuuggcgcuaucaacuccagccugccuuaccagaauauccaucccguuacaauuggcgaguguccuaaauaugugcgcucugccaagcucagaauggugaccgggcugcggaacauccccuccauucagagccgcggacuguuuggcgcuaucgccggguucauugaaggaggcuggacagggaugaucgacggaugguacggcuaucaccaucaaaaugagcagggcucuggguacgccgcugaucagaaaagcacccagaacgcgaucaauggaauuaccaacaaggucaacacagugaucgagaaaaugaauauucaauuuacggccguuggcaaggaguucaacaagcucgagaaaagaauggaaaaucugaacaagaaaguggacgauggguuucuugacaucuggaccuacaaugcugagcugcucguccugcuugaaaacgagcggacacuggaguuccacgacuccaaugugaagaaccucuaugaaaaaguuaagucucagcugaagaauaacgccaaagagauuggaaauggcugcuucgaauuuuaccacaagugugauaacgagugcauggaaagcgugcgcaaugggaccuaugacuaccccaaauauuccgaggagagcaagcugaacagagaaaaagucgauggcgugaagcucgagucuaugggaaucuaccagauccuggccauuuauuccacagucgcuagcucucuugugcugcucguuucccugggcgccaucagcuucuggaugugcuccaaugggucucugcaaugucggauuugcaucuga

SEQ ID NO: 193636 - RNA, 1701 nt, Artificial Sequence
  derived and/or modified CDS sequence (opt5) from hemagglutinin__InfluenzaA__ABN59423
augaaggccaaacugcucgugcugcuuugcgcucugagcgccaccgacgcggauacaaucuguauuggcuaccacgcuaacaauuccacggacaccgucgauacaguucucgagaagaacgugaccgugacacauucugucaaucugcuugaagacagccacaacgggaaacugugcagacucaagggaaucgcuccccugcagcugggcaaauguuccauugccggguggauccucggaaauccugagugcgaaucucuguucagcaagaaguccuggucuuauauugccgagaccccgaacagcgaaaauggcacauguuaccccggguauuuugccgauuacgaggagcuucgggaacaacuguccagcgugucuuccuucgagcgcuuugaaaucuucccuaaagagagaagcuggcccaagcauaacguuacccggggagugacggcuucuugcucccacaaaggcaagagcucuuuuuaucgcaaucuccuguggcuuaccgagaaaaacggcuccuacccuaaucugagcaaguccuaugucaacaauaaggaaaaagaggugcucguucuguggggagugcaucaccccucuaacaucgaaaaucagaagacaauuuacagaaaagagaacgccuacgucagcgugguguccagcaacuauaaucggcgcuucaccccugaaaucgcggagagaccgaagguccgggaccaggaggggcgcauuaacuacuauuggacacugcucgaacccggcgauaccaucauuuuugaggccaaugggaaccugaucgcuccuugguacgccuucgcucuuucuagaggauuuggcuccgggauuaucacgagcaaugccucuauggacgaaugugauacaaaaugccagacaccccaaggagcgaucaacagcucccugccuuuccagaauguucaccccgugaccauuggcgaguguccgaaguaugugcggucuaccaaacuccgcauggucaccggccugagaaacaucccuagcauucagucccgggggcuuuuuggagccaucgcuggcuucauugaagggggauggacaggcaugaucgacgggugguacggauaucaucaccagaaugagcaaggcagcggcuacgccgcugaucagaagucuacgcagaacgccaucaaugggauuaccaacaagguuaauuccgugaucgagaaaaugaacacacaguuuaccgccgugggaaaggaguucaauaaacuggaaaagcgcauggaaaaccucaacaaaaaggucgacgauggcuuccuggacauuuggacauacaaugcugagcugcucgugcugcuugaaaacgagagaacccuggacuuucaugauagcaauguuaagaaccucuaugagaaagugaagucucaacugaaaaauaacgcgaaggaaaucgggaauggaugcuucgaguuuuaccacaaauguaacaaugaaugcauggaguccgucaagaacggcacguaugacuaccccaaguauagcgaggaauccaaacuuaaucgggagaagauugauggggugaaacuggaaucuaugggcgucuaccagauccucgccaucuauagcacaguggcuuccucucugguucugcucgugagccugggagccauuuccuucuggaugugcagcaacggcucucuucaguguagaaucugcauuuga

SEQ ID NO: 193637 - RNA, 1701 nt, Artificial Sequence; identical to SEQ ID NO: 192838
  derived and/or modified CDS sequence (opt5) from hemagglutinin__InfluenzaA__ABO32656

SEQ ID NO: 193638 - RNA, 1701 nt, Artificial Sequence
  derived and/or modified CDS sequence (opt5) from hemagglutinin__InfluenzaA__ABO32667
augaagaccaucauugcccugagcuacauccucugccugguguucgcucagaaacuucccggcaacgacaauuccacagccacgcugugucucgggcaccaugcggucccuaacggaacccugguuaagacaauuaccaaugaucaaaucgaggugacaaacgcuaccgaacuugugcagucuagcuccacaggcgggauuugcgacucuccgcaccagauccuggauggagagaauuguacccucaucgacgcccugcugggcgauccccauugcgacggguuucagaacaaagaaugggaucucuucgucgagagaagcaaggccuauuccaauuguuacccuuaugacgugcccgauuacgcuucucugcggagccuuguugccuccagcggaacgcuggaauuuaacaaugagucuuucaacuggaccggcguggcucaaaauggcacauccagcgccugcaaacgcagaucuaacaaguccuuuuucagccggcucaauuggcugcaccagcuuaaguauaaauacccugcgcugaacgucaccaugcccaauaacgagaaguuugacaaacucuauauuuggggagugcaucacccuucuacagauuccgaccagaucagccuguacgcccaggcuuccgggcgcguuaccgugucuacgaagagaagccaacagacagucauuccgaacaucggcucccggcccugggugcgcgaugugagcucuagaauuuccaucuacuggaccauugucaaaccuggggacauccugcucaucaauagcacaggaaaccugauugcuccccggggcuauuucaagauccgcucuggaaagagcuccauuaugagaucugacgccccuaucgggaaauguaauagcgaaugcauuacccccaacggcuccaucccgaaugauaagccuuuucagaacguuaaucggaucaccuacggcgccuguccccgcuaugugaaacagaacacacuuaagcuggcgacggggaugagaaaugugccugagaaacaaacccggggaauuuucggcgccaucgcuggguuuauugaaaacggaugggagggcauggucgacgggugguacggauuccgccaccagaauagcgagggcacaggccaggccgcugaucucaagucuacccaagccgccaucaaccagauuaaugggaaacugaacagacuuaucggaaagacaaaugaaaaguuucaucagaucgagaaagaguucuccgaaguggaaggccggauucaggaccuggagaaguauguugaggauaccaaaaucgaccucuggagcuacaacgcugaacugcugguggcgcucgagaaccaacacacgauugaucugacagacucugaaaugaauaaacuuuucgagagaaccaagaagcagcugcgcgaaaacgccgaggauauggggaauggaugcuuuaagaucuaucauaaaugugacaacgcuugcauuggcuccauccggaaugggaccuacgaucacgacgucuacagagacgaggcccucaacaaucgcuuccagauuaagggcguggaacugaaaagcggauauaaggauuggauccuuuggaucuccuuugccauuucuugcuuccugcucuguguugugcugcugggcuuuaucaugugggcuugccagaaagggaacauucgguguaauaucugcauuuga

SEQ ID NO: 193639 - RNA, 1698 nt, Artificial Sequence
  derived and/or modified CDS sequence (opt5) from hemagglutinin__InfluenzaA__ABO32678
augaaggugaaacugcucguccugcuuugcaccuucacagccacguacgcugacaccaucuguauuggcuaucacgccaacaauagcacagauaccguugacacagugcuggagaagaacgugaccgucacacauuccgugaaucuccuggaagauucucacaacgggaaacuuugccugcucaagggaaucgcgccccugcagcugggcaauuguagcguugcuggguggauucucggaaacccugagugcgaacugcuuaucuccaaagagucuuggagcuacauuguggaaaccccgaaucccgagaacggcacguguuauccuggguacuuugccgacuaugaggaacugagagagcaacucuccucugucagcuccuucgaacgguuugagaucuuccccaaggagagcucuuggccuaaucauaccgugacaggaguuuccgccagcugcucucacaacggcaaguccagcuuuuaccgcaaucugcuuuggcugaccggcaaaaacgggcucuaucccaaucugucuaaguccuacgcuaacaauaaagaaaaggaggugcugguccucuggggagugcaucacccuccgaacaucggcgaucagagagcccuguaccacacagaaaacgcuuaugugagcgucguuuccucucauuacagccggcgcuucacccccgagauugccaaaagaccuaaggugcgggaccaggaagggcgcaucaauuauuacuggacgcuucuggagcccggagauacaauuaucuuugaggcgaacggcaaucucauugccccuagauucgcuuuugcccugucccggggguucggaagcggcaucauuaccucuaacgcucccauggacgaaugugaugccaagugccagacaccgcaaggcgcgaucaauuccagccuuccuuuucagaacgugcaccccgucaccaucggggaguguccuaaauaugugcgcucugccaagcugagaauggcuaccggacuccggaauauucccagcauccagucccgcggccuguucggggccauugcuggauuuaucgaaggcggguggacaggaaugguugacggcugguacggcuaucaucaccagaacgagcaagggucuggauacgccgccgaucagaaaagcacgcagaaugcuauuaacggcaucaccaauaaggugaacuccgucaucgaaaagaugaauacacaguucaccgcgguggggaaagaguucagcaaacuggagagacggauggaaaaccuccacaagaagguugacgauggauuucuggacauuuggacauacaaugccgagcuucuggugcuccuggaaaacgagcgcacccuugacuuccaugauucuaacgucaaaaaucuguaugaaaaggugaaaucccaacucaagaacaaugcuaaagagaucggcaacgggugcuuugaguucuaccacaaguguaaugacgaaugcauggagagcgucaagaacggcacguaugauuaccccaaauauucugaagaguccaagcugaauagagagaaaauugacggagugaagcuggaaagcaugggcguuuaccagauccucgccauuuauuccacaguggccucuagccugguccuucuggugucccucggggcuaucucuuuuuggaugugcagcaacggaucccugcagugucggaucugcauuuga

SEQ ID NO: 193640 - RNA, 1701 nt, Artificial Sequence
  derived and/or modified CDS sequence (opt5) from hemagglutinin__InfluenzaA__ABO32692
augaagaccaucauugcccugagcuacauccucugccugguguucgcucagaaacuucccggcaacgacaauuccacagccacgcugugucucgggcaccaugcggucccuaacggaaccauuguuaagacaaucaccaaugaucaaauugaggugacaaacgcuaccgaacuggugcagucuagcuccacaggcgggaucugcgacucuccgcaccagauccuugauggagagaauuguacccugauugacgcccuccugggcgauccccagugcgacggguuucaaaacaaaaagugggaucuguucgucgaaagaagcaaagccuauuccaauuguuacccuuaugacgugcccgauuacgcuucucuccggagccugguugccuccagcggaacgcuugaguuuaacaaugaaucuuucaacuggaccggcgugacacagaauggcaccuccagcgcuugcaagcgcagaucuaacaauuccuuuuucagccggcugaacuggcucacacaucugaaguuuaaauauccugcccuuaaugucaccaugcccaacaacgagaaguucgacaaacuguacaucuggggagugcaccauccugggacggauaaugaccagauuuuucucuaugcgcaggccucuggccgcaucacaguuuccaccaagagaagccaacagacagugauuccgaacaucgggucccggccccgcgucagaaauauuccuucucggaucagcaucuacuggaccauugugaaacccggagauauccugcugauuaacuccaccggcaaucucaucgcuccucgcggguacuucaagauuagaagcggaaagucuuccaucaugcggagcgacgcccccaucggcaaauguaacucugagugcauuacaccgaauggcagcaucccuaacgacaagcccuuucagaaugugaaccgcauuacguauggggcuuguccuagauacgucaaacagaauacccugaaacuugccacaggaaugcggaacguucccgaaaagcaaacccgcggcaucuucggggcgauugccggauuuaucgagaauggcugggaagggaugguggauggaugguauggcuucagacaccagaacuccgagggcaucgggcaggcugccgaccugaagucuacacaagcugccauuaaucagaucaacggaaaacucaaccggcugauuggcaagaccaaugagaaguuccaccagaucgaaaaagaguuuagcgaaguggaggggcgcauucaggaucuugaaaaguacgucgaggacacgaaaaucgaucugugguccuauaacgccgagcuccugguggcucuggaaaaucaacauacaauugaccucaccgauagcgagaugaacaagcuguucgaaagaaccaaaaagcagcuucgggagaaugcggaagacaugggaaacggcugcuuuaagaucuaccacaaaugugauaaugccugcaucgggucuauuagaaacggcacauaugaccaugauguuuaccgcgacgaggcucugaauaaccgguuccagaucaagggaguggagcucaaauccggcuacaaggacuggauucuguggaucagcuuugccauuucuugcuuccuucugugugucgugcuccugggguuuaucaugugggccugccagaaaggaaauaucagauguaacauuugcaucuga

SEQ ID NO: 193641 - RNA, 1701 nt, Artificial Sequence; identical to SEQ ID NO: 193505
  derived and/or modified CDS sequence (opt5) from hemagglutinin__InfluenzaA__ABO32751

SEQ ID NO: 193642 - RNA, 1701 nt, Artificial Sequence; identical to SEQ ID NO: 193505
  derived and/or modified CDS sequence (opt5) from hemagglutinin__InfluenzaA__ABO32762

SEQ ID NO: 193643 - RNA, 1701 nt, Artificial Sequence; identical to SEQ ID NO: 193527
  derived and/or modified CDS sequence (opt5) from hemagglutinin__InfluenzaA__ABO32775

SEQ ID NO: 193644 - RNA, 1701 nt, Artificial Sequence; identical to SEQ ID NO: 192315
  derived and/or modified CDS sequence (opt5) from hemagglutinin__InfluenzaA__ABO32790

SEQ ID NO: 193645 - RNA, 1701 nt, Artificial Sequence
  derived and/or modified CDS sequence (opt5) from hemagglutinin__InfluenzaA__ABO32803
augaagaccaucauugcccugagcuacauccucugccugguguucgcucagaaacuucccggcaacgacaauuccacagccacgcugugucucgggcaccaugcggucccuaacggaaccauuguuaagacaaucaccaaugaucaaauugaggugacaaacgcuaccgaacuggugcagucuagcuccacaggcgggaucugcgacucuccgcaccagauccuugauggagagaauuguacccugauugacgcccuccugggcgauccccagugcgacggguuucaaaacaaaaagugggaucuguucgucgaaagaagcaaagccuauuccaauuguuacccuuaugacgugcccgauuacguuucucuccggagccugguggcuuccagcggaacgcuugaguuuaacaaugaaucuuucaacuggaccggcgucacacagaauggcaccuccagcgccugcaagcgcagaucuaacaauuccuuuuucagccggcugaacuggcucacacaucugaaguuuaaauauccugcucuuaaugugaccaugcccaacaacgagaaguucgacaaacuguacaucuggggaguucaccauccugggacggauaaugaccagauuucucucuaugcccaggcguccggccgcaucacagugagcaccaagagaucccaacagacagucauuccgaacaucgggucucggccccgcgugagagauauuccuagccggaucuccaucuacuggaccauugugaaacccggagacacccugcugaucaauagcacaggcaaccucauugccccucgcggguacuuuaagaucagaucuggaaaguccagcauuaugcggucugacgcucccaucgauaaauguaauagcgagugcaucacgccgaacggcuccauuccuaaugacaagcccuuccagaacgucaaucgcaucaccuauggcgccuguccuagauacguuaaacagaacacacugaaacuugcuaccgggaugcggaaugugcccgaaaaacaaacacgcggaauuuuuggcgccaucgcgggguucauugagaacggaugggaaggcaugguggaugggugguauggauuuagacaccagaauagcgagggcaucggccaggccgcugaccugaagucuacccaagccgcuaucaaccagauuaaugggaaacucaaccggcugaucggaaagacgaacgagaaguuccaccagauugaaaaagaguucuccgaagucgagggcagaauccaggaucuugaaaaguacguggaggacacaaaaauugaucuguggagcuauaaugccgagcuccugguugcccuggaaaaccaacauaccaucgaccucaccgauucugagaugaauaagcuguuugaacgcacaaagaagcagcuucgggagaacgcugaagacauggggaauggaugcuucaagauuuaccacaaaugugauaacgcgugcaucggcuccaucagaaaugggaccuaugaccaugacguguaccgcgaugaggcccugaacaaucgguuucagauuaagggcgucgagcucaaaagcggauacaaggacuggauccuguggauuucuuucgcuaucuccugcuuucuucuguguguggcccuccugggcuucauuaugugggccugccagaaagggaacaucagauguaauaucugcauuuga

SEQ ID NO: 193646 - RNA, 1701 nt, Artificial Sequence; identical to SEQ ID NO: 192705
  derived and/or modified CDS sequence (opt5) from hemagglutinin__InfluenzaA__ABO32816

SEQ ID NO: 193647 - RNA, 1701 nt, Artificial Sequence; identical to SEQ ID NO: 192328
  derived and/or modified CDS sequence (opt5) from hemagglutinin__InfluenzaA__ABO32827

SEQ ID NO: 193648 - RNA, 1701 nt, Artificial Sequence
  derived and/or modified CDS sequence (opt5) from hemagglutinin__InfluenzaA__ABO32838
augaagaccaucauugcccugagcuacauccucugccugguguucgcucagaaacuucccggcaacgacaauuccacagccacgcugugucucgggcaccaugcggucccuaacggaaccauuguuaagacaaucaccaaugaucaaauugaggugacaaacgcuaccgaacuggugcagucuagcuccacaggcgggaucugcgacucuccgcaccagauccuugauggagagaauuguacccugauugacgcccuccugggcgauccccagugcgacggguuucaaaacaaaagaugggaucuguucgucgaacggagcaaggccuauuccaauuguuacccuuaugacgugcccgauuacgcuucucuccgcagccugguugccuccagcggaacgcuugaguuuaacaaugaaucuuucaacuggaccggcgugacacagaauggcaccuccagcgcuugcaaaagacggucuaacaauuccuuuuucagccgccugaacuggcucacacaucugaaguuuaaguauccugcccuuaaugucaccaugcccaacaacgagaaauucgacaagcuguacaucuggggagugcaccauccugggacggauaaugaccagauuuuucucuaugcgcaggccucuggcagaaucacaguuuccaccaaacggagccaacagacagugauuccgaacaucgggucccgccccagaguccggaauauuccuucucgcaucagcaucuacuggaccauugugaagcccggagauauccugcugauuaacuccaccggcaaucucaucgcuccuagaggguacuucaaaauucggagcggaaagucuuccaucaugcgcagcgacgcccccaucggcaaguguaacucugagugcauuacaccgaauggcagcaucccuaacgacaaacccuuucagaaugugaacagaauuacguauggggcuuguccucgguacgucaagcagaauacccugaaacuugccacaggaaugcgcaacguucccgaaaagcaaaccagaggcaucuucggggcgauugccggauuuaucgagaauggcugggaagggaugguggauggaugguauggcuuccggcaccagaacuccgagggcaucgggcaggcugccgaccugaaaucuacacaagcugccauuaaucagaucaacggaaagcucaacagacugauuggcaaaaccaaugagaaguuccaccagaucgaaaaggaguuuagcgaaguggaggggcgcauucaggaucuugaaaaauacgucgaggacacgaagaucgaucugugguccuauaacgccgagcuccugguggcucuggaaaaucaacauacaauugaccucaccgauagcgagaugaacaaacuguucgaacggaccaagaaacagcuuagagagaaugcggaagacaugggaaacggcugcuuuaagaucuaccacaagugugauaaugccugcaucgggucuauucgcaacggcacauaugaccaugauguuuaccgggacgaggcucugaauaacagauuccagaucaaaggaguggagcucaaguccggcuacaaagacuggauucuguggaucagcuuugccauuucuugcuuccuucugugugucgcccuccugggguuuaucaugugggcuugccagaagggaaauauccgcuguaacauuugcaucuga

SEQ ID NO: 193649 - RNA, 1701 nt, Artificial Sequence; identical to SEQ ID NO: 193648
  derived and/or modified CDS sequence (opt5) from hemagglutinin__InfluenzaA__ABO32849

SEQ ID NO: 193650 - RNA, 1701 nt, Artificial Sequence
  derived and/or modified CDS sequence (opt5) from hemagglutinin__InfluenzaA__ABO32860
augaagaccaucauugcccugagcuacauccucugccugguguucgcucagaaacuucccggcaacgacaauuccacagccacgcugugucucgggcaccaugcggucccuaacggaaccauuguuaagacaaucaccaaugaucaaauugaggugacaaacgcuaccgaacuggugcagucuagcuccacaggcgggaucugcgacucuccgcaccagauccuugauggagagaauuguacccugauugacgcccuccugggcgauccccagugcgacggguuucaaaacaaaagaugggaucuguucgucgaacggagcaaggccuauuccaauuguuacccuuaugacgugcccgauuacgcuucucuccgcagccugguugccuccagcggaacgcuugaguuuaacaaugaaucuuucaacuggaccggcgugacacagaauggcaccuccagcgcuugcaaaagacggucuaacaauuccuuuuucagccgccugaacuggcucacacaucugaaguuuaaguauccugcccuuaaugucaccaugcccaacaacgagaaauucgacaagcuguacaucuggggagugcaccauccugggacggauaaugaccagauuuuucucuaugcgcaggccucuggcagaaucacaguuuccaccaaacggagccaacagacagugauuccgaacaucgggucccgccccagaguccgggauauuccuucucgcaucagcaucuacuggaccauugugaagcccggagacauccugcugauuaauuccaccggcaaccucaucgcuccuagaggguacuucaaaauucggagcggaaagucuuccaucaugcgcagcgacgcccccaucggcaaguguaauucugagugcauuacaccgaacggcagcaucccuaaugauaaacccuuucagaacgugaauagaauuacguauggggcuuguccucgguacgucaagcagaacacccugaaacuugccacaggaaugcgcaauguucccgaaaagcaaaccagaggcaucuucggggcgauugccggauuuaucgagaacggcugggaagggaugguggacggaugguauggcuuccggcaccaaaauuccgagggcaucgggcaggcugccgaucugaaaucuacacaggcugccauuaaccagaucaauggaaagcucaacagacugauuggcaaaaccaacgagaaguuccaccagaucgaaaaggaguuuagcgaaguggaggggcgcauucaggaccuugaaaaauacgucgaggauacgaagaucgaccugugguccuauaaugccgagcuccugguggcucuggaaaaccaacauacaauugaucucaccgacagcgagaugaauaaacuguucgaacggaccaagaaacagcuuagagagaacgcggaagauaugggaaauggcugcuuuaagaucuaccacaagugugacaacgccugcaucgggucuauucgcaauggcacauaugaucaugacguuuaccgggacgaggcucugaacaauagauuccagaucaaaggaguggagcucaaguccggcuacaaagauuggauucuguggaucagcuuugccauuucuugcuuccuucugugugucgcccuccugggguuuaucaugugggcuugccagaagggaaacauccgcuguaauauuugcaucuga

SEQ ID NO: 193651 - RNA, 1701 nt, Artificial Sequence; identical to SEQ ID NO: 193633
  derived and/or modified CDS sequence (opt5) from hemagglutinin__InfluenzaA__ABO32871

SEQ ID NO: 193652 - RNA, 1701 nt, Artificial Sequence
  derived and/or modified CDS sequence (opt5) from hemagglutinin__InfluenzaA__ABO32882
augaagaccaucauugcccugagcuacaucauuugccucguguucgcucagaaacugcccggcaacgacaauuccacagccacgcuuugucuggggcaccaugcggucccuaacggaaccaucguuaagacaauuaccaaugaucaaaucgaggugacaaacgcuaccgaacucgugcagucuagcuccacaggcgagaucugcgacucuccgcaccagauucuggauggggaaaauuguacccuuaucgacgcccugcucggagauccccagugcgacggcuuucaaaacaaaaagugggaucuguucgucgagagaagcaaagccuauuccaauuguuacccuuaugacgugcccgauuacgcuucucugcggagccucguugccuccagcgggacgcuggaauuuaacaaugagucuuucaacuggaccggagugacacagaauggcaccuccagcgcuugcaagcgcagaucuaacaauuccuuuuucagccggcuuaacuggcugacacaucucaaguuuaaauauccugcccugaaugucaccaugcccaacaacgagaaguucgacaaacuuuacauuuggggcgugcaccauccugggacggauaaugaccagaucuuuccguaugcgcaggccucuggacgcauuacaguuuccaccaagagaagccaacagacagugauccccaacauuggcucccggccucgcgucagaaauauccccucucggaucagcauuuacuggaccaucgugaaaccuggggauauucugcucaucaacuccaccggaaaucugauugcuccccgcggcuacuucagaauccggagcgggaagucuuccaucaugcgcagcgacgccccgauuggaaaguguaacucugaaugcaucacaccuaauggcagcauucccaacgacaaaccuuuucagaaugugaacagaaucacguauggcgcuuguccccgguacgucaagcagaauacccugaaacucgccacagggaugcgcaacguucccgagaagcaaaccagaggaauuuucggcgcgaucgccggguuuaucgaaaauggaugggagggcaugguggaugggugguauggauuccggcaccagaacuccgagggcauuggccaggcugccgaccugaaaucuacacaagcugccaucaaucagauuaacgggaaacuuaacagacugaucggaaagaccaaugaaaaguuccaccagauugagaaggaauuuagcgagguggaaggccgcauccaggaucucgagaaauacgucgaggacacgaagauugaucugugguccuauaacgccgaacuucugguggcucucgagaaucaacauacaaucgaccugaccgauagcgaaaugaacaaacuguucgagcggaccaagaaacagcucagagaaaaugcggaggacauggggaacggaugcuuuaagaucuaccacaagugugauaaugccugcauuggcucuauccgcaacgggacauaugaccaugauguuuaccgggacgaggcucugaauaacagauuccagauuaaaggcguggaacuuaaguccggauacaaagacuggauccuguggauuagcuuugccaucucuugcuuccuccugugugucgcccuucugggcuuuaucaugugggcuugccagaaggggaauauucgcuguaacaucugcauuuga

SEQ ID NO: 193653 - RNA, 1701 nt, Artificial Sequence
  derived and/or modified CDS sequence (opt5) from hemagglutinin__InfluenzaA__ABO32893
augaagaccaucauugcccugagcuacauccucugccugguguucgcucagaaacuucccggcaacgacaauuccacagccacgcugugucucgggcaccaugcggucccuaacggaaccauuguuaagacaaucaccaaugaucaaauugaggugacaaacgcuaccgaacuggugcagucuagcuccacaggcgagaucugcgacucuccgcaccagauccuugauggggaaaauuguacccugauugacgcccuccugggagauccccagugcgacggcuuucaaaacaaaaagugggaucuguucgucgagagaagcaaagccuauuccaauuguuacccuuaugacgugcccgauuacgcuucucuccggagccugguugccuccagcgggacgcuugaauuuaacaaugagucuuucaacuggaccggagugacacagaauggcaccuccagcgcuugcaagcgcagaucuaacaauuccuuuuucagccggcugaacuggcucacacaucugaaguuuaaauauccugcccuuaaugucaccaugcccaacaacgagaaguucgacaaacuguacaucuggggcgugcaccauccugggacggauaaugaccagauuuuucucuaugcgcaggccucuggacgcaucacaguuuccaccaagagaagccaacagacagugauuccgaacaucggcucccggccccgcgucagaaauauuccuucucggaucagcaucuacuggaccauugugaaacccggggauauccugcugauuaacuccaccggaaaucucaucgcuccucgcggcuacuucaagauuagaagcgggaagucuuccaucaugcggagcgacgcccccaucggaaaauguaacucugaaugcauuacaccgaauggcagcaucccuaacgacaagcccuuucagaaugugaaccgcauuacguauggcgcuuguccuagauacgucaaacagaauacccugaaacuugccacagggaugcggaacguucccgagaagcaaacccgcggaaucuucggcgcgauugccggguuuaucgaaaauggaugggagggcaugguggaugggugguauggauucagacaccagaacuccgagggcaucggccaggcugccgaccugaagucuacacaagcugccauuaaucagaucaacgggaaacucaaccggcugauuggaaagaccaaugaaaaguuccaccagaucgagaaagaauuuagcgagguggaaggccgcauucaggaucuugagaaguacgucgaggacacgaaaaucgaucugugguccuauaacgccgaacuccugguggcucuggagaaucaacauacaauugaccucaccgauagcgaaaugaacaagcuguucgagagaaccaaaaagcagcuucgggaaaaugcggaggacauggggaacggaugcuuuaagaucuaccacaaaugugauaaugccugcaucggcucuauuagaaacgggacauaugaccaugauguuuaccgcgacgaggcucugaauaaccgguuccagaucaagggcguggaacucaaauccggauacaaggacuggauucuguggaucagcuuugccauuucuugcuuccuucugugugucgugcuccugggcuuuaucaugugggccugccagaaagggaauaucagauguaacauuugcaucuga

SEQ ID NO: 193654 - RNA, 1701 nt, Artificial Sequence; identical to SEQ ID NO: 193653
  derived and/or modified CDS sequence (opt5) from hemagglutinin__InfluenzaA__ABO32904

SEQ ID NO: 193655 - RNA, 1701 nt, Artificial Sequence; identical to SEQ ID NO: 193468
  derived and/or modified CDS sequence (opt5) from hemagglutinin__InfluenzaA__ABO32915

SEQ ID NO: 193656 - RNA, 1701 nt, Artificial Sequence; identical to SEQ ID NO: 193468
  derived and/or modified CDS sequence (opt5) from hemagglutinin__InfluenzaA__ABO32926

SEQ ID NO: 193657 - RNA, 1701 nt, Artificial Sequence
  derived and/or modified CDS sequence (opt5) from hemagglutinin__InfluenzaA__ABO32937
augaagaccaucauugcccugagcuacauccucugccugguguucgcucagaaacuucccggcaacgacaauuccacagccacgcugugucucgggcaccaugcggucccuaacggaaccauuguuagaacaaucaccaaugaucaaauugaggugacaaacgcuaccgaacuggugcagucuagcuccacaggcgagaucugcgacucuccgcaccagauccuugauggggaaaauuguacccugauugacgcccuccugggagauccccagugcgacggcuuucaaaacaagaaaugggaucuguucgucgagcggagcaaggccuauuccaauuguuacccuuaugacgugcccgauuacgcuucucuccgcagccugguugccuccagcgggacgcuugaauuuaacaaugagucuuucaacuggaccggagugacacagaauggcaccuccagcucuugcaaaagacgguccaacaauagcuuuuucucucgccugaacuggcucacacaucugaaguuuaaguauccugcucuuaaugucaccaugcccaacaacgagaaauucgacaagcuguacaucuggggcgugcaccauccugggacggauaaugaccagauuuuucucuaugcccaggcguccggaagaaucacaguuagcaccaaacggucccaacagacagugauuccgaacaucggcucucgccccagaguccggaauauuccuagccgcaucuccaucuacuggaccauugugaagcccggggauauccugcugauuaacagcaccggaaaucucaucgccccuagaggcuacuucaaaauucggucugggaaguccagcaucaugcgcucugacgcucccaucggaaaguguaacagcgaaugcauuacaccgaauggcuccaucccuaacgacaaacccuuucagaaugugaacagaauuacguauggcgccuguccucgguacgucaagcagaauacccugaaacuugcuacagggaugcgcaacguucccgagaagcaaaccagaggaaucuucggcgccauugcgggguuuaucgaaaauggaugggagggcaugguggaugggugguauggauuccggcaccagaacucugagggcaucggccaggccgcugaccugaaaagcacacaagccgcuauuaaucagaucaacgggaagcucaacagacugauuggaaaaaccaaugaaaaguuccaccagaucgagaaggaauuuuccgagguggaaggccgcauucaggaucuugagaaauacgucgaggacacgaagaucgaucuguggagcuauaacgccgaacuccugguggcccuggagaaucaacauacaauugaccucaccgauucugaaaugaacaaacuguucgagcggaccaagaaacagcuuagagaaaaugcugaggacauggggaacggaugcuuuaagaucuaccacaagugugauaaugcgugcaucggcuccauucgcaacgggacauaugaccaugauguuuaccgggacgaggcccugaauaacagauuccagaucaaaggcguggaacucaagagcggauacaaagacuggauucuguggaucucuuuugcuauuuccugcuuccuucugugugucgcccuccugggcuuuaucaugugggccugccagaaggggaauauccgcuguaacauuugcaucuga

SEQ ID NO: 193658 - RNA, 1698 nt, Artificial Sequence
  derived and/or modified CDS sequence (opt5) from hemagglutinin__InfluenzaA__ABO32948
augagagccaagcugcucgugcugcuuugcaccuucacagcuacguacgccgacaccaucuguauuggcuaucacgcgaacaauagcacagauaccgucgacacaguucuggagaaaaacgugaccgugacacauuccgucaaucuccuggaagauucucacaacgggaaacuuugccugcucaagggaaucgcuccccugcagcugggcaauuguagcguggccggguggauucucggaaacccugagugcgaacugcuuaucuccaaggagucuuggagcuacauuguugaaaccccgaaucccgagaacggcacguguuauccuggguacuuugccgacuaugaggaacugcgggagcaacucuccucugugagcuccuucgaacgcuuugagaucuuccccaaaggaagcucuuggccuaaucauaccgucacaggcguguccgcuagcugcucucacaacggcaaguccagcuuuuacagaaaucugcuuuggcugaccgggaagaacggacucuaucccaaucugucuauguccuacguuaacaauaaagagaaggaagugcugguccucuggggcgugcaucacccuccgaacaucggggaucagcgggcccuguaccacacagagaacgcuuaugugagcgucguuuccucucauuacagccgcagauucacccccgaaauugccaaacggccuaaggugcgcgaccaggagggaagaaucaauuauuacuggacgcuucuggaacccggcgauacaauuaucuuugaggcgaacgggaaucucauugccccuugguaugcuuucgcccugucccggggauuuggcagcggcaucauuaccucuaacgcucccauggacgagugugaugccaaaugccagacaccgcaaggggcgaucaauuccagccuuccuuuccagaacgugcaccccgucaccaucggagaauguccuaaguacgugcgcucugccaagcugagaaugguuaccggccuccggaauauucccagcauccagucccgcgggcuguuuggagcuauugccggcuucaucgaagggggauggacaggcaugguggacggcugguauggguaccaucaccagaacgaacaaggaucuggcuacgcugccgaucagaaaagcacgcagaaugccauuaacgggaucaccaauaaggucaacuccgugaucgagaaaaugaauacacaguuuaccgcuguuggaaaggaguucaacaaacuggagagacggauggagaaucucaacaagaaaguggacgauggcuuccuggacauuuggacauauaacgcggaacuucugguccuccuggagaaugaacgcacccuugacuuucacgauagcaacgugaagaaucuguacgagaaggucaaaucucaacucaagaacaaugccaaagaaaucgggaacggcugcuucgaguuuuaucauaaguguaauaacgagugcauggaauccgugaaaaauggaacguacgacuaucccaaguacagcgaggaaucuaagcugaacagagagaaaauugauggcguuaagcuggaguccauggggguguaucagauccucgcuauuuacagcacagucgccuccucucuggugcuucugguuagccucggagccaucuccuucuggaugugcucuaauggcagccugcagugucggaucugcauuuga

SEQ ID NO: 193659 - RNA, 1698 nt, Artificial Sequence
  derived and/or modified CDS sequence (opt5) from hemagglutinin__InfluenzaA__ABO32959
augaaggccaaacugcucgugcugcuuugcaccuucacagcuacguacgccgacaccaucuguauuggcuaucacgcgaacaauagcacagauaccgucgacacaguucuggagaagaacgugaccgugacacauuccgucaaucuccuggaagauucucacaacgggaaacuuugccugcucaagggaaucgcuccccugcagcugggcaauuguagcguggccggguggauucucggaaacccugagugcgaacugcuuaucuccaaagagucuuggagcuacauuguugaaaccccgaaucccgagaacggcacguguuauccuggguacuuugccgacuaugaggaacugagagagcaacucuccucugugagcuccuucgaacgguuugagaucuuccccaaggagagcucuuggccuaaucauaccgucacaggaguguccgcuagcugcucucacaacggcaaguccagcuuuuaccgcaaucugcuuuggcugaccggcaaaaacgggcucuaucccaaucugucuagauccuacguuaacaauaaggaaaaagaggugcugguccucuggggagugcaucacccuccgaacaucggcgaucagcgggcccuguaccacacagaaaacgcuuaugugagcgucguuuccucucauuacagccgcagauucacccccgagauugccaagcggccuaaagugcgcgaccaggaagggagaaucaauuauuacuggacgcuucuggagcccggagauacacucauuuuugaggcgaacggcaaucugaucgccccuugguaugcuuucgcccuuucccggggguuuggaagcggcauuaucaccucuaacgcucccauggacgaaugugaugccaagugccagacaccgcaaggcgcgauuaauuccagccugccuuuccagaacgugcaccccgucaccaucggggaguguccuaaguacgugcgcucuaccaaacucagaaugguuacaggacugcggaauauccccagcauucagucccgcggccuguuuggggccaucgcuggauucauugaaggcggguggacgggaaugguggacggcugguauggcuaccaucaccagaacgagcaagggucuggauacgccgcugaucaaaagagcacccagaaugccaucaacggcauuacaaauaaagucaacuccgugaucgaaaagaugaauacccaguuuacagccguugggaaagaguucaacaagcucgagagacggauggaaaaucugaacaaaaagguggacgauggauuccuugacaucuggaccuauaacgcugagcugcucguccugcuugaaaaugagcgcacgcuggacuuucacgauagcaacgugaagaaucucuacgaaaaagucaagucucagcugaaaaacaaugcgaaggagauuggcaacgggugcuucgaguuuuaucauaaauguaauaacgaaugcauggaguccgugaagaauggcacauacgacuaucccaaguacagcgaagagucuaaacugaacagagagaagaucgauggaguuaaacucgaauccaugggcguguaucagauucuggccaucuacagcaccgucgcuuccucucuugugcugcucguuagccugggggccauuuccuucuggaugugcucuaauggaagccugcagugucggaucugcaucuga

SEQ ID NO: 193660 - RNA, 1698 nt, Artificial Sequence; identical to SEQ ID NO: 193276
  derived and/or modified CDS sequence (opt5) from hemagglutinin__InfluenzaA__ABO32970

SEQ ID NO: 193661 - RNA, 1701 nt, Artificial Sequence
  derived and/or modified CDS sequence (opt5) from hemagglutinin__InfluenzaA__ABO32981
augaaggccaaacugcucgugcugcuuugcgcucugagcgccaccgacgcggauacaaucuguauuggcuaccacgcuaacaauuccacggacaccgucgauacaguucucgagaagaacgugaccgugacacauucugucaaucugcuugaagacagccacaacgggaaacugugcagacucaagggaaucgcuccccugcagcugggcaaauguuccauugccggguggauccucggaaauccugagugcgaaucucuguucagcaagaaguccuggucuuauauugccgagaccccgaacagcgaaaauggcacauguuaccccggguauuuugccgauuacgaggagcuucgggaacaacuguccagcgugucuuccuucgagcgcuuugaaaucuucccuaaagagagaagcuggcccaagcauaacguuacccggggagugacggcuucuugcucccacaaaggcaagagcucuuuuuaucgcaaucuccuguggcuuaccgagaaaaacggcuccuacccuaaucugagcaaguccuaugucaacaauaaggaaaaagaggugcucguucuguggggagugcaucaccccucuaacaucaaggaccagaaaacaauuuacagaaaggaaaaugccuacgucagcgugguguccagcaacuauaaccggcgcuucaccccugagaucgcggaaagaccgaaaguccgggaucaggccgggcgcauuaauuacuauuggacacugcucgagcccggcgacaccaucauuuuugaggcuaacgggaaucugaucgccccuugguacgcuuucgcccuuucuagaggauuuggcuccgggauuaucacgagcaacgcgucuauggaugaaugugacacaaagugccagacaccccaaggagccaucaauagcucccugccuuuccagaacguucaccccgugaccauuggcgaguguccgaaauaugugcggucuaccaagcuccgcauggucaccggccugagaaauaucccuagcauucagucccgggggcuuuuuggagcuaucgccggcuucauugaagggggauggacaggcaugaucgaugggugguacggauaucaucaccagaacgagcaaggcagcggcuacgcugccgaccagaagucuacgcagaaugccaucaacgggauuaccaauaaagugaacuccguuaucgaaaagaugaauacacaguuuaccgcugugggaaaagaguucaacaagcuggagaaacgcauggaaaaucucaacaagaaggucgaugacggcuuccuggacauuuggacauacaacgcggagcugcucgugcugcuugaaaaugagagaacccuggauuuucaugacagcaacguuaaaaaucucuaugaaaaggugaaaucucaacugaagaacaaugccaaagagaucgggaacggaugcuucgaguuuuaccacaaguguaauaacgaaugcauggaguccgucaagaauggcacguaugauuaccccaaauauagcgaagaguccaaacuuaaccgggagaagauugacggggugaagcuggaaucuaugggcgucuaccagauccucgcuaucuauagcacaguggccuccucucugguucugcucgugagccugggagccauuuccuucuggaugugcagcaauggcucucuucaguguagaaucugcauuuga

SEQ ID NO: 193662 - RNA, 1701 nt, Artificial Sequence
  derived and/or modified CDS sequence (opt5) from hemagglutinin__InfluenzaA__ABO32992
augaaggccaaacugcucgugcugcuuugcgcucugagcgccaccgacgcggauacaaucuguauuggcuaccacgcuaacaauuccacggacaccgucgauacaguucucgagaagaacgugaccgugacacauucugucaaucugcuugaagacagccacaacgggaaacugugcagacucaagggaaucgcuccccugcagcugggcaaauguuccauugccggguggauccucggaaauccugagugcgaaucucuguucagcaagaaguccuggucuuauauugccgagaccccgaacagcgaaaauggcacauguuaccccggguauuuugccgauuacgaggagcuucgggaacaacuguccagcgugucuuccuucgagcgcuuugaaaucuucccuaaagagagaagcuggcccaagcaugacguuacccggggagugacggcuucuugcucccacaaaggcaagagcucuuuuuaucgcaaccuccuguggcuuaccgagaaaaauggcuccuacccuaaccugagcaaguccuaugucaauaacaaggaaaaagaggugcucguucuguggggagugcaucaccccucuaauaucgaagaucagaagacaauuuacagaaaagagaacgccuacgucagcgugguguccagcaauuauaaccggcgcuucaccccugaaaucucugagagaccgaagguccgggaccagaaagggcgcauuaacuacuauuggacacugcucgagcccggcgauaccaucauuuuugaagcgaaugggaaccugaucgccccuugguacgcuuucgcccuuuccagaggauuuggcagcgggauuaucacgucuaaugcuagcauggacgagugugauacaaagugccagacaccccaaggagccaucaacuccucucugccuuuccagaauguucaccccgugaccauuggcgaauguccgaaauaugugcggagcaccaagcuccgcauggucaccggccugagaaacaucccuuccauucagagccgggggcuuuuuggagcgaucgccggcuucauugaagggggauggacaggcaugaucgacgggugguacggauaucaucaccagaaugaacaaggcucuggcuacgcugccgaucagaaguccacgcagaacgcuaucaaugggauuaccaacaaagugaauagcguuaucgagaagaugaacacacaguuuaccgccgugggaaaagaguucaauaagcuggaaaaacgcauggagaaccucaauaagaaggucgacgacggcuuccuggauauuuggacauacaacgccgaacugcucgugcugcuugagaacgaaagaacccuggacuuucaugauucuaauguuaaaaaccucuaugagaaggugaaaucccaacugaagaauaacgcuaaagagaucgggaauggaugcuucgaauuuuaccacaaguguaacaaugagugcauggaaagcgucaagaacggcacguaugacuaccccaaauauuccgaggagucuaaacuuaaucgggagaagauugauggggugaagcuggagagcaugggcgucuaccagauccucgcgaucuauuccacaguggccucuagccugguucugcucgugucccugggagcuauuagcuucuggaugugcucuaacggcucccuucaguguagaaucugcauuuga

SEQ ID NO: 193663 - RNA, 1701 nt, Artificial Sequence
  derived and/or modified CDS sequence (opt5) from hemagglutinin__InfluenzaA__ABO33006
augaaggccaagauccuggugcuccugugcgcucuuagcgccaccgacgcggauacaauuuguaucggcuaccacgcuaacaauuccacggacaccgucgauacaguucuggagaagaacgugaccgugacacauucugucaaucuccuggaagacagccacaacgggaaacuuugcagacugaagggaauugcuccccuccagcugggcaaauguuccaucgccggguggauucugggaaauccugagugcgaaucucucuucagcaagaaguccuggucuuauaucgccgagaccccgaacagcgaaaauggcacauguuaccccggguauuuugccgauuacgaggagcugcgggaacaacuuuccagcgugucuuccuucgagcgcuuugaaaucuucccuaaagagagaagcuggcccaagcauaacguuacccggggagugacggcuucuugcucccacaaaggcaagagcucuuuuuaucgcaaucugcucuggcugaccgagaaaaacggcuccuacccuaaucuuagcaaguccuaugucaacaauaaggaaaaagaggugcugguucucuggggagugcaucaccccucuaacauugaagaccagaagacaaucuacagaaaagagaaugccuacgucagcgugguguccagcaacuauaaccggcgcuucaccccugaaauuucuaagagaccgaaaguccgggaucaggaggggcgcaucaauuacuauuggacacugcuggagcccggcgacaccauuaucuuugaagcgaacgggaaucucauugccccuugguacgcuuucgcccuguccagaggauuuggcagcgggaucaucacgucuaacgcuagcauggaugagugugacacaaagugccagacaccccaaggagccauuaauuccucucuuccuuuccagaacguucaccccgugaccaucggcgaauguccgaaauaugugcggagcaccaagcugcgcauggucaccggccucagaaauauuccuuccauccagagccgggggcuguuuggagcgauugccggcuucaucgaagggggauggacaggcaugaucgaugggugguacggauaucaucaccagaacgaacaaggcucuggcuacgcugccgaccagaaguccacgcagaaugcuauuaacgggaucaccaauaaagugaacagcguuauugagaagaugaauacacaguuuaccgccgugggaaaagaguucaacaaacuugaaaagcgcauggagaaucugaacaagaaggucgaugacggcuuccucgacaucuggacauacaacgccgaacugcuggugcuccuggagaaugaaagaacccuugauuuucaugacucuaacguuaaaaaucuguaugagaaggugaaaucccaacucaagaacaaugcuaaagagauugggaacggaugcuucgaauuuuaccacaaguguaauaacgagugcauggaaagcgucaagaauggcacguaugauuaccccaaauauuccgaggagucuaagcugaaccgggagaaaaucgacggggugaaacuugagagcaugggcgucuaccagauccuggcgauuuauuccacaguggccucuagccucguucugcuggugucccucggagcuaucagcuucuggaugugcucuaauggcucccugcaguguagaauuugcaucuga

SEQ ID NO: 193664 - RNA, 1701 nt, Artificial Sequence
  derived and/or modified CDS sequence (opt5) from hemagglutinin__InfluenzaA__ABO33025
augaaggccaaacugcucgugcugcuuugcgcucugagcgccaccgacgcggauacaaucuguauuggcuaccacgcuaacaauuccacggacaccgucgauacaguucucgagaagaacgugaccgugacacauucugucaaucugcuugaagacaaccacaaugggaaacugugcaagcucaaaggaaucgccccgcugcagcugggcaaguguagcauugccggguggauccucggaaacccugagugcgaaucccuguucucuaagaaaagcugguccuauauugcugagacccccaauucugaaaacggcacauguuaccccggguauuuugccgauuacgaggagcuuagagaacaacugagcuccgugagcucuuucgagcgguuugaaaucuucccuaaggaguccagcuggcccaaucauaacguuaccaaaggagugacggcuucuugcucccacaagggcaaaagcucuuuuuaucgcaaucuccuguggcuuaccgagaagaacggcuccuacccuaaucugagcaaguccuaugucaacaauaaagaaaaggaggugcucguucuguggggagugcaucaccccucuaacaucaaagaccagagaacaauuuaccggaaggaaaacgccuacgucagcgugguguccagccacuauaaucgcagauucaccccugagaucgcgaaacggccgaagguccgcgaucaggaagggagaauuaacuacuauuggacacugcucgagcccggcgacaccaucauuuuugaggccaaugggaaccugaucgcuccuugguacgccuucgcucuuucucggggauuuggcuccgggauuaucacgagcaaugccucuauggaugaaugugacgcgaaaugccagacaccccaaggagccaucaacagcucccugccuuuccagaauguucaucccgugaccauuggcgaguguccgaaguaugugcgcucuacaaagcucagaauggucaccggccugcggaacaucccuagcauucagucccgcgggcuuuuuggagcuaucgccggcuucauugaagggggauggaccggcaugaucgaugggugguacggauaucaccaucagaaugagcaaggcagcggcuacgcugccgaccagaaaucuacacaguccgccaucaacgggauuacgaauaaggugaacagcaucauugaaaagaugaauacccaguuuacagcuguuggaaaagaguucaacaaacuggagaagagaauggaaaaucucaacaagaaaguggaugacggcuuccuggacaucuggaccuacaacgcggagcugcucguccugcuugaaaaugagcggacacuggauuuucacgacucuaacgugaagaaucucuaugaaaaaguuaagucccaacugaaaaacaaugccaaggagauugggaacggaugcuucgaguuuuaccacaaguguaauaacgaaugcauggagagcgugaaaaauggcaccuaugauuaccccaaguauuccgaagagucuaaacuuaaccgcgagaagaucgacggggucaaacuggaaagcaugggcguguaccagauccucgcuauuuauuccacggucgccucuagccuggugcugcucguuucccugggagccaucagcuucuggaugugcucuaauggcucccuucaguguagaauuugcaucuga

SEQ ID NO: 193665 - RNA, 1701 nt, Artificial Sequence
  derived and/or modified CDS sequence (opt5) from hemagglutinin__InfluenzaA__ABO33036
augaagaccaucauugcccugagcuacauccucugccugguguucgcucagaaacuucccggcaacgacaauuccacagccacgcugugucucgggcaccaugcggucccuaacggaacccugguuaagacaauuaccaaugaucaaaucgaggugacaaacgcuaccgaacuugugcagucuagcuccacaggcagaauuugcaauucuccgcaccagauccuggacggggagaacuguacccucaucgaugcccugcugggagacccccauugcgauggcuuucagaauaaagaaugggaccucuucgucgagcggcgcaaggccuauagcaacuguuacccuuaugaugugcccgacuacgcuucccugagaucucuuguugccagcuccgggacgcuggaauuuaauaacgagagcuucaauuggaccggaguggcucaaaacggcacaucuuccgccugcaaacggcgcagcauuaaguccuuuuucucuagacucaauuggcugcaccagcuuaaguauaaauacccugcgcugaacgucaccaugcccaauaacgagaaguuugauaaacucuauaucuggggcgugcaucacccuagcacagacucugaucagauuucccuguacgcccaggcuagcgggcggguuaccguguccacgaagcgcucucaacagacagucaucccgaacauuggaagcagacccugggugcggggcguguccagccgcaucucuauuuacuggaccaucgucaaaccuggggacauccugcucauuaauuccacaggaaaccugaucgcccccagaggcuauuucaagauucggagcgggaagucuagcaucaugcgcuccgaugcuccuauuggaaaauguaauucugaaugcaucacccccaacggcagcaucccgaaugacaagccuuuucagaacguuaauagaauuaccuacggcgccuguccccgguaugugaaacagaacacacuuaagcuggcgacggggaugcgcaaugugccugagaaacaaaccagaggaaucuucggcgccauugcuggguuuaucgaaaacggaugggagggcauggucgacgggugguacggauuccggcaccaaaauuccgagggcacaggccaggccgcugaucucaagagcacccaggccgccauuaaccagaucaaugggaaacugaacagacuuaucgaaaagacaaaugagaaguuucaucagauugaaaaagaguucucugaaguggagggacgcauccaggaccuggagaaguauguugaagauaccaaaauugaccucugguccuacaacgcugagcugcugguggcgcucgaaaaccaacacacgaucgaucugacagacagcgagaugaauaaacuuuucgaacggaccaagaagcagcugagagagaacgccgaggauaugggcaaugggugcuuuaagauuuaucauaaaugugacaacgcuugcaucggaucuauucgcaauggcaccuacgaucacgacgucuaccgggaugaagcccucaacaauagauuccagaucaaggggguggagcugaaauccggcuauaaggacuggauccuuuggauuagcuuugccaucuccugcuuccugcucuguguugugcugcugggauuuauuaugugggcuugccagaaaggcaacauccgcuguaauauuugcaucuga

SEQ ID NO: 193666 - RNA, 1701 nt, Artificial Sequence; identical to SEQ ID NO: 192144
  derived and/or modified CDS sequence (opt5) from hemagglutinin__InfluenzaA__ABO33047

SEQ ID NO: 193667 - RNA, 1701 nt, Artificial Sequence; identical to SEQ ID NO: 192722
  derived and/or modified CDS sequence (opt5) from hemagglutinin__InfluenzaA__ABO33058

SEQ ID NO: 193668 - RNA, 1701 nt, Artificial Sequence
  derived and/or modified CDS sequence (opt5) from hemagglutinin__InfluenzaA__ABO33069
augaagaccaucauugcccugagcuacaucuucugccucguguuugcucagaaccugcccggcaaugacaacuccacagccacgcuuugucuggggcaccaugcggucccuaauggaacccucguuaaaacaauuaccaacgaucaaaucgaggugacaaaugcuaccgaacuggugcagucuagcuccacaggcagaauuugcgacucuccgcaccggauccuugaugggaagaacuguacccugaucgacgcccuccugggagauccccauugcgacggcuuccagaaugagaaaugggaucuguuugucgaacgcagcaaggccuucuccaacuguuauccuuacgacgugcccgauuaugcuucucucagaagccugguugccuccagcgggacgcuugaguuuauuaaugaaggauucaacuggaccggcgugacacagaauggcgggucuuacgcuugcaaacggggaccugacaacuccuuuuucagccgccugaauuggcucuaugagucugaguccaaguaccccguccugaacgugaccaugccuaauaacgauaacuuugacaagcuguauaucuggggcguucaccauccgagcacagauaaagaacaaaccaaucuguacgugcaggccucugggagagucacgguguccacaaagaaaagccagcagaccauuauccccaacgugggaucccggccuuggguccgcggccucucuagcagaauuuccaucuacuggacaauuguuaagcccggggacauccugcugaucaauagcaacggaaaucucauugcgccucggggcuauuucaaaauccgcaccggcaagucuuccauuaugagaagcgacgcccccaucgggaccuguucuagcgagugcauuacaccgaacggauccaucccuaaugauaagcccuuucaaaacgugaauaaaaucacguacggcgcuuguccuaaguaugugaaacagaacacccugaaacuugccacagggaugcggaauguccccgaaaagcagacccgcggaauuuucggcgcuaucgccggguuuauugagaacggaugggagggcaugguggacggcugguacggguucagacaccaaaauucugaaggaacaggccaggcggccgaucuuaagagcacccaggcugccaucgaccagauuaacgggaaacucaaucggguuaucgagaagacgaacgaaaaguuccaccaaaucgagaaagaauuuuccgagguggagggacgcauucaggaucuggaaaaguauaucgaggacacaaaaauugaucuuuggagcuacaacgcugaacugcucgucgcccuggagaaucagcauaccaucgaccugaccgauucuaagaugaacaaacucuucgaaaagacaagacggcagcugagagagaaugccgaggacaugggcaacgggugcuuuaagauuuaucacaaaugugauaaugcuugcaucggcuccauucgcaacggaaccuacgaccaugacguguaccgggaugaagcgcuuaauaacagauuccaaaucaagggcguugagcugaaaagcggguauaaggacuggauccucuggauuucuuuugccaucuccugcuuccugcuuugugugguccugcucggauuuauuaugugggcuugccagaaaggcaauauccgcuguaacauuugcaucuga

SEQ ID NO: 193669 - RNA, 1701 nt, Artificial Sequence; identical to SEQ ID NO: 192993
  derived and/or modified CDS sequence (opt5) from hemagglutinin__InfluenzaA__ABO37988

SEQ ID NO: 193670 - RNA, 1701 nt, Artificial Sequence
  derived and/or modified CDS sequence (opt5) from hemagglutinin__InfluenzaA__ABO38010
augaaggccaaacugcucgugcugcuuugcgcuuucaccgccacauacgcggacacgaucuguauuggcuaucacgcuaacaauagcaccgauacagucgacaccguucuggagaagaacgugacagugacccauuccgucaaucuccuggaagauucucacaacgggaaacuuugcagacugaagggaacagcuccccuccagcugggcaauuguagcguggccggguggauccugggaaacccugagugcgaaucccucuuuucuaaagagagcugguccuacauugccgaaaccccgaaucccgagaacggcacguguuauccuggguacuucgccgacuaugaggaacugcgggagcaacuuucuagcguuuccagcuuugaacgcuucgagaucuuucccaaggagucuuccuggccuaaucauaccgugacaaagggagucaccgcuagcugcucucacaacggcaaauccagcuucuacaagaaucugcucuggcugacagagaaaaacggccuuuaucccaaucugucuaaguccuacgugaacaauaaagaaaaggaaguucucgugcuguggggaguccaucacccuagcaacauuggggaucagagagccaucuaccacaccgagaacgcguauguguccguggucucuagccauuacucccggcgcuuuacgccggaaaucgccaagagacccaaaguucgggaccaggagggccgcauuaauuauuacuggacacugcucgagccuggggauaccaucauuuucgaagcuaacggaaaucugaucgcccccugguaugcuuuugcccuuagcagaggcguggggucuggaauuaucacauccaacgcgagcaugggcgacugugaugccaagugccagaccccucaaggcgcuauuaauucuagccugcccuuccagaacgugcacccggucaccaucggggaguguccuaaauacgugcgguccacaaagcuccgcaugguuacgggacugagaaauauccccucuauucagagccggggccuuuuuggggccaucgcuggauucauugaaggcggguggaccggaaugaucgacggcugguauggcuaccaucaccagaacgagcaaggguccggauacgccgccgauaaaaagagcacacagaaugcuauugacggcaucaccaacaaagucaauucugugaucgaaaagaugaacacacaguuuaccgcgguggggaaggaguucaauaaacuggagcgcagaauggaaaaccucaauaagaaaguugaugacggauuccuggacauuuggacguauaacgccgagcugcucgugcugcuugaaaacgagcggacacuggauuuucacgacuccaaugucaagaaccucuacgaaaaagugaagaaucagcugaagaacaaugcuaaagagaucggcaacgggugcuucgaguuuuaucauaaguguaauaacgaaugcauggagagcgucaaaaauggcaccuacgauuauccuaaguacucugaagaguccaaacuuaagcgcgagaagauugacggagugaaacuggaaagcaugggcguuuaucaaauccucgccauuuacuccaccguggccucuagccugguccugcucgugucccugggggcuaucucuuucuggaugugcagcaacggaucccuucaguguagaaucugcauuuga

SEQ ID NO: 193671 - RNA, 1698 nt, Artificial Sequence
  derived and/or modified CDS sequence (opt5) from hemagglutinin__InfluenzaA__ABO38021
augaaggccaaacugcucgugcugcuuugcaccuucacagcuacguacgccgacaccaucuguauuggcuaucacgcgaacaauagcacagauaccgucgacacaguucuggagaagaacgugaccgugacacauuccgucaaucuccuggaagauucucacaacgggaaacuuugccugcucaagggaaucgcuccccugcagcugggcaauuguagcguggccggguggauucucggaaacccugagugcgaacugcuuaucccgaaagaguccuggucuuacauuguugaaacccccaauccugagaacggcacguguuaucccggguacuuugccgacuaugaggaacugagagagcaacucagcuccgugucuagcuucgaacgguuugagaucuucccuaaggaguccagcuggcccaaucauaccgucacaggagugucugcuuccugcagccacaacggcaagucuuccuuuuaccgcaaucugcuuuggcugaccggcaaaaacgggcucuauccuaaucugagcaagucuuacgccaacaauaaagaaaaggagguucuggugcucuggggaguccaucacccgcccaacaucggcgaucagagagcucuguaccacacagaaaacgccuauguguccguggucagcucccauuacucucggcgcuucauuccugagauggcgaaaagacccaagguucgggaccaggaagggcgcaucaauuauuacuggacccuucuggagccuggagauacgauuaucuuugaggccaacggcaaucucauugcucccugguaugccuucgcucugagcagaggguuuggauccggcaucauuacaagcaacgccccgaugggcgaaugugacgcgaagugccagaccccucaaggggccaucaauucuucccuucccuuccagaacgugcacccugugacaaucggagagugucccaaauacguccggagcgcuaagcugcgcauggugaccggccucagaaauauucccucuauccagagccgggggcuguuuggagccauugcuggcuucaucgaagggggauggaccggcaugguugauggcugguauggguaccaucaccagaacgagcaaggauccggcuacgccgccgaccagaaaucuacacagaaugcuauuaacgggaucacgaauaaggugaacagcgucaucgaaaagaugaauacccaguuuacagcggugggaaaagaguucaacaaacuggagcgcagaauggaaaaucucaacaagaagguugaugacggcuuccuggauauuuggaccuauaacgccgagcuucuggugcuccuggaaaaugagcggacacuugacuuucacgacuccaacgucaaaaaucuguacgaaaaggugaaaagccaacucaagaacaaugcuaaagagaucgggaacggcugcuucgaguuuuaucauaaguguaauaacgaaugcauggagucugucaagaauggaaccuacgauuauccuaaauacuccgaagagagcaagcugaaccgcgagaaaauugacggcgugaagcuggaaucuauggggguuuaucagauccucgccauuuacuccacgguggccagcucccugguccuucuggugucucucggagcuaucagcuucuggaugugcuccaauggcucucugcaguguagaaucugcauuuga

SEQ ID NO: 193672 - RNA, 1698 nt, Artificial Sequence
  derived and/or modified CDS sequence (opt5) from hemagglutinin__InfluenzaA__ABO38032
augaaggugaaacugcucguccugcuuugcaccuucacagccacguacgcugacaccaucuguauuggcuaucacgccaacaauagcacagauaccguugacacagugcuggagaagaacgugaccgucacacauuccgugaaucuccuggaagauucucacaacgggaaacuuugccugcucaagggaaucgcgccccugcagcugggcaauuguagcguugcuggguggauucucggaaacccugagugcgaacugcuuaucuccaaagagucuuggagcuacauuguggaaaccccggaccccgagaauggcacguguuauccuggguacuuugccgauuaugaggaacugagagagcaacucuccucugucagcuccuucgaacgguuugagaucuuccccaaggagagcucuuggccuaaccauaccgugacaggaguuuccgccagcugcucucacaauggcaaguccagcuuuuaccgcaaccugcuuuggcugaccggcaaaaaugggcucuaucccaaccugucuaaguccuacgcuaauaacaaagaaaaggaggugcugguccucuggggagugcaucacccuccgaauaucggcgaccagagagcccuguaccacacagaaaacgcuuaugugagcgucguuuccucucauuacagccggcgcuucacccccgagauugccaaaagaccuaaggugcgggaucaggaagggcgcaucaacuauuacuggacgcuucuggagcccggagacacaauuaucuuugaggcgaauggcaaccucauugccccuagauaugcuuucgcccugucccggggguuuggaagcggcaucauuaccucuaaugcucccauggaugaaugugacgccaagugccagacaccgaaaggcgcgaucaacuccagccuuccuuuccaaaaugugcaccccgucaccaucggggaguguccuaaguacgugcgcucugccaaacugagaaugguuaccggacuccggaacauucccagcauccagucccgcggccuguuuggggcuauugccggauucaucgaaggcggguggacaggaaugguggauggcugguauggcuaccaucaccagaaugagcaggggucuggauacgcugccgaccaaaagagcacgcagaacgccauuaauggcaucaccaacaaagucaauuccgugaucgaaaagaugaacacacaguuuaccgcuguugggaaagaguucaauaagcuggagagacggauggaaaaccucaauaagaaaguggaugacggauuccuggacauuuggacauauaacgcggagcuucugguccuccuggaaaacgagcgcacccuugauuuucacgacagcaaugugaagaaccuguacgaaaaagucaagucucagcucaaaaauaacgccaaggagaucggcaaugggugcuucgaguuuuaucauaaguguaacaaugaaugcauggaguccgugaaaaacggcacguacgauuaucccaaguacagcgaagagucuaaacugaauagagagaagauugacggaguuaaacuggaauccaugggcaucuaucaaauucucgcuaucuacagcacaguggccuccucucugguccuucuggugagccucggggccaucuccuucuggaugugcucuaacggaagccugcagugucggauuugcaucuga

SEQ ID NO: 193673 - RNA, 1698 nt, Artificial Sequence; identical to SEQ ID NO: 192872
  derived and/or modified CDS sequence (opt5) from hemagglutinin__InfluenzaA__ABO38043

SEQ ID NO: 193674 - RNA, 1701 nt, Artificial Sequence
  derived and/or modified CDS sequence (opt5) from hemagglutinin__InfluenzaA__ABO38054
augaaggccagacugcucgugcugcuuugcgcucuggccgcgaccgacgcugauacaaucuguauuggcuaccacgccaacaauagcacggacaccgucgauacaguucucgagaaaaacgugaccgugacacauuccgucaaucugcuugaagacucucacaacgggaagcugugccggcucaaaggaaucgccccgcugcagcugggcaaguguaauauugcuggguggauccucggaaacccugagugcgaaagccugcuuuccgagcgcucuuggagcuauauuguggaaacccccaauuccgagaacggcacauguuaccccggggauuucaucgacuaugaggaacugagagagcaacucucuagcguuuccagcuuugaacgguucgagaucuuuucuaaagaguccagcuggccuaagcauaauaccacgcgcggagugaccgccgcuugcucucacgccggcaaguccagcuucuacagaaaccugcuuuggcugacagaaaaagauggcucuuaucccaaucucaacaauuccuacgucaacaagaaagggaaggaggugcugguucuguggggagugcaucacccuagcaauauuaaagaccagcagacccucuaucagaaggaaaacgcguacgucuccguggugucuagcaacuacaaucggcgcuuuacacccgagaucgccgaaagaccuaagguccggggccaagcugggcgcaugaacuauuacuggacccugcuuaaaccgggagauacgauuauguucgaggccaauggcaaccugaucgcucccugguaugccuuugcgcucuccagaggguucggaagcggcauuaucacaucuaaugccuccaugcacgagugugacaccaagugccagacaccucagggcgcuauuaacagcucucugcccuuucagaauauccauccuguuaccaucggggaaugucccaaauacgugcggagcaccaaacuucgcauggugacaggacugagaaacauuccguccauccaaucucggggccucuucggggccauugcuggauuuaucgagggcggguggacgggaaugauugauggcugguauggcuaccaccaucagaaugaacaggggagcggauaugccgccgaccagaaguccacccaaaacgcuaucaauggcaucacaaacaaggucaauagcgugauugagaaaaugaacacccaguucacagcgguugggaaggaauuuaauaaccuggagaagcgcauggagaaccugaauaaaaagguggaugacggauuccucgacaucuggaccuacaacgccgaacugcuuguccugcucgagaaugaaagaacgcuggauuuccacgacucuaacgugaaaaaucuuuacgagaagguuaaaaaccagcugcggaauaacgcuaaggaaauuggcaaugggugcuuugaguucuaucacaaguguaacaaugagugcauggaauccgugaaaaacggcacauacgauuauccuaaguacagcgaggaaucuaaacucaauagagagaagaucgacggagucaaacuggaguccaugggcguguaucaaauucuggccaucuacagcaccgucgccuccucucucgugcugcuuguuagccugggggcuaucuccuuuuggaugugcucuaacggaagccuccagugucgcauuugcaucuga

SEQ ID NO: 193675 - RNA, 1701 nt, Artificial Sequence
  derived and/or modified CDS sequence (opt5) from hemagglutinin__InfluenzaA__ABO38065
augaaggccaaacugcucgugcugcuuugcgcucugagcgccaccgacgcggauacaaucuguauuggcuaccacgcuaacaauuccacggacaccgucgauacaguucucgagaagaacgugaccgugacacauucugucaaucugcuugaagacagccacaacgggaaacugugcagacucaagggaaucgcuccccugcagcugggcaaauguuccauugccggguggauccucggaaauccugagugcgaaucucuguucagcaagaaguccuggucuuauauugccgagaccccgaacagcgaaaauggcacauguuaccccggguauuuugccgauuacgaggagcuucgggaacaacuguccagcgugucuuccuucgagcgcuuugaaaucuucccuaaagagagaagcuggcccaagcauaacaucacccggggaguuacggcuucuugcucccacaaaggcaagagcucuuuuuaucgcaaucuccuguggcuuaccgagaaaaacggcuccuacccuaaucugagcaaguccuaugugaacaauaaggaaaaagagguccucgugcuguggggaguucaucaccccucuaacauugaagaccagaagacaaucuacagaaaagagaaugccuacgugagcgucguguccagcaacuauaaccggcgcuucaccccugaaauugcgaagagaccgaaagugcgggggcaggagggccgcaucaauuacuauuggacacugcucgagcccggggauaccauuaucuuugaagccaacggaaaucugauugcuccuugguacgccuucgcucuuucuagaggcuuuggguccggaaucaucacgagcaacgccucuauggacgagugugauacaaagugccagacaccccaaggcgcgauuaauagcucccugccuuuccagaacguccaccccguuaccaucggcgaauguccgaaauaugugcggucuaccaagcuccgcauggugaccgggcugagaaauauuccuagcauccagucccggggacuuuuuggcgccauugcuggguucaucgagggaggcuggacagggaugaucgacggaugguacggcuaucaucaccagaacgaacaaggcagcggguacgccgcugaucagaagucuacgcagaaugccauuaacggaaucaccaauaaagucaacuccgugauugagaagaugaauacacaguuuaccgccguuggcaaagaguucaacaagcuggaaaaacgcauggagaaucucaacaagaagguggacgauggguuccuggacaucuggacauacaacgcugaacugcucguccugcuugagaaugaaagaacccuggacuuucaugauagcaacgugaaaaaucucuaugagaagguuaaaucucaacugaagaacaaugcgaaagagauuggaaacggcugcuucgaauuuuaccacaaguguaauaacgagugcauggaauccgugaagaaugggacguaugacuaccccaaauauagcgaggaguccaaacuuaaccgggaaaagaucgauggcgucaagcuggagucuaugggaguguaccagauccucgccauuuauagcacagucgcuuccucucuggugcugcucguuagccugggcgccaucuccuucuggaugugcagcaaugggucucuucaguguagaauuugcaucuga

SEQ ID NO: 193676 - RNA, 1701 nt, Artificial Sequence; identical to SEQ ID NO: 192315
  derived and/or modified CDS sequence (opt5) from hemagglutinin__InfluenzaA__ABO38076

SEQ ID NO: 193677 - RNA, 1701 nt, Artificial Sequence
  derived and/or modified CDS sequence (opt5) from hemagglutinin__InfluenzaA__ABO38087
augaagaccaucauugcccugagcuacauccucugccugguguucgcucagaaacuucccgucaacgacaauuccacagccacgcugugucucggccaccaugcgguuccuaacgggacccuggugaagacaauuaccaaugaucacaucgaggugacaaacgcuaccgaacuuguccaaucuagcuccacaggaagaauuugcgacucuccgcaucagauccuggauggcgagaauuguacccucaucgacgcccugcugggggauccccacugcgacggauuucagaacaaagaaugggaucucuucguggagcggagcacggccuauuccaauuguuacccuuaugacguucccgauuacgcuucucugcgcagccuuguggccuccagcggcacccuggaauuuaacaaugagucuuucaacuggacaggggucgcucagaauggaaccuccagcgccugcaagagacggucuauuaaauccuuuuucagccgccucaacuggcugcaucaacuuaaguauaaguacccugcgcugaaugugacaaugcccaacaaugagaaauuugacaagcucuauaucuggggcguucaccacccuucuaccgauuccgaccagauuagccuguacgcccaggcuuccggcagagugacggucucuacaaaacggagccagcaaaccgugaucccgaacauugggucccgccccugggugagaggagucagcucucggaucuccauuuacuggacaaucguuaagccuggcgauauccugcucauuaacagcaccgggaaucugaucgcuccccgcggauauuucaaaauuagaucuggcaagagcuccaucaugcggucuaacgccccuauugggaaguguaauagcgaaugcaucacccccaacggauccaucccgaaugacaaaccuuuucagaacgugaaucgcauuacauacggcgccugucccagauaugugaagcagaacacgcuuaaacuggcgaccggcaugcggaaugucccugagaagcagacacgcgggaucuucggagccauugcuggcuuuaucgaaaacgggugggagggaaugguggacggcugguacggguucagacaucaaaauagcgagggaaccggccaggccgcugaucucaaaucuacacaggccgccauuaaccaaaucaauggcaagcugaaccggcuuaucgagaaaaccaaugaaaaguuucaccagauugaaaaggaguucuccgaaguugaggggagaauccaggaccuggagaaauauguggaagauacgaagauugaccucuggagcuacaacgcugagcugcuggucgcgcucgaaaaccagcauacaaucgaucugaccgacucugagaugaauaaacuuuucgaacgcacccggaagcaacugagagagaacgccgaggaugugggaaauggcugcuuuaaaauuuaucacaagugugacaacgcuugcaucggguccauucgcaauggaacauacgaucacgacguuuaccgggaugaagcccucaacaauagauuccagaucaagggcguggagcugaaaagcggguauaaggacuggauccuuuggauuuccuuugccaucucuugcuuccugcucugugucgugcugcugggcuuuauuaugugggcuugccagaaaggaaacauccgcuguaauauuugcaucuga

SEQ ID NO: 193678 - RNA, 1689 nt, Artificial Sequence
  derived and/or modified CDS sequence (opt5) from hemagglutinin__InfluenzaA__ABO38098
auggccaucauuuaccugauccuccuguucaccgcugugagaggcgaccagauuugcaucggguaucacgccaacaauagcacagagaaggucgauacgauucuugaacggaacguuaccgugacacaugcgaaagacauccuggagaagacccacaauggaaaacucuguaagcugaacggcauucccccucuugaacugggggauugcuccaucgcuggauggcuccugggcaauccggagugugaccgccugcucucugugcccgaauggagcuacaucauggagaaagagaacccuagagaugggcugugcuaucccggauccuuuaaugacuacgaagaacuuaagcaucugcucucuagcgucaagcacuucgaaaaagugaagauucugccuaaagaucgguggacacaacauaccacaaccggcggcucccgcgccugugccguuucugggaaccccagcuuuuucagaaauaugguguggcuuacgaagaaaggauccaacuauccugucgcuaagggcagcuacaauaacaccucuggggagcagaugcugaucauuuggggagugcaccacccgaaugacgagacagaacagcggacccucuaucagaacguuggcacauacguguccgucgggaccagcacgcugaauaagcgcucuacacccgauaucgccaccagaccuaaagugaacggacaaggcggccggauggaguuuuccuggacacugcucgacaugugggauaccauuaacuucgaaagcaccgggaaucugaucgcucccgaguacggauuuaagaucucuaaacgcggcuccagcgggauuaugaagacagaaggaacgcuuggcaacugcgagaccaaaugucagacaccucugggggccaucaauaccacacuccccuuccauaacgugcacccgcugaccauuggagagugcccuaaguaugucaaauccgaaaaacuuguucuggcgacgggccucagaaaugugccccagaucgagucucggggccuguuuggggccauugcuggauucaucgaaggcggguggcagggaaugguggacggcugguacggguaucaucacagcaacgaucaaggcuccggauacgccgcugacaaggagagcacacagaaagccuuugacggcaucaccaauaaggucaacucugugauugaaaagaugaauacccaguucgaggcgguugggaaggaguuuuccaaccuggaacgcagacucgagaaucugaacaaaaagauggaagauggauuccuugacguguggacauauaaugccgagcugcucguccugauggaaaacgagcggacccuugauuuccacgacagcaaugugaagaaccuguacgauaaaguucgcaugcagcucagagacaacgugaaggagcugggcaauggguguuuugaguucuaucauaaaugcgaugacgaguguaugaacucugucaagaauggaacauacgauuacccuaaauaugaagaggagagcaagcugaaccggaaugaaaucaagggcgugaaacucuccucuaugggggucuaccaaauucuggcuaucuaugccacgguggcuggcagccuuucccuggccauuaugauggccggaaucagcuuuuggaugugcucuaacggcucccuccagugcagaaucuguauuuga

SEQ ID NO: 193679 - RNA, 1701 nt, Artificial Sequence
  derived and/or modified CDS sequence (opt5) from hemagglutinin__InfluenzaA__ABO38230
augaagaccaucauugcccugagcuacaucuucugccagguguuugcucaaaaccuccccggcaaugacaacuccacagccacgcugugucuugggcaccaugcggucccuaauggaacccugguuaaaacaauuaccaacgaucagaucgaggugacaaaugcuaccgaacucgugcagucuagcuccacaggcagaauuugcgacaacccgcaccggauccuggaugggaagaauuguacccuuaucgacgcccugcucggagauccccauugcgacggcuuccagaacgagaaaugggaucuguuugucgaacgcucuaaggccuucagcaauuguuauccuuacgacgugcccgauuaugcuucccugagaucucucguugccagcuccgggacgcuggaguuuuucaacgaaggauuuaauuggaccggcgugacacaaaacggcgggagcuacgcuugcaaacggggaccugacaauucuuucuuuucccgccuuaacuggcuguauaagagcgagucuaccuaccccguccucaaugugacaaugccuaacaacgauaauuucgacaagcuguauauuuggggcguucaccauccguccaccgauaaagagcagacgaaccuuuacgugcaggccagcgggagagucacagugucuaccaagcggucccagcaaacaaucauucccagcgugggaucccgcccuugggucagaggccugucuagccggaucuccauuuacuggaccaucguuaaacccggggacgugcuccugauuaauagcaacggaaaucugaucgcgccucgcggcuauuuuaagaucagaaccggcaaaucuuccauuaugcggagcgacgcccccaucgggacauguucuagcgaaugcauuacgccgaacggauccaucccuaaugauaagcccuuccagaacguggacaagauuaccuacggcgcuuguccuaaauaugucaagcagaauacacucaaacuggccaccgggaugcgcaacgugcccgagaagcagacaagaggaaucuuuggcgcuaucgccggguucauugaaaauggaugggagggcaugaucgauggcugguacggguuccggcaccaaaacucugagggaaccggccaggcggccgaccuuaaaagcacgcaggcugccauugaucaaaucaaugggaagcugaaccgcguuauugagaaaacaaaugaaaaguuucaccagaucgaaaaggaguucuccgaaguggagggaagaauccaggaccucgagaaauaugucgaagauaccaagauugaccuguggagcuacaacgcugagcuucugguggcccucgaaaaccagcauaccaucgaucugacagacucugagaugaauaaacuguuugaaaagacccggagacaacuccgcgagaacgccgaggauaugggcaaugggugcuucaaaauuuaucacaagugugacaacgcuugcaucggcuccauucggaauggaacauacgaccaugauguuuacagagacgaagcgcugaacaaucgcuuucagaucaagggcguggagcuuaaaagcggguauaaggauuggauucuguggaucucuuucgccaucuccugcuuucuccugugugucgugcuucugggauucauuaugugggcuugccagaaaggcaacauccgguguaauauuugcaucuga

SEQ ID NO: 193680 - RNA, 1701 nt, Artificial Sequence
  derived and/or modified CDS sequence (opt5) from hemagglutinin__InfluenzaA__ABO38241
augaagaccaucauugcccugagcuacaucuccugccucguguucgcucagaaacugcccggcaacgacaauucuacagccacgcuuugucuggggcaccaugcggucccuaacggaacccucguuaagacaauuaccaaugaucaaaucgaggugacaaacgcuaccgaacuggugcagagcuccucuacaggcagaauuugcgacagcccgcaccggauccuugaugggaaaaauuguacccugaucgacgcccuccugggagauccccauugcgacggcuuucagaacgagaagugggaucuguucgucgaacgcuccaaagccuuuucuaauuguuauccuuacgacgugcccgauuaugcuagccucagaucccugguugccagcucugggacgcuugaguucauuaacgaaggauuuaauuggaccggcgugacacaguccggcgggagcuauaccugcaagcggggaucugucaacuccuucuuuagccgccugaauuggcucuacgagucugaguccaaguacccugcucugaacgugacaaugcccaauaacggcaaauucgacaagcuguauaucuggggaguucaccauccuagcaccgauaaagaacaaacgaaucuguacgugagagccuccgggcgggucacagugucuaccaagcgcagccagcagacagugauuccgaacaucggccccagaccuuggguccgggggcucuccagccgcauuucuaucuacuggaccauuguuaaacccggagacauccugcugaucaacuccaccggcaaucucauugcgccuagaggcuauuuuaagauccggacagggaaguccucuauuaugcgcagcgaugcccccaucggaacguguuccucuggcugcauuaccccgaacgggagcaucccuaaugacaaacccuuccagaacgugaauaagaucacauacggagcuuguccuagauaugugaaacaaaacacccugaaacuugccacaggcaugcggaauguccccgagaaacagacccgcgggauuuuuggagcuaucgccggcuucauugaaaacggcugggaggggaugguggacggaugguacggcuuuagacaccagaauagcgaggggacgggacaggcggccgaucuuaagagcacacaagcugccaucgaccagauuaacggcaaacucaaucggcugaucgaaaagaccaacgagaaguuccaccagaucgaaaaagaguucucugaaguugaggggcgcauucaagaucuugagaaguauguggaagacaccaaaaucgaucugugguccuacaaugcugagcuccuggucgcccuggaaaaccagcauacaauugacaugaccgauagcgagaugaauaagcucuuugaaaagacaagaaagcagcugcgggagaacgccgaggacaugggcaacggaugcuucaagaucuaucacaaaugugauaaugcuugcauuggcucuaucagaaacgggacguacgaccaugauguguaccgcgacgaagcgcuuaauaaccgguuucagauuaagggaguugagcugaaauccggcuauaaggacuggauccucuggaucagcuucgccauuuccugcuuucugcuuugugugguccugcucggguucaucaugugggcuugccaaaaaggaaauauuagauguaacaucugcauuuga

SEQ ID NO: 193681 - RNA, 1701 nt, Artificial Sequence; identical to SEQ ID NO: 192354
  derived and/or modified CDS sequence (opt5) from hemagglutinin__InfluenzaA__ABO38252

SEQ ID NO: 193682 - RNA, 1689 nt, Artificial Sequence
  derived and/or modified CDS sequence (opt5) from hemagglutinin__InfluenzaA__ABO38296
auggugaucauuuaccugauccuccuguucaccgccgucagaggcgaccagauuugcaucggguaucacgcuaacaauagcacagagaagguugauacgauucuugaacggaacgugaccgugacacaugccaaagacauccuggagaagacccacaauggaaaacucuguaagcugaacggcauucccccucuugaacugggggauugcuccaucgcgggauggcuccugggcaauccggagugugaccgccugcucucuguccccgaauggagcuacaucauggagaaagagaacccuagagaugggcugugcuaucccggauccuuuaaugacuacgaagaacuuaagcauuuccugucuagcgugaagcacuuugaaaaaguuaagauucucccuaaagaucgguggacacaacauaccacaaccggcggcucccgcgcuugugccgugucugggaaccccagcuucuuuagaaauauggucuggcugacgaagaaaggauccaacuauccuguggccaagggcagcuacaauaacaccucuggggagcagaugcuuaucauuuggggaguucaccacccgaaugacgagacagaacagcggacccuguaucagaacgugggcacauacgucuccguggggaccagcacgcucaauaagcgcucuacacccgauaucgcuaccagaccuaaagugaacggacugggcggccggauggaguucuccuggacacugcucgacaugugggauaccauuaacuuugaaagcaccgggaaucugaucgcccccgaguacggauucaagaucucuaaacgcggcuccagcgggauuaugaagacagaaggaacgcuuggcaacugcgagaccaaaugucaaacaccucugggggcuaucaauaccacacuccccuuucauaacguccacccgcugaccauuggagagugcccuaaguauguuaaauccgaaaaacuugugcuggccacgggccucagaaaugugccccagaucgagucucggggccuguucggggcgauugccggauuuaucgaaggcggguggcagggaauggucgacggcugguacggguaucaucacagcaacgaucagggcuccggauacgcugccgacaaggagagcacacaaaaggcuuucgacggcaucaccaauaaggugaacucuguuauugagaaaaugaauacccaguuugaggccguggggaaggaguucuccaaccuggaacgcagacucgagaaucugaacaaaaagauggaagauggauuccuugacgucuggacauauaaugcggagcugcucgugcugauggaaaacgagcggacccuugauuuucacgacagcaauguuaagaaccuguacgauaaagugcgcaugcagcucagagacaacgccaaggagcugggcaauggguguuucgaauuuuaucauaaaugcgaugacgaguguaugaacucugucaagaauggaacauacuacuauccuaaauacgaagaggagagcaagcugaaccggaaugaaaucaagggcgugaaacucuccucuaugggggucuaucagauucuggcuaucuacgccacgguggcuggcagccuuucccuggccauuaugauggccggaaucagcuucuggaugugcucuaacggcucccuccaaugcagaaucuguauuuga

SEQ ID NO: 193683 - RNA, 1698 nt, Artificial Sequence; identical to SEQ ID NO: 192942
  derived and/or modified CDS sequence (opt5) from hemagglutinin__InfluenzaA__ABO38318

SEQ ID NO: 193684 - RNA, 1698 nt, Artificial Sequence; identical to SEQ ID NO: 192872
  derived and/or modified CDS sequence (opt5) from hemagglutinin__InfluenzaA__ABO38329

SEQ ID NO: 193685 - RNA, 1701 nt, Artificial Sequence
  derived and/or modified CDS sequence (opt5) from hemagglutinin__InfluenzaA__ABO38351
augaaggccagacugcucgugcugcuuugcgcucuggccgcgaccgacgcugauacaaucuguauuggcuaccacgccaacaauagcacggacaccgucgauacaguucucgagaaaaacgugaccgugacacauuccgucaaucugcuugaagacucucacaacgggaagcugugccggcucaaaggaaucgcuccccugcagcugggcaaguguaauauugccggguggcuccugggaaacccugagugcgauccgcuucugcccgcccgcagcugguccuauaucguggaaaccccuaauucugagaacggcauuuguuaccccggggcuuucaucgacuaugaagaacucagagagcaacugagcuccguuucuagcuuugaacgguucgagaucuuuccuaaagaauccagcuggcccaaucauaacacaaauauuggagugaccgccgcgugcucucacgccggcaaguccagcuucuaccgcaaccuucuguggcucacgaagaaaggcgggucuuauccuaagcugaaaaauuccuacgucaacaagaaaggaaaggaggugcugguucucuggggcauccaucacccgagcaauucuaaggaucagcagacccuguaucagaacgagaacgcuuacguguccgucgugagcuccaauuacaacagacgguuuacacccgaaauugccgagcgcccugaagugagagaccaagcugggcggaugaauuauuacuggacccuucuggagcccggagauacaaucauguucgaagccaacggcaaucucgucgcgccuugguaugccuuugcucugucucgcggguucggaagcggcauuaucaccuccaacgccagcaugcacgaguguaauacgaaaugccagacaccccagggcgcuauuaacucuucccuuccguuucagaauauccauccuguuaccaucggggagugucccaaguacgugagaagcgccaaacugcggauggugacaggacuccgcaacauuccuucuauccaaagcagaggccuguucggggccauugcuggauuuaucgaaggcggguggaccggaaugauugacggcugguauggcuaccaccaucagaaugagcagggguccggauaugcggccgaucagaagucuacccaaaacgcuaucaauggcaucacaaacaaagucaauagcgugauugaaaagaugaacacgcaguucaccgccguugggaaagaguuuaacaaucuggaaaagcggauggagaaccucaauaagaaaguggacgauggauuccuggacaucuggacauacaacgccgagcuucugguccuccuggaaaaugagcgcacccuugacuuccacgauuccaacgugaagaaucuguacgaaaaaguuaagagccagcucaaaaacaaugcuaaggagauuggcaacgggugcuuugaguucuaucacaagugugacaaugagugcauggagucugugagaaacggcacauacgauuaucccaaauacuccgaagagagcaagcugaaucgggagaaaaucgacggagucaagcuggaaucuaugggcguguaucaaauucucgccaucuacuccaccgucgcgagcucccuggugcuucugguuucucucggggcuaucagcuuuuggaugugcuccaacggaucucugcaguguagaauuugcaucuga

SEQ ID NO: 193686 - RNA, 1701 nt, Artificial Sequence
  derived and/or modified CDS sequence (opt5) from hemagglutinin__InfluenzaA__ABO38362
augaaggccaaacugcucgugcugcuuugcgcucugagcgccaccgacgcggauacaaucuguauuggcuaccacgcuaacaauuccacggacaccgucgauacaguucucgagaagaacgugaccgugacacauucugucaaucugcuugaagacagccacaacgggaaacugugcagacucaagggaaucgcuccccugcagcugggcaaauguuccauugccggguggauccucggaaauccugagugcgaaucucuggugagcaagaaguccuggucuuauauugccgagaccccgaacagcgaaaauggcacauguuaccccggguauuucgccgauuacgaggagcuucgggaacaacuguccagcguuucuuccuuugagcgcuucgaaaucuuuccuaaagagagcucuuggcccaagcauaacgugaccagaggagucacggcuuccugcagccacaaaggcaagucuuccuucuaucggaaucuccuguggcuuaccgagaaaaacggcagcuacccuaaucuguccaagucuuaugugaacaauaaggaaaaagagguucucgugcuguggggaguccaucaccccagcaacaucgaaaaucagaagacaauuuaccgcaaagagaacgccuacguguccguggucagcucucacuauaacagacgguuuaccccugaaaucgcgaagcgcccgaaaguuagagaccaggaggggcggauuaauuacuauuggacacugcucgagcccggcgauaccaucauuuucgaagccaacgggaaucugaucgcuccuugguacgccuuugcucuuucccgcggauucggcagcgggauuaucacgucuaacgccagcaucgacgagugugaugcgaagugccagacaccccaaggagccauuaauuccucucugccuuuucagaacgugcaucccgugaccaucggcgaauguccgaaauaugucagaagcacaaagcuccggauggugaccggccugcgcaauauuccuuccauccagagcagagggcuuuucggagcuauugccggcuuuaucgaagggggauggaccggcaugaucgacgggugguacggauaucaccaucagaacgaacaaggcucuggcuacgcugccgaucagaaguccacacagaaugccauuaacgggaucacgaauaaaguuaacagcgugauugagaagaugaauacccaguucacagcugucggaaaagaguuuaacaagcuggaaaaacggauggagaaucucaacaagaagguggacgauggcuuccuggacaucuggaccuacaacgcggaacugcucguucugcuugagaaugaacgcacacuggacuuccacgauucuaacgugaaaaaucucuaugagaaggucaaaucccaacugaagaacaaugccaaagagauugggaacggaugcuuugaguucuaccacaaguguaauaacgagugcauggaaagcgugaagaauggcaccuaugacuaccccaaauauuccgaggagucuaaacuuaacagagaaaagaucgauggggucaagcuggagagcaugggcguguaccagauccucgcuauuuauuccacgguugccucuagccuggugcugcucgucucccugggagccaucagcuuuuggaugugcucuaauggcucccuucagugucggauuugcaucuga

SEQ ID NO: 193687 - RNA, 1698 nt, Artificial Sequence
  derived and/or modified CDS sequence (opt5) from hemagglutinin__InfluenzaA__ABO38373
augaaggccagacugcucgugcugcuuugcgcucuggccgcgaccgacgcugauacaaucuguauuggcuaccacgccaacaauagcacggacaccgucgauacaguucucgagaaaaacgugaccgugacacauuccgucaaucugcuugaagacucucacaacgggaagcugugccggcucaaaggaaucgccccgcugcagcugggcaaguguaauauugcuggguggauccucggaaacccugagugcgaaagccugcuuuccgagcgcucuuggagcuauauuguggaaacccccaauuccgagaacggcacauguuaccccggggauuucaucgacuaugaggaacugagagagcaacucucuagcguuuccagcuuugaacgguucgagaucuuuucuaaagaguccagcuggccuaagcauaccacgggaggcgugaccgccgcuugcucucacgccggcaaguccagcuucuaccgcaaucugcuuuggcugacagaaaaagaugggucuuaucccaaccucaauaacuccuacgucaauaagaaaggaaaggaggugcugguucuguggggcgugcaucacccuagcaacauuaaagaccagcagacccucuaucagaaggaaaaugcguacgucuccguggugucuagcaacuacaacagacgguuuacacccgagaucgccgaacgcccuaaggucagagggcaagcuggacggauuaauuauuacuggacccugcuuaaaccgggcgauacgaucauguucgaggccaacgggaaucugauugcucccugguaugccuuugcgcucucccgcggauucggcagcggcaucauuacaucuaacgccuccaugcacgagugugacaccaagugccagacaccucagggggcuaucaauagcucucugcccuuucagaacauccauccuguuaccauuggagaaugucccaaauacgugagaagcaccaagcuccggauggugacaggccugcgcaauaucccguccauucaaucuagagggcuuuucggagccaucgcuggcuuuauugaagggggauggacgggcaugaucgauggcugguauggguaccaccaucagaacgagcagggaagcggcuaugccgccgaccagaaauccacccaaaaugcuaucaacgggauuacaaauaaggucaacagcgugaucgagaaaaugaauacccaguucacagcgguuggaaaggaauuuaacaaucuggagaagcggauggagaaccugaacaaaaagguggaugacggcuuccucgacauuuggaccuacaaugccgaacugcuuguccugcucgagaacgaacgcacgcuggauuuccacgacucuaaugugaaaaaccuuuacgagaagguuaaaaaucagcugagaaacaaugcuaaggaaaucgggaacggcugcuuugaguucuaucacaaguguaauaacgagugcauggaauccgugaaaaauggaacauacgauuauccuaaguacagcgaggaaucuaaacucaaccgggagaagauugacggcgucaaacuggaguccauggggguguaucaaauccuggccaucuacagcaccgccgcuuccucucucguccugcuugugagccugggagccauuuccuuuuggaugugcucuaauggcagccuccaguguagaaucugcauuuga

SEQ ID NO: 193688 - RNA, 1701 nt, Artificial Sequence
  derived and/or modified CDS sequence (opt5) from hemagglutinin__InfluenzaA__ABO38384
augaaggccagacugcucgugcugcuuugcgcucuggccgcggcugacgccgauaccaucuguauuggcuaccacgccaacaauagcacagacacggucgauaccguucucgagaaaaacgugacagugacccauuccgucaaucugcuugaagacucucacaacgggaagcugugccggcucaaaggaaucccuccccugcagcugggcaaguguaauauugcuggguggcuccugggaaacccggagugcgauagccuucugcccgcccgcuccuggucuuauaucguggaaacaccuaauagcgagaacggcgcuuguuaccccggggacuucauuaauuaugaggagcucagagagcaacuguccucuguuagcuccuuugaacgguucgagaucuuuccuaaagaaagcucuuggcccaagcauaacaccacaaagggagugaccgccgcgugcucccacgccggcaaaagcucuuucuaccgcaaucuucuguggcucacgaagaaagaggauuccuauccuaagcugaaaaacagcuacgucaauaagaagggcaaagaggugcugguucucuggggagugcaucacccgucuuccagcaaggaacagcagacccuguaucagaacgagaaugcuuacgucuccguggugucuagcaacuacaacagacgguuuacacccgaaaucgccgagcgcccuaaagucagagaccaaaccgggcggaugaauuauuacuggacacuucuggaacccggcgauaccauuaucuucgaggcuaacgggaaucucauugccccuugguaugcguuugcccugucccgcggauucggcagcgggaucauuacgucuaacgcuuccaugcacgaguguaauacaaagugccagacaccccagggagccaucaacagcucucuuccguuucagaauauucauccuguuaccaucggcgaaugucccaaauacgugagaagcgcuaagcugcggauggugaccggccuccgcaacaucccuuccauucaaucuagagggcuguucggagccaucgccggcuuuauugaagggggauggaccggcaugaucgacgggugguauggauaccaccaucagaaugaacagggcagcggcuaugcugcggaucagaaauccacacaaaacgccauuaaugggaucacgaacaaggucaauagcgugaucgagaagaugaacacccaguucacagcuguuggaaaagaauuuaauaaccuggagaagcggauggagaaccucaauaaaaagguggacgauggcuuccuggacauuuggaccuacaacgccgaacuucugguccuccuggagaaugaacgcacacuugacuuccacgauucuaacgugaaaaaucuguacgagaagguuaagucccagcucaaaaacaaugccaaggaaaucgggaacggaugcuuugaguucuaucacaaaugugacaaugagugcauggaaagcgugagaaacggcaccuacgauuaucccaaguacucugaggaauccaaacugaaucgggagaagauugacggggucaagcuggagagcaugggcguguaucaaauccucgcuauuuacuccacggucgccucuagccuggugcuucugguuucccucggagcgaucucuuuuuggaugugcagcaacggcucccugcaguguagaaucugcauuuga

SEQ ID NO: 193689 - RNA, 1701 nt, Artificial Sequence
  derived and/or modified CDS sequence (opt5) from hemagglutinin__InfluenzaA__ABO38395
augaaggccaagcugcucgugcugcuuugcgcuuucaccgccacagacgcggauacgaucuguauuggcuaccacgcuaacaauagcaccgacacagucgauaccguucuggagaagaacgugacagugacccauuccgucaaucuccuggaagacucucacaacgggaaacuuugcagacugaagggaaucgccccgcuccagcugggcaauuguagcauugccggguggauccugggaaacccugagugcgaaucccucuuuucuaaaaagagcugguccuauauugcugagacacccaauucugaaaacggcaccuguuaccccggguauuucgccgauuacgaggagcugcgggaacaacuuagcuccgugagcucuuuugagcgcuucgaaaucuuuccuaaggaguccagcuggcccaaucauacgguuaccaaaggagugacagcuucuugcucccacaagggcagaagcucuuucuaucggaaccugcucuggcugaccaaaaagaauggcuccuacccuaaccuuagcaaauccuaugucaauaacaaggagaaggaagugcugguucucuggggagugcaucaccccucuaauaucggggaccagcgcgccauuuaccacacagagaacgcguacgucagcgugguguccagccauuauaacagacgguuuaccccugaaaucgccaaacgcccgaaggucagagaucaggagggccggauuaauuacuauuggacgcugcuggaacccggggacacaaucauuuucgaggcuaacggaaaucucaucgccccuugguacgcuuuugcccugucucgcggcuucggguccggaauuaucaccagcaacgcgucuauggaugagugugacgccaaaugccagacaccccaaggcgcuaucaauagcucccuuccuuuucagaacguucaccccgugaccauuggcgaauguccgaaguaugugagaucuaccaaacugcggauggucacagggcuccgcaauaucccuagcauucaguccagaggacuguucggcgccaucgcuggguuuauugagggaggcuggacggggaugaucgauggaugguacggcuaucaucaccagaacgaacaaggcagcggguacgccgccgaccagaagucuacccagaaugcuaucaacggaauuacaaauaaagugaacuccguuaucgagaagaugaauacccaguucacagcggugggcaaggaguucaacaaacuugaacggcgcauggagaaucugaacaagaaagucgaugacggguuucucgacauuuggaccuacaacgccgaacugcuggugcuccuggagaaugaaagaacgcuugauuuccacgacagcaacguuaagaaucuguaugagaaagugaagucucaacucaagaacaaugcuaaagaaaucggaaacggcugcuuugaguucuaccauaaguguaauaacgagugcauggaauccgucaaaaaugggacauaugauuaccccaaguauagcgaggaauccaaacugaaccgggagaagauugacggcgugaaacuugagucuaugggagucuaccagauccuggccaucuauagcaccguggccuccucucucguucugcuggugagccucggcgcuauuuccuuuuggaugugcagcaaugggucucugcaguguagaaucugcauuuga

SEQ ID NO: 193690 - RNA, 1701 nt, Artificial Sequence
  derived and/or modified CDS sequence (opt5) from hemagglutinin__InfluenzaA__ABO38406
augaaggccaaacugcucgugcugcuuugcgcucugagcgccaccgacgcggauacaaucuguauuggcuaccacgcuaacaauuccacggacaccgucgauacaguucucgagaagaacgugaccgugacacauucugucaaucugcuugaagacaaccacaaugggaaacugugcaagcucaaaggaaucgccccgcugcagcugggcaaguguagcauugccggguggauccucggaaacccugagugcgaaucccuguucucuaagaaaagcugguccuauauugcugagacccccaauucugaaaacggcacauguuaccccggguauuuugccgauuacgaggagcuuagagaacaacugagcuccgugagcucuuucgagcgguuugaaaucuucccuaaggaguccagcuggcccaaucauaacguuaccaaaggagugacggcuucuugcucccacaagggcaaaagcucuuuuuaucgcaaucuccuguggcuuaccgagaagaagggcuccuacccuaaccugagcaaauccuaugucaauaacaaggaaaaagaggugcucguucugugggggauccaucaccccucuaauauugaagaccagaagacaaucuacagaaaagagaacgccuacgugagcgucguguccagccacuauaaccggcgcuucaccccugaaauugcgaagagaccgaaagugcgggaucaggagggacgcaucaauuacuauuggacacugcucgagcccggcgacaccauuaucuuugaagccaacgggaaucugauugcuccuugguacgccuucgcucuuucuagaggauuuggcuccgggaucaucacgagcaacgccucuauggaugagugugacgcgaagugccagacaccccggggagccauuaauagcucccugccuuuccaaaacguccaucccguuaccaucggcgaauguccgaaguaugugcgcucuacaaaacucagaauggugaccggccugcggaauauuccuagcauccagucccgcgggcuuuuuggagcuauugccggcuucaucgaagggggauggaccggcaugaucgaugggugguacggauaucaccaucagaacgaacagggcagcggcuacgcugccgaccaaaagucuacacaguccgccauuaaugggaucacgaacaaagucaauagcauuaucgagaagaugaacacccaguuuacagcugugggaaaagaguucaauaagcuggaaaagagaauggagaaccucaauaaaaagguugaugacggcuuccuggacauuuggaccuacaacgcggaacugcucgugcugcuugagaacgaacggacacuggauuuucacgacucuaaugucaaaaaccucuaugagaaggugaaaucccagcugaagaauaacgccaaggagaucgggaauggaugcuucgaauuuuaccacaaauguaacaaugagugcauggaaagcguuaagaacggcaccuaugauuaccccaaauauuccgaggagucuaaacuuaaucgcgagaagaucgacggggugaagcuggagagcaugggcgucuaccaaauucucgcuaucuauuccacgguggccucuagccugguccugcucgugucccugggagccauuagcuucuggaugugcucuaacggcucccuucaguguagaaucugcauuuga

SEQ ID NO: 193691 - RNA, 1701 nt, Artificial Sequence
  derived and/or modified CDS sequence (opt5) from hemagglutinin__InfluenzaA__ABO38417
augaagaccaucauugcccugagcuacauccucugccugguguucgcucagaaacuucccgucaacgacaauuccacagccacgcugugucucggccaccaugcgguuccuaacgggacccuggugaagacaauuaccaaugaucacaucgaggugacaaacgcuaccgaacuuguccaaucuagcccgacaggaagaauuugcgacucuccccaucagauccuggauggcgagaauuguacccucaucgacgcccugcugggggauccucacugcgacggauuucagaacaaagaaugggaucucuucguggagcggucuacggccuauagcaauuguuaccccuaugacguuccugauuacgcuucccugcgcucucuuguggccagcuccggcacccuggaauuuaacaaugagagcuucaacuggacaggggucgcucagaauggaaccucuuccgccugcaagagacggagcauuaaauccuuuuucucccgccucaacuggcugcaucaacuuaaguauaaguaccccgcgcugaaugugacaaugccuaacaaugagaaauuugacaagcucuauaucuggggcguucaccacccgagcaccgauucugaccagauuucccuguacgcccaggcuagcggcagagugacggucuccacaaaacggucucagcaaaccgugauccccaacauugggagccgcccuugggugagaggagucuccagccggaucucuauuuacuggacaaucguuaagcccggcgauauccugcucauuaacuccaccgggaaucugaucgccccucgcggauauuucaaaauuagaagcggcaagucuagcaucaugcgguccaacacccccauugggaaguguaauucugaaugcaucacaccgaacggaagcaucccuaaugacaaacccuuucagaacgugaaucgcauuacguacggcgcuuguccuagauaugugaagcagaacacccuuaaacuggccacaggcaugcggaauguccccgagaagcagacccgcgggaucuucggagcgauugccggcuuuaucgaaaacgggugggagggaaugguggacggcugguacggguucagacaucaaaauuccgagggaacaggccaggcugccgaucucaaaagcacccaggcugccauuaaccaaaucaauggcaagcugaaccggcuuaucgagaaaacgaaugaaaaguuucaccagauugaaaaggaguucucugaaguugaggggagaauccaggaccuggagaaauauguggaagauacaaagauugaccucugguccuacaacgccgagcugcuggucgcucucgaaaaccagcauaccaucgaucugaccgacagcgagaugaauaaacuuuucgaacgcacacggaagcaacugagagagaacgcggaggauaugggaaauggcugcuuuaaaauuuaucacaagugugacaacgccugcaucgggucuauucgcaauggaaccuacgaucacgacguguaccgggaugaagcucucaacaauagauuccagaucaagggcguugagcugaaauccggguauaaggacuggauccuuuggauuagcuuugccaucuccugcuuccugcucugugugguccugcugggcuuuauuaugugggccugccagaaaggaaacauccgcuguaauauuugcaucuga

SEQ ID NO: 193692 - RNA, 1689 nt, Artificial Sequence
  derived and/or modified CDS sequence (opt5) from hemagglutinin__InfluenzaA__ABO38712
auggccaucauuuacuucauccugcucuuuaccgcugugagaggcgaccagauuugcaucggguaucacgccaacaauagcacagagaaggucgauacgauucuggaacggaacguuaccgugacacaugcgaaagacauccuugagaagacccacaauggaaaacuguguaagcucaacggcauucccccucuggaacuuggggauugcuccaucgcuggauggcugcucggcaauccggagugugaccgccugcugagagugcccgaauggucuuacaucauggagaaagagaacccucgguauagccucugcuaccccggguccuucaaugauuaugaggaacugaagcaucuucugucuagcgucaagcacuuugaaaaagugcgcauucucccuaaggacggauggacacaacauaccacauccggcggcucuaaagccugugccguuagcgggaaguccagcuucuuuagaaacaugguguggcugaccaaaaagggacccaauuacccugucgcuaagcggucuuauaacaauacguccggcgagcagaugcuuaucauuuggggagugcaccacccgaaagaugaggccgaacagcgcgcucuguaccagaagguugggaccuacgugagcgccucuacauccacccucaacaaaagaagcacacccgagaucgcggcccggccugaagucaauggccuggggucucgcauggaguucuccuggacccugcucgacgugugggauacgauuaacuuugaaagcacaggaaaucugguggcucccgaguauggcuucaagaucuccaaaagaggcucuagcgggaucaugaagaccgagggaacacuuggcaacugcgaaaccaaaugucaaaccccucugggggccauuaacacaacgcuccccuuucauaauguccacccgcugaccaucggagagugcccuaaguacguuaaguccgaaaaacuugugcuggcuacaggccuccggaacgugccccagauugagagccgcgggcuguucggagccaucgcgggcuuuauugaaggcggguggcagggaauggucgacggcugguauggguaccaucacucuaaugaucagggauccggcuaugccgcugacaaggagagcacccaaaaagccuucgauagaaucacaaacaagguuaauucugugaucgagaaaaugaacacccaguuugaagcuguggggaaggaguucagcaaucuggaaaagcggcucgagaaccugaauaaaaagauggaagacggcuuccuugacgucuggacguacaacgccgagcugcucgugcugauggagaaugaacgcacacuugauuuucacgacuccaacguuaaaaaucuguauaacaaggugagaaugcagcuccgggauaaugucaaagagcugggaaacggcuguuucgaauuuuaccauaagugcgacgaugaguguaugucuagcgugaagaacgggaccuacgacuauccuaaauacgaggaagaguccaagcugaaaagaaaugaaauuaagggagucaaacucagcucuaugggcguguaucagauccuggccauuuacgcuaccguugcggggucccuuagccuggccaucaugauugcuggaaucucucucuggaugugcuccaacggcagccugcaaugccgcaucuguauuuga

SEQ ID NO: 193693 - RNA, 1689 nt, Artificial Sequence
  derived and/or modified CDS sequence (opt5) from hemagglutinin__InfluenzaA__ABO38723
auggccaucauuuacuucauccugcucuuuaccgcugugagaggcgaccagauuugcaucggguaucacgccaacaauagcacagagaaggucgauacgauucuggaacggaacguuaccgugacacaugcgaaagacauccuugagaagacccacaauggaaaacuguguaagcucaacggcauucccccucuggaacuuggggauugcuccaucgcuggauggcugcucggcaauccggagugugaccgccugcugagagugcccgaauggucuuacaucauggagaaagagaacccucgguauagccucugcuaccccggguccuucaaugauuaugaggaacugaagcaucuucugucuagcgucaagcacuuugaaaaagugcgcauucucccuaaggacggauggacacaacauaccacauccggcggcucuaaagccugugccguuagcgggaaguccagcuucuuuagaaacaugguguggcugaccaaaaagggacccaauuacccugucgcuaagcggucuuauaacaauacguccggcgagcagaugcuuaucauuuggggagugcaccacccgaacgaugaggccgaacagcgcgcucuguaccagaaaguugggaccuacgugagcgccucuacauccacccucaauaagagaagcacacccgagaucgcggcccggccugaagucaacggccuggggucucgcauggaguucuccuggacccugcucgacgugugggauacgauuaauuuugaaagcacaggaaaccugguggcucccgaguauggcuucaaaaucuccaagagaggcucuagcgggaucaugaaaaccgagggaacacuuggcaacugcgaaaccaagugucaaaccccucugggggccauuaauacaacgcuccccuuucauaacguccacccgcugaccaucggagagugcccuaaauacguuaaguccgaaaaacuugugcuggcuacaggccuccggaaugugccccagauugagagccgcgggcuguucggagccaucgcgggcuuuauugaaggcggguggcagggaauggucgacggcugguauggguaccaucacucuaacgaucagggauccggcuaugccgcugacaaggagagcacccaaaaggccuucgauagaaucacaaauaaagugaacucuguuaucgagaagaugaauacccaguuugaagcuguggggaaagaguucagcaaccuggaaaagcggcucggcaaucugaacaagaaaauggaggacggauuccuugacgucuggacguacaaugccgaacugcucgugcugauggagaacgagcgcacacuugauuuucacgacuccaauguuaagaaccuguauaauaaagugagaaugcagcuccgggauaacgucaaggaacugggcaacggguguuucgaguuuuaccauaaaugcgacgaugaauguaugucuagcgugaagaauggaaccuacgacuauccuaaguacgaggaggaauccaaacugaagagaaacgagauuaaaggcgucaagcucagcucuauggggguguaucagauccuggccauuuacgcuaccguugcgggaucccuuagccuggccaucaugauugcuggcaucucucucuggaugugcuccaaugggagccugcaaugccgcaucuguauuuga

SEQ ID NO: 193694 - RNA, 1698 nt, Artificial Sequence
  derived and/or modified CDS sequence (opt5) from hemagglutinin__InfluenzaA__ABO44046
augaaggugaaacugcucguccugcuuugcaccuucacagccacguacgcugacaccaucuguauuggcuaucacgccaacaauagcacagauaccguugacacagugcuggagaagaacgugaccgucacacauuccgugaaucuccuggaagauucucacaacgggaaacuuugccugcucaagggaaucgcgccccugcagcugggcaauuguagcguugcuggguggauucucggaaacccugagugcgaacugcuuaucuccaaagagucuuggagcuacauuguggaaaccccgaaucccgagaacggcacguguuauccuggguacuuugccgacuaugaggaacugagagagcaacucuccucugucagcuccuucgaacgguuugagaucuuccccaaggagagcucuuggccuaaucauaccgugacaggaguuuccgccagcugcucucacaacggcaaguccagcuuuuaccgcaaucugcuuuggcugaccggcaaaaacgggcucuaucccaaucugucuaaguccuacgcuaacaauaaagaaaaggaggugcugguccucuggggagugcaucacccuccgaacaucggcgaucagagagcccuguaccacacagaaaacgcuuaugugagcgucguuuccucucauuacagccggcgcuucacccccgagauugccaaaagaccuaaggugcgggaccaggaagggcgcaucaauuauuacuggacgcuucuggagcccggagauacaauuaucuuugaggcgaacggcaaucucauugccccuagauaugcuuucgcccugucccggggguuuggaagcggcaucauuaccucuaacgcucccauggacgaaugugaugccaagugccagacaccgcaaggcgcgaucaauuccagccuuccuuuccagaacgugcaccccgucaccaucggggaguguccuaaauacgugcgcucugccaagcugagaaugguuaccggacuccggaauauucccagcauccagucccgcggccuguuuggggcuauugccggauucaucgaaggcggguggacaggaaugguggacggcugguauggcuaccaucaccagaacgagcaagggucuggauacgcugccgaucagaaaagcacgcagaaugccauuaacggcaucaccaauaagaugaacuccgucaucgaaaagaugaauacacaguuuaccgcuguggggaaagaguucaacaaacuggagagacggauggaaaaucucaacaagaagguugacgauggauuccuggacauuuggacauauaacgcggagcuucuggugcuccuggaaaaugagcgcacccuugacuuucacgauagcaacgucaaaaaucuguacgaaaaggugaaaucucaacucaagaacaaugccaaagagaucggcaacgggugcuucgaguuuuaucauaaguguaauaacgaaugcauggaguccgucaagaauggcacguacgacuaucccaaauacagcgaagagucuaagcugaacagagagaaaauugauggagugaagcuggaauccaugggcguuuaucagauccucgcuauuuacagcacaguggccuccucucugguccuucuggugagccucggggccaucuccuucuggaugugcucuaauggaagccugcagugucggaucugcauuuga

SEQ ID NO: 193695 - RNA, 1689 nt, Artificial Sequence
  derived and/or modified CDS sequence (opt5) from hemagglutinin__InfluenzaA__ABO44057
auggccaucauuuaccugauccuccuguucaccgcugugagaggcgaccagauuugcaucggguaucacgccaacaauagcacagagaaggucgauacgauucuugaacggaacguuaccgugacacaugcgaaagacauccuggagaagacccacaauggaaaacucuguaagcugaacggcauucccccucuugaacugggggauugcuccaucgcuggauggcuccugggcaauccggagugugaccgccugcucagagugcccgaauggucuuacaucauggagaaagagaacccucgguauagccugugcuaccccggguccuuuaaugauuaugaggaacuuaagcaucugcucucuagcgucaagcacuucgaaaaagugaagauucugccuaaagacggauggacacaacaugagaccgauggcggcuccaaggccugugccguuucugggaaagcuagcuuuuuccgcaacaugguguggcuuacaaagagaggacccaauuaccaggucgccaagcgguccuauaacaauaccagcggcgagcagaugcugaucauuuggggagugcaccacccuaaagacgaagcugagcagcgcgcccucuaccaaaagguugggacguacgugucugcguccaccagcacacugaacaaaagaucuaccccggaaaucgccgcucggcccgaggucaauggccuggaaucccgcauggaguuuagcuggacacuccuggaugugugggacaccauuaacuucgagucuacggggaaucuuguggccccugaauauggauuuaagaucuccaaaagaggcagcuccggcaucaugaagacagaggggacccugggaaacugcgaaacaaaaugucagacaccccucggcgcuauuaacaccacccugccuuuccauaauguccacccccuuacgaucggggagugcccgaaguacguuaagucugaaaaacuggugcucgccaccggacugcggaacgugccucagauugagagccgcggccuguuuggggcgaucgccggauucauugagggcggcuggcaggggauggucgauggaugguauggcuaccaucacuccaaugaccaagggagcggauaugcugccgauaaggaaucuacacagaaggcuuuugacagaaucaccaacaaaguuaauuccgugaucgagaaaaugaacauucaguucgaagccgugggcaaggaguuuagcaaucucgaaaagcggcuggagaaccuuaauaaaaagauggaggacggguuccuggaugucuggacauacaacgccgaacuccuggugcuuauggagaaugaacgcacccuggacuuccacgauucuaacguuaaaaaucucuaugacaaggugagaaugcagcugcgggauaacgucaaagagcugggcaauggauguuuugaguucuaccauaagugcgacgaugaauguaugaacagcgugaagaacggcacguacgacuaucccaaauacgaggaagaguccaagcucaaaagaaaugaaaucaagggggucaaacugucuagcaugggaguguaucaaauucuugcuaucuacgcgacaguugccggcucccugagccucgcuauuaugaucgccgggaucucuuuuuggaugugcuccaacggaagccugcagugccgcguguguauuuga

SEQ ID NO: 193696 - RNA, 1701 nt, Artificial Sequence; identical to SEQ ID NO: 192328
  derived and/or modified CDS sequence (opt5) from hemagglutinin__InfluenzaA__ABO44079

SEQ ID NO: 193697 - RNA, 1689 nt, Artificial Sequence
  derived and/or modified CDS sequence (opt5) from hemagglutinin__InfluenzaA__ABO44090
auggccaucauuuaccugauccuccuguucaccgcugugagaggcgaccagauuugcaucggguaucacgccaacaauagcacagagaaggucgauacgauucuugaacggaacguuaccgugacacaugcgaaagacauccuggagaagacccacaauggaaaacucuguaagcugaacggcauucccccucuugaacugggggauugcuccauugcuggauggcuccugggcaauccggagugugaccgccugcucagagugcccgaauggucuuacaucauggagaaagagaacccucgggaugggcugugcuaucccggaucuuuuaaugacuacgaggagcuuaagcaucugcucuccucugucaagcacuucgaaaaagugaagauucugccuaaagaucgcuggacacaacauaccacaaccggcggcagcagagccugugccguuuccgggaaccccagcuuuuuccggaauaugaucuggcuuacgaagaaaggaagcaacuauccuguggcuaagggcuccuacaauaacaccagcggggagcagaugcugauuaucuggggaguccaccacccgaaugacgagacagaacagcgcacccucuaucagaacgugggcacauacguuucuguggucaccuccacgcugaauaagagaagcacacccaaaauugccacccggccuaaggugaacgggcugggaggccgcauggaguuuucuuggacacuccuggauaugugggacaccaucaacuucgaauccaccggcaaucuuaucgcucccgaguacggguuuaaaauuagcaagagaggaucuuccggcaucaugaaaacagaagggacgcuggagaacugcgagaccaagugucaaacaccucucggagccauuaauaccacacugcccuuccauaacgugcacccgcuuaccaucggcgaaugcccuaaauaugucaagagcgagaagcugguucucgcgacggggcugcggaaugugccccagauugaaucccgcggacuguuuggcgccaucgcuggcuucaucgaagggggauggcagggcaugguggaugggugguacggauaucaucacucuaacgaccagggcagcggguacgccgcugauaaagaauccacacaaagagccuuugacggcauuaccaauaaggucaacagcgugaucgagaaaaugaauacccaguucgaggcgguuggaaaggaauuuucuaaccucgagcggcgccuggaaaaucuuaacaaaaagauggaggacggccugcucgauguguggacauauaaugccgaacugcuuguccugauggagaacgagagaauccucgacuuccacgauuccaaugugaagaaccuguacgacaaaguucggaugcagcugagagauaacgugaaggaacucgggaauggauguuucgaguuuuaucauaaaugcgacgaugaauguaugaacagcgucaagaauggcaccuacgacuacccuaaauaugaggaggaaucuaagcugaaccgcaaugagaucaagggggugaaacuuagcuccaugggagucuaccagauucuggcuaucuaugccacaguggcuggcucucucagccuggccaucaugauggccgggauuuccuucuggaugugcagcaacggcucucugcaaugccggaucuguauuuga

SEQ ID NO: 193698 - RNA, 1689 nt, Artificial Sequence
  derived and/or modified CDS sequence (opt5) from hemagglutinin__InfluenzaA__ABO44101
auggccaucauuuaccugauccuccuguucaccgcugugagaggcgaccagauuugcaucggguaucacgccaacaauagcacagagaaggucgauacgauucuugaacggaacguuaccgugacacaugcgaaagacauccuggagaagacccacaauggaaaacucuguaagcugaacggcauucccccucuugaacugggggauugcuccaucgcuggauggcuccugggcaauccggagugugaccgccugcucagagugcccgaauggucuuacaucauggagaaagagaacccucgguauagccugugcuaccccggguccuuuaaugauuaugaagaacuuaagcaucugcucucuagcgucaagcacuucgaaaaagugaagauucugccuaaagacggauggacacaacauaagaccgauggcggcuccaaagccugugccguuucugggaagcccagcuuuuuccgcaacaugguguggcuuacaaagaaaggaccuaauuacccggucgcuaagagauccuauaacaauaccagcggcgagcagaugcugaucauuuggggagugcaccaccccaacgacgaggccgaacagcgggcucucuaccagaaaguugggacguacgugucugccuccaccagcacacugaauaagcgcucuaccccugagaucgcggccagacccgaagucuccggccuggggagccggauggaguuuucuuggacacuccuggaugugugggacaccauuuccuucgaaagcacgggaaaccuuguggcuccugaguauggcuuuaaaaucuccaagcgcggcucuagcgggaucaugaaaacagagggaacccugggcaauugcgaaacaaagugucaaacaccccucggggccauuaacaccacccugccguuccauaacguccacccucuuacgaucggagagugccccaaguacguuaaauccgaaaagcuggugcucgcuaccggccugagaaaugugccucagauugagagccgggggcuguuuggagccaucgcgggcuucauugaaggcggguggcagggaauggucgauggcugguauggguaccaucacucuaacgaccagggauccggcuaugccgcugauaaagagagcacacaaaaggccuuugaccgcaucaccaauaaagugaacucuguuaucgagaagaugaauacacaguucgaagcuguggggaaggaguuuagcaaccucgagaaaagacuggagaaucuuaacaagaaaauggaagacggcuuccuggaugucuggaccuacaaugccgagcuccuggugcuuauggagaacgaacggacgcuggacuuccacgauuccaauguuaagaaccucuaugacaaagugcgcaugcagcugagagauaaugucaaggagcugggaaacggcuguuuugaguucuaccauaagugcgacgaugaauguaugaacucugugaaaaaugggacauacgacuaucccaaguacgaggaagagagcaaacucaagcggaacgaaauuaaaggagucaagcuguccagcaugggcguguaucagauccuugccauuuacgcuaccguugcggggucucugucccucgccaucaugauugcuggaaucagcuuuuggaugugcucuaauggcucccugcaaugcagaaucuguauuuga

SEQ ID NO: 193699 - RNA, 1701 nt, Artificial Sequence
  derived and/or modified CDS sequence (opt5) from hemagglutinin__InfluenzaA__ABO44123
augaaggccaaacugcucgugcugcuuugcgcuuucaccgccacagacgcggauacgaucuguauuggcuaccacgcuaacaauagcaccgacacagucgauaccguucuggagaagaacgugacagugacccauuccgucaaucuccuggaagacucucacaacgggaaacuuugcagacugaagggaaucgccccgcuccagcugggcaauuguagcauugccggguggauccugggaaacccugagugcgaaucccucuuuucuaaaaagagcugguccuauauugcugagacacccaauucugaaaacggcaccuguuaccccggguauuucgccgauuacgaggagcugcgggaacaacuuagcuccgugagcucuuuugagcgcuucgaaaucuuuccuaaggaguccagcuggcccaaucauacgguuaccaaaggagugacagcuucuugcucccacaagggcaaaagcucuuucuauagaaaccugcucuggcugaccaagaaaaauggcuccuacccuaaccuuagcaaguccuaugucaauaacaaggagaaagaagugcugguucucuggggagugcaucaccccucuaauaucggggaccagcgggccauuuaccacacagagaacgcguacgucagcgugguguccagccauuauaaccgcagauuuaccccugaaaucgccaagcggccgaaaguccgcgaucaggagggcagaauuaauuacuauuggacgcugcuggaacccggggacacaaucauuuucgaggcuaacggaaaucucaucgccccuugguacgcuuuugcccugucucggggcuucggguccggaauuaucaccagcaacgcgucuauggaugagugugacgccaagugccagacaccccaaggcgcuaucaauagcucccuuccuuuucagaacguucaccccgugaccauuggcgaauguccgaaauaugugcgcucuaccaagcugagaauggucacagggcuccggaauaucccuagcauucagucccgcggacuguucggcgccaucgcuggguuuauugagggaggcuggacggggaugaucgauggaugguacggcuaucaucaccagaacgaacaaggcagcggguacgccgccgaccagaaaucuacccagaaugcuaucaacggaauuacaaauaaggugaacuccguuaucgagaagaugaauacccaguucacagcggugggcaaagaguucaacaaacuugaaagacggauggagaaucugaacaagaaggucgaugacggguuucucgacauuuggaccuacaacgccgaacugcuggugcuccuggagaaugaacgcacgcuugauuuccacgacagcaacguuaaaaaucuguaugagaaggugaagucucaacucaaaaacaaugcuaaggaaaucggaaacggcugcuuugaguucuaccauaaauguaauaacgagugcauggaauccgucaagaaugggacauaugauuaccccaaauauagcgaggaauccaagcugaacagagagaagauugacggcgugaaacuugagucuaugggagucuaccagauccuggccaucuauagcaccguggccuccucucucguucugcuggugagccucggcgcuauuuccuuuuggaugugcagcaaugggucucugcagugucggaucugcauuuga

SEQ ID NO: 193700 - RNA, 1701 nt, Artificial Sequence
  derived and/or modified CDS sequence (opt5) from hemagglutinin__InfluenzaA__ABO44134
augaaggccaaacugcucgugcugcuuugcgcucugagcgccaccgacgcggauacaaucuguauuggcuaccacgcuaacaauuccacggacaccgucgauacaguucucgagaagaacgugaccgugacacauucugucaaucugcuugaagacagccacaacgggaaacugugcagacucaagggaaucgcuccccugcagcugggcaaauguuccauugccggguggauccucggaaauccugagugcgaaucucuguucagcaagaaguccuggucuuauauugccgagaccccgaacagcgaaaauggcacauguuaccccggguauuuugccgauuacgaggagcuucgggaacaacuguccagcgugucuuccuucgagcgcuuugaaaucuucccuaaagagagaagcuggcccaagcauaacguuacccggggagugacggcuucuugcucccacaaaggcaagagcucuuuuuaucgcaaucuccuguggcuuaccgagaaaaacggcuccuacccuaaucugagcaaguccuaugucaacaauaaggaaaaagaggugcucguucuguggggagugcaucaccccucuaacaucgaagaccagaagacaauuuacagaaaagagaaugccuacgucagcgugguguccagcaacuauaaccggcgcuucaccccugaaaucgcggagagaccgaagguccgggggcaggccggccgcauuaauuacuauuggacacugcucgagcccggggauaccaucauuuuugaagcuaacggaaaucugaucgccccuuggcacgcuuucgcccuuucuagaggcuuuggguccggaauuaucacgagcaacgcgucuauggacgagugugauacaaaaugccagacaccccaaggcgccaucaauagcucccugccuuuccagaacauucaucccguuaccaucggcgaauguccgaaguacgugcggucuaccaaacuccgcauggugaccgggcugagaaauauuccuagcauccagucccggggacuuuuuggcgcuauugccggguucaucgagggaggcuggacagggaugaucgacggaugguauggcuaccaccaucagaacgaacaaggcagcggguaugcugccgaucagaagucuacgcagaaugccauuaacggaaucaccaauaaggucaacuccgugauugagaaaaugaauacacaguuuaccgcuguuggcaaggaguucaacaaacuggaaaagcgcauggagaaucucaacaaaaagguggacgauggguuccuggacaucuggacauacaacgcggaacugcucguccugcuugagaaugaaagaacccuggacuuucacgauagcaacgugaagaaucucuacgagaaaguuaagucucaacugaaaaacaaugccaaggagauuggaaacggcugcuucgaauuuuaucacaaauguaauaacgagugcauggaauccgugaagaaugggacguacgacuaucccaaguacagcgaggaguccaaacuuaaccgggaaaagaucgauggcgucaaacuggagucuaugggaguguaucagauccucgcuauuuacagcacagucgccuccucucuggugcugcucguuagccugggcgccaucuccuucuggaugugcagcaaugggucucuucaguguagaauuugcaucuga

SEQ ID NO: 193701 - RNA, 1701 nt, Artificial Sequence
  derived and/or modified CDS sequence (opt5) from hemagglutinin__InfluenzaA__ABO52071
augaagaccaucauugcccugagcuacauccucugccugguguucgcucagaaacuucccggcaacgacaauuccacagccacgcugugucucgggcaccaugcggucccuaacggaaccauuguuaagacaaucaccaaugaucaaauugaggugacaaacgcuaccgaacuggugcaaaauucuagcacaggcgggaucugcgacuccccgcaccagauccuugauggagagaacuguacccugauugacgcccuccugggcgauccccagugcgacggguuucagaauaaaaagugggaucuguucgucgaaagaucuaaagccuauagcaacuguuacccuuaugacgugcccgauuacgcuucccuccggucucugguugccagcuccggaacgcuugaguuuaauaacgaaucuuucaauuggaccggcgugacacagaacggcaccucuuccgcuugcaagcgcagaagcaauaacagcuuuuucucccggcugaauuggcucacacaucugaaguuuaaauauccugcccuuaacgucaccaugcccaacaaugagaaguucgacaaacuguacaucuggggagugcaccauccuagcacggauaacgaccagauuucucucuaugcgcaggccuccgggcgcaucacaguuagcaccaagagaucccaacagacagugauuccgaauaucggcucucggccccgcgucagagauauuccuagccggaucuccaucuacuggaccauugugaaacccggggacauccugcugauuaacagcaccggaaaucucaucgcuccucgcggcuacuuuaagauuagaucugggaaguccagcaucaugcggucugacgcccccaucggaaaauguaacagcgagugcauuacaccgaauggcuccaucccuaacgauaagcccuuccagaaugugaaccgcauuacguauggcgcuuguccuagauacgucaaacagaauacccugaagcuggccacagggaugcggaacguucccgaaaaacaaacccgcggaaucuuuggcgcgauugccggguucaucgagaauggaugggaaggcaugguggacgggugguauggauuuagacaccagaacucugagggcaucggccaggcugccgaucuuaagagcacacaagcugccauuaaucagaucaacgggaaacucaaccggcugauuggaaagaccaaugagaaguuccaccagaucgaaaaagaguucuccgaaguggagggccgcauucaggaccuugaaaaguacgucgaggauacgaaaaucgaccuguggagcuauaacgccgagcuccugguggcucuggaaaaucaacauacaauugaucucaccgacucugagaugaacaagcuguuugaaagaaccaaaaagcagcuucgggagaaugcggaagauauggggaacggaugcuucaagaucuaccacaaaugugacaaugccugcaucggcuccauuagaaacgggacauaugaucaugacguuuaccgcgacgaggcucugaauaaccgguuucagaucaagggcguggagcucaaaagcggauacaaggauuggauucuguggaucucuuucgccauuuccugcuuucuucugugugucgcccuccugggcuucaucaugugggcuugccagaaagggaauaucagauguaacauuugcaucuga

SEQ ID NO: 193702 - RNA, 1701 nt, Artificial Sequence
  derived and/or modified CDS sequence (opt5) from hemagglutinin__InfluenzaA__ABO52225
augaaggccaaacugcucgugcugcuuugcgcuuucaccgccacauacgcggacacgaucuguauuggcuaucacgcuaacaauagcaccgauacagucgacaccguucuggagaagaacgugacagugacccauuccgucaaucuccuggaagauucucacaacgggaaacuuugcagacugaagggaacagcuccccuccagcugggcaauuguagcguggccggguggauccugggaaacccugagugcgaaucccucuuuucuaaagagagcugguccuacauugccgaaaccccgaaucccgagaacggcacguguuauccuggguacuucgccgacuaugaggaacugaaggagcaacuuucuagcguuuccagcuuugaacgguucgagaucuuucccaaggagucuuccuggccuaaucauaccgugacaaaaggagucaccgcuagcugcucucacaacggcaaguccagcuucuacaaaaaucugcucuggcugacagaaaagaacggccuuuaucccaaucugucuaaauccuacgugaacaauaaggagaaggaaguucucgugcuguggggaguccaucacccuagcaacauuggggaucagcgcgccaucuaccacaccgagaacgcguauguguccguggucucuagccauuacuccagacgguuuacgccggaaaucgccaaacgccccaagguuagagaccaggagggccggauuaauuauuacuggacacugcucgagccuggggauaccaucauuuucgaagcuaacggaaaucugaucgcccccugguaugcuuuugcccuuagccgcggcuucgggucuggaauuaucacauccaacgcgagcaugggcgagugugacgccaaaugccagaccccucaaggcgcuauuaauucuagccugcccuuucagaacgugcacccggugaccaucggggaauguccuaaguacgucagauccacaaaacuccggauggugacgggacugcgcaauauccccucuauucagagcagaggccuuuucggggccaucgcuggauuuauugagggcggguggaccggaaugaucgauggcugguauggcuaccaucaccagaacgaacaaggguccggauacgccgccgacaagaaaagcacacagaaugcuauugauggcaucaccaacaagguuaauucugugaucgagaagaugaacacacaguucaccgcggucgggaaagaguucaauaagcuggaacggcgcauggagaaccucaauaaaaagguggacgauggauuucuggacauuuggacguauaacgccgaacugcucguucugcuugagaacgaaagaacacuggacuuccacgauuccaaugugaaaaaccucuacgagaaggucaagaaucagcugaaaaacaaugcuaaggagaucggcaacgggugcuuugaguucuaucauaaauguaaugacgaaugcauggaaagcgugaagaacggcaccuacgauuauccuaaauacucugaggaguccaaacuuaagcgggaaaagauugacggagucaagcuggagagcaugggcguguaucaaauccucgccauuuacuccaccguugccucuagccuggugcugcucgucucccugggggcuaucucuuuuuggaugugcagcaauggaucccuucagugucgcaucugcauuuga

SEQ ID NO: 193703 - RNA, 1689 nt, Artificial Sequence
  derived and/or modified CDS sequence (opt5) from hemagglutinin__InfluenzaA__ABO52236
auggccaucauuuaccugauccuccuguucaccgcugugagaggcgaccagauuugcaucggguaucacgccaacaauagcacagagaaggucgauacgauucuugaacggaacguuaccgugacacaugcgaaagacauccuggagaagacccacaauggaaaacucuguaagcugaacggcauucccccucuugaacugggggauugcuccaucgcuggauggcuccugggcaauccggagugugaccgccugcucucugugcccgaauggagcuacaucauggagaaagagaacccuagagaugggcugugcuaucccggauccuuuaaugacuacgaggaacuuaagcauuuccugucuagcgucaagcacuuugaaaaagugaagauucucccuaaagaucgguggacacaacauaccacaaccggcggcucccgcgccugugccguuucugggaaccccagcuucuuuagaaauaugguguggcugacgaagaaaggauccaacuauccugucgcuaagggcagcuacaauaacaccucuggggagcagaugcuuaucauuuggggagugcaccacccgaaugacgagacagaacagcggacccuguaucagaacguuggcacauacguguccgucgggaccagcacgcucaauaagcgcucuacacccgauaucgccaccagaccuaaagugaacggacugggcggccggauggaguucuccuggacacugcucgacaugugggauaccauuaacuuugaaagcaccgggaaucugaucgcucccgaguacggauucaagaucucuaaacgcggcuccagcgggauuaugaagacagaaggaacgcuuggcaacugcgagaccaaaugucaaacaccucugggggccaucaauaccacacuccccuuucauaacgugcacccgcugaccauuggagagugcccuaaguaugucaaauccgaaaaacuuguucuggcgacgggccucagaaaugugccccagaucgagucucggggccuguucggggccauugcuggauuuaucgaaggcggguggcagggaaugguggacggcugguacggguaucaucacagcaacgaucagggcuccggauacgccgcugacaaggagagcacacaaaaagccuucgacggcaucaccaauaaggucaacucugugauugaaaagaugaauacccaguuugaggcgguugggaaggaguucuccaaccuggaacgcagacucgagaaucugaacaaaaagauggaagauggauuccuugacguguggacauauaaugccgagcugcucguccugauggaaaacgagcggacccuugauuuucacgacagcaaugugaagaaccuguacgauaaaguucgcaugcagcucagagacaacgcuaaggagcugggcaauggguguuucgaauuuuaucauaaaugcgaugacgaguguaugaacucugugaagaauggaacauacuacuauccuaaauacgaagaggagagcaagcugaaccggaaugaaaucaagggcgucaaacucuccucuauggggguguaucagauucuggccaucuacgcuacggucgccggcagccuuucccuggccauuaugauggcuggaaucagcuucuggaugugcucuaacggcucccuccaaugcagaaucuguauuuga

SEQ ID NO: 193704 - RNA, 1689 nt, Artificial Sequence
  derived and/or modified CDS sequence (opt5) from hemagglutinin__InfluenzaA__ABO52247
auggccaucauuuaccugauccuccuguucaccgcugugagaggcgaccagauuugcaucggguaucacgccaacaauagcacagagaaggucgauacgauucuugaacggaacguuaccgugacacaugcgaaagacauccuggagaagacccacaauggaaaacucuguaagcugaacggcauucccccucuugaacugggggauugcuccaucgcuggauggcuccugggcaauccggagugugaccgccugcucagagugcccgaauggucuuacaucauggagaaagagaacccucgguauagccugugcuaccccggguccuuuaaugauuaugaagaacuuaagcaucugcucucuagcgucaagcacuucgaaaaagugaagauucugccuaaagacggauggacacaacauaagaccgauggcggcuccaaagccugugccguuucugggaagcccagcuuuuuccgcaacaugguguggcuuacaaagaaaggaccuaauuacccggucgcuaagagauccuauaacaauaccagcggcgagcagaugcugaucauuuggggagugcaccaccccaacgacgaggccgaacagcgggcucucuaccagaaaguugggacguacgugucugccuccaccagcacacugaauaagcgcucuaccccugagaucgcggccagacccgaagucuccggccuggggagccggauggaguuuucuuggacacuccuggaugugugggacaccauuuccuucgaaagcacgggaaaccuuguggcuccugaguauggcuuuaaaaucuccaagcgcggcucuagcgggaucaugaaaacagagggaacccugggcaauugcgaaacaaagugucaaacaccccucggggccauuaacaccacccugccguuccauaacguccacccucuuacgaucggagagugccccaaguacguuaaauccgaaaagcuggugcucgcuaccggcccuagaaaugugccccagauugagagccgggggcuguuuggagccaucgcgggcuucauugaaggcggguggcagggaauggucgauggcugguauggguaccaucacucuaacgaccagggauccggcuaugccgcugauaaagagagcacacaaaaggccuuugaccgcaucaccaauaaagugaacucuguuaucgagaagaugaauacacaguucgaagcuguggggaaggaguuuagcaaccuggagaaaagacucgagaaucugaacaagaaaauggaagacggcuuccuugaugucuggaccuacaaugccgagcugcucgugcugauggagaacgaacggacgcuugacuuccacgauuccaauguuaagaaccuguaugacaaagugcgcaugcagcucagagauaaugucaaggagcugggaaacggcuguuuugaguucuaccauaagugcgacgaugaauguaugaacucugugaaaaaugggacauacgacuaucccaaguacgaggaagagagcaaacugaagcggaacgaaauuaaaggagucaagcucuccagcaugggcguguaucagauccuggccauuuacgcuaccguugcggggucucuuucccuggccaucaugauugcuggaaucagcuuuuggaugugcucuaauggcucccuccaaugcagaaucuguauuuga

SEQ ID NO: 193705 - RNA, 1701 nt, Artificial Sequence
  derived and/or modified CDS sequence (opt5) from hemagglutinin__InfluenzaA__ABO52258
augaaggccaaacugcucgugcugcuuugcgcucugagcgccaccgacgcggauacaaucuguauuggcuaccacgcuaacaauuccacggacaccgucgauacaguucucgagaagaacgugaccgugacacauucugucaaucugcuugaagacagccacaacgggaaacugugcagacucaagggaaucgcuccccugcagcugggcaaauguuccauugccggguggauccucggaaauccugagugcgaaucucuguucagcaagaaguccuggucuuauauugccgagaccccgaacagcgaaaauggcacauguuaccccggguauuuugccgauuacgaggagcuucgggaacaacuguccagcgugucuuccuucgagcgcuuugaaaucuucccuaaagagagcucuuggcccaagcauaacguuaccagaggagugacggcuuccugcagccacaaaggcaaguguucuuuuuaucggaaucuccuguggcuuaccgagaaaaacggcuccuacccuaaucugagcaaguccuaugucaacaauaaggaaaaagaggugcucguucuguggggagugcaucaccccucuaacaucgaagaccagaagacaauuuaccgcaaagagaaugccuacgucagcgugguguccagccacuauaacagacgguucaccccugaaaucgcgaagcgcccgaaagucagagaucaggaggggcggauuaacuacuauuggacacugcucgagcccggcgacaccaucauuuuugaagccaaugggaaccugaucgcuccuugguacgccuucgcucuuucucgcggauuuggcuccgggauuaucacgagcaaugccucuauggaugagugcgacgcgaagugucagacaccccaaggagccaucaacagcucccugccuuuccagaauguucaucccgugaccauuggcgaaugcccgaaauaugugagaucuacaaagcuccggauggucaccggccugcgcaacaucccuagcauucaguccagagggcuuuuuggagcuaucgccggcuucauugaagggggauggaccggcaugaucgaugggugguacggauaucaccaucagaaugaacaaggcagcggcuacgcugccgaccagaagucuacacagaacgccaucaaugggauuacgaacaaaguuaauuccgugaucgagaagaugaacacccaguuuacagcugugggaaaagaguucaauaagcuggaaaaacggauggagaaccucaauaagaaggucgaugacggcuuccuggacauuuggaccuacaacgcggaacugcucgugcugcuugagaacgaacgcacacuggauuuucacgacagcaauguuaaaaaccucuaugagaaggugaaaucucaacugaagaauaacgccaaagagaucgggaauggauguuucgaauuuuaccacaagugcaacaaugagugcauggaauccgucaagaacggcaccuaugauuaccccaaauauagcgaggaguccaaacuuaauagagagaagauugacggggugaagcuggagucuaugggcgucuaccagauccucgcuaucuauagcacgguggccuccucucugguucugcucgugagccugggagccauuuccuucuggauguguagcaacggcucucuucagugccggaucuguauuuga

SEQ ID NO: 193706 - RNA, 1701 nt, Artificial Sequence
  derived and/or modified CDS sequence (opt5) from hemagglutinin__InfluenzaA__ABO52280
augaaggccagacugcucauccugcuuugcgcucugagcgccaccgacgcggauacaauuuguaucggcuaccacgcuaacaauuccacggacaccguggauacaguccucgagaaaaacguuaccgugacacauucugugaaucugcuugaagacagccacaacgggaagcugugccggcucaaaggaauugcuccccugcagcugggcaaguguaauaucgccggguggauucucggaaacccugagugcgaaucccugcuuucuaaucgcagcugguccuauaucgccgagaccccgaacucugaaaauggcaucuguuaccccggggauuucgccgacuaugaggagcugagagaacaacucagcuccgucagcucuuuugagcgguucgaaauuuuuccuaaagaguccagcuggcccaagcauaacaucacacgcggagugaccguugcuugcucucacgccaagaaauccagcuucuacaagaaucugcuuuggcugacggaggcgaacggccucuauccuucucuguccaaaagcuacgugaaugauagagaaaaggagguccuggugcucuggggcguucaucaccccuccaacauugaagaccagcggacccuguaucgcaaagagaaugccuacgugucugucgugagcuccaacuacaacagacgguuuacaccugaaaucgcugagcgcccgaaggugagagggcagcccggacggaugaauuauuacuggacccuucuggagccuggcgauaagauuaucuucgaagccaacgggaaucucauugcucccugguaugccuuugcgcugagccgcggaccuggcucugggaucaucacauccaacgccagcauggacgagugugauaccaaaugccagacgccccaaggagcuauuaauucuagccuuccguuccagaacauccacccugucacaauuggcgaaugucccaaguacguuagauccaccaaacugcggauggugacaggccuccgcaauaucccuucuauucagagcagagggcuguuuggagccaucgcuggcuucaucgaagggggauggaccggcaugguggacgggugguauggauaccaucaccagaacgagcaaggcuccggcuaugccgccgaucaaaagagcacccagaaugcuauuaacgggaucacaaauaaagucaacucugugauugagaagaugaauacgcaguuuaccgcgguuggaaaagaguucaacaagcuggaaaagcggauggagaaucucaacaaaaagguggacgacggcuuucuggauaucuggacauacaacgccgaacuucugguccuccuggagaaugaaagaacccuugacuuccaugauuccaacgugaaaaaucuguacgagaagguuaaaaaccagcuccgcaauaacgcuaaggagauugggaauggaugcuucgaauuuuaucacaagugugacaacgagugcauggaaagcgugaaaaauggcacauacgauuaucccaaguacucugaggaguccaaacugaaccgggccaagaucgacggggucaaacuggaaagcaugggcguguaucagauccucgccauuuacuccaccgucgcuucuagccuggugcuucugguuucccucggagccaucucuuucuggaugugcagcaauggcucccugcaguguagaauuugcaucuga

SEQ ID NO: 193707 - RNA, 1689 nt, Artificial Sequence
  derived and/or modified CDS sequence (opt5) from hemagglutinin__InfluenzaA__ABO52302
auggccaucauuuaccugauccuccuguucaccgcugugagaggcgaccagauuugcaucggguaucacgccaacaauagcacagagaaggucgauacgauucuugaacggaacguuaccgugacacaugcgaaagacauccuggagaagacccacaauggaaaacucuguaagcugaacggcauucccccucuugaacuggggaauugcuccaucgcuggauggcuccugggcaacccggagugugaucgccugcucucugugcccgaauggagcuacaucauggagaaagagaauccuagagacgggcugugcuaucccggauccuuuaacgauuacgaagaacuuaagcaucugcucucuagcgucaagcacuucgaaaaagugaagauucugccuaaagaccgguggacacaacauaccacaaccggcggcucccgcgccugugccguuucugggaaucccagcuuuuucagaaacaugguguggcuuacgaagaaaggauccaauuauccugucgcuaagggcagcuacaacaauaccucuggggagcagaugcugaucauuuggggagugcaccacccgaacgaugagacagaacagcggacccucuaucagaauguuggcacauacguguccgucgggaccagcacgcugaacaagcgcucuacacccgacaucgccaccagaccuaaagugaacggacugggcggccggauggaguuuuccuggacacuccuggauaugugggacaccauuaauuucgaaagcaccgggaaccuuaucgcucccgaguacggauuuaagaucucuaaacgcggcuccagcgggauuaugaagacagaaggaacgcugggcaauugcgagaccaaaugucaaacaccucucggggccaucaacaccacacugcccuuccauaaugugcacccgcuuaccauuggagagugcccuaaguaugucaaauccgaaaagcugguucucgcgacgggccugagaaacgugccccagaucgagucucggggccuguuuggggccauugcuggauucaucgaaggcggguggcagggaaugguggauggcugguacggguaucaucacagcaaugaccagggcuccggauacgccgcugauaaggagagcacacaaaaagccuuugacggcaucaccaacaaggucaauucugugauugagaaaaugaacacccaguucgaggcgguugggaaggaguuuuccaaucucgaacgcagacuggagaaccuuaauaaaaagauggaagacggauuccuggauguguggacauauaacgccgagcuccugguccuuauggaaaaugagcggacccuggacuuccacgauagcaacgugaagaaccucuacgacaaaguucgcaugcagcugagagauaaugugaaggagcugggcaacggguguuuugaguucuaucauaaaugcgacgaugaauguaugaacucugucaagaauggaacauacgacuacccuaaauaugaagaggagagcaagcucaaucggaacgaaaucaagggcgugaaacuguccucuauggggauuuaccagauccuugcuauuuaugccacggucgcuggcagccugucccucgccaucaugauggccggaaucagcuuuuggaugugcucuaauggcucccugcaaugcagaauuuguaucuga

SEQ ID NO: 193708 - RNA, 1701 nt, Artificial Sequence
  derived and/or modified CDS sequence (opt5) from hemagglutinin__InfluenzaA__ABO52313
augaagaccaucauugcccugagcuacaucuucugccucguguuugcucagaaccugcccggcaaugacaacuccacagccacgcuuugucuggggcaccaugcggucccuaauggaacccucguuaaaacaauuaccaacgaucaaaucgaggugacaaaugcuaccgaacuggugcagucuagcuccacaggcaagauuugcaacaauccgcacagaauccuugacgggaucaacuguacccugauugaugcccuccugggagacccccauugcgauggcuuccagaaugagaaaugggaccuguuugucgaacggucuaaggccuucagcaacuguuauccuuacgaugugcccgacuaugcuucccuccgcucucugguugccagcuccgggacgcuugaguuuaucaaugaaggauucaacuggaccggcgugacacagaauggcgggagcaacgcuugcaaaagaggaccugauucuggcuuuuucucccggcugaauuggcucuacaagagcgggucuaccuaucccguccugaacgugacaaugccuaacaaugacaacuuugauaaacuuuacauuuggggaguucaccauccguccaccgaccaagagcagacgaaucuguaugugcaggccagcggccgcgucacagugucuaccaagagaucccagcaaacaaucauucccaacguggggagccggccuuggguccgcggacucuccucuagaaucagcauuuacuggaccaucguuaagcccggcgauauccuggugauuaauuccaacggcaaucugaucgcgccucgggggcacuucaaaaugcgcaccggaaagagcucuauuaugagauccgacgcccccaucggcacauguagcucugagugcauuacgccgaacgggagcaucccuaaugacaaacccuuucagaacgugaauaagaucaccuacggagcuuguccuaaguaugucaaacagaacacacucaagcuggccaccggcaugcggaaugugcccgaaaaacagacacgcgggauuuucggagcuaucgccggcuuuauugagaacggcugggaagggaugaucgauggaugguacggcuucagacaccgcaauuccgaggggaccggacaagcggccgaccuuaagucuacgcaggcugccauugaucagaucaacggcaaacugaaccggguuaucgagaagacaaaugaaaaauuccaucaaauugagaaggaauuuagcgagguggaagggagaauccaggaccucgagaaguaugucgaggauaccaaaauugaccugugguccuacaacgcugaacuucugguggcccucgagaaucagcacaccaucgaucugacagacagcgaaaugaacaagcuguucgagaaaacccggagacagcuccgcgaaaaugccgaggauaugggcaacggaugcuuuaagauuuaucauaaaugugacaaugcuugcaucggcucuauucggaacgggacauacgaucacgacguuuauagagacgaggcgcugaauaaccgcuuccaaaucaagggaguggaacuuaaguccggcuacaaagauuggauccuguggauuagcuuugccaucucuugcuuccuccugugugucgugcuucugggguuuauuaugugggcuugccagaagggaaauauccgguguaacauuugcaucuga

SEQ ID NO: 193709 - RNA, 1701 nt, Artificial Sequence
  derived and/or modified CDS sequence (opt5) from hemagglutinin__InfluenzaA__ABO52335
augaagaccaucauugcccugagcuacaucuucugccucgugcugggccaggacuuucccagaaacgauaauuccacagcuacgcuuugucuggggcaccaugccgucccuaacggaacccucguuaaaacaauuaccaaugaccaaaucgaggugacaaacgcgaccgaacuggugcagucuagcuccacaggcaagauuugcaauaacccgcaccggauccuugaugggaucgacuguacccugauugaugcucuccugggagacccccauugcgauggcuuccagaaugagacgugggaccuguuugucgaacgcucuaaagccuucagcaacuguuauccuuacgaugugcccgacuaugccucccucagaucucugguugcuagcuccgggacccuugaguuuaucaaugaaggauucacauggaccggcgugacacagaacggcgggagcaaugccugcaagcggggaccugauucuggcuuuuucucccgccugaacuggcucuacaaaagcgggaauaccuaucccguccugaacgugacgaugccuaauaacgacaacuuugauaaacuuuacauuuggggaguucaccauccgucuacagaccaagaccagaccucccuguaugugcaggcuagcggcagagucacagugucuaccaagcggucccagcaaaccgugauccccaauauugggccucgccccugggucagaggacucagcucccggaucucuauuuacuggacaaucguuaagccuggcgauauccugcugauuaacagcaauggcaaccucaucgcccccagaggguacuucaagaugagaacgggaaaauccagcauuaugcggucugacgcgccgaucggcaccuguauuuccgagugcaucacaccuaaugggagcauccccaacgauaagccuuuucagaaugugaacaaaauuaccuauggagccugucccaaguacgugaagcagaauacacugaaacuugcuaccggcaugcgcaacguccccgagaagcagacgagagggaucuucggagccauugcuggcuuuaucgaaaauggcugggaggggaugauugacggaugguauggcuuccggcaccaaaacucugaagggacaggacaggccgcggaucugaaaagcacccaggccgcuaucgaccaaaucaauggcaagcucaaccgcgugauugagaaaaccaaugagaaguuccaccagaucgaaaaagaguuuuccgaaguugaggggcgcauucaggaucuggaaaaguacguggaggacacaaagaucgaucuuuggucuuauaacgccgagcugcucgucgcucuggaaaaccagcauaccauugaccugacagauagcgagaugaauaaacucuucgaaaagacgcggagacaacugcgcgagaacgccgaagacaugggcaauggaugcuuuaaaaucuaccaccggugugacaacgccugcauuggcuccaucagaaaugggaccuaugaucaugacguguaccgcgaugaggcucuuaacaaucgguuccagaucaagggaguugagcugaaaagcggcuacaaggacuggauucucuggaucucuuuugcgauuuccugcuuccugcuuugugugguccugcucggguuuaucaugugggccugccagaagggaaacauuagauguaauaucugcaucuga

SEQ ID NO: 193710 - RNA, 1701 nt, Artificial Sequence
  derived and/or modified CDS sequence (opt5) from hemagglutinin__InfluenzaA__ABO52346
augaagaccaucauugcccugagcuacaucuucugccucguguuugcucaggaccugcccggcaacgauaauuccacagccacgcuuugucuggggcaccaugcggucccuaacggaacccucguuaaaacaauuaccaaugaccaaaucgaggugacaaacgcuaccgaacuggugcagucuagcuccacaggcaagauuugcgauaauccgcacagaauccuugacgggaucaacuguacccugauugaugcccuccugggagacccccauugcgauggcuuccagaaugagaaaugggaccuguuugucgaacggucuaaggccuucagcgauuguuauccuuacgacgugcccgauuaugcuucccuccgcucucugguugccagcuccgggacgcuugaguuuaucaacgaaggauucaauuggaccggcgugacacagaacggcgggagcucugcuugcaaaagaggaccugacaauggcuuuuucucccggcugaacuggcucuacaagagcgggucuaccuaucccguccaaaaugugacaaugccuaacaaugauaacuccgacaagcuguacauuuggggaguucaccauccgagcaccgacaaagagcagacggaucuuuaugugcaggccucuggcaaggucacaguguccaccaaacgcagccagcaaacagugauccccaacgucggguccagaccuuggguucggggacugucuagccgcguguccauuuacuggaccaucgugaagcccggcgacauucucgucaucaauagcaacggcaaucugaucgcgccuagaggguacuuuaaaaugcggaccggaaagucuuccauuaugcgcagcgaugcccccaucggcacauguucuagcgagugcauuacgccgaacggguccaucccuaaugacaagcccuuccagaacgugaauaaaauuaccuauggagcuuguccuaaguacguuaaacagaacacacugaagcucgccaccggcaugagaaaugugcccgaaaaacagacacgggggaucuuuggagcuaucgccggcuucauugagaacggcugggaagggaugaucgauggaugguauggcuuucgccaccaaaauucugaggggaccggacaggcggccgaccuuaagagcacgcaggcugccauugaucaaaucaacggcaaacugaauagagucauugagaagacaaacgaaaaguuccaccagaucgagaaagaguucuccgaaguggaagggcggauccaggaccuggagaaguacguugaggauaccaaaauugaccucuggagcuauaaugcugaacugcuuguggcccuggagaaccagcauaccaucgaucucacagacucugaaaugaacaagcuguuugagaaaacccgcagacaacugcgggaaaaugccgaggacaugggcaacggaugcuucaagauuuaccacaagugugauaaugcuugcaucggcuccauuagaaacgggacauaugaccaugaugucuaccgcgacgaggcgcucaauaaccgguuucagaucaaaggaguggaacuuaagagcggcuacaaagauuggauucuguggaucucuuucgccaucuccugcuuucugcucugugucgugcugcuuggguucauuaugugggcuugccagaagggaaauaucagauguaacauuugcaucuga

SEQ ID NO: 193711 - RNA, 1701 nt, Artificial Sequence
  derived and/or modified CDS sequence (opt5) from hemagglutinin__InfluenzaA__ABO52357
augaagaccaucauugcccugagcuacaucuucugccucgcucugggccaggaccuucccgggaacgauaauuccacagccacgcugugucucggacaccaugcggugccuaacggcacccuggucaaaacaauuaccgacgaucaaaucgagguuacaaaugcuaccgaacuugugcagucuagcuccacagggaagauuugcaacaauccgcacagaauccuggacggaaucgauuguacccucauugacgcccugcugggcgauccccauugcgacguguuucagaacgagacgugggaucucuucgucgaacggucuaaagccuuuagcaauuguuauccuuacgacgugcccgauuaugcuucccugcgcucucuuguugccagcuccgggacccuggaguucaucacagaaggauuuaccuggacaggcgugacccagaacggcgggagcaaugcuugcaagagaggaccuggcucuggguucuuuucccggcucaacuggcugacgaaaagcggaucuacauaccccguccuuaaugugaccaugccuaacaaugacaacuucgauaagcuguauauuuggggcguucaccauccguccacaaaucaagagcagaccagccucuacgugcaggccucugggcgcgucaccguguccacaagacggagccagcaaacgaucauucccaacaucggaucccgcccuugggugagaggccugucuagccggauuuccaucuauuggaccaucgucaagcccggcgacguucuggugauuaacagcaaugggaaccucaucgcgccucgcggauacuuuaaaaugagaacaggcaagucuuccauuaugcggagcgacgcccccaucgauaccuguauuuucgagugcaucacaccgaaugggucuaucccuaacgacaaacccuuucagaaugugaacaagauuaccuacggagcuuguccuaaauaugucaagcagaauacgcugaaacuugccacaggcaugcgcaacgugcccgaaaagcagaccagagggaucuucggagcuauugccggcuuuaucgagaauggcugggaagggaugauugauggaugguacggcuuccggcaccaaaacagcgaggggaccggacaggcggccgaccugaaguccacacaggcugccaucgaucaaaucaauggcaaacucaaccgcguuauugagaagaccaaugaaaaauuccaccagaucgagaaggaauuuucugagguggaagggcggauucaggaccuggagaaauaugucgaggauacaaagaucgaccuuuggagcuacaacgcugaacugcucguggcccuggagaaucagcauacgauugaucugaccgacuccgaaaugaacaaacucuucgagaagacaagaagacaacugcgcgaaaacgccgaggauaugggcaauggaugcuuuaagaucuaucacaaaugugacaacgcuugcauugagagcauccggaauggcaccuacgaccaugauguuuauagagacgaagcgcuuaacaaucgcuuccagaucaaggggguggagcugaaaucuggauacaaggauuggauucucuggaucuccuuugccauuagcugcuuccugcuuugugucgugcugcucggcuuuaucaugugggcuugccagcgggggaacauuagauguaauaucugcaucuga

SEQ ID NO: 193712 - RNA, 1701 nt, Artificial Sequence
  derived and/or modified CDS sequence (opt5) from hemagglutinin__InfluenzaA__ABO52368
augaagaccaucauugcccugagcuacaucuucugccucgcucugggccaggaccuucccgggaacgauaauuccacagccacgcugugucucggacaccaugcggugccuaacggcacccuggucaaaacaauuaccaaugaccaaaucgagguuacaaacgcuaccgaacuugugcagucuagcuccacagggaagauuugcaauaacccgcacagaauccuggauggaaucaauuguacccucauugacgcccugcugggcgauccccauugcgacguguuucaggaugagacgugggaccucuucgucgaacggucuaaagccuuuagcaacuguuauccuuacgaugugcccgacuaugcuucccugcgcucucuuguugccagcuccgggacccuggaguucaucacagaaggauuuaccuggacaggcgugacccagaauggcgggagcaacgcuugcaagagaggaccuggcucuggguucuuuucccggcucaauuggcugacgaaaagcggaucuacauaccccguccuuaacgugaccaugccuaauaacgauaauuucgacaagcuguauauuuggggcguucaccauccguccacaaaccaagagcagaccagccucuacgugcaggccucugggcgcgucaccguguccacaagacggagccagcaaacgaucauucccaacaucggaucccgcccuugggugagaggccugucuagccggauuuccaucuauuggaccaucgucaagcccggcgauguucuggugauuaauagcaacgggaaucucaucgcgccucgcggauacuuuaaaaugagaacaggcaagucuuccauuaugcggagcgacgcccccaucgacaccuguauuucugagugcaucacaccgaacgggagcaucccuaaugauaaacccuuccagaacgugaauaagauuaccuacggagcuuguccuaaauaugucaagcagaacacgcugaaacuugccacaggcaugcgcaaugugcccgaaaagcagaccagagggcuguuuggagcuaucgccggcuucauugagaacggcugggaagggaugaucgacggaugguacggcuuucggcaccaaaauuccgaggggaccggacaggcggccgaucucaagucuacacaggcugccauugaccaaaucaacggcaaacugaaucgcguuaucgagaagaccaacgaaaaauuccaccagauugagaaggaguucagcgaaguggaagggagaauccaggaucuugagaaauaugucgaggacacaaagauugaucugugguccuacaaugcugaacuccugguggcccuggagaaccagcauacgaucgaccucaccgauagcgaaaugaacaagcuguuugagaaaacacggagacaacuucgcgaaaaugccgaggacaugggcaacggaugcuucaagauuuaucacaaaugugauaaugcuugcaucgagucuauucggaacggcaccuacgaccaugacguuuauagagaugaagcgcugaauaaccgcuuucagaucaaggggguggagcucaaauccggauacaaggacuggauccuguggauuagcuucgccaucucuugcuuucuucugugugucgugcuccugggcuucauuaugugggcuugccagcgggggaauaucagauguaacauuugcaucuga

SEQ ID NO: 193713 - RNA, 1701 nt, Artificial Sequence
  derived and/or modified CDS sequence (opt5) from hemagglutinin__InfluenzaA__ABO52797
augaaggccaaacugcucgugcugcuuugcgcucugagcgccaccgacgcggauacaaucuguauuggcuaccacgcuaacaauuccacggacaccgucgauacaguucucgagaagaacgugaccgugacacauucugucaaucugcuugaagacaaccacaaugggaaacugugcaagcucaaaggaaucgccccgcugcagcugggcaaguguagcauugccggguggauccucggaaacccugagugcgaaucccuguucucuaagaaaagcugguccuauauugcugagacccccaauucugaaaacggcacauguuaccccggguauuuugccgauuacgaggagcuuagagaacaacugagcuccgugagcucuuucgagcgguuugaaaucuucccuaaggaguccagcuggcccaaucauaacguuaccaaaggagugacggcuucuugcucccacaagggcaaaagcucuuuuuaucgcaaucuccuguggcuuaccgagaagaacggcuccuacccuagccuguccaagucuuaugucaauaacaaagaaaaggaggugcucguucuguggggagugcaucaccccagcaauaucaaagaccagaagacaauuuacagaaaagaaaacgccuacgucuccguggugagcucucacuauaaccggcgcuucaccccugagaucgcgaagagaccgaaaguccgggaucaggaagggcgcauuaauuacuauuggacacugcucgagcccggcgacaccaucauuuuugaggccaacgggaaucugaucgcuccuugguacgccuucgcucuuuccagaggauuuggcagcgggauuaucacgucuaacgccagcauggaugaaugugacgcgaagugccagacaccccaaggagccaucaauuccucucugccuuuccagaacguucaucccgugaccauuggcgaguguccgaaguaugugcggagcacaaaacuccgcauggucaccggccugagaaauaucccuuccauucagagccgggggcuuuuuggagcuaucgccggcuucauugaagggggauggaccggcaugaucgaugggugguacggauaucaccaucagaacgagcaaggcucuggcuacgcugccgaccagaaguccacacagagcgccaucaaugggauuacgaacaaaguuaauucuaucauugaaaagaugaacacccaguuuacagcugugggaaaagaguucaauaagcuggagaagcgcauggaaaaccucaauaaaaagguggaugacggcuuccuggacaucuggaccuacaacgcggagcugcucguccugcuugaaaacgagagaacacuggauuuucacgacuccaaugugaaaaaccucuaugaaaagguuaaaagccaacugaagaauaacgccaaggagauugggaauggaugcuucgaguuuuaccacaaauguaacaaugaaugcauggaguccgugaagaacggcaccuaugauuaccccaaauauucugaagagagcaaacuuaaucgggagaagaucgacggggucaagcuggaauccaugggcguguaccagauccucgcuauuuauucuacggucgccagcucccuggugcugcucguuagccugggagccaucucuuucuggaugugcuccaacggcagccuucagugucgcauuugcaucuga

SEQ ID NO: 193714 - RNA, 1698 nt, Artificial Sequence; identical to SEQ ID NO: 192814
  derived and/or modified CDS sequence (opt5) from hemagglutinin__InfluenzaA__ABP49217

SEQ ID NO: 193715 - RNA, 1698 nt, Artificial Sequence
  derived and/or modified CDS sequence (opt5) from hemagglutinin__InfluenzaA__ABP49305
augaaggccaaacugauggugcuccugugcaccuucacagcuacguacgccgacaccaucuguauuggcuaucacgcgaacaauagcacagauaccgucgacacaguucuugagaagaacgugaccgugacacauuccgucaaucugcucgaagauucucacaacgggaaacugugccuucugaagggaaucgcuccccuccagcugggcaauuguagcguggccggguggauucugggaaacccugagugcgaacuccugaucuccaaagagucuuggagcuacauuguugaaaccccgaaucccgagaacggcacguguuauccuggguacuuugccgacuaugaggaacuuagagagcaacuguccucugugagcuccuucgaacgguuugagaucuuccccaaggagagcucuuggccuaaucauaccgucacaggaguguccgcuagcugcucucacaacggcaaguccagcuuuuaccgcaaucuccuguggcuuaccggcaaaaacgggcuguaucccaaucucucuaaguccuacgccaacaauaaagaaaaggagguucuggugcuguggggaguccaucacccuccgaacaucggcgaucagagagcucucuaccacacagaaaacgccuaugugagcguggucuccucucauuacagccggcgcuucacccccgagauugcgaaaagaccuaagguucgggaccaggaagggcgcaucaauuauuacuggacgcugcuugagcccggagauacaauuaucuuugaggccaacggcaaucugauugcuccuugguaugccuucgcucucuccagaggguuuggaagcggcaucauuaccucuaacgcccccaugggcgaaugugacgcgaagugccagacaccgcaaggggccaucaauuccagccugccuuuccagaacgugcaccccgugaccaucggagaguguccuaaauacguccggucugcuaaacuucgcauggugaccggccugagaaauauucccagcauccagucccgggggcucuuuggagccauugcuggcuucaucgaagggggauggacaggcaugguugauggcugguauggguaccaucaccagaacgagcaaggaucuggcuacgccgccgaccagaaaagcacgcagaaugcuauuaacgggaucaccaauaaggugaacuccgucaucgaaaagaugaauacacaguuuaccgcggugggaaaggaguucaacaaacuggagcgcagaauggaaaaucugaacaagaagguugaugacggcuuccucgauauuuggacauauaacgccgagcugcuugugcugcucgaaaaugagcggacccuggacuuucacgacagcaacgucaaaaaucuuuacgaaaaggugaaaucucaacugaagaacaaugcuaaagagaucgggaacggcugcuucgaguuuuaucauaaguguaauaacgaaugcauggaguccgucaagaauggaacguacgauuaucccaaauacagcgaagagucuaagcucaaccgcgagaaaauugacggcgugaagcuggaauccauggggguuuaucagauccuggccauuuacagcacaguggccuccucucucguccugcuugugagccugggagcuaucuccuucuggaugugcucuaauggcagccuccaguguagaaucugcauuuga

SEQ ID NO: 193716 - RNA, 1701 nt, Artificial Sequence
  derived and/or modified CDS sequence (opt5) from hemagglutinin__InfluenzaA__ABP49316
augaaggccaaacugcucgugcugcuuugcgcucugagcgccaccgacgcggauacaaucuguauuggcuaccacgcuaacaauuccacggacaccgucgauacaguucucgagaagaacgugaccgugacacauucugucaaucugcuugaagacagccacaacgggaaacugugcagacucaagggaaucgccccgcugcagcugggcaaauguaauauugccggguggauccucggaaacccugagugcgaaucccuguucucuaagaaguccugguccuauauugcugagacccccaauucugaaaacggcacauguuaccccggguauuuugccgauuacgaggagcuucgggaacaacugagcuccgugagcucuuucgagcgcuuugaaaucuucccuaaagagagauccuggcccaagcauaauaucacccggggaguuacggcugccugcagccacaaaggcaagucuuccuuuuaucgcaaccuccuguggcuuaccgagaaaaauggcagcuacccuaaccugaagaagucuuaugugaauaacaaagaaaaggagguccucgugcuguggggaguucaucaccccuccaauauugaagaccagaaaacacuguacagaaaggagaacgcguacgugagcgucguguccucuaacuauaauaaacgguucaccccugaaaucgccgagcgcccgaaggugagagggcaggcuggccggauuaacuacuauuggacacuccuggagcccggggauaccaucauuuuugaagccaauggaaaccuuaucgcuccuuggcacgccuucgcgcugagccgcggcuuuggguccggaauuaucacgagcaaugccucuauggacgagugugauacaaaaugccagacaccccaaggcgcuaucaacuccagccucccuuuccagaauauucaucccgucaccaucggcgaauguccgaaguacguuagaucuaccaagcugcggauggugaccgggcuucgcaacauuccuagcauccaguccagaggacuguuuggcgccauugcuggguucaucgagggaggcuggacagggaugaucgacggaugguauggcuaccaccaucagaaugaacaaggcucuggguaugccgccgaucagaaaagcacgcagaacgcuauuaauggaaucaccaacaaggugaauagcgucauugagaaaaugaacacacaguuuaccgcggugggcaaggaguucaauaaacucgaaaagcggauggagaaccugaacaagaaaguugacgauggguuccuggacaucuggacauacaaugccgaacuccuggugcuucuggagaacgaacgcacccucgacuuucacgauagcaaugucaagaaccuguacgagaaagugaagucucaacuuaaaaauaacgcuaaggagauuggaaauggcugcuucgaauuuuaucacaaguguaacaaugagugcauggaauccguuaaaaacgggacguacgacuaucccaaguacagcgaggagucuaaacugaauagagaaaagaucgauggcgugaaacucgaguccaugggagucuaucagauccuggccauuuacagcacaguggccuccucucugguccuccuggugagccuuggcgcuaucuccuucuggaugugcucuaacgggagccugcagugucggauuugcaucuga

SEQ ID NO: 193717 - RNA, 1701 nt, Artificial Sequence
  derived and/or modified CDS sequence (opt5) from hemagglutinin__InfluenzaA__ABP49327
augaaggccagacugcucgugcugcuuugcgcucuggccgcgaccgacgcugauacaaucuguauuggcuaccacgccaacaauagcacggacaccgucgauacaguucucgagaaaaacgugaccgugacacauuccgucaaucugcuugaagacucucacaacgggaagcugugccggcucaaaggaaucgccccgcugcagcugcgcaaguguaauauugcuggcuggauccucgggaacccugagugcgaaagccugcuuuccgagagaucuuggagcuauauuguggaaacccccaauuccgagaacggaacauguuaccccggcgauuucaccaauuaugaggaacugcgggagcaacucucuagcguuuccagcuuugaacgcuucgagaucuuuccuaaagagucuuccuggcccaagcauaacacgaccagaggggugacagccgcuugcagccacgccggaaagucuuccuucuaccggaaucugcuuuggcugaccgaaaaagacggcagcuauccuaaccucaauaacucuuacgucaauaagaaaggcaaggaggugcugguucuguggggagugcaucaccccuccaacaucaaagaucagcagacacucuaucagaaggaaaacgcguacgucagcgugguguccucuaauuacaaccgcagauuuaccccugagauugccgaacggccgaagguccgcgggcaagcuggcagaaugaauuauuacuggacgcugcuuaaacccggggacacaaucauguucgaggccaacggaaaucugauugcuccuugguaugccuuugcgcucagccggggcuucggguccggaaucauuaccagcaacgccucuaugcacgagugugauacaaagugccagacaccccagggcgcuaucaauuccagccugccuuuucagaacauucaucccguuaccaucggcgaauguccgaaauacgugcgcucuaccaagcugagaauggugacggggcuucggaauaucccuagcauucaaucccgcggacucuucggcgccaucgcuggguuuauugagggaggcuggaccgggaugaucgacggaugguauggcuaccaccaucagaacgaacagggcucuggguaugccgccgaucagaaaagcacacaaaaugcuauuaacggaaucaccaauaaggucaacuccgugaucgagaaaaugaauacacaguucaccgcgguuggcaaggaauuuaacaaccuggagaagagaauggagaaucugaacaaaaagguggacgauggguuccucgacauuuggacguacaaugccgaacugcuuauccugcucgagaacgaacggacacuggacuuccacgauagcaaugucaaaaaccuuuacgagaaggugaaaucucagcugagaaauaacgcuaaggaaauuggaaauggcugcuuugaguucuaucacaaguguaacaaugagugcauggaauccguuaaaaacgggaccuacgacuaucccaaguacagcgaggaaucuaaacucaaucgcgagaagaucgauggcgugaaacuggaguccaugggagucuaucaaauucuggccaucuacagcaccguggccuccucucucguccugcuugugagccugggcgcuaucuccuuuuggaugugcucuaacgggagccuccagugucggauuugcaucuga

SEQ ID NO: 193718 - RNA, 1701 nt, Artificial Sequence
  derived and/or modified CDS sequence (opt5) from hemagglutinin__InfluenzaA__ABP49338
augaaggccaaacugcucgugcugcuuugcgcucugagcgccaccgacgcggauacaaucuguauuggcuaccacgcuaacaauuccacggacaccgucgauacaguucucgagaagaacgugaccgugacacauucugucaaucugcuugaagacagccacaacgggaaacugugcagacucaagggaaucgcuccccugcagcugggcaaauguuccauugccggguggauccucggaaauccugagugcgaaucucuguucagcaagaaguccuggucuuauauugccgagaccccgaacagcgaaaauggcacauguuaccccggguauuuugccgauuacgaggagcuucgggaacaacuguccagcgugucuuccuucgagcgcuuugaaaucuucccuaaagagagaagcuggcccaagcauaacguuacccggggagugacggcuucuugcucccacaaaggcaagagcucuuuuuaucgcaaucuccuguggcuuaccgagaaaaacggcuccuacccuaaucugagcaaguccuaugucaacaauaaggaaaaagaggugcucguucuguggggagugcaucaccccucuaacaucgaagaccagaagacaauuuacagaaaagagaaugccuacgucagcgugguguccagcaacuauaaccggcgcuucaccccugaaaucgcgaagagaccgaaaguccgggggcaggagggccgcauuaauuacuauuggacacugcucgagcccggggauaccaucauuuuugaagccaacggaaaucugaucgcuccuugguacgccuucgcucuuucuagaggcuuuggguccggaauuaucacgagcaacgccucuauggacgagugugauacaaagugccagacaccccaaggcgcgaucaauagcucccugccuuuccagaacguucaccccgugaccauuggcgaauguccgaaauaugugcggucuaccaagcuccgcauggucaccgggcugagaaauaucccuagcauucagucccggggacuuuuuggcgccaucgcuggguucauugagggaggcuggacagggaugaucgacggaugguacggcuaucaucaccagaacgaacaaggcagcggguacgccgcugaucagaagucuacgcagaaugccaucaacggaauuaccaauaaagugaacuccguuaucgagaagaugaauacacaguuuaccgccgugggcaaagaguucaacaagcuggaaaaacgcauggagaaucucaacaagaaggucgacgauggguuccuggacauuuggacauacaacgcugaacugcucgugcugcuugagaaugaaagaacccuggacuuucaugauagcaacguuaaaaaucucuaugagaaggugaaaucucaacugaagaacaaugcgaaagagaucggaaacggcugcuucgaauuuuaccacaaguguaauaacgagugcauggaauccgucaagaaugggacguaugacuaccccaaauauagcgaggaguccaaacuuaaccgggaaaagauugauggcgugaagcuggagucuaugggagucuaccagauccucgccaucuauagcacaguggcuuccucucugguucugcucgugagccugggcgccauuuccuucuggaugugcagcaaugggucucuucaguguagaaucugcauuuga

SEQ ID NO: 193719 - RNA, 1701 nt, Artificial Sequence
  derived and/or modified CDS sequence (opt5) from hemagglutinin__InfluenzaA__ABP49349
augaaggccaaacugcucgugcugcuuugcgcucugagcgccaccgacgcggauacaaucuguauuggcuaccacgcuaacaauuccacggacaccgucgauacaguucucgagaagaacgugaccgugacacauucugucaaucugcuugaagacaaccacaaugggaaacugugcaagcucaaaggaaucgccccgcugcagcugggcaaguguagcauugccggguggauccucggaaacccugagugcgaaucccuguucucuaagaaaagcugguccuauauugcugagacccccaauucugaaaacggcacauguuaccccggguauuuugccgauuacgaggagcuuagagaacaacugagcuccgugagcucuuucgagcgguuugaaaucuucccuaaggaguccagcuggcccaaucauaacguuaccaaaggagugacggcuucuugcucccacaagggcaaaagcucuuuuuaucgcaaucuccuguggcuuaccgagaagaacggcuccuacccuaaucugagcaaguccuaugucaacaauaaagaaaaggaggugcucguucugugggggauccaucaccccucuaacauugaagaccagaaaacaaucuacagaaaggagaacgccuacgugagcgucguguccagccacuauaaucggcgcuucaccccugaaauugcgaaaagaccgaaggugcgggaucaggagggacgcaucaacuacuauuggacacugcucgagcccggcgacaccauuaucuuugaagccaaugggaaccugauugcuccuugguacgccuucgcucuuucuagaggauuuggcuccgggaucaucacgagcaaugccucuauggaugagugugacgcgaaaugccagacaccccugggagccauuaacagcucccucccuuuccaaaauguccaucccguuaccaucggcgaauguccgaaguaugugcggucuacaaagcugcgcauggugaccggccuuagaaacauuccuagcauccagucccgggggcuguuuggagcuauugccggcuucaucgaagggggauggaccggcaugaucgaugggugguacggauaucaccaucagaaugagcagggcagcggcuacgcugccgaccaaaaaucuacacaguccgccauuaacgggaucacgaauaaggucaacagcauuaucgagaaaaugaauacccaguuuacagcugugggaaaggaguucaacaaacucgaaaagcgcauggagaaucugaacaagaaaguugaugacggcuuccuggacauuuggaccuacaacgcggaacuccuggugcuucuggagaaugaaagaacacucgauuuucacgacucuaacgucaagaaucuguaugagaaagugaagucccagcuuaaaaacaaugccaaggagaucgggaacggaugcuucgaauuuuaccacaaguguaauaacgagugcauggaaagcguuaaaaauggcaccuaugauuaccccaaguauuccgaggagucuaaacugaaccgggaaaagaucgacggggugaaacucgagagcaugggcgucuaccaaauucuggcuaucuauuccacgguggccucuagccugguccuccuggugucccuuggagccauuagcuucuggaugugcucuaauggcucccugcagugucgcaucugcauuuga

SEQ ID NO: 193720 - RNA, 1701 nt, Artificial Sequence
  derived and/or modified CDS sequence (opt5) from hemagglutinin__InfluenzaA__ABP49360
augaaggccaagcugcucauccugcuuugcgcuuucaccgccacagacgcggauacgauuuguaucggcuaccacgcuaacaauagcaccgacacaguggauaccguccuggagaagaacguuacagugacccauuccgugaaucuccuggaagacucucacaacgggaaacuuugcagacugaagggaauugccccgcuccagcugggcaauuguagcaucgccggguggauucugggaaacccugagugcgaaucccucuuuucuaaaaagagcugguccuauaucgcugagacacccaauucugaaaacggcaccuguuaccccggguauuucgccgauuacgaggagcugcgggaacaacuuagcuccgucagcucuuuugagcgcuucgaaaucuuuccuaaggaguccagcuggcccaaucauacggugaccaaaggaguuacagcuucuugcucccacaacggcaagagcucuuucuauagaaaucugcucuggcugaccaaaaagaacggcuccuacccuaaucuuagcaaauccuaugugaacaauaaggagaaggaaguccuggugcucuggggaguucaucaccccucuaacauuggggaccagcgggccaucuaccacacagagaacgcguacgugagcgucguguccagccauuauaaucgcagauuuaccccugaaauugccaaacggccgaaggugcgcgaucaggagggcagaaucaacuacuauuggacgcugcuggaacccggggacacaauuaucuucgaggcuaauggaaaccucauugccccuugguacgcuuuugcccugucucggggcuucggguccggaaucaucaccagcaaugcgucuauggaugagugugacgccaaaugccagacaccccaaggcgcuauuaacagcucccuuccuuuucagaauguccaccccguuaccaucggcgaauguccgaaguaugugcgcucuaccaaacugagaauggugacagggcuccggaacauuccuagcauccagucccgcggacuguucggcgccauugcuggguuuaucgagggaggcuggacggggaugaucgauggaugguacggcuaucaucaccagaaugaacaaggcagcggguacgccgccgaccagaagucuacccagaacgcuauuaauggaaucacaaacaaagucaauuccgugauugagaagaugaacacccaguucacagcgguuggcaaggaguucaauaaacuugaaagacggauggagaaccugaacaagaaaguggaugacggguuucucgacaucuggaccuacaaugccgaacugcugguccuccuggagaacgaacgcacgcuugauuuccacgacagcaaugugaagaaccuguaugagaaaguuaagucucaacucaagaauaacgcuaaagaaauuggaaauggcugcuuugaguucuaccauaaguguaacaaugagugcauggaauccgugaaaaacgggacauaugauuaccccaaguauagcgaggaauccaaacugaauagagagaagaucgacggcgucaaacuugagucuaugggaguguaccagauccuggccauuuauagcaccgucgccuccucucucgugcugcugguuagccucggcgcuaucuccuuuuggaugugcagcaacgggucucugcagugucggauuugcaucuga

SEQ ID NO: 193721 - RNA, 1701 nt, Artificial Sequence; identical to SEQ ID NO: 192722
  derived and/or modified CDS sequence (opt5) from hemagglutinin__InfluenzaA__ABP49371

SEQ ID NO: 193722 - RNA, 1701 nt, Artificial Sequence; identical to SEQ ID NO: 193459
  derived and/or modified CDS sequence (opt5) from hemagglutinin__InfluenzaA__ABP49382

SEQ ID NO: 193723 - RNA, 1698 nt, Artificial Sequence
  derived and/or modified CDS sequence (opt5) from hemagglutinin__InfluenzaA__ABP49393
augaaggugaaacugcucguccugcuuugcaccuucacagccacguacgcugacaccaucuguauuggcuaucacgccaacaauagcacagauaccguugacacagugcuggagaagaacgugaccgucacacauuccgugaaucuccuggaagauucucacaacgggaaacuuugccugcucaagggaaucgcgccccugcagcugggcaauuguagcguugcuggguggauucucggaaacccugagugcgaacugcuuaucuccaaagagucuuggagcuacauuguggaaaccccgaaucccgagaacggcacguguuauccuggguacuuugccgacuaugaggaacugagagagcaacucuccucugucagcuccuucgaacgguuugagaucuuccccaaggagagcucuuggccuaaucauaccgugacaggaguuuccgccagcugcucucacaacggcaaguccagcuuuuaccgcaaucugcuuuggcugaccggcaaaaacgggcucuaucccaaucugucuaaguccuacgcuaacaauaaagaaaaggaggugcugguccucuggggaauccaucacccuccgaacauuggcgaucagagagcccuguaccacacagaaaacgcuuaugugagcguggucuccucucauuacagccggcgcuucacccccgagaucgccaaaagaccuaagguucgggaccaggaagggcgcauuaauuauuacuggacgcuucuggagcccggagauacaaucauuuuugaggcgaacggcaaucucaucgccccuagauucgcuuuugcccugucccggggguucggaagcggcauuaucaccucuaacgcucccauggacgaaugugaugccaagugccagacaccgcaaggcgcgaucaauuccagccuuccuuuucagaacgugcaccccgugaccauuggggaguguccuaaauauguccgcucugccaagcugagaauggugaccggacuccggaauauccccagcauucagucccgcggccuguucggggcuaucgccggauuuauugaaggcggguggacaggaaugguugacggcugguacggcuaucaucaccagaacgagcaagggucuggauacgcugccgaucagaaaagcacgcagaaugccaucaacggcaucaccaauaaggugaacuccgucauugaaaagaugaauacacaguucaccgcuguggggaaagaguucaacaaacuggagagacggauggaaaaucucaacaagaagguugacgauggauuucuggacaucuggacauacaacgcggagcuucuggugcuccuggaaaaugagcgcacccuugacuuccacgauagcaacgucaaaaaucuguaugaaaaggugaaaucucaacucaagaacaaugccaaagagauuggcaacgggugcuuugaguucuaccauaaguguaaugacgaaugcauggaguccgucaagaacggcacguaugauuaccccaaauauagcgaagagucuaagcugaauagagagcggaucgacggagugaaacuggaauccaugggcguuuaccagauucucgcuaucuauagcacaguggccuccucucugguccuucuggugagccucggggccaucuccuuuuggaugugcucuaacggaagccugcaguguagaauuugcaucuga

SEQ ID NO: 193724 - RNA, 1701 nt, Artificial Sequence
  derived and/or modified CDS sequence (opt5) from hemagglutinin__InfluenzaA__ABP49404
augaagaccaucauugcccugagcuacacacucugccugguguucgcucagaaacuucccggcaacgacaauuccacggccacccugugucucgggcaccaugcggucccuaacggaacaaucguuaagaccauuacaaaugaucaaaucgaggugaccaacgcuacagaacuggugcagucuagcuccaccggcgggauuugcgacucuccgcaccagauccuugauggagagaauuguacgcugaucggcgcccuccugggggacccccagugcgauggauuucaaaacaaaaagugggaccuguucgucgaaagaagcaaagccuauuccaauuguuacccuuaugaugugcccgacuacgcuucucuccggagccugguugccuccagcggcacccuugaguuuaacaaugaaucuuucaacuggacaggcgugacccagaaugggacauccagcgcuugcaagcgcagaucuaacaauuccuuuuucagccggcugaacuggcucacccaucugaaguuuaaauauccugcccuuaaugucacgaugcccaacaacgagaaguucgauaaacuguacauuuggggagugcaccauccuggcacauauaaugaccagaucucucucuacgcgcaggccuccgggcgcauuaccguuagcacaaagagaucccaacagaccgugaucccgaacauuggaucucggccccgcgucagagauaucccuagccggauuuccaucuacuggaccaucgugaaacccggcgacauucugcugaucaauagcacagggaaccucauugcuccucgcggauauuuuaagaucagaucuggcaaguccagcauuaugcggucugaugcccccaucggcaaauguaauagcgagugcaucacgccgaacggguccauuccuaaugacaagcccuuccagaacgugaaucgcaucaccuacggagcuuguccuagauaugucaaacagaacacacugaaacuugccaccggcaugcggaauguucccgaaaaacaaacacgcgggauuuuuggagcgaucgccggcuucauugagaacgggugggaaggaaugguggacggcugguacggcuuuagacaccagaauagcgaggggaucggacaggcugccgaucugaagucuacccaagcugccaucaaccagauuaauggcaaacucaaccggcugaucgggaagacgaacgagaaguuccaccagauugaaaaagaguucuccgaaguggagggaagaauccaggaccuugaaaaguaugucgaggauacaaaaauugaccuguggagcuacaaugccgagcuccugguggcucuggaaaaccaacauaccaucgaucucaccgacucugagaugaauaagcuguuugaacgcacaaagaagcagcuucgggagaacgcggaagauaugggcaaugggugcuucaagauuuaucacaaaugugacaacgccugcaucggcuccaucagaaauggaaccuacgaucaugacguuuaccgcgaugaggcucugaacaaucgguuucagauuaagggcguggagcucaaaagcggguauaaggacuggauccuguggauuucuuucgccaucuccugcuuucuucugugugucgcccuccugggauucauuaugugggcuugccagaaaggcaacaucagauguaauaucugcauuuga

SEQ ID NO: 193725 - RNA, 1701 nt, Artificial Sequence; identical to SEQ ID NO: 192722
  derived and/or modified CDS sequence (opt5) from hemagglutinin__InfluenzaA__ABP49415

SEQ ID NO: 193726 - RNA, 1701 nt, Artificial Sequence; identical to SEQ ID NO: 192722
  derived and/or modified CDS sequence (opt5) from hemagglutinin__InfluenzaA__ABP49426

SEQ ID NO: 193727 - RNA, 1689 nt, Artificial Sequence
  derived and/or modified CDS sequence (opt5) from hemagglutinin__InfluenzaA__ABP49437
auggccaucauuuaccugauccuccuguucaccgcugugagaggcgaccagauuugcaucggguaucacgccaacaauagcacagagaaggucgauacgauucuugaacggaacguuaccgugacacaugcgaaagacauccuggagaagacccacaauggaaaacucuguaagcugaacggcauucccccucuugaacugggggauugcuccaucgcuggauggcuccugggcaauccggagugugaccgccugcucucugugcccgaauggagcuacaucauggagaaagagaacccuagagaugggcugugcuaucccggauccuuuaaugacuacgaagaacuuaagcaucugcucucuagcgucaagcacuucgaaaaagugaagauucugccuaaagaucgguggacacaacauaccacaaccggcggcucccgcgccugugccguuucugggaaccccagcuuuuucagaaauaugguguggcuuacgaagaaaggauccaacuauccugucgcuaagggcagcuacaauaacaccucuggggagcagaugcugaucauuuggggagugcaccacccgaaugacgagacagaacagcggacccucuaucagaacguuggcacauacguguccgucgggaccagcacgcugaauaagcgcucuacacccgagaucgccaccagaccuaaagugaacggacugggcggccggauggaauuuuccuggacacuccuggauaugugggacaccauuaacuucgagagcaccgggaaucuuaucgcucccgaauacggauuuaagaucucuaaacgcggcuccagcgggauuaugaagacagagggaacgcuggagaacugcgaaaccaaaugucaaacaccucucggcgccaucaauaccacacugcccuuccauaacgugcacccgcuuaccauuggggagugcccuaaguaugucaaauccgaaaagcugguucucgcgacgggacugagaaaugugccccagaucgagucucggggccuguuuggcgccauugcuggguucaucgaaggaggcuggcaggggaugguggauggaugguacggcuaucaucacagcaacgaccagggguccggcuacgccgcugauaaggagagcacacaaaaagccuuugacggaaucaccaauaaggucaacucugugauugagaaaaugaauacccaguucgaagcgguuggcaaggaguuuuccaaccucgaacgcagacuggagaaucuuaacaaaaagauggaagacggguuccuggauguguggacauauaaugccgagcuccugguccuuauggagaacgaacggacccuggacuuccacgauagcaaugugaagaaccucuacgacaaaguucgcaugcagcugagagauaacgugaaggagcugggaaauggcuguuuugaguucuaucauaaaugcgacgaugaguguaugaacucugucaagaaugggacauacgacuacccuaaauaugaggaagagagcaagcucaaccggaaugaaaucaagggagugaaacuguccucuaugggcgucuaccagauucuugcuaucuaugccacgguggcugggagccugucccucgccauuaugauggccggcaucagcuuuuggaugugcucuaacggaucccugcaaugcagaaucuguauuuga

SEQ ID NO: 193728 - RNA, 1701 nt, Artificial Sequence
  derived and/or modified CDS sequence (opt5) from hemagglutinin__InfluenzaA__ABP49448
augaaggccaaacugcucgugcugcuuugcgcucugagcgccaccgacgcggauacaaucuguauuggcuaccacgcuaacaauuccacggacaccgucgauacaguucucgagaagaacgugaccgugacacauucugucaaucugcuugaagacagccacaacgggaaacugugcagacucaagggaaucgcuccccugcagcugggcaaauguuccauugccggguggauccucggaaauccugagugcgaaucucuguucagcaagaaguccuggucuuauauugccgagaccccgaacagcgaaaauggcacauguuaccccggguauuuugccgauuacgaggagcuucgggaacaacuguccagcgugucuuccuucgagcgcuuugaaaucuucccuaaagagagaagcuggcccaagcauaacguuacccggggagugacggcuucuugcucccacaaaggcaagagcucuuuuuaucgcaaucuccuguggcuuaccgagaaaaacggcuccuacccuaaucugagcaaguccuaugucaacaauaaggaaaaagaggugcucguucuguggggagugcaucaccccucuaacaucgaagaccagaagacaauuuacagaaaagagaaugccuacgucagcgugguguccagcaacuauaaccggcgcuucaccccugaaaucucugagagaccgaagguccgggggcaggagggccgcauuaauuacuauuggacacugcucgaacccggggauaccaucauuuuugaggcgaacggaaaucugaucgccccuugguacgcuuucgcccuuuccagaggcuuugggagcggaauuaucacgucuaacgcuagcauggacgaaugugauacaaaaugccagacaccccaaggcgccaucaauuccucucugccuuuccagaacguucaccccgugaccauuggcgaguguccgaaguaugugcggagcaccaaacuccgcauggucaccgggcugagaaauaucccuuccauucagagccggggacuuuuuggcgcgaucgccggguucauugaaggaggcuggacagggaugaucgacggaugguacggcuaucaucaccagaacgagcaaggcucuggguacgcugccgaucagaaguccacgcagaaugcuaucaacggaauuaccaauaaggugaacagcguuaucgagaaaaugaauacacaguuuaccgccgugggcaaggaguucaacaaacuggaaaagcgcauggaaaaucucaacaaaaaggucgacgauggguuccuggacauuuggacauacaacgccgagcugcucgugcugcuugaaaaugagagaacccuggacuuucaugauucuaacguuaagaaucucuaugagaaagugaagucccaacugaaaaacaaugcuaaggaaaucggaaacggcugcuucgaguuuuaccacaaauguaauaacgaaugcauggagagcgucaagaaugggacguaugacuaccccaaguauuccgaggaaucuaaacuuaaccgggagaagauugauggcgugaaacuggaaagcaugggagucuaccagauccucgcgaucuauuccacaguggccucuagccugguucugcucgugucccugggcgcuauuagcuucuggaugugcucuaaugggucccuucaguguagaaucugcauuuga

SEQ ID NO: 193729 - RNA, 1689 nt, Artificial Sequence
  derived and/or modified CDS sequence (opt5) from hemagglutinin__InfluenzaA__ABP49459
auggccaucauuuaccugauccuccuguucaccgcugugagaggcgaccagauuugcaucggguaucacgccaacaauagcacagagaaggucgauacgauucuugaacggaacguuaccgugacacaugcgaaagacauccuggagaagacccacaauggaaaacucuguaagcugaacggcauucccccucuugaacugggggauugcuccaucgcuggauggcuccugggcaauccggagugugaccgccugcucucugugcccgaauggagcuacaucauggagaaagagaacccuagagaugggcugugcuaucccggauccuuuaaugacuacgaagaacuuaagcaucugcucucuagcgucaagcacuucgaaaaagugaagauucugccuaaagaucgguggacacaacauaccacaaccggcggcucccgcgccugugccguuucugggaaccccagcuuuuucagaaauaugguguggcuuacgaagaaaggauccaacuauccugucgcuaagggcagcuacaauaacaccucuggggagcagaugcugaucauuuggggagugcaccacccgaaugacgagacagaacagcggacccucuaucagaacguuggcacauacguguccgucgggacccccacgcugaauaagcgcagcacaccugauaucgccaccagacccaaagugaacggacaaggcggccggauggaguuuucuuggacacugcucgacaugugggauaccauuaacuucgaauccaccgggaaucugaucgcuccugaguacggauuuaagaucagcaaacgcgggucuuccggcauuaugaagacagaaggaacgcuuggcaacugcgagaccaaaugucagacaccccugggggccaucaauaccacacucccguuccauaacgugcacccucugaccauuggagagugccccaaguaugucaaaagcgaaaaacuuguucuggcgacgggccucagaaaugugccucagaucgagucccggggccuguuuggggccauugcuggauucaucgaaggcggguggcagggaaugguggacggcugguacggguaucaucacucuaacgaucaaggcagcggauacgccgcugacaaggaguccacacagaaagccuuugacggcaucaccaauaaggucaacagcgugauugaaaagaugaauacccaguucgaggcgguugggaaggaguuuucuaaccuggaacgcagacucgagaaucugaacaaaaagauggaagauggauuccuugacguguggacauauaaugccgagcugcucguccugauggaaaacgagcggacccuugauuuccacgacuccaaugugaagaaccuguacgauaaaguucgcaugcagcucagagacaacgugaaggagcugggcaauggguguuuugaguucuaucauaaaugcgaugacgaguguaugaacagcgucaagaauggaacauacgauuaccccaaauaugaagaggagucuaagcugaaccggaaugaaaucaagggcgugaaacucagcuccaugggggucuaccaaauucuggcuaucuaugccacgguggcuggcucucuuagccuggccauuaugauggccggaaucuccuuuuggaugugcagcaacggcucucuccagugcagaaucuguauuuga

SEQ ID NO: 193730 - RNA, 1689 nt, Artificial Sequence
  derived and/or modified CDS sequence (opt5) from hemagglutinin__InfluenzaA__ABP49470
auggccaucauuuaccugauccuccuguucaccgcugugagaggcgaccagauuugcaucggguaucacgccaacaauagcacagagaaggucgauacgauucuugaacggaacguuaccgugacacaugcgaaagacauccuggagaagacccacaauggaaaacucuguaagcugaacggcauucccccucuugaacugggggauugcuccaucgcuggauggcuccugggcaauccggagugugaccgccugcucucugugcccgaauggagcuacaucauggagaaagagaacccuagagaugggcugugcuaucccggauccuuuaaugacuacgaagaacuuaagcaucugcucucuagcgucaagcacuucgaaaaagugaagauucugccuaaagaucgguggacacaacauaccacaaccggcggcucccgcgccugugccguuucugggaaccccagcuuuuucagaaauaugguguggcuuacgaagaaaggauccaacuauccugucgcuaagggcagcuacaauaacaccucuggggagcagaugcugaucauuuggggagugcaccacccgaaugacgagacagaacagcggacccucuaucagaacguuggcacauacguguccgucagcaccucuacgcugaauaagcgcuccacacccgauaucgccaccagaccuaaagugaacgggcugggaggccggauggaguuuagcuggacacuccuggacaugugggauaccauuaacuucgaaucuaccggcaaucuuaucgcucccgaguacggguuuaagaucuccaaacgcggaagcuccggcauuaugaagacagaagggacgcugggaaacugcgagaccaaaugucaaacaccucucggcgccaucaauaccacacugcccuuccauaacgugcacccgcuuaccauuggggagugcccuaaguaugucaaaucugaaaagcugguucucgcgacgggacugagaaaugugccccagaucgagagccggggccuguuuggcgccauugcuggguucaucgaaggaggcuggcaggggaugguggacggaugguacggcuaucaucacuccaacgaucaggggagcggcuacgccgcugacaaggagucuacacaaaaagccuuugacggaaucaccaauaaggucaacuccgugauugagaaaaugaauacccaguucgaggcgguuggcaaggaguuuagcaaccucgaacgcagacuggagaaucuuaacaaaaagauggaagauggguuccuggacguguggacauauaaugccgagcuccugguccuuauggaaaacgagcggacccuggauuuccacgacucuaaugugaagaaccucuacgauaaaguucgcaugcagcugagagacaacgugaaggagcugggaaauggcuguuuugaguucuaucauaaaugcgaugacgaauguaugaacagcgucaagaaugggacauacgauuacccuaaauaugaagaggaguccaagcucaaccggaaugaaaucaagggagugaaacugucuagcaugggcgucuaccagauucuugcuaucuaugccacgguggcugggucccugagccucgccauuaugauggccggcaucucuuuuuggaugugcuccaacggaagccugcaaugcagaaucuguauuuga

SEQ ID NO: 193731 - RNA, 1701 nt, Artificial Sequence
  derived and/or modified CDS sequence (opt5) from hemagglutinin__InfluenzaA__ABP49492
augaagaccaucauugcccugagcuacaucuucugccucguguuugcucagggccugcccgggaacgacaauuccacagccacgcuuugucugggacaccaugcggucccuaacggcacccucguuaaaacaauuaccaaugaucaaaucgaggugacaaacgcuaccgaacuggugcagucuagcuccacagggaagauuugcgacaauccgcacagaauccuugauggaaucaacuguacccugauugacgcccuccugggcgauccccauugcgacggguuccagaaugagaaaugggaucuguuugucgaacggucuaaggccuucagcaacuguuauccuuacgacgugcccgauuaugcuucccuccgcucucugguugccagcuccggaacgcuugaguuuaucaaugaaggcuucaacuggaccggcgugacacagaaugggggaucuagcuccugcaaaagaggcccugacaacggguuuuucagccggcugaauuggcucuacaagucuggauccaccuaucccguccaaaacgugacaaugccuaauaacgauaacagcgacaagcuguacauuuggggcguucaccauccgucuaccgauaaagagcagacggaccuuuaugugcaggcuuccgggaaggucacagugagcaccaaacgcucccagcaaacagugauccccaaugucggaucuagaccuuggguucggggccugagcucccgcgugagcauuuacuggaccaucgugaagcccggcgacauucucgucaucaacucuaaugggaaccugaucgccccuagaggauacuuuaaaaugcggaccggcaaguccagcauuaugcgcucugaugcgcccaucgggacauguagcuccgagugcauuacgccgaauggaucuaucccuaacgacaagcccuuccagaaugugaacaaaauuaccuauggcgccuguccuaaguacguuaaacagaauacacugaagcucgcuaccgggaugagaaacgugcccgaaaaacagacacggggaaucuuuggcgccaucgcuggcuucauugagaaugggugggaaggaaugaucgauggcugguauggguuucgccaccaaaacagcgagggaaccggccaggccgcggaccugaaguccacgcaggccgcuauugaucaaaucaaugggaaacuuaacagagucauugagaagacaaaugaaaaguuccaccagaucgagaaagaguucagcgaaguggaaggccggauccaggaccuggagaaguacguugaggauaccaaaauugaccucuggucuuauaacgccgaacugcuuguggcucuggagaaccagcauaccaucgaucucacagacuccgaaaugaauaagcuguuugagaaaacccgcagacaacugcgggaaaacgccgaggauaugggaaauggcugcuucaagauuuaccacaagugugacaacgccugcaucgggagcauuagaaauggaacauaugaccaugaugucuaccgcgacgaggcucucaacaaucgguuucagaucaaaggcguggaacugaagucuggguacaaagauuggauucuuuggaucuccuucgcgaucagcugcuuucugcucugugucgugcugcuuggauucauuaugugggccugccagaagggcaacaucagauguaauauuugcaucuga

SEQ ID NO: 193732 - RNA, 1701 nt, Artificial Sequence; identical to SEQ ID NO: 193628
  derived and/or modified CDS sequence (opt5) from hemagglutinin__InfluenzaA__ABP49503

SEQ ID NO: 193733 - RNA, 1701 nt, Artificial Sequence
  derived and/or modified CDS sequence (opt5) from hemagglutinin__InfluenzaA__ABP49514
augaagaccaucauugcccugagcuacaucuucuaucucgcucugggccaggaccuucccgggaacgauaauuccacagccacgcugugccucggacaccaugcggugccuaacggcacccuggucaaaacaauuaccaaugaccaaaucgagguuacaaacgcuaccgaacuugugcagucuagcuccacagggaagauuuguaauaacccgcacagaauccuggauggaaucgacugcacccucauugaugcccugcugggcgacccccauugugauguguuucagaaugagacgugggaccucuucgucgaacggucuaaagccuuuagcaacugcuacccuuaugaugugcccgacuacgcuucccugcgcucucuuguugccagcuccgggacccuggaguucaucacagaaggauuuaccuggacaggcgugacccagaauggcgggagcaacgcuuguaagagaggaccuggcucuggguucuuuucccggcucaauuggcugacgaaaagcggaucuacauaucccguccuuaacgugaccaugccuaauaacgauaauuucgacaagcuguacauuuggggcguucaccauccguccacaaaccaagagcagaccagccucuaugugcaggccucugggcgcgucaccguguccacaagacggagccagcaaacgaucauucccaacaucggaucccgcccuugggugagaggccugucuagccggauuuccaucuacuggaccaucgucaagcccggcgauguucuggugauuaauagcaacgggaaucucaucgcgccucgcggauacuuuaaaaugagaacaggcaagucuuccauuaugcggagcgacgcccccaucgauaccugcauuucugaguguaucacaccgaacgggagcaucccuaaugacaaacccuuccagaacgugaauaagauuaccuauggagcuugcccuaaauacgucaagcagaacacgcugaaacuugccacaggcaugcgcaaugugcccgaaaagcagaccagagggcuguuuggagcuaucgccggcuucauugagaacggcugggaagggaugaucgacggaugguauggcuuucggcaccaaaauuccgaggggaccggacaggcggccgaucucaagucuacacaggcugccauugaccaaaucaacggcaaacugaaucgcguuaucgagaagaccaacgaaaaauuccaccagauugagaaggaguucagcgaaguggaagggagaauccaggaucuugagaaauacgucgaggacacaaagauugaucugugguccuauaaugcugaacuccugguggcccuggagaaccagcauacgaucgaccucaccgauagcgaaaugaacaagcuguuugagaaaacacggagacaacuucgcgaaaaugccgaggacaugggcaacggauguuucaagauuuaccacaaaugcgauaaugcuuguaucgagucuauucggaacggcaccuaugaccaugacguuuacagagaugaagcgcugaauaaccgcuuucagaucaaggggguggagcucaaauccggauacaaggacuggauccuguggauuagcuucgccaucucuugcuuucuucugugcgucgugcuccugggcuucauuaugugggcuugucagcgggggaauaucagaugcaacauuuguaucuga

SEQ ID NO: 193734 - RNA, 1701 nt, Artificial Sequence
  derived and/or modified CDS sequence (opt5) from hemagglutinin__InfluenzaA__ABQ01311
augaaggccagacugcucauccugcuuugcgcucugagcgccaccgacgcggauacaauuuguaucggcuaccacgcuaacaauuccacggacaccguggauacaguccucgagaaaaacguuaccgugacacauucugugaaucugcuugaagacagccacaacgggaagcugugccggcucaaaggaauugcuccccugcagcugggcaaguguaauaucgccggguggauucucggaaacccugagugcgaaucccugcuuucuaaucgcagcugguccuauaucgccgagaccccgaacucugaaaauggcacauguuaccccggggauuucgccgacuaugaggagcugagagaacaacucagcuccgucagcucuuuugagcgguucgaaaucuuuccuaaagagcgcuccuggcccaagcauaacauuaccagaggagugacggcugccugcagccacgcgaagaaaucuuccuucuacaagaaucugcuuuggcugaccgaggccaacggcagcuauccuaaucucucuaaauccuacguuaacaauaaggaaaaagaggugcugguccuguggggcgugcaucaccccagcaagaucgaagaucagcggacacucuaucgcaaggagaacgcuuacguuuccguggucucuagcaacuacaauagacgguuuaccccugaaauugccgagcgcccgaaagugagagggcaggcuggacggaugaacuauuacuggacacugcuugagcccggcgacaagaucauuuucgaagccaaugggaaccugaucgcgccuugguaugccuuugcucucucccgcggacugggcagcgggauuaucaccucuaaugccuccauggaugagugugacacgaaaugccagacaccccaaggagcuaucaacagcucucuuccuuuccagaauauucaccccgugaccaucggcgaauguccgaaguacgucagaagcacaaaacugcggaugguuaccggccuccgcaacauuccuuccauccagucuagagggcuguuuggagccauugccggcuucaucgaagggggauggaccggcaugguggaugggugguauggauaccaucaccagaaugagcaaggcagcggcuaugcugcggaccagaaguccacacagaacgccaucaaugggauuacgaacaaagugaauagcgucaucgagaagaugaacacccaguuuacagcugugggaaaggaguucaauaaacuggaaaagcggauggagaaccucaacaaaaagguugaugacggcuuucuggacauuuggaccuacaaugccgaacuucuggugcuccuggagaacgaaagaacacuugauuuccaugacucuaaugucaaaaaccuguacgagaaggugaagaaucaacuccgcaacaaugccaaagagaucgggaacggaugcuucgaauuuuaucacaagugugauaaugagugcauggaauccguuaaaaacggcaccuacgacuaucccaaguacagcgaggagucuaaacugaaucgggaaaagauugauggggugaagcuggaguccaugggcgucuaucagauccucgcuaucuacagcacgguggccuccucucugguccuucuggugagccucggagcgauuuccuucuggaugugcucuaacggcagccugcaguguagaaucugcauuuga

SEQ ID NO: 193735 - RNA, 1701 nt, Artificial Sequence
  derived and/or modified CDS sequence (opt5) from hemagglutinin__InfluenzaA__ABQ01322
augaaggccaaacugcucgugcugcuuugcgcucugagcgccaccgacgcggauacaaucuguauuggcuaccacgcuaacaauuccacggacaccgucgauacaguucucgagaagaacgugaccgugacacauucugucaaucugcuugaagacagccacaacgggaaacugugcagacucaagggaaucgcuccccugcaucugggcaaauguuccauugccggguggauccucggaaauccugagugcgaaucucuguucagcaagaaguccuggucuuauauugccgagaccccgaacagcgaaaauggcacauguuaccccggguauuuugccgauuacgaggagcuucgggaacagcuguccagcgugucuuccuucgagcgcuuugaaaucuucccuaaagagagaagcuggcccaagcacaacguuacccggggagugacggcugccugcucucauaaaggcaaguccagcuuuuaucgcaaucuccuguggcuuaccgagaaaaacggcucuuacccuaaucuguccaagagcuaugucaacaauaaggaaaaagaggugcucguucuguggggagugcaccaccccuccaacaucgaagaccaaaagacaauuuacagaaaagagaaugcguacgucucuguggugagcuccaacuauaaccggcgcuucaccccugaaaucgccaagagaccgaaaguccgggggcaggagggccgcauuaauuacuauuggacacugcucgagcccggggauaccaucauuuuugaagcuaacggaaaucugaucgccccuugguacgcuuucgcccuuagcagaggcuuugggucuggaauuaucacguccaacgcgagcauggacgagugugaugccaagugccagacaccccagggcgcuaucaauucuagccugccuuuccaaaacguucaucccgugaccauuggcgaauguccgaaauaugugcgguccacaaagcuccgcauggucaccgggcugagaaauaucccuucuauucagagccggggacuuuuuggcgccaucgcuggguucauugagggaggcuggaccgggaugaucgacggaugguacggcuaucaccaucagaacgaacagggcuccggguacgccgccgaucaaaagagcacacagaaugcuaucaacggaauuacgaauaaagugaacucuguuaucgagaagaugaauacccaguuuacagcggugggcaaagaguucaacaagcuggaaaaacgcauggagaaucucaacaagaaggucgacgauggguuccuggacauuuggaccuacaacgccgaacugcucgugcugcuugagaaugaaagaacacuggacuuucacgauuccaacguuaaaaaucucuaugagaaggugaaaagccagcugaagaacaaugcuaaagagaucggaaacggcugcuucgaauuuuaccacaaguguaauaacgagugcauggaaucugucaagaaugggaccuaugacuaccccaaauauuccgaggagagcaaacuuaaccgggaaaagauugauggcgugaagcuggaguccaugggagucuaccaaauccucgccaucuauucuacgguggccagcucccugguucugcucgugucucugggcgcuauuagcuucuggaugugcuccaaugggagccuucaguguagaaucugcauuuga

SEQ ID NO: 193736 - RNA, 1701 nt, Artificial Sequence; identical to SEQ ID NO: 192722
  derived and/or modified CDS sequence (opt5) from hemagglutinin__InfluenzaA__ABQ01333

SEQ ID NO: 193737 - RNA, 1701 nt, Artificial Sequence
  derived and/or modified CDS sequence (opt5) from hemagglutinin__InfluenzaA__ABQ01344
augaagaccaucauugcccugagcuacauccucugccugguguucgcucagaaacuucccggcaacgacaauuccacagccacgcugugucucgggcaccaugcggucccuaacggaacccugguuaagacaauuaccaaugaucaaaucgaggugacaaacgcuaccgaacuugugcagucuagcuccacaggcgggauuugcgacucuccgcaccagauccuggauggagagaauuguacccucaucgacgcccugcugggcgauccccauugcgacggguuucagaacaaagaaugggaucucuucgucgagagaagcaaggccuauuccaauuguuacccuuaugacgugcccgauuacgcuucucugcggagccuuguugccuccagcggaacgcuggaauuuaacaaugagucuuucaacuggaccggcguggcucaaaauggcacauccagcgccugcaaacgcagaucuaacaaguccuuuuucagccggcucaauuggcugcaccagcuuaaguauaaauacccugcgcugaacgucaccaugcccaauaacgagaaguuugacaaacucuauauuuggggagugcaucacccuucuacagauuccgaccagaucagccuguacgcccaggcuccggggcgcguuaccguguccacgaagagaucucaacagacagucauucccaacaucggcagccggccuugggugcgcgggguguccagcagaauuucuaucuacuggaccauugucaaacccggagauauccugcucaucaauuguacaggcaaccugauugccccucggggguauuucaagauccgcuccggaaagagcucuauuaugagaagcgacgcuuccaucggcaaaugcaauucugaauguauuacccccaacggcagcaucccgaaugacaagccuuuucagaacguuaaucggaucaccuacggggccugcccccgcuaugugaaacagaacacacuuaagcuggcgacgggaaugagaaaugugccugagaaacaaacccggggcauuuucggggccaucgcuggauuuauugaaaacggcugggaggggauggucgauggaugguacggcuuccgccaccaaaauuccgagggcacagggcaggccgcugaccucaagagcacccaggccgccaucaaccagauuaauggaaaacugaacagacuuaucggcaagacaaaugaaaaguuucaucagaucgagaaagaguucucugaaguggaagggcggauucaggaucuggagaaguauguugaggacaccaaaaucgaucucugguccuacaacgcugaacugcugguggcgcucgagaaccaacacacgauugaccugacagauagcgaaaugaauaaacuuuucgagagaaccaagaagcagcugcgcgaaaacgccgaggacaugggaaauggcuguuuuaagaucuaucauaaaugcgauaacgcuugcauugggucuauccggaauggcaccuacgaccacgaugucuacagagacgaggcccucaacaaucgcuuccagauuaagggaguggaacugaaauccggcuauaaggacuggauccuuuggaucagcuuugccauuuccuguuuccugcucugcguugugcugcugggguuuaucaugugggcuugucagaaaggaaacauucggugcaauaucuguauuuga

SEQ ID NO: 193738 - RNA, 1689 nt, Artificial Sequence
  derived and/or modified CDS sequence (opt5) from hemagglutinin__InfluenzaA__ABQ01355
auggccaucauuuaccugauccuccuguucaccgcugugagaggcgaccagauuugcaucggguaucacgccaacaauagcacagagaaggucgauacgauucuugaacggaacguuaccgugacacaugcgaaagacauccuggagaagacccacaauggaaaacucuguaagcugaacggcauucccccucuugaacugggggauugcuccaucgcuggauggcuccugggcaauccggagugugaccgccugcucagagugcccgaauggucuuacaucauggagaaagagaacccucgggaugggcugugcuaucccgggagcuuuaaugacuacgaggaacuuaagcaucugcucuccucugucaagcacuucgaaaaagugcgcauucugccuaaggauagauggacacaacauaccacaaccggcggcagccgggccugugccguuuccgggaaccccucuuucuuccgcaauaugaucuggcuuacgaaaaagggaagcaacuauccuguggcuaaaggcuccuacaauaacaccagcggggagcagaugcugauuaucuggggaguccaccacccgauugacgagacagaacagagaacccucuaucagaauguggagacauacguuucuguggucaccuccacgcugaacaagcggagcacacccaagaucgccacccgcccuaaagugaauggccugggaggaagaauggaauuuucuuggacacuccuggauaugugggacaccaucaacuucgaguccaccggcaaccuuauugcucccgaauacggcuuuaagaucagcaaacgggggucuuccggaauuaugaagacagagggcacgcuggagaauugcgaaaccaaaugucaaacaccucucggggccaucaacaccacacugcccuuccauaaugugcacccgcuuaccauuggagagugcccuaaguaugucaaaagcgaaaagcugguucucgcgacgggccugcgcaacgugccccagaucgaguccagagggcuguuuggagccaucgcuggcuucauugaaggcggguggcagggaaugguggauggcugguacggguaucaucacucuaaugaccagggaagcggcuacgccgcugauaaggaguccacacaacgggccuuugacgggaucaccaacaaagucaauagcgugauugagaagaugaacacccaguucgaagcgguuggcaaagaguuuucuaaucucgaacgcagacuggagaaccuuaauaagaaaauggaagacggauuccuggauguguggacauauaacgccgagcuccugguccuuauggagaaugaacggacccuggacuuccacgauuccaacgugaagaaucucuacgacaagguuagaaugcagcugcgcgauaacgugaaagagcugggcaacggguguuuugaauuuuaucauaagugcgacgaugaguguaugaauagcgucaaaaacggaacauacgacuacccuaaguaugaggaagagucuaaacucaaucggaacgaaaucaagggcgugaagcugagcuccaugggggucuaccagauucuugcuaucuaugccacgguggcuggaucucugagccucgccaucaugauggccggcauuuccuuuuggaugugcagcaaugggucucugcaaugcagaaucuguauuuga

SEQ ID NO: 193739 - RNA, 1701 nt, Artificial Sequence
  derived and/or modified CDS sequence (opt5) from hemagglutinin__InfluenzaA__ABQ01366
augaagaccaucauugcccugagcuacaucuucugccucguguuugcucaggaccugcccggcaacgauaauuccacagccacgcuuugucuggggcaccaugcggucccuaacggaacccucguuaaaacaauuaccaaugaccaaaucgaggugacaaacgcuaccgaacuggugcagucuagcuccacaggcaagauuugcgauaauccgcacagaauccuugacgggaucaacuguacccugauugaugcccuccugggagacccccauugcgauggcuuccagaaugagaaaugggaccuguuugucgaacggucuaaggccuucagcaacuguuauccuuacgaugugcccgacuaugcuucccuccgcucucugguugccagcuccgggacgcuugaguuuaucaaugaaggauucaacuggaccggcgugacacagaauggcgggagcucugcuugcaaaagaggaccugauaacggcuuuuucucccggcugaauuggcucuacaagagcgggucuaccuaucccguccaaaacgugacaaugaccaauaacgacaacuccgauaagcuguacauuuggggaguucaccauccuagcacggacaaagagcagacagaccuuuaugugcaggccucuggcaaggucaccguguccacaaaacgcagccagcaaaccaucauuccgaaugugggguccagacccuggguccggggacugucuagccgcguuuccaucuacuggaccauugugaagccuggcgauauccucgugaucaacagcaauggcaaccugauugcgcccagaggguacuuuaaaaugcggacaggaaagucuuccaucaugcgcagcgacgccccuauuggcacguguucuagcgagugcaucacccccaauggguccauuccgaacgauaagccuuuccagaaugucaacaaaaucacauauggagcuugucccaaguacgugaaacagaauacccugaagcucgccacaggcaugagaaacguuccugaaaaacagacccgggggaucuuuggagcuauugccggcuucaucgagaauggcugggaagggaugauugacggaugguauggcuuucgccaccaaaacucugaggggacgggacaggcggccgaucuuaagagcacacaggcugccaucgaccaaauuaauggcaaacugaacagagugaucgagaagaccaaugaaaaguuccaccagaucgagaaagaguucuccgaagucgaagggcggauucaggaucuggagaaguacguggaggacaccaaaaucgaucucuggagcuauaacgcugaacugcuuguugcccuggagaaccagcauacaauugaccucaccgauucugaaaugaauaagcuguuugagaaaacacgcagacaacugcgggaaaacgccgaggacaugggcaauggaugcuucaagaucuaccacaagugugacaacgcuugcauuggcuccaucagaaaugggacguaugaucaugacguguaccgcgaugaggcgcucaacaaucgguuucagauuaaaggagucgaacuuaagagcggcuacaaagacuggauccuguggaucucuuucgccauuuccugcuuucugcucugugugguccugcuuggguucaucaugugggcuugccagaagggaaacauuagauguaauaucugcauuuga

SEQ ID NO: 193740 - RNA, 1701 nt, Artificial Sequence; identical to SEQ ID NO: 193505
  derived and/or modified CDS sequence (opt5) from hemagglutinin__InfluenzaA__ABQ44383

SEQ ID NO: 193741 - RNA, 1701 nt, Artificial Sequence; identical to SEQ ID NO: 192705
  derived and/or modified CDS sequence (opt5) from hemagglutinin__InfluenzaA__ABQ44405

SEQ ID NO: 193742 - RNA, 1701 nt, Artificial Sequence
  derived and/or modified CDS sequence (opt5) from hemagglutinin__InfluenzaA__ABQ44416
augaaggccaagcugcucgugcugcuuugcgcuuucaccgccacagacgcggauacgaucuguauuggcuaccacgcuaacaauagcaccgacacagucgauaccguucuggagaagaacgugacagugacccauuccgucaaucuccuggaagacucucacaacgggaaacuuugcagacugaagggaaucgccccgcuccagcugggcaauuguagcauugccggguggauccugggaaacccugagugcgaaucccucuuuucuaaaaagagcugguccuauauugcugagacacccaauucugaaaacggcaccuguuaccccggguauuucgccgauuacgaggagcugcgggaacaacuuagcuccgugagcucuuuugagcgcuucgaaaucuuuccuaaggaguccagcuggcccaaucauacgguuaccaaaggagugacagcuucuugcucccacaagggcaaaagcucuuucuauagaaaccugcucuggcugaccgagaagaauggcuccuacccuaaccuuagcaaauccuaugucaauaacaaggaaaaggaggugcugguucucuggggagugcaucaccccucuaauaucggggaccagcgggccauuuaccacacagaaaacgcguacgucagcgugguguccagccauuauaaccgcagauuuaccccugagaucgccaaacggccgaagguccgcgaucaggaaggcagaauuaauuacuauuggacgcugcuggagcccgaggacacaaucauuuucgaagcuaacgggaaucucaucgccccuugguacgcuuuugcccugucucggggauucggcuccgggauuaucaccagcaacgcgucuauggaugagugugacgccaaaugccagacaccccaaggagcuaucaauagcucccuuccuuuucagaacguucaccccgugaccauuggcgaauguccgaaguaugugcgcucuaccaaacugagaauggucacaggccuccggaauaucccuagcauucagucccgcgggcuguucggagccaucgcuggcuuuauugaagggggauggacgggcaugaucgaugggugguacggauaucaucaccagaacgaacaaggcagcggcuacgccgccgaccagaagucuacccagaaugcuaucaacgggauuacaaauaaagugaacuccguuaucgagaagaugaauacccaguucacagcggugggaaaggaguucaacaaacuugaaagacggauggagaaucugaacaagaaagucgaugacggcuuucucgacauuuggaccuacaacgccgaacugcuggugcuccuggagaaugaacgcacgcuugauuuccacgacagcaacguuaagaaucuguaugagaaagugaagucucaacucaagaacaaugcuaaagagaucgggaacggaugcuuugaguucuaccauaaguguaauaacgagugcauggaauccgucaaaaauggcacauaugauuaccccaaguauagcgaggaguccaaacugaacagagaaaagauugacggggugaaacuugagucuaugggcgucuaccagauccuggccaucuauagcaccguggccuccucucucguucugcuggugagccucggagcuauuuccuuuuggaugugcagcaauggcucucugcagugucggaucugcauuuga

SEQ ID NO: 193743 - RNA, 1701 nt, Artificial Sequence; identical to SEQ ID NO: 192328
  derived and/or modified CDS sequence (opt5) from hemagglutinin__InfluenzaA__ABQ44427

SEQ ID NO: 193744 - RNA, 1689 nt, Artificial Sequence
  derived and/or modified CDS sequence (opt5) from hemagglutinin__InfluenzaA__ABQ44438
auggccaucauuuacuucauccugcucuuuaccgcugugagaggcgaccagauuugcaucggguaucacgccaacaauagcacagagaaggucgauacgauucuggaacggaacguuaccgugacacaugcgaaagacauccuugagaagacccacaauggaaaacuguguaagcucaacggcauucccccucuggaacuuggggauugcuccaucacaggauggcugcucggcaauccggagugugaccgccugcugagagugcccgaauggucuuacaucauggagaaagagaacccucgguauagccucugcuaccccggguccuucaaugauuaugaggaacugaagcaucuucugucuagcgucaagcacuuugaaaaagugcgcauucucccuaaggacggauggacccaacauacaaccuccggcggcucuaaggcuugugccguuagcgggaaguccagcuucuuuagaaacaugguguggcugacgaaaaagggacccaauuacccugucgccaagcggucuuauaacaauaccuccggcgagcagaugcuuaucauuuggggagugcaccacccgaacgaugaggcugaacagagcgcccuguaccagaaaguugggacauacgugucugcuuccaccagcacacucaauaagcgcucuacccccgagaucgccgcgagaccugaagucaacggccuggggucccggauggaguucagcuggacgcugcucgacgugugggauacaauuaauuuugaauccaccggaaaccugguggcccccgaguauggcuucaaaaucucuaagcgcggcagcuccgggaucaugaaaacagagggaacccuuggcaacugcgaaaccaagugucaaacaccucugggggcuauuaauacgacccuccccuuucauaacguccacccgcugacaaucggagagugcccuaaauacguuaagagcgaaaaacuugugcuggccaccggccucagaaaugugccccagauugagucucgggggcuguucggagcuaucgccggcuuuauugaaggcggguggcagggaauggucgacggcugguauggguaccaucacuccaacgaucagggaagcggcuaugcggccgacaaagagucuacacaaaaggcuuucgaucgcaucaccaauaaagugaacagcguuaucgagaagaugaauacgcaguuugaagccguggggaaagaguucuccaaccuggaaaagagacucgagaaucugaacaagaaaauggaagacggcuuccuugacgucuggacauacaaugcugagcugcucgugcugauggagaacgaacggacccuugauuuucacgacucuaauguuaagaaccuguauaauaaagugcgcaugcagcucagagauaacgucaaggagcugggaaacggcuguuucgaauuuuaccauaaaugcgacgaugaguguaugagcuccgugaagaaugggaccuacgacuauccuaaguacgaggaagagagcaaacugaagcggaacgaaauuaaaggagucaagcucucuuccaugggcguguaucagauccuggccauuuacgccacaguugcugggagccuuucucuggcgaucaugauugccggaaucucccucuggaugugcagcaauggcucccugcaaugcagaaucuguauuuga

SEQ ID NO: 193745 - RNA, 1689 nt, Artificial Sequence
  derived and/or modified CDS sequence (opt5) from hemagglutinin__InfluenzaA__ABQ44460
auggccaucauuuaccugauccuccuguucaccgcugugagaggcgaccagauuugcaucggguaucacgccaacaauagcacagagaaggucgauacgauucuugaacggaacguuaccgugacacaugcgaaagacauccuggagaagacccacaauggaaaacucuguaagcugaacggcauucccccucuugaacugggggauugcuccaucgcuggauggcuccugggcaauccggagugugaccgccugcucucugugcccgaauggagcuacaucauggagaaagagaacccuagagaugggcugugcuaucccggauccuuuaaugacuacgaagaacuuaagcaucugcucucuagcgucaagcacuucgaaaaagugaagauucugccuaaagaucgguggacacaacauaccacaaccggcggcucccgcgccugugccguuucugggaaccccagcuuuuucagaaauaugaucuggcuuacgaagaaaggauccaacuauccuguggcuaagggcagcuacaauaacaccucuggggagcagaugcugauuaucuggggaguccaccacccgaaugacgagacagaacagcggacccucuaucagaacgugggcacauacguuuccguggggaccagcacgcugaauaagcgcucuacacccgauauugccaccagaccuaaagucaacggacugggcucccggauggaguuuagcuggacacuccuggacaugugggauaccaucaacuucgaaucuaccggcaaucuuaucgcucccgaguacggguuuaagauuuccaaacgcggaagcuccggcaucaugaagacagaagggacgcugggaaacugcgagaccaaaugucaaacaccucucggcgccauuaauaccacacugcccuuccauaacgugcacccgcuuaccaucggggagugcccuaaguaugugaaaucugaaaagcugguccucgcgacgggacugagaaauguuccccagauugagagccggggccuguuuggcgccaucgcuggguucaucgaaggaggcuggcaggggaugguggacggaugguacggcuaucaucacuccaacgaucaggggagcggcuacgccgcugacaaggagucuacacaaaaagccuuugacggaauuaccaauaaggugaacuccgucaucgagaaaaugaauacccaguucgaggcggugggcaaggaguuuagcaaccucgaacgcagacuggagaaucuuaacaaaaagauggaagauggguuccuggacguuuggacauauaaugccgagcuccuggugcuuauggaaaacgagcggacccuggauuuccacgacucuaaugucaagaaccucuacgauaaagugcgcaugcagcugagagacaacguuaaggagcugggaaauggcuguuuugaguucuaucauaaaugcgaugacgaauguaugaacagcgugaagaaugggacauacgauuacccuaaauaugaagaggaguccaagcucaaccggaaugaaauuaagggagucaaacugucuagcaugggcguguaccagauccuugcuauuuaugccacggucgcugggucccugagccucgccaucaugauggccggcaucucuuuuuggaugugcuccaacggaagccugcaaugcagaauuuguaucuga

SEQ ID NO: 193746 - RNA, 1701 nt, Artificial Sequence
  derived and/or modified CDS sequence (opt5) from hemagglutinin__InfluenzaA__ABQ44471
augaaggccagacugcucauccugcuuugcgcucugagcgccaccgacgcggauacaauuuguaucggcuaccacgcuaacaauuccacggacaccguggauacaguccucgagaaaaacguuaccgugacacauucugugaaucugcuugaagacagccacaacgggaagcugugccggcucaaaggaauugcuccccugcagcugggcaaguguaauaucgccggguggauucucggaaacccugagugcgaaucccugcuuucuaaucgcagcugguccuauaucgccgagaccccgaacucugaaaauggcacauguuaccccggggauuucgccgacuaugaggagcugagagaacaacucagcuccgucagcucuuuugagcgguucgaaaucuuuccuaaagagcgcuccuggcccaagcauaacauuaccagaggagugacggcugccugcagccacgcgaagaaaucuuccuucuacaagaaucugcuuuggcugaccgaggccaacggcagcuauccuaaucucucuaaauccuacguuaacaauaaggaaaaagaggugcugguccuguggggcgugcaucaccccagcaacaucgaagaucagcggacacucuaucgcaaggagaacgcuuacguuuccguggucucuagcaauuacaacagacgguuuaccccugaaauugccgagcgcccgaaggugagagggcaggcuggacggaugaauuauuacuggacacugcuugagcccggcgacaaaaucauuuucgaagccaacgggaaucugaucgcgccuugguaugccuuugcucucucccgcggacugggcagcgggauuaucaccucuaacgccuccauggaugagugugacacgaagugccagacaccccaaggagcuaucaauaacagccuuccuuuccagaauauucaccccgugaccaucggcgaauguccgaaauacgucagaucuacaaagcugcggaugguuaccggccuccgcaacauuccuagcauccaguccagagggcuguuuggagccauugccggcuucaucgaagggggauggaccggcaugguggaugggugguauggauaccaucaccagaaugaacaaggcucuggcuaugcugcggaccagaaaagcacacagaacgccaucaaugggauuacgaacaaggucaauuccgugaucgagaaaaugaacacccaguuuacagcugugggaaaggaguucaacaagcuggaaaaacggauggagaaucucaacaagaaaguugaugacggcuuucuggacauuuggaccuacaaugccgaacuucuggugcuccuggagaacgaaagaacacuugauuuccaugacagcaaugucaagaaccuguacgagaaagugaagaaucaacuccgcaacaaugccaaggagaucgggaacggaugcuucgaauuuuaucacaaaugugauaaugagugcauggaaucuguuaagaacggcaccuacgacuaucccaaauacuccgaggagagcaagcugaaucgggagaaaauugauggggugaagcuggagucuaugggcgucuaucagauccucgcuaucuacuccacgguggccagcucccugguccuucuggugucucucggagcgauuagcuucuggaugugcuccaacggcucucugcaguguagaaucugcauuuga

SEQ ID NO: 193747 - RNA, 1701 nt, Artificial Sequence
  derived and/or modified CDS sequence (opt5) from hemagglutinin__InfluenzaA__ABR15797
augaagaccaucauugcccugagcuacaucuucugccucgcucugggccaggaccuucccgggaacgauaauuccacagccacgcugugucucggacaccaugcggugccuaacggcacccuggucaaaacaauuaccaaugaccaaaucgagguuacaaacgcuaccgaacuugugcagucuagcuccacagggaagauuugcaauaacccgcacagaauccuggauggaaucgacuguacccucauugaugcccugcugggcgacccccauugcgauguguuucagaaugagacgugggaccucuucgucgaacggucuaaagccuuuagcaacuguuauccuuacgaugugcccgacuaugcuucccugcgcucucuuguugccagcuccgggacccuggaguucaucacagaaggauuuaccuggacaggcgugacccagaauggcgggagcaacgcuugcaagagaggaccuggcucuggguucuuuucccggcucaauuggcugacgaaaagcggaucuacauaccccguccuuaacgugaccaugccuaauaacgauaauuucgacaagcuguauauuuggggcguucaccauccguccacaaaccaagagcagaccagccucuacgugcaggccucugggcgcgucaccguguccacaagacggagccagcaaacgaucauucccaacaucggaucccgcccuugggugagaggccugucuagccggauuuccaucuauuggaccaucgucaagcccggcgauguucuggugauuaauagcaacgggaaucucaucgcgccucgcggauacuuuaaaaugagaacaggcaagucuuccauuaugcggagcgacgcccccaucgacaccuguauuucugagugcaucacaccgaacgggagcaucccuaaugauaaacccuuccagaacgugaauaagauuaccuacggagcuuguccuaaauaugucaagcagaacacgcugaaacuugccacaggcaugcgcaaugugcccgaaaagcagaccagagggcuguuuggagcuaucgccggcuucauugagaacggcugggaagggaugaucgacggaugguacggcuuucggcaccaaaauuccgaggggaccggacaggcggccgaucucaagucuacacaggcugccauugaccaaaucaacggcaaacugaaucgcguuaucgagaagaccaacgaaaaauuccaccagauugagaaggaguucagcgaaguggaagggagaauccaggaucuugagaaauaugucgaggacacaaagauugaucugugguccuacaaugcugaacuccugguggcccuggagaaccagcauacgaucgaccucaccgauagcgaaaugaacaagcuguuugagaaaacacggagacaacuucgcgaaaaugccgaggacaugggcaacggaugcuucaagauuuaucacaaaugugauaaugcuugcaucgagucuauucggaacggcaccuacgaccaugacguuuauagagaugaagcgcugaauaaccgcuuucagaucaaggggguggagcucaaauccggauacaaggacuggauccuguggauuagcuucgccaucucuugcuuucuucugugugucgugcuccugggcuucauuaugugggcuugccagcgggggaauaucagauguaacauuugcaucuga

SEQ ID NO: 193748 - RNA, 1701 nt, Artificial Sequence
  derived and/or modified CDS sequence (opt5) from hemagglutinin__InfluenzaA__ABR15808
augaaggccagacugcucauccugcuuugcgcucugagcgccaccgacgcggauacaauuuguaucggcuaccacgcuaacaauuccacggacaccguggauacaguccucgagaaaaacguuaccgugacacauucugugaaucugcuugaagacagccacaacgggaagcugugccggcucaaaggaauugcuccccugcagcugggcaaguguaauaucgccggguggauucucggaaacccugagugcgaaucccugcuuucuaaucgcagcugguccuauaucgccgagaccccgaacucugaaaauggcacauguuaccccggggauuucgccgacuaugaggagcugagagaacaacucagcuccgucagcucuuuugagcgguucgaaaucuuuccuaaagagcgcuccuggcccaagcauaacauuaccagaggagugacggcugccugcagccacgcgaagaaaucuuccuucuacaagaaucugcuuuggcugaccgaggccaacggcagcuauccuaaucucucuaaauccuacguuaacaauaaggaaaaagaggugcugguccuguggggcgugcaucaccccagcaacaucgaagaucagcggacacucuaucgcaaggagaacgcuuacguuuccguggucucuagcaauuacaacagacgguuuaccccugaaauugccgagcgcccgaaggugagagggcaggcuggacggaugaauuauuacuggacacugcuugagcccggcgacaaaaucauuuucgaagccaacgggaaucugaucgcgccuugguaugccuuugcucucucccgcggacugggcagcgggauuaucaccucuaacgccuccauggaugagugugacacgaagugccagacaccccaaggagcuaucaauagcucucuuccuuuccagaacauucaccccgugaccaucggcgaauguccgaaauacgucagaagcacaaagcugcggaugguuaccggccuccgcaauauuccuuccauccagucuagagggcuguuuggagccauugccggcuucaucgaagggggauggaccggcaugguggaugggugguauggauaccaucaccagaacgaacaaggcagcggcuaugcugcggaccagaaauccacacagaaugccaucaacgggauuacgaauaaggugaacagcgucaucgagaaaaugaauacccaguuuacagcugugggaaaggaguucaacaagcuggaaaaacggauggagaaccucaauaagaaaguugaugacggcuuucuggacauuuggaccuacaacgccgaacuucuggugcuccuggagaaugaaagaacacuugauuuccaugacucuaacgucaagaaucuguacgagaaagugaagaaccaacuccgcaauaacgccaaggagaucgggaauggaugcuucgaauuuuaucacaaaugugauaacgagugcauggaauccguuaagaauggcaccuacgacuaucccaaauacagcgaggagucuaagcugaaccgggagaaaauugauggggugaagcuggaguccaugggcgucuaucagauccucgcuaucuacagcacgguggccuccucucugguccuucuggugagccucggagcgauuuccuucuggaugugcucuaauggcagccugcaguguagaaucugcauuuga

SEQ ID NO: 193749 - RNA, 1698 nt, Artificial Sequence; identical to SEQ ID NO: 192814
  derived and/or modified CDS sequence (opt5) from hemagglutinin__InfluenzaA__ABR15885

SEQ ID NO: 193750 - RNA, 1698 nt, Artificial Sequence
  derived and/or modified CDS sequence (opt5) from hemagglutinin__InfluenzaA__ABR15896
augaaggccaaacugcucgugcugcuuugcaccuucacagcuacguacgccgacaccaucuguauuggcuaucacgcgaacaauagcacagauaccgucgacacaguucuggagaagaacgugaccgugacacauuccgucaaucuccuggaagauucucacaacgggaaacuuugccugcucaagggaaucgcuccccugcagcugggcaauuguagcguggccggguggauucucggaaacccugagugcgaacugcuuaucuccaaagagucuuggagcuacauuguugaagccccgaaucccgagaacggcaccuguuauccuggguacuuugcugacuaugaggaacugagagagcaacucuccucugugagcuccuucgaacgguuugagaucuuccccaaggagagcucuuggccuaaucauacggucaccggaguguccgccagcugcucucacaacggcaaguccagcuuuuaccgcaaucugcuuuggcugacaggcaaaaacgggcucuaucccaaucugucuauguccuacguuaacaauaaggaaaaagaggugcugguccucuggggagugcaucacccuccgaacaucggcgaucagagagcucuguaccacaccgaaaacgccuaugugagcgucguuuccucucauuacagccggcgcuucacacccgagauugcgaagagaccuaaagugcgggaccaggaagggcgcaucaauuauuacuggacccuucuggagcccggagauacgauuaucuuugaggccaacggcaaucucauugcuccuugguaugccuucgcucuguccagaggguuuggaagcggcaucauuacaucuaacgcccccauggacgaaugugaugcgaagugccagaccccgcaaggcgccaucaauuccagccuuccuuuccagaacgugcaccccgucacaaucggggaguguccuaaguacgugcggucugcuaaacugcgcaugguuaccggacucagaaauauucccagcauccagucccggggccuguuuggggccauugcuggauucaucgaaggcggguggaccggaaugguggacggcugguauggcuaccaucaccagaacgagcaagggucuggauacgccgccgaucaaaagagcacacagaaugcuauuaacggcaucacgaauaaagucaacuccgugaucgaaaagaugaauacccaguuuacagcgguugggaaagaguucaacaagcuggagcgcagaauggaaaaucucaacaaaaagguggacgauggauuccuggacauuuggaccuauaacgccgagcuucugguccuccuggaaaaugagcggacacuugacuuucacgauagcaacgugaagaaucuguacgaaaaagucaagucucagcucaaaaacaaugcuaaggagaucggcaacgggugcuucgaguuuuaucauaaauguaauaacgaaugcauggaguccgugaagaauggcaccuacgacuaucccaaguacagcgaagagucuaaacugaaccgcgagaagauugauggaguuaaacuggaauccaugggcguguaucagauccucgccauuuacagcacggucgccuccucucuggugcuucugguuagccucggggcuaucuccuucuggaugugcucuaauggaagccugcaguguagaaucugcauuuga

SEQ ID NO: 193751 - RNA, 1698 nt, Artificial Sequence; identical to SEQ ID NO: 192813
  derived and/or modified CDS sequence (opt5) from hemagglutinin__InfluenzaA__ABR15907

SEQ ID NO: 193752 - RNA, 1698 nt, Artificial Sequence; identical to SEQ ID NO: 192814
  derived and/or modified CDS sequence (opt5) from hemagglutinin__InfluenzaA__ABR15918

SEQ ID NO: 193753 - RNA, 1701 nt, Artificial Sequence
  derived and/or modified CDS sequence (opt5) from hemagglutinin__InfluenzaA__ABR15929
augaagaccaucauugcccugagcuacauccucugccugguguucgcucagaaacuucccggcaacgacaauuccacagccacgcugugucucgggcaccaugcggucccuaacggaacccugguuaagacaauuaccaaugaucaaaucgaggugacaaacgcuaccgaacuugugcagucuagcuccacaggcagaauuugcgacucuccgcaccagauccuggauggggagaauuguacccucaucgacgcccugcugggagauccccauugcgacggcuuucagaacaaagaaugggaucucuucgucgagcggagcaaggccuauuccaauuguuacccuuaugacgugcccgauuacguuucucugcgcagccuuguggcuuccagcgggacgcuggaauuuaacaaugagucuuucaacuggaccggagucgcccaaaauggcacauccagcgcuugcaaaagacggucugacaaguccuuuuucagccgccucaacuggcugcaccagcuuaaguauaaauacccugcccugaaugugaccaugcccaacaaugagaaguuugauaaacucuauauuuggggcguucaucacccugggacagacucugaucagaucucccuguacgcgcaggccagcggaagagugaccgucuccacgaagcggucucaacagacagugauuccgaacaucggcagccgccccugggugagagggauuuccagccggaucucuauuuacuggaccaucgucaaaccuggagacauccugcucauuaacuccacaggcaaucugaucgcuccccgcggguauuucaagauuagaagcggaaagucuagcaucaugcgguccgacgccccuauuggcaaauguaacucugaaugcaucacccccaauggcagcaucccgaacgauaagccuuuucagaauguuaaccgcauuaccuacgggcccuguccuagauaugugaaacagaauacacuuaagcuggcuacgggaaugcggaacgugcccgagaaacaaacccgcggcaucuucggggccauugcgggauuuaucgaaaauggcugggaggggaugauggacggaugguacggcuucagacaccagaacuccgagggcacagggcaggccgcugaucucaagagcacccaagccgcuauuaaucagaucaacggaaaacugaaucggcuuaucgaaaagacaaacgagaaguuucaucagauugaaaaagaguucucugaagucgagggcagaauccaggaccuggagaaguauguggaagauaccaaaauugaccucugguccuacaaugccgagcugcugguugcccucgaaaaccaacacacgaucgaucugacagacagcgagaugaacaaacuuuucgaacgcaccaagaagcagcugcgggagaaugcugaggauauggggaacggaugcuuuaagauuuaucauaaauguaauaacgcgugcaucggcucuauuagaaaugggaccuacgaccacgauguguaccgcgacgaagcccucaacaaucgguuccagaucaagggcgucgagcugaaauccggauauaaggacuggauccuuuggauuagcuuugcuaucuccugcuuccugcucuguauugugcugcugggcuuuaucaugugggccugccagaaagggaacauuagauguaauaucugcaucuga

SEQ ID NO: 193754 - RNA, 1701 nt, Artificial Sequence
  derived and/or modified CDS sequence (opt5) from hemagglutinin__InfluenzaA__ABR15940
augaagaccaucauugcccugagcuacauccucugccugguguucgcucagaaacuucccggcaacgacaauuccacagccacgcugugucucgggcaccaugcggucccuaacggaacccugguuaagacaauuaccaaugaucaaaucgaggugacaaacgcuaccgaacuugugcagucuagcuccacaggcagaauuugcgacucuccgcaccagauccuggauggggagaauuguacccucaucgacgcccugcugggagauccccauugcgacggcuuucagaacaaagaaugggaucucuucgucgagcggagcaaggccuauuccaauuguuacccuuaugacgugcccgauuacguuucucugcgcagccuuguggcuuccagcgggacgcuggaauuuaacaaugagucuuucaacuggaccggagucgcccaaaauggcacauccagcgcuugcaaaagacggucugacaaguccuuuuucagccgccucaacuggcugcaccagcuuaaguauaaauacccugcccugaaugugaccaugcccaacaaugagaaguuugauaaacucuauauuuggggcguucaucacccugggacagacucugaucagaucucccuguacgcgcaggccagcggaagagugaccgucuccacgaagcggucucaacagacagugauuccgaacaucggcagccgccccugggugagaggggucuccagccggauuucuaucuacuggaccauuguuaaaccuggagacauccugcucaucaacuccacaggcaaucugauugcuccccgcggguauuucaagaucagaagcggaaagucuagcauuaugcgguccgacgccccuaucggcaaauguaacucugaaugcauuacccccaauggcagcaucuccaacgauaagccguuucagaaugugaaccgcaucaccuacggggcuuguccuagauaugugaaacagaauacacuuaagcuggccacgggaaugcggaacguccccgagaaacaaacccgcggcauuuucggggcgaucgccggauuuauugaaaauggcugggaggggaugauggacggaugguacggcuucagacaccagaacagcgagggcacagggcaggcugccgaucucaagucuacccaagcugccaucaaucagauuaacggaaaacugaaucggcuuaucgaaaagacaaacgagaaguuucaucagaucgaaaaagaguucuccgaaguggagggccgcauucaggaccuggagaaguauguugaagauaccaaaaucgaccucuggagcuacaaugccgagcugcugguggcucucgaaaaccaacacacgauugaucugacagacucugagaugaacaaacuuuucgaaagaaccaagaagcagcugcgggagaaugcggaggauauggggaacggaugcuuuaagaucuaucauaaaugugacaaugccugcauuggcuccaucagaaacgggaccuacgaucacgacgucuaccgcgacgaagcucucaauaaccgguuccagauuaagggcguggagcugaaaagcggauauaaggauuggguucuuuggaucuccuuugccaucucuugcuuccugcucuguauugugcugcugggcuuuaucaugugggccugccagaaagggaauauuagauguaacaucugcauuuga

SEQ ID NO: 193755 - RNA, 1701 nt, Artificial Sequence; identical to SEQ ID NO: 192634
  derived and/or modified CDS sequence (opt5) from hemagglutinin__InfluenzaA__ABR15951

SEQ ID NO: 193756 - RNA, 1701 nt, Artificial Sequence
  derived and/or modified CDS sequence (opt5) from hemagglutinin__InfluenzaA__ABR15962
augaagaccaucauugcccugagcuacauccucugccugguguucgcucagaaacuucccggcaacgacaauuccacagccacgcugugucucgggcaccaugcggucccuaacggaacccugguuaagacaauuaccaaugaucaaaucgaggugacaaacgcuaccgaacuugugcagucuagcuccacaggcagaauuugcgacucuccgcaccagauccuggauggggagaauuguacccucaucgacgcccugcugggagauccccauugcgacggcuuucagaacaaagaaugggaucucuucgucgagcggagccgcgccuauuccaauuguuacccuuaugacgugcccgauuacguuucucugagaagccuuguggcuuccagcgggacgcuggaauuuaacaaugagucuuucaacuggaccggagucgcccaaaauggcacauccagcgcuugcaagcggcgcucugacaaauccuuuuucagcagacucaacuggcugcaccagcuuaaguauaaguacccugcccugaaugugaccaugcccaacaaugagaaauuugauaagcucuauauuuggggcguucaucacccugggacagacucugaucagaucucccuguacgcgcaggccagcggacgggugaccgucuccacgaaacgcucucaacagacagugauuccgaacaucggcagcagacccugggugcgcggggucuccagcauuaucucuauuuacuggaccaucguuaagccuggagacauccugcucauuaacuccacaggcaaucugaucgcuccccggggguauuucaaaauuagaagcggaaagucuagcaucaugcgguccgacgccccuauuggcaaguguaacucugaaugcaucacccccaauggcagcaucccgaacgauaaaccuuuucagaaugugaaccgcauuaccuacgggcccuguccuagauaugugaagcagaauacacuuaaacuggcuacgggaaugcggaacguccccgagaagcaaacccgcggcaucuucggggccauugcgggauuuaucgaaaauggcugggaggggaugauggacggaugguacggcuucagacaccagaacuccgagggcacagggcaggccgcugaucucaaaagcacccaagccgcuauuaaucagaucaacggaaagcugaaucggcuuaucgagaaaacaaacgaaaaguuucaucagauugaaaaggaguucucugaaguggagggcagaauccaggaccuggagaaauauguugaagauaccaagauugaccucugguccuacaaugccgagcugcugguggcccucgaaaaccaacacacgaucgaucugacagacagcgagaugaacaaacuuuucgaacgcaccaagaaacagcugcgggagaaugcugaggauauggggaacggaugcuuuaagauuuaucauaagugugacaaugcgugcaucggcucuauuagaaacgggaccuacgaucacgacgucuaccgcgacgaagcccucaauaaccgguuccagaucaaaggcguggagcugaaguccggauauaaagauuggauccuuuggauuagcuuugcuaucuccugcuuccugcucuguauuguucugcugggcuuuaucaugugggccugccagaaggggaauauuagauguaacaucugcaucuga

SEQ ID NO: 193757 - RNA, 1701 nt, Artificial Sequence
  derived and/or modified CDS sequence (opt5) from hemagglutinin__InfluenzaA__ABR22241
augaagaccaucauugcccugagcuacauccucugccuggcuuucgcccagaaacuucccggcaacgacaauuccacagcgacgcugugucucgggcaccaugcugugccuaacggaacccuggucaagacaauuaccaaugaucaaaucgagguuacaaacgccaccgaacuugugcagucuagcuccacaggcagaauuugcgacucuccgcaccagauccuggauggggagaauuguacccucaucgacgcccugcugggagauccccauugcgacggcuuucagaacaaagaaugggaucucuucguggagcggagcaaggcuuauuccaauuguuacccuuaugacguccccgauuacgccucucugcgcagccuuguggcuuccagcgggacgcuggaauuuaacaaugagucuuucaacuggaccggaguugcccaaaauggcacauccagcgcgugcaaaagacggucuauuaaguccuuuuucagccgccucaacuggcugcaccagcuugaguauagauacccugcccugaaugugaccaugcccaacaaugacaaguuugauaaacucuauaucuggggcguccaucacccuucuacagacuccgaucagauuagcguguacgcucaggccuccgggcggguuaccgugucuacgaagcgcagccaacagacagucaucccgaacauuggauccagacccugggugcggggcaucagcucucgcauuuccaucuacuggaccaucgugaaaccuggggacauucugcugaucaacagcacaggaaaucucauugcucccagaggcuauuucaagauccggucugggaaaagcuccauuaugcgcucugacgccccuaucggaaaguguaacagcgaaugcaucacccccaauggcuccauuccgaacgauaagccuuuucagaaugucaacagaaucaccuacggcgcguguccccgguauguuaaacagaauacacugaaacuugccacggggaugcgcaacgugccugagaaacaaaccagaggaauuuucggcgcuaucgccggguuuauugaaaauggaugggagggcaugauggacgggugguacggauuccggcaccagaacagcgagggcacaggccaggcugccgaucugaagucuacccaagccgcuaucaaucagaucaacgggaaacucaauaagcugauugaaaagacaaacgagaaguuucaucagaucgaaaaggaguucuccgaaguggagggacgcauucaggaccuugagaaauaugucgaagauaccaagaucgaccuguggagcuacaaugcggagcuccugguggcccuggaaaaccaaaacacgauugaucucacagacucugagaugaauaaacuguucgaaagaacccggaagcagcuuagagagaacgcugaggauaugggcaaugggugcuuuaaaaucuaucacaagugugacaacgccugcauuggauccauccgcaauggcaccuacgaucaugacguuuaccgggacgaagcccugaacaauagauuccagaucaaggggguggagcucaaaagcggcuauaaggauuggauucuguggaucuccuuugcuauuucuugcuuccuucugugugucgugcuccugggauuuaucaugugggccugccagaaaggcaacauucgcuguaauaucugcaucuga

SEQ ID NO: 193758 - RNA, 1701 nt, Artificial Sequence; identical to SEQ ID NO: 192722
  derived and/or modified CDS sequence (opt5) from hemagglutinin__InfluenzaA__ABR28515

SEQ ID NO: 193759 - RNA, 1701 nt, Artificial Sequence
  derived and/or modified CDS sequence (opt5) from hemagglutinin__InfluenzaA__ABR28592
augaagaccaucauugcccugagcuacguguucugccucgucuuugcucaggaccugcccggcaacgauaauuccacagccacgcuuugucuggggcaccaugcgguuccuaacggaacccucgugaaaacaaucaccaaugaccaaauugaggugacaaacgcuaccgaacugguccagucuagcuccacaggcaagaucugcgauaauccgcaccggauucuugacgggaucaacuguacccugaucgaugcccuccugggagacccccauugcgauggcuuccagaaugagaaaugggaccuguuuguggaaagaucuaaggccuucagcaacuguuauccuuacgauguucccgacuaugcuucccuccgcucucugguggccagcuccgggacgcuugaguuuauuaaugaaggauucaacuggaccggcgucacacagaauggcgggagcucugcuugcaaaagaggaccugauaacggcuuuuucucccggcugaauuggcucuacaagagcgggucuaccuaucccgugcaaaacguuacaaugccuaauaacgacaacuccgauaagcuguacaucuggggagugcaccauccgagcaccgacaaagagcagacggaccuuuauguccaggccucuggcaaggugacaguguccaccaaacgcagccagcaaacagucauucccaauguuggguccagaccuugggugcggggacugucuagccgcguguccaucuacuggaccauugucaagcccggcgauauccucgugauuaacagcaauggcaaccugaucgcgccuagaggguacuuuaaaaugcggaccggaaagucuuccaucaugcgcagcgacgcccccauuggcacauguucuagcgagugcaucacgccgaauggguccauuccuaacgauaagcccuuccagaauguuaacaaaaucaccuauggagcuuguccuaaguacgugaaacagaauacacugaagcucgccaccggcaugagaaacguccccgaaaaacagacacgggggauuuuuggagcuaucgccggcuucaucgagaauggcugggaagggaugauugacggaugguauggcuuucgccaccaaaacucugaggggaccggacaggcggccgaucuuaagagcacgcaggcugccaucgaccaaauuaauggcaaacugaacagagugaucgagaagacaaaugaaaaguuccaccagauugagaaagaguucuccgaaguugaagggcggauccaggaucuggagaaguacguggaggacaccaaaaucgaucucuggagcuauaacgcugaacugcuugucgcccuggagaaccagcauaccauugaccucacagauucugaaaugaauaagcuguuugagaaaacccgcagacaacugcgggaaaacgccgaggacaugggcaauggaugcuucaagaucuaccacaagugugacaacgcuugcauuggcuccaucagaaaugggacauaugaucaugacguguaccgcgaugaggcgcucaacaaucgguuucagauuaaaggagucgaacuuaagagcggcuacaaagacuggauccuguggauuucuuucgccaucuccugcuuucugcucugugugguucugcuuggguucaucaugugggcuugccagaagggaaacauuagauguaauaucugcauuuga

SEQ ID NO: 193760 - RNA, 1698 nt, Artificial Sequence; identical to SEQ ID NO: 192814
  derived and/or modified CDS sequence (opt5) from hemagglutinin__InfluenzaA__ABR28768

SEQ ID NO: 193761 - RNA, 1698 nt, Artificial Sequence; identical to SEQ ID NO: 192814
  derived and/or modified CDS sequence (opt5) from hemagglutinin__InfluenzaA__ABR28779

SEQ ID NO: 193762 - RNA, 1701 nt, Artificial Sequence; identical to SEQ ID NO: 193505
  derived and/or modified CDS sequence (opt5) from hemagglutinin__InfluenzaA__ABR28790

SEQ ID NO: 193763 - RNA, 1698 nt, Artificial Sequence; identical to SEQ ID NO: 192814
  derived and/or modified CDS sequence (opt5) from hemagglutinin__InfluenzaA__ABR28801

SEQ ID NO: 193764 - RNA, 1701 nt, Artificial Sequence; identical to SEQ ID NO: 192722
  derived and/or modified CDS sequence (opt5) from hemagglutinin__InfluenzaA__ABR28812

SEQ ID NO: 193765 - RNA, 1701 nt, Artificial Sequence
  derived and/or modified CDS sequence (opt5) from hemagglutinin__InfluenzaA__ABR28823
augaagaccaucauugcccugagcuacauccucugccugguguucgcucagaaacuucccggcaacgacaauuccacagccacgcugugucucgggcaccaugcggucccuaacggaacccugguuaagacaauuaccaaugaucaaaucgaggugacaaacgcuaccgaacuugugcagucuagcuccacaggcagaauuugcgacucuccgcaccagauccuggauggggagaauuguacccucaucgacgcccugcugggagauccccauugcgacggcuuucagaacaaagaaugggaucucuucgucgagcggagcaaggccuauuccaauuguuacccuuaugacgugcccgauuacguuucucugcgcagccuuguggcuuccagcgggacgcuggaauuuaacaaugagucuuucaacuggaccggagucgcccaaaauggcacauccagcgcuugcaaaagacggucugacaaguccuuuuucagccgccucaacuggcugcaccagcuuaaguauaaauacccugcccugaaugugaccaugcccaacaaugagaaguuugauaaacucuauauuuggggcguucaucacccugggacagacucugaucagaucucccuguacgcgcaggccagcggaagagugaccgucuccacgaagcggucucaacagacagugauuccgaacaucggcagccgccccugggugagagggauuuccagccggaucucuauuuacuggaccaucgucaaaccuggagacauccugcucauuaacuccacaggcaaucugaucgcuccccgcggguauuucaagauuagaagcggaaagucuagcaucaugcgguccgacgccccuauuggcaaauguaacucugaaugcaucacccccaauggcagcaucccgaacgauaagccuuuucagaauguuaaccgcauuaccuacgggcccuguccuagauaugugaaacagaauacacuuaagcuggcuacgggaaugcggaacgugcccgagaaacaaacccgcggcaucuucggggccauugcgggauuuaucgaaaauggcugggaggggaugauggacggaugguacggcuucagacaccagaacuccgagggcacagggcaggccgcugaucucaagagcacccaagccgcuauuaaucagaucaacggaaaacugaaucggcuuaucgaaaagacaaacgagaaguuucaucagauugaaaaagaguucucugaagucgagggcagaauccaggaccuggagaaguauguggaagauaccaaaauugaccucugguccuacaaugccgagcugcugguugcccucgaaaaccaacacacgaucgaucugacagacagcgagaugaacaaacuuuucgaacgcaccaagaagcagcugcgggagaaugcugaggauauggggaacggaugcuuuaagauuuaucauaaaugugacaaugcgugcaucggcucuauuagaaacgggaccuacgaucacgacguguaccgcgacgaagcccucaauaaccgguuccagaucaagggcgucgagcugaaauccggauauaaggauuggauccuuuggauuagcuuugcuaucuccugcuuccugcucuguauugugcugcugggcuuuaucaugugggccugccagaaagggaauauuagauguaacaucugcaucuga

SEQ ID NO: 193766 - RNA, 1698 nt, Artificial Sequence; identical to SEQ ID NO: 192942
  derived and/or modified CDS sequence (opt5) from hemagglutinin__InfluenzaA__ABR28834

SEQ ID NO: 193767 - RNA, 1698 nt, Artificial Sequence; identical to SEQ ID NO: 192913
  derived and/or modified CDS sequence (opt5) from hemagglutinin__InfluenzaA__ABR28845

SEQ ID NO: 193768 - RNA, 1701 nt, Artificial Sequence
  derived and/or modified CDS sequence (opt5) from hemagglutinin__InfluenzaA__ABR28856
augaagaccaucauugcccugagcuacauccucugccugguguucgcucagaaacuucccggcaacgacaauuccacagccacgcugugucucgggcaccaugcggucccuaacggaacccugguuaagacaauuaccaaugaucaaaucgaggugacaaacgcuaccgaacuugugcagucuagcuccacaggcagaauuugcgacucuccgcaccagauccuggauggggagaauuguacccucaucgacgcccugcugggagauccccauugcgacggcuuucagaacaaagaaugggaucucuucgucgagcggagcaaggccuauuccaauuguuacccuuaugacgugcccgauuacguuucucugcgcagccuuguggcuuccagcgggacgcuggaauuuaacaaugagucuuucaacuggaccggagucgcccaaaauggcacauccagcgcuugcaaaagacggucugacaaguccuuuuucagccgccucaacuggcugcaccagcuuaaguauaaauacccugcccugaaugugauuaugcccaacaaugagaaguuugauaaacucuauaucuggggcguucaucacccugggaccgacucugaucagauuucccuguacgcgcaggccagcggaagagugacagucuccaccaagcggucucaacagacggugaucccgaacauuggcagccgccccugggugagaggggucuccagccggaucucuauuuacuggacaaucguuaaaccuggagacauccugcucauuaacuccaccggcaaucugaucgcuccccgcggguauuucaagauuagaagcggaaagucuagcaucaugcgguccgacgccccuauuggcaaauguaacucugaaugcaucacacccaauggcagcaucccgaacgauaagccuuuucagaaugugaaccgcauuaccuacggggcuugucccagauaugugaaacagaagacccuuaaacuggccacaggaaugcggaaugucccugagaagcaaacgcgcggcaucuucggggcgauugccggauuuaucgaaaacggcugggaggggaugauggacggaugguacggcuucagacaccaaaauuccgagggcaccgggcaggcugccgaucucaaaagcacacaggcugccauuaaccagaucaauggaaagcugaaccggcuuaucgaaaagaccaaugagaaauuucaucagauugaaaaggaguucucugaaguggagggcagaauccaggaccuggagaaauauguugaagauacaaagauugaccucugguccuacaacgccgagcugcugguggcucucgaaaaucaacacaccaucgaucugacggacagcgagaugaacaaacuuuucgaacgcacaaagaagcagcugcgggagaacgcggaggauauggggaauggaugcuuuaaaauuuaucauaagugugacaacgccugcaucggcucuauuagaaaugggaccuacgaucacgacgucuaccgcgacgaagcucucaacaaucgguuccagaucaaaggcguggagcugaaguccggauauaaagauuggauccuuuggauuagcuuugccaucuccugcuuccugcucuguauuguucugcugggcuuuaucaugugggccugccagaaggggaacauuagauguaauaucugcaucuga

SEQ ID NO: 193769 - RNA, 1701 nt, Artificial Sequence; identical to SEQ ID NO: 192679
  derived and/or modified CDS sequence (opt5) from hemagglutinin__InfluenzaA__ABR28867

SEQ ID NO: 193770 - RNA, 1701 nt, Artificial Sequence; identical to SEQ ID NO: 192634
  derived and/or modified CDS sequence (opt5) from hemagglutinin__InfluenzaA__ABR28878

SEQ ID NO: 193771 - RNA, 1698 nt, Artificial Sequence; identical to SEQ ID NO: 193276
  derived and/or modified CDS sequence (opt5) from hemagglutinin__InfluenzaA__ABR28900

SEQ ID NO: 193772 - RNA, 1701 nt, Artificial Sequence
  derived and/or modified CDS sequence (opt5) from hemagglutinin__InfluenzaA__ABR28922
augaagaccaucauugcccugagcuacauccucugccugguguucgcucagaaacuucccggcaacgacaauuccacagccacgcugugucucgggcaccaugcggucccuaacggaaccauuguuaagacaaucaccaaugaucaaauugaggugacaaacgcuaccgaacuggugcagucuagcuccacaggcgggaucugcgacucuccgcaccagauccuugauggagagaauuguacccugauugacgcccuccugggcgauccccagugcgacggguuucaaaacaaaaagugggaucuguucgucgaaagaagcaaagccuauuccaauuguuacccuuaugacgugcccgauuacgcuucucuccggagccugguugccuccagcggaacgcuugaguuuaacaaugaaucuuucaacuggaccggcgugacacagaauggcaccuccagcgcuugcaagcgcagaucuaacaauuccuuuuucagccggcugaacuggcucacacaucugaaguuuaaauauccugcccuuaaugucaccaugcccaacaacgagaaguucgacaaacuguacaucuggggagugcaccauccugggacggauaaugaccagauuucucucuaugcgcaggccuccggccgcaucacaguuagcaccaagagaucccaacagacagugauuccgaacaucgggucucggccccgcgucagagauauuccuagccggguguccaucuacuggaccaucgugaaacccggagacauucugcugaucaauagcaccggcaaccucauugcuccucgcggguacuuuaagaucagaucuggaaaguccagcauuaugcggucugacgcccccaucggcaaauguaauagcgagugcaucacaccgaacggcuccauuccuaaugauaagcccuuccagaacgucaaucgcaucacguauggggcuuguccuagauacguuaaacagaacacccugaagcuggccacaggaaugcggaaugugcccgaaaaacaaacccgcggcauuuuuggggcgaucgccggauucauugagaacggcugggaagggaugguggacggaugguauggcuuuagacaccaaaauucugagggcaucgggcaggcugccgaucuuaagagcacacaggcugccaucaaccagauuaauggaaaacucaaccggcugaucggcaagaccaacgagaaguuccaccagauugaaaaagaguucuccgaagucgaggggagaauccaggaccuugaaaaguacguggaggauacgaaaauugaccuguggagcuauaaugccgagcuccugguugcucuggaaaaccaacauacaaucgaucucaccgacucugagaugaauaagcuguuugaacgcaccaaaaagcagcuucgggagaacgcggaagauaugggaaauggcugcuucaagauuuaccacaaaugugacaacgccugcaucggguccaucagaaauggcacauaugaucaugacguguaccgcgacgaggcucugaacaaucgguuucagauuaagggagucgagcucaaaagcggcuacaaggauuggauccuguggauuucuuucgccaucuccugcuuucuucuguguguggcccuccugggguucauuaugugggcuugccagaaaggaaacaucagauguaauaucugcauuuga

SEQ ID NO: 193773 - RNA, 1701 nt, Artificial Sequence; identical to SEQ ID NO: 193653
  derived and/or modified CDS sequence (opt5) from hemagglutinin__InfluenzaA__ABR88080

SEQ ID NO: 193774 - RNA, 1701 nt, Artificial Sequence
  derived and/or modified CDS sequence (opt5) from hemagglutinin__InfluenzaA__ABS00315
augaaggccaaacugcucgugcugcuuugcgcuuucaccgccacagacgcggauacgaucuguauuggcuaccacgcuaacaauagcaccgacacagucgauaccguucuggagaagaacgugacagugacccauuccgucaaucuccuggaagacucucacaacgggaaacuuugcagacugaagggaaucgccccgcuccagcugggcaauuguagcguggccggguggauucugggaaacccugagugcgaaucccucuuuucuaaaaagagcugguccuauaucgcugagacacccaauucugaaaacggcaccuguuaccccggguauuucgccgauuacgaggagcugcgggaacaacuuagcuccguuagcucuuuugagcgcuucgaaauuuuuccuaaggaguccagcuggcccaaucauacggugaccaaaggagucucugcuuccugcagccacaagggcagaucuuccuucuaucggaaccugcucuggcugacagagaaaaauggcagcuacccuaaccuuuccaagucuuaugugaauaacaaagaacgcgagguucuggugcucuggggaguccaucaccccagcaauaucggggaacagagagccaucuaccacaccgagaacgcguacguguccguggucagcucucauuauaaccggcgcuuuacaccugaaauugccaagagaccgaagguucggggccaggaggggcgcaucaauuacuauuggacccugcuggagcccggagacacgauuaucuucgaagcuaacggcaaucucauugccccuugguacgcuuuugcccuguccagaggguucggaagcggcaucauuacaucuaacgcgagcauggaugagugugacgccaaaugccagacaccccaaggcgcuaucaauuccucucuuccuuuucagaacgugcaccccgugaccaucggggaauguccgaaguauguccggagcaccaaacugcgcauggugaccggacucagaaauauuccuuccauccagagccggggccuguucggggccauugcuggauuuaucgagggcggguggacaggaaugauugauggcugguacggcuaucaucaccagaacgaacaagggucuggauacgccgccgaccagaaguccacgcagaaugcuaucaacggcaucaccaauaaaguuaacagcgugauugagaagaugaauacacaguucaccgcggucgggaaagaguucaacaaacuugaacgcagaauggagaaucugaacaagaagguggaugacggauuucucgauaucuggacauacaacgccgaacugcugguucuccuggagaaugaacggacccuugacuuccacgacucuaacgugaagaaucuguaugagaaagucaagucccaacucaaaaacaaugcuaaggagauuggcaacgggugcuuugaguucuaccauaaguguaauaacgaaugcauggaaagcgugaaaaauggcacguaugauuaccccaaguauuccgaggagucuaaacugaacagagaaaagaucgacggagucaaacuugagagcaugggcguguaccagauucuggccaucuauuccacaguugccucuagccucgugcugcuggucucccucggggcuaucagcuuuuggaugugcucuaauggaucccugcagugucgcauuugcaucuga

SEQ ID NO: 193775 - RNA, 1701 nt, Artificial Sequence
  derived and/or modified CDS sequence (opt5) from hemagglutinin__InfluenzaA__ABS00326
augaaggccaagcugcucgugcugcuuugcgcuuucaccgccacagacgcggauacgaucuguauuggcuaccacgcuaacaauagcaccgacacagucgauaccguucuggagaagaacgugacagugacccauuccgucaaucuccuggaagacucucacaacgggaaacuuugcagacugaagggaaucgccccgcuccagcugggcaauuguagcguggccggguggauucugggaaacccugagugcgaaucccucuuuucuaaaaagagcugguccuauaucgcugagacacccaauucugaaaacggcaccuguuaccccggguauuucgccgauuacgaggagcugcgggaacaacuuagcuccguuagcucuuuugagcgcuucgaaauuuuuccuaaggaguccagcuggcccaaucauacggugaccaaaggagucucugcuuccugcagccacaagggcagaucuuccuucuaucggaaccugcucuggcugacagagaaaaauggcagcuacccuaaccuuuccaagucuuaugugaauaacaaagaaaaggagguucuggugcucuggggaguccaucaccccagcaauaucggggaacagcgcgccaucuaccacaccgagaacgcguacguguccguggucagcucucauuauaacagacgguuuacaccugaaauugccaagcgcccgaaaguuagaggccaggaggggcggaucaauuacuauuggacccugcuggagcccggagacacgauuaucuucgaagcuaacggcaaucucauugccccuugguacgcuuuugcccugucccgcggguucggaagcggcaucauuacaucuaacgcgagcauggaugagugugacgccaagugccagacaccccaaggcgcuaucaauuccucucuuccuuuucagaacgugcaccccgugaccaucggggaauguccgaaauaugucagaagcaccaagcugcggauggugaccggacuccgcaauauuccuuccauccagagcagaggccuguucggggccauugcuggauuuaucgagggcggguggacaggaaugauugauggcugguacggcuaucaucaccagaacgaacaagggucuggauacgccgccgaccagaaauccacgcagaaugcuaucaacggcaucaccaauaagguuaacagcgugauugagaaaaugaauacacaguucaccgcggucgggaaggaguucaacaaacuugaacggcgcauggagaaucugaacaaaaagguggaugacggauuucucgauaucuggacauacaacgccgaacugcugguucuccuggagaaugaaagaacccuugacuuccacgacucuaacgugaaaaaucuguaugagaaggucaaaucccaacucaagaacaaugcuaaggagauuggcaacgggugcuuugaguucuaccauaaauguaauaacgaaugcauggaaagcgugaagaauggcacguaugauuaccccaaauauuccgaggagucuaagcugaaccgggaaaagaucgacggagucaaacuugagagcaugggcguguaccagauucuggccaucuauuccacaguugccucuagccucgugcugcuggucucccucggggcuaucagcuuuuggaugugcucuaauggaucccugcaguguagaauuugcaucuga

SEQ ID NO: 193776 - RNA, 1701 nt, Artificial Sequence; identical to SEQ ID NO: 193712
  derived and/or modified CDS sequence (opt5) from hemagglutinin__InfluenzaA__ABS49899

SEQ ID NO: 193777 - RNA, 1701 nt, Artificial Sequence
  derived and/or modified CDS sequence (opt5) from hemagglutinin__InfluenzaA__ABS49910
augaagaccaucauugcccugagcuacaucuucugccucgcucugggccaggaccuucccgggaacgauaauuccacagccacgcugugucucggacaccaugcggugccuaacggcacccuggucaaaacaauuaccaaugaccaaaucgagguuacaaacgcuaccgaacuugugcagucuagcuccacagggaagauuugcaauaacccgcacagaauccuggauggaaucaauuguacccucauugacgcccugcugggcgauccccauugcgacguguuucaggaugagacgugggaccucuucgucgaacggucuaaagccuuuagcaacuguuauccuuacgaugugcccgacuaugcuucccugcgcucucuuguugccagcuccgggacccuggaguucaucacagaaggauuuaccuggacaggcgugacccagaauggcgggagcaacgcuugcaagagaggaccuggcucuggguucuuuucccggcucaauuggcugacgaaaagcggaucuacauaccccguccuuaacgugaccaugccuaauaacgauaauuucgacaagcuguauauuuggggcguucaccauccguccacaaaccaagagcagaccagccucuacgugcaggccucugggcgcgucaccguguccacaagacggagccagcaaacgaucauucccaacaucggaucccgcccuugggugagaggccugucuagccggauuuccaucuauuggaccaucgucaagcccggcgauguucuggugauuaauagcaacgggaaucucaucgcgccucgcggauacuuuaaaaugagaacaggcaagucuuccauuaugcggagcgacgcccccaucgacaccuguauuucugagugcaucacaccgaacgggagcaucccuaaugauaaacccuuccagaacgugaauaagauuaccuacggagcuuguccuaaauaugucaagcagaacacgcugaaacuugccacaggcaugcgcaaugugcccgaaaagcagaccagagggcuguuuggagcuaucgccggcuucauugagaacggcugggaagggaugaucgacggaugguacggcuuucggcaccaaaauuccgaggggaccggacaggcggccgaucucaagucuacacaggcugccauugaccaaaucaacggcaaacugaaucgcguuaucgagaagaccaacgaaaaauuccaccagauugagaaggaguucagcgaaguggaagggagaauccaggaucuugagaaauaugucgaggacacaaagauugaucugugguccuacaaugcugaacuccugguggcccuggagaaccagcauacgaucgaccucaccgauagcgaaaugaacaagcuguuugagaaaacacggagacaaaugcgcgaaaaugccgaggacaugggcaacggaugcuucaagauuuaucacaaaugugauaaugcuugcaucgagucuauucggaacggcaccuacgaccaugacguuuauagagaugaagcgcuuaauaaccgcuuucagaucaaggggguggagcugaaauccggauacaaggacuggauccucuggauuagcuucgccaucucuugcuuucugcuuugugucgugcugcucggcuucauuaugugggcuugccagcgggggaauaucagauguaacauuugcaucuga

SEQ ID NO: 193778 - RNA, 1701 nt, Artificial Sequence; identical to SEQ ID NO: 192722
  derived and/or modified CDS sequence (opt5) from hemagglutinin__InfluenzaA__ABS49965

SEQ ID NO: 193779 - RNA, 1698 nt, Artificial Sequence
  derived and/or modified CDS sequence (opt5) from hemagglutinin__InfluenzaA__ABS49976
augaaggugaaacugcucguccugcuuugcaccuucacagccacguacgcugacaccaucuguauuggcuaucacgccaacaauagcacagauaccguugacacagugcuggagaagaacgugaccgucacacauuccgugaaucuccuggaagauucucacaacgggaaacuuugccugcucaagggaaucgcgccccugcagcugggcaauuguagcguugcuggguggauucucggaaacccugagugcgaacugcuuaucuccaaagagucuuggagcuacauuguggaaaccccgaaucccgagaacggcacguguuauccuggguacuuugccgacuaugaggaacugagagagcaacucuccucugucagcuccuucgaacgguuugagaucuuccccaaggagagcucuuggccuaaucauaccgugacaggaguuuccgccagcugcucucacaacggcaaguccagcuuuuaccgcaaucugcuuuggcugaccggcaaaaacgggcucuaucccaaucugucuaaguccuacgcuaacaauaaagaaaaggaggugcugguccucuggggagugcaucacccuccgaacaucggcaaccagagagcccuguaccacacagaaaaugcuuaugugagcgucguuuccucucauuacagccggcgcuucacccccgagauugccaaaagaccuaaggugcgggaucaggaagggcgcaucaacuauuacuggacgcuucuggagcccggagacacaauuaucuuugaggcgaauggcaaccucauugccccuagauaugcuuucgcccugucccggggguuuggaagcggcaucauuaccucuaaugcucccauggaugaaugugacgccaagugccagacaccgcaaggcgcgaucaacuccagccuuccuuuccagaaugugcaccccgucaccaucggggaguguccuaaauacgugcgcucugccaagcugagaaugguuaccggacuccggaacauucccagcauccagucccgcggccuguuuggggcuauugccggauucaucgaaggcggguggacaggaaugguggauggcugguauggcuaccaucaccagaaugagcaagggucuggauacgcugccgaccagaaaagcacgcagaacgccauuaauggcaucaccaacaaggucaauuccgugaucgaaaagaugaacacacaguuuaccgcuguugggaaagaguucaauaaacuggagagacggauggaaaaccucaacaagaagguggaugacggauuccuggauauuuggacauauaaugcggagcuucugguccuccuggaaaacgagcgcacccuugacuuucacaauagcaacgugaaaaaucuguacgaaaaggucaaaucucaacucaagaacaaugccaaagagaucggcaacgggugcuucgaguuuuaucauaaguguaauaacgaaugcauggaguccgugaagaauggcacguacgacuaucccaaauacagcgaagagucuaagcugaacagagagaaaauugauggaguuaagcuggaauccaugggcguguaucagauccucgcuauuuacagcacagucgccuccucucuggugcuucugguuagccucggggccaucuccuucuggaugugcucuaauggaagccugcagugucggaucugcauuuga

SEQ ID NO: 193780 - RNA, 1698 nt, Artificial Sequence
  derived and/or modified CDS sequence (opt5) from hemagglutinin__InfluenzaA__ABS49987
augaaggugaaacugcucguccugcuuugcaccuucacagccacguacgcugacaccaucuguauuggcuaucacgccaacaauagcacagauaccguugacacagugcuggagaagaacgugaccgucacacauuccgugaaucuccuggaagauucucacaacgggaaacuuugccugcucaagggaaucgcgccccugcagcugggcaauuguagcguugcuggguggauucucggaaacccugagugcgaacugcuuaucuccaaagagucuuggagcuacauuguggaaaccccgaaucccgagaacggcacguguuauccuggguacuuugccgacuaugaggaacugagagagcaacucuccucugucagcuccuucgaacgguuugagaucuuccccaaggagagcucuuggccuaaucauaccgugacaggaguuuccgccagcugcucucacaacggcaaguccagcuuuuaccgcaaucugcuuuggcugaccggcaaaaacgggcucuaucccaaucugucuaaguccuacgcuaacaauaaagaaaaggaggugcugguccucuggggagugcaucacccuccgaacaucggcgaucagagagcccuguaccacacagaaaacgcuuaugugagcgucguuuccucucauuacagccggcgcuucacccccgagauugccaaaagaccuaaggugcgggaccaggaagggcgcaucaauuauuacuggacgcuucuggagcccggagauacaauuaucuuugaggcgaacggcaaucucauugccccuagauaugcuuucgcccugucccggggguuuggaagcggcaucauuaccucuaacgcucccauggacgaaugugaugccaagugccagacaccgcaaggcgcgaucaauuccagccuuccuuuccagaacgugcaccccgucaccaucggggaguguccuaaauacgugcgcucugccaagcugagaaugguuaccggacuccggaauauucccagcauccagucccgcggccuguuuggggcuauugccggauucaucgaaggcggguggacaggaaugguggacggcugguauggcuaccaucaccagaacgagcaagggucuggauacgcugccgaucagaaaagcacgcagaaugccauuaacggcaucaccaauaaggucaacuccgugaucgaaaagaugaauacacaguuuaccgcuguugggaaagaguucaacaaacuggagagacggauggaaaaucucaacaagaagguggacgauggauuccuggacauuuggacauauaacgcggagcuucugguccuccuggaaaaugagcgcacccuugacuuucacgauagcaacaugaaaaaucuguacgaaaaggugaaaucucaacucaagaacaaugccaaagagaucggcaacgggugcuucgaguuuuaucauaaguguaauaacgaaugcauggaguccgucaagaauggcacguacgacuaucccaaauacagcgaagagucuaagcugaacagagagaaaauugauggagugaagcuggaauccaugggcguuuaucagauccucgcuauuuacagcacaguggccuccucucugguccuucuggugagccucggggccaucuccuucuggaugugcucuaauggaagccugcagugucggaucugcauuuga

SEQ ID NO: 193781 - RNA, 1701 nt, Artificial Sequence
  derived and/or modified CDS sequence (opt5) from hemagglutinin__InfluenzaA__ABS49998
augaagaccaucauugcccugagcuacauccucugccugguguucgcucagaaacuucccggcaacgacaauuccacagccacgcugugucucgggcaccaugcggucccuaacggaacccugguuaagacaauuaccaaugaucaaaucgaggugacaaacgcuaccgaacuugugcagucuagcuccacaggcgggauuugcgacucuccgcaccagauccuggauggagagaauuguacccucaucgacgcccugcugggcgauccccauugcgacggguuucagaacaaagaaugggaucucuucgucgagagaagcaaggccuauuccaauuguuacccuuaugacgugcccgauuacgcuucucugcggagccuuguugccuccagcggaacgcuggaauuuaacaaugagucuuucaacuggaccggcguggcucaaaauggcacauccagcgccugcaaacgcagaucuaacaaguccuuuuucagccggcucaauuggcugcaccagcuuaaguauaaauacccugcgcugaacgucauuaugcccaauaacgagaaguuugacaaacucuauaucuggggagugcaucacccuucuaccgauuccgaccagauuagccuguacgcccaggcuccggggcgcguuacaguguccaccaagagaucucaacagacggucauccccaacauuggcagccggccuugggugcgcgggguguccagcagaaucucuauuuacuggacaaucgucaaacccggagauauccugcucauuaauuguaccggcaaccugaucgccccucggggguauuucaagauucgcuccggaaagagcucuaucaugagaagcgacgcuuccauuggcaaaugcaauucugaauguaucacacccaacggcagcaucccgaaugacaagccuuuucagaacguuaaucggauuaccuacggggccugcccccgcuaugugaaacagaacacccuuaagcuggcgacaggaaugagaaaugugccugagaaacaaacgcggggcaucuucggggccauugcuggauuuaucgaaaacggcugggaggggauggucgauggaugguacggcuuccgccaccaaaauuccgagggcaccgggcaggccgcugaccucaagagcacacaggccgccauuaaccagaucaauggaaaacugaacagacuuaucgaaaagaccaaugagaaguuucaucagauugaaaaagaguucucugaaguggagggccggauccaggaucuggagaaguauguugaagacacaaaaauugaucucugguccuacaacgcugagcugcugguggcgcucgaaaaccaacacaccaucgaccugacggauagcgagaugaauaaacuuuucgaaagaacaaagaagcagcugcgcgagaacgccgaggacauggggaauggauguuuuaagauuuaucauaaaugcgauaacgcuugcaucggcucuauucggaaugggaccuacgaccacgaugucuacagagacgaagcccucaacaaucgcuuccagaucaagggcguggagcugaaauccggauauaaggacuggauccuuuggauuagcuuugccaucuccuguuuccugcucugcguugugcugcugggcuuuauuaugugggcuugucagaaagggaacauccggugcaauauuuguaucuga

SEQ ID NO: 193782 - RNA, 1701 nt, Artificial Sequence
  derived and/or modified CDS sequence (opt5) from hemagglutinin__InfluenzaA__ABS50009
augaagaccaucauugcccugagcuacauccucugccugguguucgcucagaaacuucccggcaacgacaauuccacagccacgcugugucucgggcaccaugcggucccuaacggaacccugguuaagacaauuaccaaugaucaaaucgaggugacaaacgcuaccgaacuugugcagucuagcuccacaggcgggauuugcgacucuccgcaccagauccuggauggagagaauuguacccucaucgacgcccugcugggcgauccccauugcgacggguuucagaacaaagaaugggaucucuucgucgagagaagcaaggccuauuccaauuguuacccuuaugacgugcccgauuacgcuucucugcggagccuuguugccuccagcggaacgcuggaauuuaacaaugagucuuucaacuggaccggcguggcucaaaauggcacauccagcgccugcaaacgcagaucuaacaaguccuuuuucagccggcucaauuggcugcaccagcuuaaguauaaauacccugcgcugaacgucaccaugcccaauaacgagaaguuugacaaacucuauauuuggggagugcaucacccuucuacagauuccgaccagaucagccuguacgcccaggcuccggggcgcguuaccguguccacgaagagaucucaacagacagucauucccaacaucggcagccggccuugggugcgcgggguguccagcaaaauuucuaucuacuggaccauugucaagcccggagauauccugcucaucaauuguacaggcaaccugauugccccuagaggguauuucaagauccgguccggaaaaagcucuauuaugcgcagcgacgcuuccaucggcaagugcaauucugaauguauuacccccaacggcagcaucccgaaugacaaaccuuuucagaacguuaauagaaucaccuacggggccugcccccgguaugugaagcagaacacacuuaaacuggcgacgggaaugcgcaaugugccugagaagcaaaccagaggcauuuucggggccaucgcuggauuuauugaaaacggcugggaggggauggucgauggaugguacggcuuccggcaccaaaauuccgagggcacagggcaggccgcugaccucaaaagcacccaggccgccaucaaccagauuaauggaaagcugaaccgccuuaucgaaaagacaaaugagaaauuucaucagaucgaaaaggaguucucugaaguggagggccggauucaggaucuggagaaauauguugaagacaccaagaucgaucucugguccuacaacgcugagcugcugguggcgcucgaaaaccaacacacgauugaccugacagauagcgagaugaauaaacuuuucgaaagaaccaagaagcagcugagagagaacgccgaggacauggggaauggauguuuuaaaaucuaucauaagugcgauaacgcuugcauuggcucuauccgcaaugggaccuacgaccacgaugucuaccgggacgaagcccucaacaauagauuccagauuaaaggcguggagcugaaguccggauauaaagacuggauccuuuggaucagcuuugccauuuccuguuuccugcucugcguugugcugcugggcuuuaucaugugggcuugucagaaggggaacauucgcugcaauaucuguauuuga

SEQ ID NO: 193783 - RNA, 1701 nt, Artificial Sequence; identical to SEQ ID NO: 192782
  derived and/or modified CDS sequence (opt5) from hemagglutinin__InfluenzaA__ABS50020

SEQ ID NO: 193784 - RNA, 1701 nt, Artificial Sequence
  derived and/or modified CDS sequence (opt5) from hemagglutinin__InfluenzaA__ABS50031
augaagaccaucauugcccugagcuacaugcucugccugguguucgcucagaaacuucccggcaacgacaauuccacagccaugcugugucucgggcaccaugcggucccuaacggaacgcugguuaagaccaucacaaaugaucaaauugaggugaccaacgcuacagaacuugugcagucuagcuccaccggcgggaucugcgacucuccgcaccagauucuggauggagagaauuguacacucaucgacgcccugcugggcgauccccauugcgacggguuucagaacaaagaaugggaucucuucgucgagagaagcaaggccuauuccaauuguuacccuuaugacgugcccgauuacgcuucucugcggagccuuguugccuccagcggaacccuggaauuuaacaaugagucuuucaacuggacgggcguggcucaaaauggcaccuccagcgccugcaaacgcagaucuaacaaguccuuuuucagccggcucaauuggcugcaccagcuuaaguauaaauacccugcgcugaacgucacaaugcccaauaacgagaaguuugacaaacucuauaucuggggagugcaucacccuucuaccgauuccgaccagauuagccuguacgcccaggcuccggggcgcguuacaguguccaccaagagaucucaacagacggucauccccaacauuggcagcgggccuugggugcggggaguguccagccgcaucucuauuuacuggacaaucgucaaacccggcgauauucugcucaucaauuguaccgggaaccugaucgccccuagaggauauuucaagauucgguccggcaagagcucuaucaugcgcagcgacgcuuccauuggcaaaugcaauucugaauguaucacacccaacgggagcauuccgaaugacaagccuuuucagaacguuaauagaaucaccuacggagccugcccccgguaugugaaacagaacacccuuaagcuggcgacaggcaugcgcaaugugccugagaaacaaacgagagggaucuucggagccauugcuggcuuuaucgaaaacgggugggagggaauggucgauggcugguacggcuuccggcaccaaaauuccgaggggaccggacaggccgcugaccucaagagcacacaggccgccauuaaccagaucaauggcaaacugaaccgccuuauugaaaagaccaaugagaaguuucaucagaucgaaaaagaguucucugaaguggaggggagaauccaggaucuggagaaguauguugaagacacaaaaauugaucucugguccuacaacgcugagcugcugguggcgcucgaaaaccaacacaccaucgaccugacggauagcgagaugaauaaacuuuucgaacggacaaagaagcagcugagagagaacgccgaggacaugggaaauggcuguuuuaagauuuaucauaaaugcgauaacgcuugcaucgggucuauucgcaauggcaccuacgaccacgaugucuaccgggacgaagcccucaacaauagauuccagaucaagggaguggagcugaaauccggcuauaaggacuggauucuuuggaucagcuuugccaucuccuguuuccugcucugcguugugcugcugggguuuauuaugugggcuugucagaaaggaaacauccgcugcaauauuuguaucuga

SEQ ID NO: 193785 - RNA, 1701 nt, Artificial Sequence; identical to SEQ ID NO: 192123
  derived and/or modified CDS sequence (opt5) from hemagglutinin__InfluenzaA__ABS50042

SEQ ID NO: 193786 - RNA, 1701 nt, Artificial Sequence; identical to SEQ ID NO: 193765
  derived and/or modified CDS sequence (opt5) from hemagglutinin__InfluenzaA__ABS50053

SEQ ID NO: 193787 - RNA, 1701 nt, Artificial Sequence
  derived and/or modified CDS sequence (opt5) from hemagglutinin__InfluenzaA__ABS50064
augaagaccaucauugcccugagcuacauccucugccugguguucgcucagaaacuucccggcaacgacaauuccacagccacgcugugucucgggcaccaugcggucccuaacggaacccugguuaagacaauuaccaaugaucaaaucgaggugacaaacgcuaccgaacuugugcagucuagcuccacaggcagaauuugcgacucuccgcaccagauccuggauggggagaauuguacccucaucgacgcccugcugggagauccccauugcgacggcuuucagaacaaagaaugggaucucuucgucgagcggagcaaggccuauuccaauuguuacccuuaugacgugcccgauuacguuucucugcgcagccuuguggcuuccagcgggacgcuggaauuuaacaaugagucuuucaacuggaccggagucgcccaaaauggcacauccagcgcuugcaaaagacggucugacaaguccuuuuucagccgccucaacuggcugcaccagcuuaaguauaaauacccugcccugaaugugaccaugcccaacaaugagaaguuugauaaacucuauauuuggggcguucaucacccugggacagacucugaucagaucucccuguacgcgcaggccagcggaagagugaccgucuccacgaagcggucucaacagacagugauuccgaacaucggcagccgccccugggugagaggggucuccagccggauuucuaucuacuggaccauuguuaaaccuggagacauccugcucaucaacuccacaggcaaucugauugcuccccgcggguauuucaagaucagaagcggaaagucuagcauuaugcgguccgacgccccuaucggcaaauguaacucugaaugcauuacccccaauggcagcaucccgaacgauaagccuuuucagaaugugaaccgcaucaccuacgggcccuguccuagauaugugaaacagacaacgcuuaagcuggcuaccggaaugcggaauguccccgagaaacaaacacgcggcauuuucggggccaucgcgggauuuauugaaaacggcugggaggggaugauggacggaugguacggcuucagacaccaaaauuccgagggcaccgggcaggccgcugaucucaagagcacacaggccgcuaucaaccagauuaauggaaaacugaaccggcuuaucgaaaagaccaaugagaaguuucaucagaucgaaaaagaguucucugaaguggagggccgcauucaggaccuggagaaguauguugaagauacgaaaaucgaccucugguccuacaacgccgagcugcuggugagccucgaaaaucaacacacaauugaucugaccgacucugagaugaacaaacuuuucgaaagaaccaagaagcagcugcgggagaacgccgaggauauggggaauggaugcuuuaagaucuaucauaaaugugacaacgcuugcauuggcuccaucagaaaugggacauacgaucacgacgucuaccgcgacgaagcgcucaacaaucgguuccagauuaagggcguggagcugaaaagcggauauaaggauuggauccuuuggaucuccuuugccauuucuugcuuccugcucuguaucguucugcugggcuuuauuaugugggcuugccagaaagggaacaucagauguaauauuugcaucuga

SEQ ID NO: 193788 - RNA, 1701 nt, Artificial Sequence
  derived and/or modified CDS sequence (opt5) from hemagglutinin__InfluenzaA__ABS50075
augaagaccaucauugcccugagcuacauccucugccugguguucgcucagaaacuucccggcaacgacaauuccacagccacgcugugucucgggcaccaugcggucccuaacggaaccauuguuaagacaaucaccaaugaucaaauugaggugacaaacgcuaccgaacuggugcagucuagcuccacaggcgggaucugcgacucuccgcacaaaauccuugauggagagaauuguacccugauugacgcccuccugggcgauccccagugcgacggguuucagaacaagaaaugggaucuguucgucgaaagaagcaaggccuauuccaauuguuacccuuaugacgugcccgauuacgcuucucuccggagccugaucgccuccagcggaacgcuugaguuuaacaaugaaucuuucaacuggaccggcguuacacaaaauggcaccuccagcgcuugcaagcgcagaucuaacuccagcuuuuucucucggcugaauuggcucacacaucugaaauuuaaguauccugcccuuaacgugaccaugcccaauaacgaggaguucgacaaacuguacauuuggggaguccaccauccugggacguauaacgaucagaucucccucuacgcgcaggccagcggccgcauuacaguguccaccaagagaucucagcaaacaguuaucccgaauauugggagccggccccgcgugagagacaucccuucccggaucagcauuuacuggaccaucgucaaacccggagauauucugcugaucaacucuaccggcaaucucauugcuccucgcggguauuuuaagaucagauccggaaagagcucuaucaugcggagcgacgcccccauuggcaaauguaacuccgaaugcaucacaccgaauggcucuauuccuaacgacaagcccuuccagaaugugaaccgcaucacguacggggcuuguccuagauaugugaaacagaauacccugaaacuugccacaggaaugcggaacguccccgagaagcagacccgcggcauuuuuggggcgaucgccggauucaucgaaaauggcugggaggggaugguugauggaugguacggcuuuagacaccaaaacagcgagggcauugggcaggcugccgaccugaaguccacacaggcugccaucgaucaaauuaauggaaaacucaaccggcugaucggcaagaccaaugaaaaguuccaccagauugagaaagaguucagcgaaguggaagggagaauccaggaccuugagaaguauguggaggauacgaaaauugaccuguggucuuacaacgccgaacuccuggucgcucuggagaaccagcauacaaucgaucucaccgacuccgaaaugaauaagcuguuugagcgcaccaaaaagcaacuucgggaaaacgcggaggauaugggaaauggcugcuucaagaucuaucacaaaugugacaacgccugcauugggagcaucagaaauggcacauacgaucaugacguguaccgcgacgaggcucugaacaaucgguuucagauuaagggaguugaacucaaaucuggcuauaaggauuggauccuguggauuuccuucgccaucagcugcuuucuucuguguguggcccuccugggguucaucaugugggcuugccagaaaggaaacauuagauguaauaucugcauuuga

SEQ ID NO: 193789 - RNA, 1698 nt, Artificial Sequence
  derived and/or modified CDS sequence (opt5) from hemagglutinin__InfluenzaA__ABS71665
augaaggugaaacugcucguccugcuuugcaccuucacagccacguacgcugacaccaucuguauuggcuaucacgccaacaauagcacagauaccguugacacagugcuggagaagaacgugaccgucacacauuccgugaaucuccuggaagauucucacaacgggaaacuuugccugcucaagggaaucgcgccccugcagcugggcaauuguagcguugcuggguggauucucggaaacccugagugcgaaucccugaucucuagagagagcugguccuacauuguggaaaaaccgucucccgagaauggcaccuguuauccugggcauuuugccgacuacgaggaacuucgggagcaacugagcuccgucagcucuuucgaacgcuuugagaucuuccccaaggaguccagcuggccuaaccacacggccaccggagugucugcuuccugcagccauaauggcgaaucuuccuuuuauaagaaccuccuguggcuuacaggcaaaaaugggcuguaccccaaccucagcaaguccuaugccaauaacaaagagaaggaaguucuggugcuguggggaguccaccacccuccgaauaucggcgaucagagagcucucuaccauaccgagaacgccuacgugucuguggucagcucccacuauagccggaaauucacacccgaaauugcgaagcgcccuaagguuagagaccaggaggggcggaucucuuacuauuggacccugcuugagcccggagauacgauuaucuuugaagccaacggcaaucugauugcuccucgcuacgccuucgcucucuccagaggguuuggaagcggcaucauuaacucuaaugcccccauggacgagugugaugcgaaaugccagacaccgcaaggcgccaucaacagcucccugccuuuccagaaugugcaucccgugaccaucggggaauguccuaaguauguccggucugcuaaacuucgcauggugacaggacugagaaacauucccagcauccagucccggggccucuuuggggccauugcuggauucaucgagggcggguggaccggaaugguugacggcugguacggcuaucaccaccagaaugaacaagggagcggauacgccgccgaucagaagucuacccagaacgcuauuaauggcaucacaaacaaagucaauuccgugaucgagaagaugaacacgcaguuuaccgcgguggggaaagaguucaauaagcuggaacgcagaauggagaaccugaauaagaaaguugacgauggauucauugacaucuggacauacaacgccgaacuccuggugcuucuggagaacgaacggacccucgacuuucaugauagcaaugucaagaaccuguaugagaaagugaagucucaacuuaaaaauaacgcuaaggagauuggcaaugggugcuucgaauuuuaccacaaguguaacgacgagugcauggaauccgucaaaaauggcacauaugauuaccccaaguauagcgaggaguccaaacugaaccgcgaaaagaucgacggagugaaacucgagucuaugggcguuuaccagauucuggccaucuauagcaccguggccuccucucugguccuccuggugagccuuggggcuaucuccuucuggaugugcagcaauggaucucugcaguguagaauuugcaucuga

SEQ ID NO: 193790 - RNA, 1698 nt, Artificial Sequence
  derived and/or modified CDS sequence (opt5) from hemagglutinin__InfluenzaA__ABS71666
augaaggugaaacugcucguccugcuuugcaccuucacagccacguacgcugacaccaucuguauuggcuaucacgccaacaauagcacagauaccguugacacagugcuggagaagaacgugaccgucacacauuccgugaaucuccuggaagauucucacaacgggaaacuuugccugcucaagggaaucgcgccccugcagcugggcaauuguagcguugcuggguggauucucggaaacccugagugcgaaucccugaucucuagagagagcugguccuacauuguggaaaaaccgucucccgagaauggcaccuguuauccugggcauuuugccgacuacgaggaacuucgggagcaacugagcuccgucagcucuuucgaacgcuuugagaucuuccccaaggaguccagcuggccuaaccacacggccaccggagugucugcuuccugcagccauaauggcaagucuuccuuuuauaaaaaccuccuguggcuuacaggcaagaaugggcuguaccccaaccucagcaaauccuaugccaauaacaaggaaaaagagguucuggugcuguggggaguccaccacccuccgaauaucggcgaucagagagcucucuaccauaccgaaaacgccuacgugucuguggucagcucccacuauagccggaaguucacacccgagauugcgaagcgcccuaaaguuagagaccaggaagggcggaucucuuacuauuggacccugcuugagcccggagauacgauuaucuuugaggccaacggcaaucugauugcuccucgcuacgccuucgcucucuccagaggguuuggaagcggcaucauuaacucuaaugcccccauggacgaaugugaugcgaagugccagacaccgcaaggcgccaucaacagcucccugccuuuccagaaugugcaucccgugaccaucggggaguguccuaaauauguccggucugcuaaacuucgcauggugacaggacugagaaacauucccagcauccagucccggggccucuuuggggccauugcuggauucaucgaaggcggguggaccggaaugguugacggcugguacggcuaucaccaccagaaugagcaagggagcggauacgccgccgaucagaaaucuacccagaacgcuauuaauggcaucacaaacaaggucaauuccgugaucgaaaagaugaacacgcaguuuaccgcgguggggaaggaguucaauaagcuggagcgcagaauggaaaaccugaauaaaaagguugacgauggauucauugacaucuggacauacaacgccgagcuccuggugcuucuggaaaacgagcggacccucgacuuucaugauagcaaugucaaaaaccuguaugaaaaggugaaaucucaacuuaagaauaacgcuaaggagauuggcaaugggugcuucgaguuuuaccacaaauguaacgacgaaugcauggaguccgucaagaauggcacauaugauuaccccaaauauagcgaagaguccaagcugaaccgcgagaaaaucgacggagugaagcucgaaucuaugggcguuuaccagauucuggccaucuauagcaccguggccuccucucugguccuccuggugagccuuggggcuaucuccuucuggaugugcagcaauggaucucugcaguguagaauuugcaucuga

SEQ ID NO: 193791 - RNA, 1698 nt, Artificial Sequence
  derived and/or modified CDS sequence (opt5) from hemagglutinin__InfluenzaA__ABS71667
augaaggugaaacugcucguccugcuuugcaccuucacagccacguacgcugacaccaucuguauuggcuaucacgccaacaauagcacagauaccguugacacagugcuggagaagaacgugaccgucacacauuccgugaaucuccuggaagauucucacaacgggaaacuuugccugcucaagggaaucgcgccccugcagcugggcaauuguagcguugcuggguggauucucggaaacccugagugcgaaucccugaucucuagagagagcugguccuacauuguggaaaaaccgucucccgagaauggcaccuguuauccugggcauuuugccgacuacgaggaacuucgggagcaacugagcuccgucagcucuuucgaacgcuuugagaucuuccccaaggaguccagcuggccuaaccacacggccaccggagugucugcuuccugcagccauaauggcaagucuuccuuuuauaaaaaccuccuguggcuuacaggcaagaaugggcuguaccccaaccucagcaaauccuaugccaauaacaaggaaaaagagguucuggugcuguggggaguccaccacccuccgaauaucggcgaucagagagcucucuaccauaccgaaaacgccuacauuucuguggugagcucccacuauagccggaaguucacacccgagaucgcgaagcgcccuaaagucagagaccaggaagggcggauuucuuacuauuggacccugcuugagcccggagauacgaucauuuuugaggccaacggcaaucugaucgcuccucgcuacgccuucgcucucuccagaggguuuggaagcggcauuaucaacucuaaugcccccauggacgaaugugaugcgaagugccagacaccgcaaggcgccaucaacagcucccugccuuuccagaauguucaucccgugaccauuggggaguguccuaaauaugugcggucugcuaaacuucgcauggucacaggacugagaaacauccccagcauucagucccggggccucuuuggggccaucgcuggauucauugaaggcggguggaccggaaugguggacggcugguacggcuaucaccaccagaaugagcaagggagcggauacgccgccgaucagaaaucuacccagaacgcuaucaauggcaucacaaacaagguuaauuccgugauugaaaagaugaacacgcaguuuaccgcggucgggaaggaguucaauaagcuggagcgcagaauggaaaaccugaauaaaaagguggacgauggauucaucgacauuuggacauacaacgccgagcuccugguucuucuggaaaacgagcggacccucgacuuucaugauagcaaugugaaaaaccuguaugaaaaggucaaaucucaacuuaagaauaacgcuaaggagaucggcaaugggugcuucgaguuuuaccacaaauguaacgacgaaugcauggaguccgugaagaauggcacauaugauuaccccaaauauagcgaagaguccaagcugaaccgcgagaaaauugacggagucaagcucgaaucuaugggcguguaccagauccuggccaucuauagcaccguugccuccucucuggugcuccuggucagccuuggggcuauuuccuucuggaugugcagcaauggaucucugcaguguagaaucugcauuuga

SEQ ID NO: 193792 - RNA, 1698 nt, Artificial Sequence
  derived and/or modified CDS sequence (opt5) from hemagglutinin__InfluenzaA__ABS71668
augaaggugaaacugcucguccugcuuugcaccuucacagccacguacgcugacaccaucuguauuggcuaucacgccaacaauagcacagauaccguugacacagugcuggagaagaacgugaccgucacacauuccgugaaucuccuggaagauucucacaacgggaaacuuugccugcucaagggaaucgcgccccugcagcugggcaauuguagcguugcuggguggauucucggaaacccugagugcgaaucccugaucucuagagagagcugguccuacauuguggaaaaaccgucucccgagaauggcaccuguuauccugggcauuuugccgacuacgaggaacuucgggagcaacugagcuccgucagcucuuucgaacgcuuugagaucuuccccaaggaguccagcuggccuaaccacacggccucuggaguguccgcuagcugcucucauaauggcaaguccagcuuuuauaaaaaccuccuguggcuuaccggcaagaaugggcuguaccccaaccucuccaaaucuuaugccaauaacaaggaaaaagagguucuggugcuguggggaguccaccacccuccgaauaucggcgaucagagagcucucuaccauacagaaaacgccuacgugagcguggucuccagccacuauucucggaaguucacccccgagauugcgaagcgcccuaaaguuagagaccaggaagggcggaucaacuacuauuggacacugcuugagcccggagauaccauuaucuuugaggccaauggcaaccugauugcuccucgcuacgccuucgcucucuccagaggguuuggaagcggcaucauuaauucuaacgcccccauggacgaaugugaugcgaagugccagacgccgcaaggcgccaucaauagcucccugccuuuccagaacgugcaucccgugacaaucggggaguguccuaaauauguccggucugcuaaacuucgcauggugaccggacugagaaauauucccagcauccagucccggggccucuuuggggccauugcuggauucaucgaaggcggguggacaggaaugguugacggcugguacggcuaucaccaccagaacgagcaagggagcggauacgccgccgaucagaaaucuacccagaaugcuauuaacggcaucaccaauaaggugaacuccgucaucgaaaagaugaauacacaguuuacggcgguggggaaggaguucaacaagcuggagcgcagaauggaaaaucugaacaaaaagguugacgauggauucauugacaucuggaccuacaacgccgagcuccuggugcuucuggaaaaugagcggacacucgacuuucaugauagcaacgucaaaaaucuguaugaaaaggugaaaucucaacuuaagaacaaugcuaaggagauuggcaacgggugcuucgaguuuuaccacaaauguaaugacgaaugcauggaguccgucaagaacggcaccuaugauuaccccaaauauagcgaagaguccaagcugaaucgcgagaaaaucgacggagugaagcucgaaucuaugggcguuuaccagauucuggccaucuauagcacaguggccuccucucugguccuccuggugagccuuggggcuaucuccuucuggaugugcagcaacggaucucugcaguguagaauuugcaucuga

SEQ ID NO: 193793 - RNA, 1698 nt, Artificial Sequence
  derived and/or modified CDS sequence (opt5) from hemagglutinin__InfluenzaA__ABS71669
augaaggugaaacugcucguccugcuuugcaccuucacagccacguacgcugacaccaucuguauuggcuaucacgccaacaauagcacagauaccguugacacagugcuggagaagaacgugaccgucacacauuccgugaaucuccuggaagauucucacaacgggaaacuuugccugcucaagggaaucgcgccccugcagcugggcaauuguagcguugcuggguggauucucggaaacccugagugcgaacugcuuaucuccaaagagucuuggagcuacauuguggaaaagccgaaucccgagaacggcaccuguuauccugggcauuuugccgacuacgaggaacugagagagcaacucuccucugucagcuccuucgaacgguuugagaucuuccccaaggagagcucuuggccuaaucacacggugaccggaguuuccgccagcugcucucauaacggcgaauccagcuuuuauaaaaaucugcuuuggcugacaggcaagaacgggcucuaccccaaucugucuaaauccuaugcuaacaauaaggagaaagaagugcugguccucuggggagugcaccacccuccgaacaucggcgaucagaaggcccuguaccauaccgagaacgcuuacgugagcgucguuuccucucacuauagccgcaaguucacacccgaaauugccaaaagaccuaaggugcgggaccaggaggggcgcaucaauuacuauuggacccuucuggagcccggagauacgauuaucuuugaagcgaacggcaaucucauugccccuagauacgcuuucgcccugucccggggguuuggaagcggcaucauuaacucuaaugcucccauggacaaaugugaugccaagugccagacaccgcaaggcgcgaucaacuccagccuuccuuuccagaaugugcaucccgucaccaucggggaguguccuaaauaugugcgcucugccaagcugagaaugguuacaggacuccggaacauucccagcauccagucccgcggccuguuuggggcuauugccggauucaucgaaggcggguggaccggaaugguggacggcugguacggcuaucaccaccagaaugagcaagggucuggauacgcugccgaucagaaaagcacccagaacgccauuaauggcaucacaaacaaggucaauuccgugaucgaaaagaugaacacgcaguuuaccgcuguugggaaagaguucaauaagcuggagagacggauggaaaaccucaacaaaaagguggacgauggauucauugacaucuggacauacaaugcggagcugcuuguccugcucgaaaacgagcgcacccuggacuuucaugauagcaaugugaaaaaccuuuaugaaaaggucaagucucaacugaaaaauaacgccaaggagauuggcaaugggugcuucgaguuuuaccacaaauguaacgacgaaugcauggaguccgugaagaauggcacauaugauuaccccaaauauagcgaagagucuaagcucaacagagagaagaucgacggaguuaaacuggaauccaugggcguguaccagauucuggcuaucuauagcaccgucgccuccucucucgugcugcuuguuagccugggggccaucuccuucuggaugugcucuaauggaagccuccagugucggauuugcaucuga

SEQ ID NO: 193794 - RNA, 1698 nt, Artificial Sequence
  derived and/or modified CDS sequence (opt5) from hemagglutinin__InfluenzaA__ABS71671
augaaggugaaacugcucguccugcuuugcaccuucacagccacguacgcugacaccaucuguauuggcuaucacgccaacaauagcacagauaccguugacacagugcuggagaagaacgugaccgucacacauuccgugaaucuccuggaagauucucacaacgggaaacuuugccugcucaagggaaucgcgccccugcagcugggcaauuguagcguugcuggguggauucucggaaacccugagugcgaacugcuuaucuccaaagagucuuggagcuacauuguggaaaagccgaaucccgagaacggcaccuguuauccugggcauuuugccgacuacgaggaacugagagagcaacucuccucugucagcuccuucgaacgguuugagauguuccccaaggagagcucuuggccuaaucacacggugaccggaguuuccgccagcugcucucauaacggcaaauccagcuuuuauaagaaucugcuuuggcugacaggcaaaaacgggcucuaccccaaucugucuaaguccuaugcuaacaauaaagaaaaggaggugcugguccucuggggagugcaccacccuccgaacaucggcgaucagcgcgcccuguaccauaccgaaaacgcuuacgugagcgucguuuccucucacuauagcagaaaguucacacccgagaucgccaaacggccuaaggugcgcgaccaggaagggagaauuaauuacuauuggacccuucuggagcccggagauacgaucauuuuugaggcgaacggcaaucucaucgccccucgguacgcuuucgcccugucccgcggguuuggaagcggcauuaucaacucuaaugcucccauggacgaaugugaugccaaaugccagacaccgcaaggcgcgauuaacuccagccuuccuuuccagaaugugcaucccgucaccaucggggaguguccuaaguaugugagaucugccaaacugcggaugguuacaggacuccgcaacauccccagcauucaguccagaggccuguuuggggcuaucgccggauucauugaaggcggguggaccggaaugguggacggcugguacggcuaucaccaccagaaugagcaagggucuggauacgcugccgaucaaaagagcacccagaacgccaucaauggcauuacaaacaaagucaauuccgugaucgaaaagaugaacacgcaguuuaccgcuguugggaaggaguucaauaaacuggagcggcgcauggaaaaccucaacaagaaaguggacgauggauucaucgacauuuggacauacaaugcggagcugcuuguccugcucgaaaacgagagaacccuggacuuucaugauagcaaugugaagaaccuuuaugaaaaagucaagucucagcugaagaauaacgccaaagagaucggcaaugggugcuucgaguuuuaccacaaguguaacgacgaaugcauggaguccgugaaaaauggcacauaugauuaccccaaguauagcgaagagucuaaacucaaccgggagaagauugacggaguuaagcuggaauccaugggcguguaccagauccuggcuauuuauagcaccgucgccuccucucucgugcugcuuguuagccugggggccaucuccuucuggaugugcucuaauggaagccuccagugucgcaucugcauuuga

SEQ ID NO: 193795 - RNA, 1698 nt, Artificial Sequence
  derived and/or modified CDS sequence (opt5) from hemagglutinin__InfluenzaA__ABS71672
augaaggugaaacugcucguccugcuuugcaccuucacagccacguacgcugacaccaucuguauuggcuaucacgccaacaauagcacagauaccguugacacagugcuggagaagaacgugaccgucacacauuccgugaaucuccuggaagauucucacaacgggaaacuuugccugcucaagggaaucgcgccccugcagcugggcaauuguagcguugcuggguggauucucggaaacccugagugcgaacugcuuaucuccaaagagucuuggagcuacauuguggaaaagccgaaucccgagaacggcaccuguuauccugggcauuuugccgacuacgaggaacugagagagcggcucuccucugucagcuccuucgaacgcuuugagauguuccccaaggagagcucuuggccuaaucacacggugaccggaguuuccgccagcugcucucauaacggcaaauccagcuuuuauaagaaucugcuuuggcugacaggcaaaaacgggcucuaccccaaucugucuaaguccuaugcuaacaauaaagaaaaggaggugcugguccucuggggagugcaccacccuccgaacaucggcgcccaaagagcucuguaccauaccgaaaacgccuacgugagcgucguuuccucucacuauagccggaaguucacacccgagaucgcgaaacgcccuaaggugagagaucaggaagggcggauuaauuacuauuggacccuucuggagcccggagacacgaucauuuuugaggccaacggcaaucucaucgcuccucgcuacgccuucgcucuguccagaggguuuggaagcggcauuaucaacucuaaugcccccauggaugaaugugacgcgaaaugccagacaccgcagggcgccauuaacuccagccuuccuuuccaaaaugugcaucccgucaccaucggggaguguccuaaguaugugcggucugcuaaacugcgcaugguuacaggacucagaaacauccccagcauucagucccggggccuguuuggggccaucgcuggauucauugaaggcggguggaccggaaugguggauggcugguacggcuaucaccaccagaaugagcaggggucuggauacgccgccgaccaaaagagcacccagaacgcuaucaauggcauuacaaacaaagucaauuccgugaucgaaaagaugaacacgcaguuuaccgcgguugggaaggaguucaauaaacuggagcgcagaauggaaaaccucaacaagaaaguggaugacggauucaucgauauuuggacauacaaugccgagcugcuuguccugcucgaaaacgagcggacccuggacuuucaugacagcaaugugaagaaccuuuaugaaaaagucaagucucagcugaagaauaacgcuaaagagaucggcaaugggugcuucgaguuuuaccacaaguguaacgaugaaugcauggaguccgugaaaaauggcacauaugacuaccccaaguauagcgaagagucuaaacucucccgcgagaagauugauggaguuaagcuggaaagcaugggcguguaccaaauccuggccauuuauuccaccgucgccucuagccucgugcugcuuguuucccugggggcuaucucuuucuggaugugcagcaacggaucccuccaguguagaaucugcauuuga

SEQ ID NO: 193796 - RNA, 1698 nt, Artificial Sequence
  derived and/or modified CDS sequence (opt5) from hemagglutinin__InfluenzaA__ABS71673
augaaggugaaacugcucguccugcuuugcaccuucacagccacguacgcugacaccaucuguauuggcuaucacgccaacaauagcacagauaccguugacacagugcuggagaagaacgugaccgucacacauuccgugaaucuccuggaagauucucacaacgggaaacuuugccugcucaagggaaucgcgccccugcagcugggcaauuguagcguugcuggguggauucucggaaacccugagugcgaacugcuuaucuccaaagagucuuggagcuacauuguggaaaccccgaaucccgagaacggcacguguuauccuggguacuuugccgacuaugaggaacugagagagcaacucuccucugucagcuccuucgaacgguuugagaucuuccccaaggagagcucuuggccuaaucauaccgugacaggaguuuccgccagcugcucucacaacggccgcuccagcuuuuacagaaaucugcuuuggcugaccggcaagaacgggcucuaucccaaucugucuaaauccuacgcuaacaauaaggaaaaagaggugcugguccucuggggagugcaucacccuccgaacaucggcgaucagcgggcccuguaccacacagaaaacaccuaugugagcgucguuuccucucauuacagccgcagauucacgcccgagauugcuaagcggccuaaagugcgcgaccaggaagggagaaucaauuauuacuggacacuucuggagcccggagauaccauuaucuuugaggccaacggcaaucucauugcgccucgguucgccuuugcucugucccgcggguucggaagcggcaucauuacaucuaacgcccccauggacgaaugugaugcuaagugccagaccccgcaaggcgccaucaauuccagccuuccuuuucagaacgugcaccccgucaccaucggggaguguccuaaguaugugagaucugcgaaacugcggauggccacaggacuccgcaauauucccagcauccaguccagaggccuguucggggcuauugccggauuuaucgaaggcggguggacgggaaugguugacggcugguacggcuaucaucaccagaacgagcaagggucuggauacgcugccgaucaaaagagcacccagaaugccauuaacggcaucacaaauaaagugaacuccgucaucgaaaagaugaauacccaguucacagcuguggggaaagaguucagcaagcuggagcggcgcauggaaaaccucaauaaaaagguugacgauggauuucuggacauuuggaccuacaacgcggagcuucuggugcuccuggaaaacgagagaacgcuugacuuccacgauucuaaugucaagaaccuguaugaaaaagugaagucccagcucaaaaauaacgccaaggagaucggcaaugggugcuuugaguucuaccauaaauguaacgacgaaugcauggagagcgucaagaauggcacauaugauuaccccaaguauucugaagaguccaaacugaaccgggagaagauugacggagugaaacuggaaagcaugggcguuuaccagauccucgcuauuuauuccaccguggccucuagccugguccuucuggugucccucggggccaucucuuuuuggaugugcagcaauggaucccugcaguguagaaucugcauuuga

SEQ ID NO: 193797 - RNA, 1701 nt, Artificial Sequence; identical to SEQ ID NO: 192702
  derived and/or modified CDS sequence (opt5) from hemagglutinin__InfluenzaA__ABS71674

SEQ ID NO: 193798 - RNA, 1701 nt, Artificial Sequence
  derived and/or modified CDS sequence (opt5) from hemagglutinin__InfluenzaA__ABS71675
augaagaccaucauugcccugagcuacauccucugccugguguucgcucagaaacuucccggcaacgacaauuccacagccacgcugugucucgggcaccaugcggucccuaacggaaccauuguuaagacaaucaccaaugaucaaauugaggugacaaacgcuaccgaacuggugcagucuagcuccacaggcgggaucugcgacucuccgcaccagauccuugauggagagaauuguacccugauugacgcccuccugggcgauccccagugcgacggguuucaaaacaaaaagugggaucuguucgucgaaagaagcaaagcccauuccaauuguuauccuuacgacgugcccgauuaugcuucucuccggagccugguugccuccagcggaacgcuugaguuuaacaaugaaucuuucaacuggaccggcgugacacagaauggcaccuccagcgcuugcaagcgcagaucuaacaauuccuuuuucagccggcugaacuggcucacacaccugaaguuuaaauacccugcccuuaaugucaccaugcccaacaacgagaaguucgacaaacuguauaucuggggagugcaucacccugggacggauaaugaccagauuuuucucuacgcgcaggccucuggccgcaucacaguuuccaccaagagaagccaacagacagugauuccgaacaucgggucccggccccgcgucagaaauauuccuucucggaucagcaucuauuggaccauugugaaacccggagauauccugcugauuaacuccaccggcaaucucaucgcuccucgcggguacuucaagauuagaagcggaaagucuuccaucaugcggagcgacgcccccaucggcaaauguaacucugagugcauuacaccgaauggcagcaucccuaacgacaagcccuuucagaaugugaaccgcauuacguacggggcuuguccuagauaugucaaacagaauacccugaaacuugccacaggaaugcggaacguucccgaaaagcaaacccgcggcaucuucggggcgauugccggauuuaucgagaauggcugggaagggaugguggauggaugguacggcuucagacaccagaacuccgagggcaucgggcaggcugccgaccugaagucuacacaagcugccauuaaucagaucaacggaaaacucaaccggcugauuggcaagaccaaugagaaguuccaucagaucgaaaaagaguuuagcgaaguggaggggcgcauucaggaucuugaaaaguaugucgaggacacgaaaaucgaucugugguccuacaacgccgagcuccugguggcucuggaaaaucaacacacaauugaccucaccgauagcgagaugaacaagcuguucgaaagaaccaaaaagcagcuucgggagaaugcggaagacaugggaaacggcugcuuuaagaucuaucauaaaugugauaaugccugcaucgggucuauuagaaacggcacauacgaccacgauguuuaucgcgacgaggcucugaauaaccgguuccagaucaagggaguggagcucaaauccggcuacaaggacuggauucuguggaucagcuuugccauuucuugcuuccuucugugugucgcccuccugggguuuaucaugugggcuugccagaaaggaaauaucagauguaacauuugcaucuga

SEQ ID NO: 193799 - RNA, 1701 nt, Artificial Sequence
  derived and/or modified CDS sequence (opt5) from hemagglutinin__InfluenzaA__ABS71676
augaagaccaucauugcccugagcuacauccucugccugguguucgcucagaaacuucccggcauugacaacuccacagccacgcugugucucgggcaccaugcggucccuaauggaaccaucguuaagacaauuaccaacgaucaaaucgaggugacaaaugcuaccgaacuggugcagaacucuagcacaggcgggaucugcgacuccccgcaccagauucuugauggagagaauuguacccugaucgacgcccuccugggcgauccccagugcgacggguuucaaaacaaaaagugggaucuguucgucgaaagaucuaaagccuauagcaauuguuacccuuaugacgugcccgauuacgcuucccuccggucucugguugccagcuccggaacgcuugaguuuaacaaugaaucuuucaacuggaccggcgugacacagaauggcaccucuuccgcuugcaagcgcgggagcaacaauagcuuuuucuccagacugaacuggcucacacauagcaaguuuaaauauccugcccugaaugucaccaugcccaacaacgaggaguucgacaaacuuuacauuuggggagugcaccauccuggcacggauaaugaccagaucuuucuguaugcgcaggccucugggcggauuacaguuuccaccaagcgcagccaacagacagugaucccgaacauuggauccagaccccggguccgcaauaucccuucuagaaucagcauuuacuggaccaucgugaagcccggcgauauucuccugaucaacuccaccgggaaucugauugcuccucggggauacuucaucauccgcagcggcaaaucuuccauuaugagaagcgacgcccccaucggcaaguguaacucugaaugcauuacaccgaaugggagcaucccuaacgacaagcccuuucagaaugugaaccggauuacguauggagcuuguccucgcuacgucaaacagaauacccucaagcuggccacaggcaugagaaacguucccgagaaacaaacccgggggaucuucggagcgaucgccggcuuuauugaaaaugggugggagggaaugguggauggcugguauggcuuccgccaccagaacuccgaggggaucggacaggcugccgaccuuaagucuacacaagcugccauugaucagaucaauggcaaacugaacagacucauugggaagaccaacgaaaaauuccaccagaucgagaaggaauuuagcgagguggaaggacggauucaggaccuggagaaguacgucgaggauacgaaaaucgaccuuugguccuauaaugccgaacugcucguggcucuggagaaccaacauacaaucgaucugaccgacagcgaaaugaauaaacucuucgagaagaccaagaaacagcugagagaaaacgcggaggauaugggcaaugggugcuuuaagauuuaccacaagugugacaacgccugcaucggcucuauucgcaauggaacauaugaucaugacguuuaccgggacgaggcucuuaacaauagauuccagaucaaaggcguggaacugaaguccggguacaaagauuggauucucuggaucagcuuugccaucucuugcuuccugcuuugugucgcccugcucggauuuauuaugugggcuugccagaagggcaacauccgcuguaauauuugcaucuga

SEQ ID NO: 193800 - RNA, 1701 nt, Artificial Sequence
  derived and/or modified CDS sequence (opt5) from hemagglutinin__InfluenzaA__ABS71677
augaagaccaucauugcccugagcuacauccucugccugguguucgcucagaaacuucccggcauugacaacuccacagccacgcugugucucgggcaccaugcggucccuaauggaaccaucguuaagacaauuaccgaugaccaaaucgaggugacaaacgcuaccgaacuggugcaaaauucuagcacaggcgggaucugcgauuccccgcaccagauucuugacggagagaacuguacccugaucgaugcccuccugggcgacccccagugcgauggguuucagaauaaaaagugggaccuguucgucgaaagaucuaaagccuauagcaacuguuacccuuaugaugugcccgacuacgcuucccuccggucucugguugccagcuccggaacgcuugaguuuaauaacgaaucuuucaauuggaccggcgugacacagaacggcaccucuuccgcuugcaagcgcgggagcaauaacagcuuuuucuccagacugaauuggcucacacauagcaaguuuaaauauccugcccugaacgucaccaugcccaauaacgaggaguucgauaaacuuuacauuuggggagugcaccauccuggcacggacaacgaucagaucuuucuguaugcgcaggccucugggcggauuacaguuuccaccaagcgcagccaacagacagugaucccgaauauuggauccagaccccggguccgcaacaucccuucuagaaucagcauuuacuggaccaucgugaagcccggcgacauucuccugaucaauuccaccgggaaccugauugcuccucggggauacuucaaaauccgcagcggcaagucuuccaucaugagaagcgacgcccccauugauaaguguaauucugaaugcaucacaccgaacggcagcauuccuaaugacaaacccuuucagaacgugaaucggaucacguauggggcuuguccucgcuacgucaagcagaacacccucaaacuggccacaggaaugagaaauguucccgagaagcaaacccggggcauuuucggggcgaucgccggauuuaucgaaaacggcugggaggggaugguggauggaugguauggcuuccgccaccaaaauuccgagggcauugggcaggcugccgaccuuaaaucuacacaggcugccaucgaucagauuaacggaaagcugaauagacucaucggcaaaaccaacgaaaaguuccaccagauugagaaggaauuuagcgagguggaagggcggauccaggaccuggagaaauacgucgaggauacgaagauugaccuuugguccuauaacgccgaacugcucguggcucuggagaaucaacauacaaucgaucugaccgacagcgaaaugaacaaacucuucgagaagaccaaaaagcagcugagagaaaaugcggaggauaugggaaacggcugcuuuaagaucuaccacaaaugugacaaugccugcauugggucuauccgcaacggcacauaugaccaugauguuuaccgggacgaggcucuuaauaacagauuccagauuaagggaguggaacugaaauccggcuacaaggauuggauccucuggauuagcuuugccaucucuugcuuccugcuuugugucgcccugcucggguuuaucaugugggcuugccagaaaggaaauauucgcuguaacaucugcauuuga

SEQ ID NO: 193801 - RNA, 1701 nt, Artificial Sequence
  derived and/or modified CDS sequence (opt5) from hemagglutinin__InfluenzaA__ABS71679
augaagaccaucauugcccugagcuacauccucugccugguguucgcucagaaacuucccggcauugacaacuccacagccacgcugugucucgggcaccaugcggucccuaauggaaccaucguuaagacaauuaccaacgaucaaaucgaggugacaaaugcuaccgaacuggugcagucuagcuccacaggcgggaucugcgacucuccgcaccagauucuugauggagagaacuguacccugaucgacgcccuccugggcgauccccagugcgacggguuucaaaauaaaaagugggaucuguucgucgaaagaagcaaagccuauuccaacuguuacccuuaugacgugcccgauuacgcuucucuccggagccugguugccuccagcggaacgcuugaguuuaauaacgaaucuuucaauuggaccggcgugacacagaacggcaccuccagcgcuugcaagcgcgggucuaauaacuccuuuuucagcagacugaauuggcucacacauucuaaguuuaaauauccugcccugaacgucaccaugcccaauaacgaggaguucgacaaacuuuacauuuggggagugcaccauccuggcacggauaacgaccagaucuuucuguaugcgcaggccuccgggcggauuacaguuagcaccaagcgcucccaacagacagugaucccgaauauuggaucuagaccccggguccgcaacaucccuagcagaaucuccauuuacuggaccaucgugaagcccggcgauauucuccugaucaauagcaccgggaaccugauugcuccucggggauacuucaaaauccgcucuggcaaguccagcaucaugagaucugacgcccccauuggcaaguguaauagcgaaugcaucacaccgaacggguccauuccuaaugacaaacccuuucagaacgugaaucggaucacguauggagcuuguccucgcuacgucaagcagaacacccucaaacuggccacaggcaugagaaauguucccgagaagcaaacccgggggauuuucggagcgaucgccggcuuuaucgaaaacgggugggagggaaugguggauggcugguauggcuuccgccaccaaaauucugaggggauuggacaggcugccgaccuuaaaagcacacaggcugccaucgaucagauuaacggcaagcugaauagacucaucgggaaaaccaacgaaaaguuccaccagauugagaaggaauuuuccgagguggaaggacggauccaggaccuggagaaauacgucgaggauacgaagauugaccuuuggagcuauaacgccgaacugcucguggcucuggagaaucaacauacaaucgaucugaccgacucugaaaugaacaaacucuucgagaagaccaaaaagcagcugagagaaaaugcggaggauaugggcaacgggugcuuuaagaucuaccacaaaugugacaaugccugcauuggcuccauccgcaacggaacauaugaucaugacguuuaccgggacgaggcucuuaauaacagauuccagauuaagggcguggaacugaaaagcggguacaaggauuggauccucuggauuucuuuugccaucuccugcuuccugcuuugugucgcccugcucggauuuaucaugugggcuugccagaaaggcaauauucgcuguaacaucugcauuuga

SEQ ID NO: 193802 - RNA, 1701 nt, Artificial Sequence; identical to SEQ ID NO: 193801
  derived and/or modified CDS sequence (opt5) from hemagglutinin__InfluenzaA__ABS71680

SEQ ID NO: 193803 - RNA, 1701 nt, Artificial Sequence
  derived and/or modified CDS sequence (opt5) from hemagglutinin__InfluenzaA__ABS71682
augaagaccaucauugcccugagcuacauccucugccugguguucgcucagaaacuucccggcaacgacaauuccacagccacgcugugucucgggcaccaugcggucccuaacggaaccauuguuaagacaaucaccaaugaucaaauugaggugacaaacgcuaccgaacuggugcagucuagcuccacaggcgggaucugcgacucuccgcaccagauccuugauggagagaauuguacccugauugacgcccuccugggcgauccccagugcgacggguuucaaaacaaaaagugggaucuguucgucgaaagaagcaaagccuauuccaauuguuacccuuaugacgugcccgauuacgcuucucuccggagccugaucgccuccagcggaacgcuugaguuuaacaaugaaucuuucaacuggaccggcguuacacagaauggcaccuccagcgcuugcaagcgcagaucuaacaauuccuuuuucagccggcugaacuggcucacacaucugaaguuuaaauauccugcccuuaaugugaccaugcccaacaacgagaaguucgacaaacuguacauuuggggaguccaccauccugggacggauaaugaccagaucuuucucuaugcgcaggccucuggccgcauuacaguguccaccaagagaagccaacagacaguuaucccgaacauugggucccggccccgcgugagaaauaucccuucucggaucagcauuuacuggaccaucgucaaacccggagauauucugcugaucaacuccaccggcaaucucauugcuccucgcggguacuucaagaucagaagcggaaagucuuccaucaugcggagcgacgcccccauuggcaaauguaacucugagugcaucacaccgaauggcagcauuccuaacgacaagcccuuucagaaugugaaccgcaucacguauggggcuuguccuagauacgugaaacagaauacccugaaacuugccacaggaaugcggaacguccccgaaaaacaaacccgcggcauuuucggggcgaucgccggauuuaucgagaauggcugggaagggaugguugauggaugguauggcuucagacaccagaacuccgagggcauugggcaggcugccgaccugaagucuacacaagcugccaucgaucagauuaauggaaaacucaaccggcugaucggcaagaccaacgagaaguuccaccagauugaaaaagaguuuagcgaaguggaggggagaauccaggaccuugaaaaguacguggaggauacgaaaauugaccugugguccuauaaugccgagcuccuggucgcucuggaaaaccaacauacaaucgaucucaccgacagcgagaugaauaagcuguucgaaaagaccaagaagcagcuucgcgagaacgcggaagauaugggaaauggcugcuuuaaaaucuaccacaagugugacaacgccugcauugggucuauccggaauggcacauaugaucaugacguguacagagacgaggcucugaacaaucgcuuccagauuaaaggaguugagcucaaguccggcuacaaagauuggauccuguggauuagcuuugccaucucuugcuuccuucugugugugguccuccugggguuuaucaugugggccugccagaagggaaacauucgguguaauaucugcauuuga

SEQ ID NO: 193804 - RNA, 1701 nt, Artificial Sequence
  derived and/or modified CDS sequence (opt5) from hemagglutinin__InfluenzaA__ABU80177
augaagaccaucauugcccugagcuacauccucugccugguguucgcucagaaacuucccgucaacgacaauuccacagccacgcugugucucggccaccaugcgguuccuaacgggacccuggugaagacaauuaccaaugaucacaucgaggugacaaacgcuaccgaacuuguccaaucuagcuccacaggaagaauuugcgacucuccgcaucagauccuggauggcgagaauuguacccucaucgacgcccugcugggggauccccacugcgacggauuucagaacaaagaaugggaucucuucguggagcggagcacggccuauuccaauuguuacccuuaugacguucccgauuacgcuucucugcgcagccuuguggccuccagcggcacccuggaauuuaacaaugagucuuucaacuggacaggggucgcucagaauggaaccuccagcucuugcaagagacgguccauuaagagcuuuuucucucgccucaacuggcugcaucaacuuaaauauaaguacccugcccugaaugugacaaugcccaacaaugagaaauuugacaagcucuauaucuggggcguucaccacccuuccaccgauagcgaccagauuucccuguacgcgcaggccucuggcagagugacggucagcacaaaacggucccagcaaaccgugaucccgaacauugggagccgccccugggugagaggagucucuucccggaucagcauuuacuggacaaucguuaagccuggcgauauccugcucauuaacucuaccgggaaucugaucgcuccccgcggauauuucaaaauuagaagcggcaaguccucuaucaugcggagcaacgccccuauugggaaguguaauuccgaaugcaucacccccaacggaagcaucccgaaugacaaaccuuuucagaacgugaaucgcauuacauacggcgcuugucccagauaugugaagcagaacacgcuuaaacuggccaccggcaugcggaaugucccugagaagcagacacgcgggaucuucggagcgauugccggcuuuaucgaaaacgggugggagggaaugguggacggcugguacggguucagacaucaaaauucugagggaaccggccaggcugccgaucucaaauccacacaggcugccauuaaccaaaucaauggcaagcugaaccggcuuaucgagaaaaccaaugaaaaguuucaccagauugaaaaggaguucagcgaaguugaggggagaauccaggaccuggagaaauauguggaagauacgaagauugaccucuggucuuacaacgccgagcugcuggucgcucucgaaaaccagcauacaaucgaucugaccgacuccgagaugaauaaacuuuucgaacgcacccggaagcaacugagagagaacgcggaggauaugggaaauggcugcuuuaaaauuuaucacaagugugacaacgccugcaucgggagcauucgcaauggaacauacgaucacgacguguaccgggaugaagcucucaacaauagauuccagaucaagggcguugagcugaaauccggguauaaggacuggauccuuuggauuucuuuugccaucagcugcuuccugcucugugugguccugcugggcuuuauuaugugggccugccagaaaggaaacauccgcuguaauauuugcaucuga

SEQ ID NO: 193805 - RNA, 1698 nt, Artificial Sequence
  derived and/or modified CDS sequence (opt5) from hemagglutinin__InfluenzaA__ABU80298
augaaggugaaacugcucguccugcuuugcaccuucacagccacguacgcugacaccaucuguauuggcuaucacgccaacaauagcacagauaccguugacacagugcuggagaagaacgugaccgucacacauuccgugaaucuccuggaagauucucacaacgggaaacuuugccugcucaagggaaucgcgccccugcagcugggcaauuguagcguugcuggguggauucucggaaacccugagugcgaacugcuuaucuccaaagagucuuggagcuacauuguggaaaccccgaaucccgagaacggcacguguuauccuggguacuuugccgacuaugaggaacugagagagcaacucuccucugucagcuccuucgaacgguuugagaucuuccccaaggagagcucuuggccuaaucauaccgugacaggaguuuccgccagcugcucucacaacggcaaguccagcuuuuaccgcaaucugcuuuggcugaccggcaaaaacgggcucuaucccaaucugucuaaguccuacgcuaacaauaaagaaaaggaggugcugguccucuggggagugcaucacccuccgaacaucggcgaucagagagcccuguaccacacagaaaacgcuuaugugagcgucguuuccucucauuacagccggcgcuucacccccgagauugccaaaagaccuaaggugcgggaccaggaagggcgcaucaauuauuacuggacgcuucuggagcccggagauacaauuaucuuugaggcgaacggcaaucucauugccccuagauaugcuuucgcccugucccggggguuuggaagcggcaucauuaccucuaacgcucccauggacgaaugugaugccaagugccagacaccgcaaggcgcgaucaauuccagccuuccuuuccagaacgugcaccccgucaccaucggggaguguccuaaauacgugcgcucugccaagcugagaauggcuaccggacuccggaauauucccagcauccagucccgcggccuguuuggggccauugcuggauucaucgaaggcggguggacaggaaugguugacggcugguauggcuaccaucaccagaacgagcaagggucuggauacgccgccgaucagaaaagcacgcagaaugcuauuaacggcaucaccaauaaggugaacuccgucaucgaaaagaugaauacacaguuuaccgcgguggggaaagaguucaacaaacuggagagacggauggaaaaucucaacaagaagguugacgauggauuccuggacauuuggacauauaacgccgagcuucuggugcuccuggaaaaugagcgcacccuugacuuucacgauagcaacgucaaaaaucuguacaagaaagugaagucucaacucaaaaacaaugcuaaggaaaucggcaacgggugcuucgaguuuuaucauaaguguaauaacgagugcauggaauccgucaaaaauggcacguacgacuaucccaaguacagcgaggaaucuaaacugaacagagagaagauugauggagugaaacuggaguccaugggcguuuaucagauccucgccauuuacagcacaguggccuccucucugguccuucuggugagccucggggcuaucuccuucuggaugugcucuaauggaagccugcagugucggaucugcauuuga

SEQ ID NO: 193806 - RNA, 1701 nt, Artificial Sequence
  derived and/or modified CDS sequence (opt5) from hemagglutinin__InfluenzaA__ABU80320
augaagaccaucauugcccugagcuacauccucugccugguguucgcucagaaacuucccggcaacgacaauuccacagccacgcugugucucgggcaccaugcggucccuaacggaacccugguuaagacaauuaccaaugaucaaaucgaggugacaaacgcuaccgaacuugugcagucuagcuccacaggcgggauuugcgacucuccgcaccagauccuggauggagagaauuguacccucaucgacgcccugcugggcgauccccauugcgacagcuuucagaacaaagaaugggaucucuucgucgagagauccaaggccuauucuaauuguuacccuuaugacgugcccgauuacgcuagccugcggucccuuguugccagcucugggacgcuggaauuuaacaaugaguccuucaacuggaccggaguggcucaaaauggcacaagcucugccugcaaacgcagauccaacaagagcuuuuucucucggcucaauuggcugcaccagcuuaaguauaaauacccugcgcugaacgucaccaugcccaauaacgagaaguuugacaaacucuauauuuggggcgugcaucacccuuccacagauagcgaccagaucucccuguacgcccaggcuccggggcgcguuaccgugucuacgaagagaagccaacagacagucauucccaacaucggaucccggccuugggugcgcggcgugagcucuauuaucuccauuuacuggaccaucgucaaacccggggauauccugcucauuaauuguacaggaaaccugaucgccccuagaggcuauuucaagauucggagcgggaagucuagcaucaugcgcuccgacgcuucuauuggaaaaugcaauagcgaauguaucacccccaacggcuccaucccgaaugacaagccuuuucagaacguuaauagaauuaccuacggcgccugcccccgguaugugaaacagaacacacuuaagcuggcgacggggaugcgcaaugugccugagaaacaaaccagaggaaucuucggcgccauugcuggguuuaucgaaaacggaugggagggcauggucgaugggugguacggauuccggcaccagaauagcgagggcacaggccaggccgcugaccucaagucuacccaagccgccauuaaccagaucaaugggaaacugaaccgccuuaucgaaaagacaaaugagaaguuucaucagauugaaaaagaguucuccgaaguggagggaagaauccaggaucuggagaaguauguugaagacaccaaaauugaucucuggagcuacaacgcugagcugcugguggcgcucgaaaaccaacacacgaucgaccugacagauucugagaugaauaaacuuuucgaacggaccaagaagcagcugagagagaacgccgaggacaugggcaauggguguuuuaagauuuaucauaaaugcgauaacgcuugcaucggauccauucgcaauggcaccuacgaccacgaugucuaccgggacgaagcccucaacaauagauuccagaucaaggggguggagcugaaaagcggcuauaaggacuggauccuuuggauuuccuuugccaucucuuguuuccugcucugcguugugcugcugggauuuauuaugugggcuugucagaaaggcaacauccgcugcaauauuuguaucuga

SEQ ID NO: 193807 - RNA, 1701 nt, Artificial Sequence; identical to SEQ ID NO: 193111
  derived and/or modified CDS sequence (opt5) from hemagglutinin__InfluenzaA__ABU80331

SEQ ID NO: 193808 - RNA, 1701 nt, Artificial Sequence
  derived and/or modified CDS sequence (opt5) from hemagglutinin__InfluenzaA__ABU80400
augaaggccauccugcucgugcugcuuuacaccuucacagcugccaacgcggacacgcugugcauuggcuaucacgcuaauaacagcaccgauacagucgacaccguucucgagaaaaaugugacagugacccauuccgucaaccugcuugaagauagacacaaugggaagcuguguaaacuccggggaguggcuccccugcaucugggcaagugcaacaucgccggguggcuccugggaaauccugagugugaacuucuguuuacagccucuagcugguccuacauuguugagaccucuaacagcgacaauggcacgugcuauccgggggauuucaucaacuacgaagaacuccgcgagcagcuguccucugugagcuccuuugaaagauucgagauuuuucccaaagccagcucuuggccuaaucacgaaaccaaccggggagucacagcugccugucccuaugcgggcgccaauuccuucuaccgcaaccuuaucuggcuggugaagaagggcaauagcuauccuaaacucucuaaguccuacguuaacaacaaagagaaggaggugcugguccugugggggauccaucaucccccuaccagcacagaccaacagucucucuaccagaaugcugaugccuauguguuugugggauccagcaaauacaacaagaaguucaaaccggaaauugcuaccagacccaagguccggggccaggccgggcgcaugaauuauuacuggacgcugguugagccuggagacacaaucaccuuugaagcgacaggcaaccuuguggugcccagauaugccuucgcuaugaaacggggguccggaucuggcauuaucauuagcgauaccccuguccacgacugcaauaccacaugucaaacgcccaagggcgccaucaacaccucccugccguuucagaauauucacccugugacaaucggggagugccccaaauacguuaagagcaccaaacuccgcauggcuacaggacugagaaacaucccuucuauucagucccggggccuuuucggggccaucgccggauuuauugaaggcggguggaccggaaugaucgauggcugguauggcuaccaccaucagaaugagcaagggagcggauacgcugcggaccgcaagucuacgcagaacgccauugauggcaucacaaauaaggugaacagcgucaucgagaaaaugaauacccaguucaccgcuguggggaaggaguucaaccaccuggagaaaagaauugaaaaucucaaccggaagguugacgacggauuucuggauaucuggacauauaacgccgagcugcucgugcugcuugaaaaugagcgcacccuggacuaccacgauuccaacgucaaaaaucucuaugagaaggugagaucucagcugaagaacaaugccaaagaaauuggcaacggguguuucgaguuuuaccauaagugcgacgauacauguauggaaagcgucaaaaauggcacguaugacuaccccaaguauuccgaggaaagcaaacuuaaccgggaggagaucgauggagugaagcuggaaucuaccagaauuuaccaaauccucgcuaucuacuccacaguugccagcucucuggugcugcucgucucccugggcgcgauuagcuucuggaugugcuccaaugggucucuucagugccgcaucuguauuuga

SEQ ID NO: 193809 - RNA, 1701 nt, Artificial Sequence
  derived and/or modified CDS sequence (opt5) from hemagglutinin__InfluenzaA__ABU92572
augaagaccaucauugcccugagcuacauccucugccugguguucacacagaaacuucccggcaacgacaauuccacggcuacccugugucucgggcaccaugccgucccuaacggaacacugguuaagaccauuacaaaugaucaaaucgaggugaccaacgcgacagaacuugugcagucuagcuccaccggcagaauuugcgacucuccgcaccagauccuggauggggagaauuguacgcucaucgacgcucugcugggagauccccauugcgacggcuuucagaacaaagaaugggaucucuucgucgagcggagcaaggccuauuccaauuguuacccuuaugacgugcccgauuacguuucucugcgcagccuuguggccuccagcgggacccuggaauuuaacaaugagucuuucaacuggacaggagucgcucaaaauggcaccuccagcgccugcaaaagacggucugacaaguccuuuuucagccgccucaacuggcugcaccagcuuaaguauaaauacccugcucugaaugugacaaugcccaacaaugagaaguuugauaaacucuauauuuggggcguucaucacccugggaccgacucugaucagaucucccuguacgcccaggcgagcggaagagugacggucuccacaaagcggucucaacagaccgugauuccgaacaucggcagccgccccugggugagaggggucuccagccggauuucuaucuacuggacaauuguuaaaccuggagacauccugcucaucaacuccaccggcaaucugauugcccccagaggguauuucaagaucagaagcggaaagucuagcauuaugcgguccgacgcuccuaucggcaaauguaacucugaaugcauuacccccaauggcagcaucccgaacgauaagccuuuucagaaugugaaccgcaucacauacgggcccuguccuagauaugugaaacagaauacgcuuaagcuggccaccggaaugcggaacguccccgagaaacaaacacgcggcauuuucggggcuaucgccggauuuauugaaaauggcugggaggggaugauggacggaugguacggcuucagacaccagaacuccgagggcaccgggcaggcggccgaucucaagagcacacaagcugccaucaaucagauuaacggaaaacugaaucggcuuaucgaaaagaccaacgagaaguuucaucagaucgaaaaagaguucucugaaguggagggccgcauucaggaccuggagaaguauguugaagauacgaaaaucgaccucugguccuacaaugcugagcugcugguggcccucgaaaaccaacacacaauugaucugaccgacagcgagaugaacaaacuuuucgaacgcaccaagaagcagcugcgggagaaugccgaggauauggggaacggaugcuuuaagaucuaucauaaaugugacaaugcuugcauuggcucuaucagaaacgggacauacgaucacgacgucuaccgcgacgaagcgcucaauaaccgguuccagauuaagggcguggagcugaaauccggauauaaggauuggauccuuuggaucagcuuugccauuuccugcuuccugcucuguaucguucugcugggcuuuauuaugugggcuugccagaaagggaauaucagauguaacauuugcaucuga

SEQ ID NO: 193810 - RNA, 1701 nt, Artificial Sequence
  derived and/or modified CDS sequence (opt5) from hemagglutinin__InfluenzaA__ABU92573
augaagaccaucauugcccugagcuacauccucugccugguguucgcucagaaacuucccggcaacgacaauuccacagccacgcugugucucgggcaccaugcggucccuaacggaacccugguuaagacaauuaccaaugaucaaaucgaggugacaaacgcuaccgaacuugugcagucuagcuccacaggcagaauuugcgacucuccgcaccagauccuggauggggagaauuguacccucaucgacgcccugcugggagauccccauugcgacggcuuucagaacaaagaaugggaucucuucgucgagcggagcaaggccuauuccaauuguuacccuuaugacgugcccgauuacguuucucugcgcagccuuguggcuuccagcgggacgcuggaauuuaacaaugagucuuucaacuggaccggagucgcccaaaauggcacauccagcgcuugcaaaagacggucugacaaguccuuuuucagccgccucaacuggcugcaccagcuuaaguauaaauacccugcccugaaugugaccaugcccaacaaugagaaguuugauaaacucuauauuuggggcguucaucacccugggacagacucugaucagaucucccuguacgcgcaggccagcggaagagugaccgucuccacgaagcggucucaacagacagugauuccgaacaucggcagccgccccugggugagaggggucuccagccggauuucuaucuacuggaccauuguuaaaccuggagacauccugcucaucaacuccacaggcaaucugauugcuccccgcggguauuucaagaucagaagcggaaagucuagcauuaugcgguccgacgccccuaucggcaaauguaacucugaaugcauuacccccaauggcagcaucccgaacgggaagccuuuucagaaugugaaccgcaucaccuacggagcuugucccagauaugugaaacagaauacacuuaagcuggccacgggcaugcggaacgucccugagaaacaaacccgcgggauuuucggagcgaucgccggcuuuauugaaaaugggugggagggaaugauggauggcugguacggcuucagacaccagaacuccgaggggacaggacaggcugccgaccucaagagcacccaagcugccaucaaucagauuaacggcaaacugaaucggcuuaucaagaagacaaacgaaaaauuucaucagaucgagaaggaguucucugaaguggaagggcgcauucaggaucuggagaaauauguugaggacaccaagaucgaucucugguccuacaaugccgaacugcugguggcucucgagaaccaacacacgauugaccugacagauagcgaaaugaacaaacuuuucgagagaaccaagaagcagcugcgggaaaaugcggaggacaugggaaacggcugcuuuaaaaucuaucauaagugugauaaugccugcauugggucuaucagaaacggcaccuacgaccacgaugucuaccgcgacgaggcucucaauaaccgguuccagauuaaaggaguggaacugaaguccggcuauaaagacuggauccuuuggaucagcuuugccauuuccugcuuccugcucuguaucguucugcugggguuuauuaugugggccugccagaagggaaauaucagauguaacauuugcaucuga

SEQ ID NO: 193811 - RNA, 1701 nt, Artificial Sequence
  derived and/or modified CDS sequence (opt5) from hemagglutinin__InfluenzaA__ABU92575
augaagaccaucauugcccugagcuacauccucugccugguguucgcucagaaacuucccggcaacgacaauuccacagccacgcugugucucgggcaccaugcggucccuaacggaacccugguuaagacaauuaccaaugaucaaaucgaggugacaaacgcuaccgaacuugugcagucuagcuccacaggcagaauuugcgacucuccgcaccagauccuggauggggagaauuguacccucaucgacgcccugcugggagauccccauugcgacggcuuucagaacaaagaaugggaucucuucgucgagcggagcaaggccuauuccaauuguuacccuuaugacgugcccgauuacguuucucugcgcagccuuguggcuuccagcgggacgcuggaauuuaacaaugagucuuucaacuggaccggagucgcccaaaauggcacauccagcgcuugcaaaagacggucugacaaguccuuuuucagccgccucaacuggcugcaccagcuuaaguauaaauacccugcccugaaugugaccaugcccaacaaugagaaguuugauaaacucuauauuuggggcguucaucacccugggacagacucugaucagaucucccuguacgcgcaggccagcggaagagugaccgucuccacgaagcggucucaacagacagugauuccgaacaucggcagcaaacccugggugcgcggggucuccagcagaauuucuaucuacuggaccauuguuaagccuggagacauccugcucaucaacuccacaggcaaucugauugcuccccggggguauuucaagauccgcagcggaaaaucuagcauuaugagauccgacgccccuaucggcaaguguaacucugaaugcauuacccccaauggcagcaucccgaacgauaaaccuuuucagaaugugaaccggaucaccuacgggcccuguccucgcuaugugaagcagaauacacuuaaacuggcuacgggaaugagaaacguccccgagaagcaaacccggggcauuuucggggccaucgcgggauuuauugaaaauggcugggaggggaugauggacggaugguacggcuuccgccaccagaacuccgagggcacagggcaggccgcugaucucaaaagcacccaagccgcuaucaaucagauuaacggaaagcugaauagacuuaucgaaaagacaaacgagaaauuucaucagaucgaaaaggaguucucugaaguggagggccggauucaggaccuggagaaauauguugaagauaccaagaucgaccucugguccuacaaugccgagcugcugguggcccucgaaaaccaacacacgauugaucugacagacagcgagaugaacaaacuuuucgaaagaaccaagaagcagcugcgcgagaaugcugaggauauggggaacggaugcuuuaaaaucuaucauaagugugacaaugcgugcauuggcucuauccggaacgggaccuacgaucacgacgucuacagagacgaagcccucaauaaccgcuuccagauuaaaggcguggagcugaaguccggauauaaagauuggauccuuuggaucagcuuugcuauuuccugcuuccugcucuguaucguucugcugggcuuuauuaugugggccugccagaaggggaauauccgguguaacauuugcaucuga

SEQ ID NO: 193812 - RNA, 1701 nt, Artificial Sequence; identical to SEQ ID NO: 192123
  derived and/or modified CDS sequence (opt5) from hemagglutinin__InfluenzaA__ABU92576

SEQ ID NO: 193813 - RNA, 1701 nt, Artificial Sequence; identical to SEQ ID NO: 192123
  derived and/or modified CDS sequence (opt5) from hemagglutinin__InfluenzaA__ABU92577

SEQ ID NO: 193814 - RNA, 1701 nt, Artificial Sequence; identical to SEQ ID NO: 192144
  derived and/or modified CDS sequence (opt5) from hemagglutinin__InfluenzaA__ABU92578

SEQ ID NO: 193815 - RNA, 1701 nt, Artificial Sequence; identical to SEQ ID NO: 192144
  derived and/or modified CDS sequence (opt5) from hemagglutinin__InfluenzaA__ABU92579

SEQ ID NO: 193816 - RNA, 1701 nt, Artificial Sequence; identical to SEQ ID NO: 192144
  derived and/or modified CDS sequence (opt5) from hemagglutinin__InfluenzaA__ABU92580

SEQ ID NO: 193817 - RNA, 1701 nt, Artificial Sequence; identical to SEQ ID NO: 193809
  derived and/or modified CDS sequence (opt5) from hemagglutinin__InfluenzaA__ABU92581

SEQ ID NO: 193818 - RNA, 1701 nt, Artificial Sequence
  derived and/or modified CDS sequence (opt5) from hemagglutinin__InfluenzaA__ABU92582
augaagaccaucauugcccugagcuacauccucugccugguguucgcucagaaacuucccggcaacgacaauuccacagccacgcugugucucgggcaccaugcggucccuaacggaacccugguuaagacaauuaccaaugaucaaaucgaggugacaaacgcuaccgaacuugugcagucuagcuccacaggcagaauuugcgacucuccgcaccagauccuggauggggagaauuguacccucaucgacgcccugcugggagauccccauugcgacggcuuucagaacaaagaaugggaucucuucgucgagcggagcaaggccuauuccaauuguuacccuuaugacgugcccgauuacguuucucugcgcagccuuguggcuuccagcgggacgcuggaauuuaacaaugagucuuucaacuggaccggagucgcccaaaauggcacauccagcgcuugcaaaagacggucugacaaguccuuuuucagccgccucaacuggcugcaccagcuuaaguauaaauacccugcccagaaugugaccaugcccaacaaugagaaguuugauaaacuguauauuuggggcguucaucacccugggacagacucugaucagaucucccucuacgcgcaagccagcggaagagugaccgucuccacgaagcggucucagcagacagugauuccgaacaucggcagccgccccugggugagaggggucuccagccggauuucuaucuacuggaccauuguuaaaccuggagacauccugcugaucaacuccacaggcaaucucauugcuccccgcggguauuucaagaucagaagcggaaagucuagcauuaugcgguccgacgccccuaucggcaaauguaacucugaaugcauuacccccaauggcagcaucccgaacgauaagccuuuucagaaugugaaccgcaucaccuacggggcuugucccagauaugugaaacaaaauacacugaagcuggccacgggaaugcggaacgucccugagaaacagacccgcggcauuuucggggcgaucgccggauuuauugaaaauggcugggaggggaugauggacggaugguacggcuucagacaccagaacuccgagggcacagggcaagcugccgaucuuaagagcacccaggcugccaucaaucagauuaacggaaaacucaaucggcugaucgaaaagacaaacgagaaguuucaucagaucgaaaaagaguucucugaaguggagggccgcauucaagaccuugagaaguauguugaagauaccaaaaucgaccugugguccuacaaugccgagcuccugguggcucuggaaaaccagcacacgauugaucucacagacagcgagaugaacaagcuguucgaaagaaccaaaaagcagcuucgggagaaugcggaggauauggggaacggaugcuuuaagaucuaucauaaaugugacaaugccugcauuggcucuaucagaaacgggaccuacgaucacgacgucuaccgcgacgaagcucugaauaaccgguuccagauuaagggcguggagcucaaauccggauauaaggauuggauccuguggaucagcuuugccauuuccugcuuccuucuguguaucguucuccugggcuuuauuaugugggccugccaaaaagggaauaucagauguaacauuugcaucuga

SEQ ID NO: 193819 - RNA, 1701 nt, Artificial Sequence; identical to SEQ ID NO: 193818
  derived and/or modified CDS sequence (opt5) from hemagglutinin__InfluenzaA__ABU92583

SEQ ID NO: 193820 - RNA, 1701 nt, Artificial Sequence
  derived and/or modified CDS sequence (opt5) from hemagglutinin__InfluenzaA__ABU92584
augaagaccaucauugcccugagcuacauccucugccugguguucgcucagaaacuucccggcaacgacaauuccacagccacgcugugucucgggcaccaugcggucccuaacggaacccugguuaagacaauuaccaaugaucaaaucgaggugacaaacgcuaccgaacuugugcagucuagcuccacaggcagaauuugcgacucuccgcaccagauccuggauggggagaauuguacccucaucgacgcccugcugggagauccccauugcgacggcuuucagaacaaagaaugggaucucuucgucgagcggagcaaggccuauuccaauuguuacccuuaugacgugcccgauuacguuucucugcgcagccuuguggcuuccagcgggacgcuggaauuuaacaaugagucuuucaacuggaccggagucgcccaaaauggcacauccagcgcuugcaaaagacggucugacaaguccuuuuucagccgccucaacuggcugcaccagcuuagauauaaguacccugcccugaaugugaccaugcccaacaaugagaaauuugauaagcucuauauuuggggcguucaucacccugggacagacucugaucagaucucccuguacgcgcaggccagcggacgggugaccgucuccacgaaacgcucucaacagacagugauuccgaacaucggcagcagacccugggugcgcggggucuccagccggauuucuaucuacuggaccauuguuaagccuggagacauccugcucaucaacuccacaggcaaucugauugcucccagaggguauuucaaaauccggagcggaaagucuagcauuaugcgcuccgacgccccuaucggcaaguguaacucugaaugcauuacccccaauggcagcaucccgaacgauaaaccuuuucagaaugugaacagaaucaccuacggggcuuguccccgguaugugaagcagaaaacacuuaagcuggccacgggaaugcgcaaugucccugagaaacaaaccagaggcauuuucggggcgaucgccggauuuauugaaaacggcugggaggggaugauggacggaugguacggcuuccggcaccaaaauuccgagggcacagggcaggcugccgaucucaagagcacccaggcugccaucaaccagauuaauggaaaacugaacagacuuaucgaaaagacaaaugagaaguuucaucagaucgaaaaagaguucucugaaguggagggccgcauucaggaccuggagaaguauguugaagauaccaaaaucgaccucugguccuacaacgccgagcugcugguggcucucgaaaaucaacacacgauugaucugacagacagcgagaugaacaaacuuuucgaacggaccaagaagcagcugagagagaacgcggaggauauggggaauggaugcuuuaagaucuaucauaaaugugacaacgccugcauuggcucuauccgcaaugggaccuacgaucacgacgucuaccgggacgaagcucucaacaauagauuccagauuaagggcguggagcugaaauccggauauaaggauuggauccuuuggaucagcuuugccauuuccugcuuccugcucuguaucguucugcugggcuuuauuaugugggccugccagaaagggaacauccgcuguaauauuugcaucuga

SEQ ID NO: 193821 - RNA, 1701 nt, Artificial Sequence
  derived and/or modified CDS sequence (opt5) from hemagglutinin__InfluenzaA__ABU92586
augaagaccaucauugcccugagcuacauccucugccugguguucgcucagaaacuucccggcaacgacaauuccacagccacgcugugucucgggcaccaugcggucccuaacggaaccauuguuaagacaaucaccaaugaucaaauugaggugacaaacgcuaccgaacuggugcagucuagcuccacaggcgggaucugcgacucuccgcaccagauccuugauggagagaauuguacccugauugacgcccuccugggcgauccccagugcgacggguuucaaaacaaaaagugggaucuguucgucgaaagaagcaaagccuauuccaauuguuacccuuaugacgugcccgauuacgcuucucuccggagccugaucgccuccagcggaacgcuugaguuuaacaaugaaucuuucaacuggaccggcguuacacagaauggcaccuccagcgcuugcaagcgcagaucuaacuccagcuuuuucucucggcugaauuggcucacacaucugaaguuuaaauauccugcccuuaacgugaccaugcccaauaacgaggaguucgacaagcuguacauuuggggaguccaccauccugggacggauaacgaccagaucucccucuaugcgcaggccagcggccgcauuacaguguccaccaaaagaucucaacagacaguuaucccgaauauugggagccggccccgcgugagagauaucccuucccggaucagcauuuacuggaccaucgucaagcccggagacauucugcugaucaacucuaccggcaaucucauugcuccucgcggguacuuuaaaaucagauccggaaagagcucuaucaugcggagcgacgcccccauuggcaaguguaacuccgaaugcaucacaccgaauggcucuauuccuaacgauaaacccuuccagaaugugaaccgcaucacguauggggcuuguccuagauacgugaagcagaauacccugaaacuugccacaggaaugcggaacguccccgagaagcaaacccgcggcauuuuuggggcgaucgccggauucaucgaaaauggcugggaggggaugguugacggaugguauggcuuuagacaccagaacagcgagggcauugggcaggcugccgaucugaaauccacacaagcugccaucgaccagauuaauggaaagcucaaccggcugaucggcaaaaccaaugaaaaguuccaccagauugagaaggaguucagcgaaguggaagggagaauccaggaucuugagaaauacguggaggacacgaagauugaucuguggucuuauaacgccgaacuccuggucgcucuggagaaccaacauacaaucgaccucaccgauuccgaaaugaauaaacuguuugagcgcaccaagaaacagcuucgggaaaacgcggaggacaugggaaauggcugcuucaagaucuaccacaagugugauaacgccugcauugggagcaucagaaauggcacauaugaccaugacguguaccgcgaugaggcucugaacaaucgguuucagauuaaaggaguugaacucaagucuggcuacaaaaacuggauccuguggauuuccuucgccaucagcugcuuucuucuguguguggcccuccugggguucaucaugugggcuugccagaagggaaauauuagauguaacaucugcauuuga

SEQ ID NO: 193822 - RNA, 1701 nt, Artificial Sequence
  derived and/or modified CDS sequence (opt5) from hemagglutinin__InfluenzaA__ABU92587
augaagaccaucauugcccugagcuacauccucugccugguguucgcucagaaacuucccggcaacgacaauuccacagccacgcugugucucgggcaccaugcggucccuaacggaaccauuguuaagacaaucaccaaugaucaaauugaggugacaaacgcuaccgaacuggugcagucuagcuccacaggcgggaucugcgacucuccgcaccagauccuugauggagagaauuguacccugauugacgcccuccugggcgauccccagugcgacggguuucaaaacaaaaagugggaucuguucgucgaaagaagcaaagccuauuccaauuguuacccuuaugacgugcccgauuacgcuucucuccggagccugaucgccuccagcggaacgcuugaguuuaacaaugaaucuuucaacuggaccggcguuacacagaauggcaccuccagcgcuugcaagcgcagaucuaacuccagcuuuuucucucggcugaauuggcucacacaucugaaguuuaaauauccugcccuuaacgugaccaugcccaauaacgaggaguucgacaagcuguacauuuggggaguccaccauccugggacguauaacgaucagaucucccucuacgcgcaggccagcggccgcauuacaguguccaccaaaagaucucaacagacagcuaucccgaauauugggagccggccccgcguuagagacaucccuucccggaucagcauuuacuggaccaucgugaagcccggagauauucugcugaucaacucuaccggcaaucucauugccccucgcggguauuuuaaaaucagauccggaaagagcucuaucaugcggagcgacgcucccauuggcaaguguaacuccgaaugcaucacaccgaauggcucuauuccuaacgacaaacccuuccagaaugucaaccgcaucacguacggggccuguccuagauaugugaagcagaauacccugaaacuugcgacaggaaugcggaacgugcccgagaagcaaacccgcggcauuuuuggggccaucgcuggauucaucgaaaauggcugggaggggauggucgauggaugguacggcuuuagacaccagaacagcgagggcauugggcaggccgcugaccugaaauccacacaagccgccaucgaucagauuaauggaaagcucaaccggcugaucggcaaaaccaaugaaaaguuccaccagauugagaaggaguucagcgaaguugaagggagaauccaggaccuugagaaauauguggaggauacgaagauugaccuguggucuuacaacgcugaacuccugguggcgcuggagaaccaacauacaaucgaucucaccgacuccgaaaugaauaaacuguuugagcgcaccaagaaacagcuucgggaaaacgccgaggauaugggaaauggcugcuucaagaucuaucacaagugugacaacgcuugcauugggagcaucagaaauggcacauacgaucaugacgucuaccgcgacgaggcccugaacaaucgguuucagauuaaaggaguggaacucaagucuggcuauaaagauuggauccuguggauuuccuucgccaucagcugcuuucuucuguguguugcucuccugggguucaucaugugggccugccagaagggaaacauuagauguaauaucugcauuuga

SEQ ID NO: 193823 - RNA, 1701 nt, Artificial Sequence
  derived and/or modified CDS sequence (opt5) from hemagglutinin__InfluenzaA__ABU92588
augaagaccaucauugcccugagcuacauccucugccugguguucgcucagaaacuucccggcaacgacaauuccacagccacgcugugucucgggcaccaugcggucccuaacggaaccauuguuaagacaaucaccaaugaucaaauugaggugacaaacgcuaccgaacuggugcagucuagcuccacaggcgggaucugcgacucuccgcaccagauccuugauggagagaauuguacccugauugacgcccuccugggcgauccccagugcgacggguuucaaaacaaaaagugggaucuguucgucgaaagaagcaaagccuauuccaauuguuacccuuaugacgugcccgauuacgcuucucuccggagccugguugccuccagcggaacgcuugaguuuaacaaugaaucuuucaacuggaccggcgugacacagaauggcaccuccagcgcuugcaagcgcaagucuaacaauuccuuuuucagcagacugaacuggcucacacaucugaaauuuaaguauccugcccuuaaugucaccaugcccaacaacgagaaauucgacaagcuguacaucuggggagugcaccauccugggacggauaaugaccagauuucucucuaugcgcaggccuccggccggaucacaguuagcaccaaacgcucccaacagacagugauuccgaacaucgggucuagaccccggguccgcgauauuccuagcagaaucuccaucuacuggaccauugugaagcccggagacauccugcugauuaauagcaccggcaaccucaucgcuccucggggguacuuuaagauucgcucuggaaaauccagcaucaugagaucugacgcccccaucggcaaguguaauagcgagugcauuacaccgaacggcuccaucccuaaugauaaacccuuccagaacgugaaucggauuacguauggggcuuguccucgcuacgucaagcagaacacccugaaacuugccacaggaaugagaaauguucccgaaaagcaaacccggggcaucuuuggggcgauugccggauucaucgagaacggcugggaagggaugguggacggaugguauggcuuucgccaccagaauagcgagggcaucgggcaggcugccgaucugaaaagcacacaagcugccauuaaccagaucaauggaaagcucaacagacugauuggcaagaccaacgagaaauuccaccagaucgaaaaggaguucuccgaaguggaggggcggauucaggaccuugaaaaauacgucgaggauacgaagaucgaccuguggagcuauaaugccgaguuucucguggcucuggaaaaccaacauacaauugaucugaccgacucugagaugaauaaacucuucgaaagaaccaagaagcagcugcgcgagaacgcggaagauaugggaaauggcugcuuuaaaaucuaccacaagugugacaacgccugcaucggguccauucggaauggcacauaugaucaugacguuuacagagacgaggcucuuaacaaucgcuuccagaucaaaggaguggagcugaagucuggcuacaaagauuggauucucuggaucucuuuugccauuuccugcuuccugcuuugugucgcccugcucggguuuaucaugugggcuugccagaagggaaacauccgguguaauauuugcaucuga

SEQ ID NO: 193824 - RNA, 1701 nt, Artificial Sequence; identical to SEQ ID NO: 192705
  derived and/or modified CDS sequence (opt5) from hemagglutinin__InfluenzaA__ABU92590

SEQ ID NO: 193825 - RNA, 1701 nt, Artificial Sequence
  derived and/or modified CDS sequence (opt5) from hemagglutinin__InfluenzaA__ABU92591
augaagaccaucauugcccugagcuacauccucugccugguguucgcucagaaacuucccggcaacgacaauuccacagccacgcugugucucgggcaccaugcggucccuaacggaaccauuguuaagacaaucaccaaugaucaaauugaggugacaaacgcuaccgaacuggugcagucuagcuccacaggcgggaucugcgacucuccgcaccagauccuugauggagagaauuguacccugauugacgcccuccugggcgauccccagugcgacggguuucaaaacaaaaagugggaucuguucgucgaaagaagcaaagccuauuccaauuguuacccuuaugacgugcccgauuacgcuucucuccggagccugaucgccuccagcggaacgcuugaguuuaacaaugaaucuuucaacuggaccggcguuacacagaauggcaccuccagcgcuugcaagcgcagaucuaacuccagcuuuuucucucggcugaauuggcucacacaucugaaguuuaaauauccugcccuuaacgugaccaugcccaauaacgaggaguucgacaagcuguacauuuggggaguccaccauccugggacggauaacgaccagaucucccucuaugcgcaggccagcggccgcauuacaguguccaccaaaagaucucaacagacaguuaucccgaauauugggagccggccccgcgugagagauaucccuucccggaucagcauuuacuggaccaucgucaagcccggagacauucugcugaucaacucuaccggcaaucucauugcuccucgcggguacuuuaaaaucagauccggaaagagcucuaucaugcggagcgacgcccccauuggcaaguguaacuccgaaugcaucacaccgaauggcucuauuccuaacgauaaacccuuccagaaugugaaccgcaucacguauggggcuuguccuagauacgugaagcagaauacccugaaacuugccacaggaaugcggaacguccccgagaagcaaacccgcggcauuuuuggggcgaucgccggauucaucgaaaauggcugggaggggaugguugacggaugguauggcuuuagacaccagaacagcgagggcauugggcaggcugccgaucugaaauccacacaagcugccaucgaccagauuaauggaaagcucaaccggcugaucggcaaaaccaaugaaaaguuccaccagauugagaaggaguucagcgaaguggaagggagaauccaggaucuugagaaauacguggaggacacgaagauugaucuguggucuuauaacgccgaacuccuggucgcucuggagaaccaacauacaaucgaccucaccgauuccgaaaugaauaaacuguuugagcgcaccaagaaacagcuucgggaaaacgcggaggacaugggaaauggcugcuucaagaucuaccacaagugugauaacgccugcauugggagcaucagaaauggcacauaugaccaugacguguaccgcgaugaggcucugaacaaucgguuucagauuaaaggaguugaacucaagucuggcuacaaagacuggauccuguggauuuccuucgccaucagcugcuuucuucuguguguggcccuccugggguucaucaugugggcuugccagaagggaaacauuagauguaauaucugcauuuga

SEQ ID NO: 193826 - RNA, 1701 nt, Artificial Sequence; identical to SEQ ID NO: 193825
  derived and/or modified CDS sequence (opt5) from hemagglutinin__InfluenzaA__ABU92592

SEQ ID NO: 193827 - RNA, 1701 nt, Artificial Sequence
  derived and/or modified CDS sequence (opt5) from hemagglutinin__InfluenzaA__ABU92593
augaagaccaucauugcccugagcuacauccucugccugguguucgcucagaaacuucccggcaacgacaauuccacagccacgcugugucucgggcaccaugcggucccuaacggaaccauuguuaagacaaucaccaaugaucaaauugaggugacaaacgcuaccgaacuggugcagucuagcuccacaggcgggaucugcgacucuccgcaccagauccuugauggagagaauuguacccugauugacgcccuccugggcgauccccagugcgacggguuucaaaacaaaaagugggaucuguucgucgaaagaagcaaagccuauuccaauuguuacccuuaugacgugcccgauuacgcuucucuccggagccugguugccuccagcggaacgcuugaguuuaacaaugaaucuuucaacuggaccggcgugacacagaauggcaccuccagcgcuugcaagcgcagaucuaacaauuccuuuuucagccggcugaacuggcucacacaucugaaguuuaaauauccugcccuuaaugucaccaugcccaacaacgagaaguucgacaaacuguacaucuggggagugcaccauccugggacggauaaugaccagauuuuucucuaugcgcaggccucuggccgcaucacaguuuccaccaagagaagccaacagacagugauuccgaacaucgggucccggccccgcgucagaaauauuccuucucggaucagcaucuacuggaccauugugaaacccggagauauccugcugauuaacuccaccggcaaucucaucgcuccucgcggguacuucaagauuagaagcggaaagucuuccaucaugcggagcgacgcccccaucggcaaauguaacucugagugcauuacaccgaauggcagcaucccuaacgacaagcccuuucagaaugugaaccgcauuacguauggggcuuguccuagauacgucaaacagaauacccugaaacuugccacaggaaugcggaacguucccgaaaaacaaacccgcggcaucuucggggcgauugccggauuuaucgagaauggcugggaagggaugguggauggaugguauggcuucagacaccagaacuccgagggcaucgggcaggcugccgaccugaagucuacacaagcugccauugaucagaucaauggaaaacucaaccggcugauuggcaagaccaacgagaaguuccaccagaucgaaaaagaguuuagcgaaguggaggggcgcauucaggaccuugaaaaguacgucgaggauacgaaaaucgaccugugguccuauaaugccgagcuccugguggcucuggaaaaccaacauacaauugaucucaccgacagcgagaugaauaagcuguucgaaaagaccaagaagcagcuuagagagaacgcggaagauaugggaaauggcugcuuuaaaaucuaccacaagugugacaacgccugcaucgggucuauucggaauggcacauaugaucaugacguuuacagagacgaggcucugaacaaucgcuuccagaucaaaggaguggagcucaaguccggcuacaaagauuggauucuguggaucagcuuugccauuucuugcuuccuucugugugucgcccuccugggguuuaucaugugggcuggacagaagggcaacaagcggugcaauaucuguauuuga

SEQ ID NO: 193828 - RNA, 1701 nt, Artificial Sequence
  derived and/or modified CDS sequence (opt5) from hemagglutinin__InfluenzaA__ABU92594
augaagaccaucauugcccugagcuacauccucugccugguguucgcucagaaacuucccggcaacgacaauuccacagccacgcugugucucgggcaccaugcggucccuaacggaaccauuguuaagacaaucaccaaugaucaaauugaggugacaaacgcuaccgaacuggugcagucuagcuccacaggcgagaucugcaauucuccgcaccagauccuugacggggaaagcuguacccugauugaugcccuccugggagacccccagugcgauggcuuucaaaacaaaaagugggaccuguucgucgagagauccaaagccuauucuaauuguuacccuuaugaugugcccgacuacgcuagccuccggucccugguugccagcucugggacgcuugaauuuaacaaugaguccuucaacuggaccggagugacacagaauggcaccagcucugcuugcaagcgcagauccaacaauagcuuuuucucucggcugaacuggcucacacaucugaaguuuaaauauccugcccuuaaugucaccaugcccaacaacgagaaguucgauaaacuguacaucuggggcgugcaccauccugggacggacaaugaucagauuuuucucuaugcgcaggccuccggacgcaucacaguuagcaccaagagaucccaacagacagugauuccgaacaucggcucucggccccgcgucagaaauauuccuagccggaucuccaucuacuggaccauugugaaacccggggacauccugcugauuaacagcaccggaaaucucaucgcuccucgcggcuacuucaagauuagaucugggaaguccagcaucaugcggucugaugcccccaucggaaaauguaacagcgaaugcauuacaccgaauggcuccaucccuaacgacaagcccuuucagaaugugaaccgcauuacguauggcgcuuguccuagauacgucaaacagaauacccugaagcuggccacagggaugcggaacguucccgagaaacaaacccgcggaaucuucggcgcgauugccggguuuaucgaaaauggaugggagggcaugguggacgggugguauggauucagacaccagaacucugagggcaucggccaggcugccgaucuuaagagcacacaagcugccauuaaucagaucaacgggaaacucaaccggcugauuggaaagaccaaugaaaaguuccaccagaucgagaaagaauuuuccgagguggaaggccgcauucaggaccuugagaaguacgucgaggauacgaaaaucgaccuguggagcuauaacgccgaacuccugguggcucuggagaaucaacauacaauugaucucaccgacucugaaaugaacaagcuguucgagagaaccaaaaagcagcuucgggaaaaugcggaggauauggggaacggaugcuuuaagaucuaccacaaaugugacaaugccugcaucggcuccauuagaaacgggacauaugaucaugacguuuaccgcgaugaggcucugaauaaccgguuccagaucaagggcguggaacucaaaagcggauacaaggacuggauucuguggaucucuuuugccauuuccugcuuccuucugugugucgcccucagcggcuuuaucaugugggcuugccagaaagggaauaucagauguaacauuugcaucuga

SEQ ID NO: 193829 - RNA, 1701 nt, Artificial Sequence
  derived and/or modified CDS sequence (opt5) from hemagglutinin__InfluenzaA__ABU92595
augaagaccaucauugcccugagcuacauccucugccugguguucgcucagaaacuucccgagaacgacaauuccacagccacgcugugucucggccaccaugcggucccuaacgggaccauuguuaagacaaucaccaaugaucaaauugaagugacaaacgcuaccgagcuggugcagucuagcuccacaggaggcaucugcgacucuccgcaccagauccuugauggggaaaauuguacccugauugacgcccuccugggagauccccagugcgacggcuuucaaaacaaaaagugggaucuguucgucgagagaagcaaagccuauuccaauuguuacccuuaugacgugcccgauuacgcuucucuccggagccugguugccuccagcgggacgcuugaauuuaacaaugagucuuucaacuggaccggagugacacagaauggcaccuccagcgcuugcaagcgcagaucuaacaauuccuuuuucagccggcugaacuggcucacacaucugaaguuuaaauauccugcccuuaaugucaccaugcccaacaacgagaaguucgacaaacuguacaucuggggcgugcaccauccugggacggauaaugaccagauuuuucucuaugcgcaggccucuggacgcaucacaguuuccaccaagagaagccaacagacagugauuccgaacaucggcucccggccccgcgucagaaauauuccuucucggaucagcaucuacuggaccauugugaaacccggggauauccugcugauuaacuccaccggaaaucucaucgcuccucgcggcuacuucaagauuagaagcgggaagucuuccaucaugcggagcgacgcccccaucggaaaauguaacucugaaugcauuacaccgaauggcagcaucccuaacgacaagcccuuucagaaugugaaccgcauuacguauggcgcuuguccuagauacgucaaacagaauacccugaaacuugccacagggaugcggaacguucccgagaagcaaacccgcggaaucuucggcgcgauugccggguuuaucgaaaauggaugggagggcaugguggaugggugguauggauucagacaccagaacuccgagggcaucggccaggcugccgaccugaagucuacacaagcugccauugaucagaucaaugggaaacucaaccggcugauuggaaagaccaacgaaaaguuccaccagaucgagaaagaauuuagcgagguggaaggccgcauucaggaccuugagaaguacgucgaggauacgaaaaucgaccugugguccuauaaugccgaacuccugguggcucuggagaaccaacauacaauugaucucaccgacagcgaaaugaauaagcuguucgagaaaaccaagaagcagcuuagagaaaacgcggaggauauggggaauggaugcuuuaaaaucuaccacaagugugacaacgccugcaucggcucuauucggaaugggacauaugaucaugacguuuacagagacgaggcucugaacaaucgcuuccagaucaaaggcguggaacucaaguccggauacaaagauuggauucuguggaucagcuuugccauuucuugcuuccuucugugugucgcccuccugggcuuuaucaugugggcuugccagaaggggaacauccgguguaauauuugcaucuga

SEQ ID NO: 193830 - RNA, 1701 nt, Artificial Sequence
  derived and/or modified CDS sequence (opt5) from hemagglutinin__InfluenzaA__ABU92596
augaagaccaucauugcccugagcuacauccucugccugguguucgcucagaaacuucccggcaacgacaauuccacagccacgcugugucucgggcaccaugcggucccuaacggaaccaugguuaagacaauuaccaaugaucaaaucgaggugacaaacgcuaccgaacuggugcagucuagcuccacaggcgagauuugcgacucuccgcaccagauccuugauggggaaaauuguacccugaucgacgcccuccugggagauccccagugcgacggcuuucaaaacaaaaagugggaucuguucgucgagagaagcaaagcccauuccaauuguuauccuuacgacgugcccgauuaugcuucucuccggagccugauugccuccagcgggacgcuugaauuuaacaaugagucuuucaacuggaccggaguuacacagaauggcaccuccagcgcuugcaagcgcagaucugacaacuccuuuuucagccggcugaauuggcucacacaccugaaguuuaaauacccugcccuuaacgugaccaugcccaauaacgaggaguucgauaagcuguauaucuggggcguccaucacccugggacggacaacgaucagauuucucucuacgcgcaggccuccggacgcaucacagugagcaccaaaagaucccaacagacaguuauuccgaauaucggcucucggccccgcgugagagacauuccuagccggaucuccaucuauuggaccauugucaagcccggggacauccugcugauuaacagcaccggaaaucucaucgcuccucgcggcuacuuuaaaauuagaucugggaaguccagcaucaugcggucugaugcccccaucggaaaguguaacagcggcugcauuacaccgaauggcuccaucccuaacgacaaacccuuccagaaugugaaccgcauuacguacggggcuuguccuagauaugugaagcagaauacccugaaacuugccacaggaaugcggaacguccccgaaaagcaaacccgcggcaucuuuggggcgauugccggauucaucgaaaauggcugggaggggaugguugauggaugguacggcuuuagacaccagaacucugagggcaucgggcaggcugccgaccugaaaagcacacaagcugccauugaucagaucaauggaaagcucaaccggcugauuggcaaaaccaaugaaaaguuccaucagaucgagaaggaguucuccgaaguggaagggcgcauucaggaccuugagaaauauguggaggauacgaagaucgaccuguggagcuacaacgccgaacuccuggucgcucuggagaaccaacacacaauugaucucaccgacucugaaaugaauaaacuguuugagagaaccaagaaacagcuucgggaaaacgcggaggauaugggaaauggcugcuucaagaucuaucauaagugugacaacgccugcaucggguccauuagaaauggcacauacgaccacgauguguaucgcgacgaggcucugaacaaucgguuucagaucaaaggaguugaacucaagagcggcuacaaagauuggauucuguggaucucuuucgccauuuccugcuuucuucuguguguggcccuccugggguucaucaugugggcuugccagaagggaaacaucagauguaauauuugcaucuga

SEQ ID NO: 193831 - RNA, 1701 nt, Artificial Sequence; identical to SEQ ID NO: 192702
  derived and/or modified CDS sequence (opt5) from hemagglutinin__InfluenzaA__ABU92597

SEQ ID NO: 193832 - RNA, 1701 nt, Artificial Sequence; identical to SEQ ID NO: 192145
  derived and/or modified CDS sequence (opt5) from hemagglutinin__InfluenzaA__ABU92601

SEQ ID NO: 193833 - RNA, 1701 nt, Artificial Sequence; identical to SEQ ID NO: 192145
  derived and/or modified CDS sequence (opt5) from hemagglutinin__InfluenzaA__ABU92602

SEQ ID NO: 193834 - RNA, 1701 nt, Artificial Sequence
  derived and/or modified CDS sequence (opt5) from hemagglutinin__InfluenzaA__ABU92603
augaagaccaucauugcccugagcuacauccucugccugguguucgcucagaaacuucccggcaacgacaauuccacagccacgcugugucucgggcaccaugcggucccuaacggaaccauuguuaagacaaucaccaaugaucaaauugaggugacaaacgcuaccgaacuggugcagaucucuagcacaggcgagaucugcgacuccccgcaccagauucuugauggggaaaauuguacccugaucgacgcccuccugggagauccccagugcgacggcuuucaaaacaaaaagugggaucuguucgucgagagaucuaaagccuauagcaauuguuacccuuaugacgugcccgauuacgcuucccuccggucucugguugccagcuccgggacgcuugaauuuaacaaugagagcuucgacuggaccggagugacacagaacggcaccucuuccgcuugcaagcgcagaagcgauaagucuuucuucucccggcugaauuggcucacacaucugaaauauaaguacccugcccuuaacgucaccaugcccaauaacgagaaauuugacaagcuguauauuuggggcgugcaccauccugggacggauagcgaccagaucucucucuacgcgcaggccuccggacgcauuacaguuagcaccaaaagaucccaacagacagugaucccgaauauuggcucucggccccgcgucagagacgugagcucccggaucagcaucuacuggaccauugugaagccuggggauauccugcugauuaacucuaccggaaaccucaucgcuccccgcggcuauuucaagauuagauccgggaaaagcucuaucaugcggagcgacgccccuaucggaaaguguaauuccgaaugcauuacacccaacggcucuaucccgaaugauaaaccuuuucagaacgucaaucgcauuacguacggcgcuugucccagauauguuaagcagaacacccugaaacuugccacagggaugcggaaugugccugagaagcaaacccgcggaaucuucggcgcgauugccggguuuaucgaaaacggaugggagggcaugguggacgggugguacggauucagacaccagaauagcgagggcacaggccaggcugccgaucugaaauccacccaagcugccaucaaccagauuaaugggaagcucaaccggcugaucggaaagacgaaugaaaaauuucaccagauugagaaggaauuuagcgaggucgaaggcagaauccaggaccuugagaaauauguggaggauacaaagauugaccuguggucuuacaacgccgaacuccugguugcucuggagaaucaacauaccaucgaucucaccgacuccgaaaugaacaaacuguucgagcgcacaaagaagcagcuucgggaaaacgcggaggauauggggaauggaugcuuuaaaauuuaucacaagugugacaacgccugcaucggcagcaucagaaaugggaccuacgaccaugauguguaccgcgacgaggcucugaacaaucgguuccagauuaaaggcgucgaacucaagucuggauauaaagauuggauccuguggauuuccuuugccaucagcugcuuccuucuguguguggcccuccugggcuuuauuaugugggcuugccagaaggggaacaucagauguaauaucugcauuuga

SEQ ID NO: 193835 - RNA, 1701 nt, Artificial Sequence; identical to SEQ ID NO: 192145
  derived and/or modified CDS sequence (opt5) from hemagglutinin__InfluenzaA__ABU92604

SEQ ID NO: 193836 - RNA, 1701 nt, Artificial Sequence; identical to SEQ ID NO: 193834
  derived and/or modified CDS sequence (opt5) from hemagglutinin__InfluenzaA__ABU92605

SEQ ID NO: 193837 - RNA, 1701 nt, Artificial Sequence; identical to SEQ ID NO: 193834
  derived and/or modified CDS sequence (opt5) from hemagglutinin__InfluenzaA__ABU92606

SEQ ID NO: 193838 - RNA, 1701 nt, Artificial Sequence; identical to SEQ ID NO: 192684
  derived and/or modified CDS sequence (opt5) from hemagglutinin__InfluenzaA__ABU92608

SEQ ID NO: 193839 - RNA, 1701 nt, Artificial Sequence; identical to SEQ ID NO: 192684
  derived and/or modified CDS sequence (opt5) from hemagglutinin__InfluenzaA__ABU92609

SEQ ID NO: 193840 - RNA, 1701 nt, Artificial Sequence
  derived and/or modified CDS sequence (opt5) from hemagglutinin__InfluenzaA__ABU92610
augaagaccaucauugcccugagcuacauccucugccugguguucgcucagaaacuucccggcaacgacaauuccacagccacgcugugucucgggcaccaugcggucccuaacggaaccauuguuaagacaaucaccaaugaucaaauugaggugacaaacgcuaccgaacuggugcagucuagcuccacaggcgagaucugcgacucuccgcaccagauccuugauggggaaaauuguacccugauugacgcccuccugggagauccccagugcgacggcuuucaaaacaaaaagugggaucuguucgucgagagaagcaaagccuauuccaauuguuacccuuaugacgugcccgauuacgcuucucuccggagccugguugccuccagcgggacgcuugaauuuaacaaugagucuuucaacuggaccggagugacacagaauggcaccuccagcgcuugcaagcgcagaucuaacaauuccuuuuucagccggcugaacuggcucacacauucuaaguuuaaauauccugcccugaaugucaccaugcccaacaacgagaaguucgacaaacuuuacaucuggggcgugcaccauccugggacggauaaugaccagauuuuucuguaugcgcaggccuccggacgcaucacaguuagcaccaagagaucccaacagacagugauuccgaacaucggcucucggccccgcgucagaaauauuccuagccggaucuccaucuacuggaccauugugaaacccggggauauccuccugauuaacagcaccggaaaucugaucgcuccucgcggcuacuucaagauuagaucugggaaguccagcaucaugcggucugacgcccccaucggaaaauguaacagcgaaugcauuacaccgaauggcuccaucccuaacgacaagcccuuucagaaugugaaccgcauugcuuauggcgccuguccuagauacgucaaacagaauacgcucaagcuggcgaccgggaugcggaacguucccgagaaacaaacacgcggaaucuucggcgccauugcuggguuuaucgaaaauggaugggagggcaugguggaugggugguauggauucagacaccagaacucugagggcaucggccaggccgcugaccuuaagagcacccaagccgccauuaaucagaucaacgggaaacugaaccggcucauuggaaagacaaaugaaaaguuccaccagaucgagaaagaauuuuccgagguggaaggccgcauucaggaucuggagaaguacgucgaggacaccaaaaucgaucuuuggagcuauaacgcugaacugcucguggcgcuggagaaucaacauacgauugaccugacagauucugaaaugaacaaacucuucgagagaaccaagaagcagcugcgggaaaaugccgaggacauguccaacgggugcuuuaagaucuaccacaaaugugauaaugcuugcaucggaagcauuagaaacggcaccuaugaccaugauguuuaccgcgacgaggcccuuaauaaccgguuccagaucaaggggguggaacugaaaucuggcuacaaggacuggauucucuggaucuccuuugccauuagcugcuuccugcuuugugucgugcugcucggauuuaucaugugggcuugccagaaaggcaauaucagauguaacauuugcaucuga

SEQ ID NO: 193841 - RNA, 1701 nt, Artificial Sequence
  derived and/or modified CDS sequence (opt5) from hemagglutinin__InfluenzaA__ABU92611
augaagaccaucauugcccugagcuacauccucugccugguguucgcucagaaacuucccggcaacgacaauuccacagccacgcugugucucgggcaccaugcggucccuaacggaaccauuguuaagacaaucaccaaugaucaaauugaggugacaaacgcuaccgaacuggugcagucuagcuccacaggcgggaucugcgacucuccgcaccagauccuugauggagagaauuguacccugauugacgcccuccugggcgauccccagugcgacggguuucaaaacaaaaagugggaucuguucgucgaaagaagcaaagccuauuccaauuguuacccuuaugacgugcccgauuacgcuucucuccggagccugaucgccuccagcggaacgcuugaguuuaacaaugaaucuuucaacuggaccggcguuacacagaauggcaccuccagcgcuugcaagcgcagaucuaacaauuccuuuuucagccggcugaacuggcucacacaucugaaguuuaaauauccugcccuuaaugugaccaugcccaacaacgaggaguucgacaagcuguacauuuggggaguccaccauccugggacggauaaugaccagaucucucucuaugcgcaggccuccggcaaaauuacagugagcaccaagcgcucccaacagacaguuaucccgaacauugggucuagaccccgggugcgcgauaucccuagcagaaucuccauuuacuggaccaucgucaaacccggagacauucugcugaucaauagcaccggcaaccucauugcuccucggggguacuuuaagauccgcucuggaaaguccagcaucaugagaucugacgcccccauuggcaaauguaauagcgaaugcaucacaccgaacggcuccauuccuaaugauaagcccuuccagaacgugaaucggaucacguauggggcuuguccucgcuacgugaaacagaacacccugaagcuggccacaggaaugagaaauguccccgagaaacaaacccggggcauuuuuggggcgaucgccggauucaucgaaaacggcugggaggggaugguugacggaugguauggcuuucgccaccaaaauucugagggcauugggcaggcugccgaucuuaagagcacacaggcugccaucgaccagauuaacggaaaacucaauagacugaucggcaagaccaacgaaaaguuccaccagauugagaaagaguucuccgaaguggaagggcggauccaggaucuugagaaguacguggaggacacgaaaauugaucuguggagcuauaacgccgaacuccuggucgcucuggagaaucaacauacaaucgaccucaccgauucugaaaugaacaagcuguuugagagaaccaaaaagcagcuucgcgaaaaugcggaggacaugggaaacggcugcuucaagaucuaccacaaaugugauaaugccugcauuggguccauccggaacggcacauaugaccaugacguguacagagaugaggcucugaauaaccgcuuucagauuaagggaguugaacucaaaagcggcuacaaggacuggauccuguggauuucuuucgccaucuccugcuuucuucuguguguggcccuccugggguucaucauuugggcuugccugaaaggaaauauccgguguaacauuugcaucuga

SEQ ID NO: 193842 - RNA, 1701 nt, Artificial Sequence
  derived and/or modified CDS sequence (opt5) from hemagglutinin__InfluenzaA__ABU92612
augaagaccaucauugcccugagcuacauccucugccugguguucgcucagaaacuucccggcaacgacaauuccacagccacgcugugucucgggcaccaugcggucccuaacggaaccaugguuaagacaauuaccaaugaucaaaucgaggugacaaacgcuaccgaacuggugcagucuagcuccacaggcgggauuugcgacucuccgcaccagauccuugauggagagaauuguacccugaucgacgcccuccugggcgauccccagugcgacggguuucaaaacaaaaagugggaucuguucgucgaaagaagcaaagcccauuccaauuguuauccuuacgacgugcccgauuaugcuucucuccggagccugguugccuccagcggaacgcuugaguuuaacaaugaaucuuucaacuggaccggcgugacacagaauggcaccuccagcgcuugcaagcgcagaucuaacaauuccuuuuucagccggcugaacuggcucacacaccugaaguuuaaauacccugcccuuaaugucaccaugcccaacaacgagaaguucgacaaacuguauauuuggggagugcaucacccugggacggauaaugaccagaucucucucuacgcgcaggccuccggccgcauuacaguuagcaccaagagaucccaacagacagugaucccgaacauugggucucggccccgcgucagagauaucccuagccggauuuccaucuauuggaccaucgugaaacccggagacauucugcugaucaauagcaccggcaaccucauugcuccucgcggguacuuuaagaucagaucuggaaaguccagcauuaugcggucugacgcccccaucggcaaauguaauagcgagugcaucacaccgaacggcuccauuccuaauaacaagcccuuccagaaugugaaccgcaucacguacggggcuuguccuagauaugucaaacagaauacccugaagcuggccacaggaaugcggaacguucccgaaaaacaaacccgcggcauuuuuggggcgaucgccggauucauugagaauggcugggaagggaugguggauggaugguacggcuuuagacaccagaacucugagggcaucgggcaggcugccgaccuuaagagcacacaagcugccaucaaucagauuaacggaaaacucaaccggcugaucggcaagaccaaugagaaguuccaucagauugaaaaagaguucuccgaaguggaggggagaauccaggaucuugaaaaguaugucgaggacacgaaaauugaucuguggagcuacaacgccgagcuccugguggcucuggaaaaucaacacacaaucgaccucaccgauucugagaugaacaagcuguuugaacgcaccaaaaagcagcuucgggagaaugcggaagacaugggaaacggcugcuucaagauuuaucauaaaugugauaaugccugcaucggguccaucagaaacggcacauacgaccacgauguuuaucgcgacgaggcucugaauaaccgguuucagauuaagggaguggagcucaaaagcggcuacaaggacuggauccuguggauuucuuucgccaucuccugcuuucuucugugugucgcccuccugggguucauuaugugggcuugccagaaaggaaauaucagauguaacaucugcauuuga

SEQ ID NO: 193843 - RNA, 1701 nt, Artificial Sequence; identical to SEQ ID NO: 193330
  derived and/or modified CDS sequence (opt5) from hemagglutinin__InfluenzaA__ABU92613

SEQ ID NO: 193844 - RNA, 1701 nt, Artificial Sequence; identical to SEQ ID NO: 193829
  derived and/or modified CDS sequence (opt5) from hemagglutinin__InfluenzaA__ABU92614

SEQ ID NO: 193845 - RNA, 1701 nt, Artificial Sequence
  derived and/or modified CDS sequence (opt5) from hemagglutinin__InfluenzaA__ABU92615
augaagaccaucauugcccugagcuacauccucugccugguguucgcucagaaacuucccggcaacgacaauuccacagccacgcugugucucgggcaccaugcggucccuaacggaaccauuguuagaacaaucaccaaugaucaaauugaggugacaaacgcuaccgaacuggugcagucuagcuccacaggcgggaucugcgacucuccgcaccagauccuugauggagagaauuguacccugauugacgcccuccugggcgauccccagugcgacggguuucaaaacaagaaaugggaucuguucgucgaacggagcaaggccuauuccaauuguuacccuuaugacgugcccgauuacgcuucucuccgcagccugguugccuccagcggaacgcuugaguuuaacaaugaaucuuucaacuggaccggcgugacacagaauggcaccuccagcgcuugcaaaagacggucuaacaauuccuuuuucagccgccugaacuggcucacacaucugaaguuuaaguauccugcccuuaaugucaccaugcccaacaacgagaaauucgacaagcuguacaucuggggagugcaccauccugggacggauaaugaccagauuucucucuaugcgcaggccuccggcagaaucacaguuagcaccaaacggucccaacagacagugauuccgaacgucgggucucgccccagagugcgggauaucccuagccgcauuuccaucuacuggaccaucgugaagcccggagacauucugcugaucaauagcaccggcaaccucauugcuccuagaggguacuuuaaaauccggucuggaaaguccagcauuaugcgcucugacgcccccaucggcaaguguaauagcgagugcaucacaccgaacggcuccauuccuaaugauaaacccuuccagaacgucaauagaaucacguauggggcuuguccucgguacguuaagcagaacacccugaaacuugccacaggaaugcgcaaugugcccgaaaagcaaaccagaggcauuuuuggggcgaucgccggauucauugagaacggcugggaagggaugguggacggaugguauggcuuucggcaccaaaauucugagggcaucgggcaggcugccgaucugaaaagcacacaggcugccaucaaccagauuaauggaaagcucaacagacugaucggcaaaaccaacgagaaguuccaccagauugaaaaggaguucuccgaagucgaggggcgcauccaggaccuugaaaaauacguggaggauacgaagauugaccuguggagcuauaaugccgagcuccugguugcucuggaaaaccaacauacaaucgaucucaccgacucugagaugaauaaacuguuugaacggaccaagaaacagcuuagagagaacgcggaagauaugggaaauggcugcuucaagauuuaccacaagugugacaacgccugcaucggguccauccgcaauggcacauaugaucaugacguguaccgggacgaggcucugaacaauagauuucagauuaaaggagucgagcucaagagcggcuacaaagauuggauccuguggauuucuuucgccaucuccugcuuucuucuguguguggcccuccugggguucauuaugugggcuugccagaagggaaacauccgcuguaauaucugcauuuga

SEQ ID NO: 193846 - RNA, 1701 nt, Artificial Sequence
  derived and/or modified CDS sequence (opt5) from hemagglutinin__InfluenzaA__ABU92617
augaagaccaucauugcccugagcuacauccucugccugguguucgcucagaaacuucccggcaacgacaauuccacagccacgcugugucucgggcaccauucugucccuaacggaaccauuguuaagacaaucaccaaugaucaaauugaggugacaaacgcgaccgaacuggugcagagcuccucuacaggcgggaucugcgacagcccgcaccagauccuugauggagagaauuguacccugauugacgcucuccugggcgauccccagugcgacggguuucaaaacaaaaagugggaucuguucgucgaaagauccaaagccuauucuaauuguuacccuuaugacgugcccgauuacgccagccuccggucccugaucgcuagcucuggaacgcuugaguuuaacaaugaauccuucaacuggaccggcguuacacagaauggcaccagcucugccugcaagcgcagauccaacagcucuuucuucucccggcugaauuggcucacacaucugaaguuuaaauauccugcucuuaacgugaccaugcccaauaacgaggaguucgacaagcuguacauuuggggaguccaccauccugggacggauaacgaccagaucagccucuaugcccaggcguccggccgcauuacagugucuaccaaaagaagccaacagacaguuaucccgaauauugggucccggccccgcgugagagauaucccuagccggaucucuauuuacuggaccaucgucaagcccggagacauucugcugaucaacuccaccggcaaucucauugccccucgcggguacuuuaaaaucagaagcggaaagucuagcaucaugcgguccgacgcucccauuggcaaguguaacucugaaugcaucacaccgaauggcagcauuccuaacgauaaacccuuccagaaugugaaccgcaucacguauggggccuguccuagauacgugaagcagaauacccugaaacuugcuacaggaaugcggaacguccccgagaagcaaacccgcggcauuuuuggggccaucgcgggauucaucgaaaauggcugggaggggaugguugacggaugguauggcuuuagacaccagaacuccgagggcauugggcaggccgcugaucugaaaagcacacaagccgcuaucgaccagauuaauggaaagcucaaccggcugaucggcaaaaccaaugaaaaguuccaccagauugagaaggaauuuucugagguggaagggagaauccaggaucuugagaaauacguggaggacacgaagauugaucugugguccuauaacgccgaacuccuggucgcccuggagaaccaacauacaaucgaccucaccgauagcgaaaugaauaaacuguuugagcgcaccaagaaacagcuucgggaaaacgcugaggacaugggaaauggcugcuucaagaucuaccacaagugugauaacgcgugcauugggucuaucagaaauggcacauaugaccaugacguguaccgcgaugaggcccugaacaaucgguuucagauuaaaggaguugaacucaaguccggcuacaaagacuggauccuguggauuagcuucgcuaucuccugcuuucuucuguguguggcccuccugggguucaucaugugggccugccagaagggaaacauuagauguaauaucugcauuuga

SEQ ID NO: 193847 - RNA, 1701 nt, Artificial Sequence; identical to SEQ ID NO: 193330
  derived and/or modified CDS sequence (opt5) from hemagglutinin__InfluenzaA__ABU92619

SEQ ID NO: 193848 - RNA, 1701 nt, Artificial Sequence; identical to SEQ ID NO: 193829
  derived and/or modified CDS sequence (opt5) from hemagglutinin__InfluenzaA__ABU92620

SEQ ID NO: 193849 - RNA, 1701 nt, Artificial Sequence
  derived and/or modified CDS sequence (opt5) from hemagglutinin__InfluenzaA__ABU92622
augaagaccaucauugcccugagcuacauccucugccugguguucgcucagaaacuucccggcaacgacaauuccacagccacgcugugucucgggcaccaugcggucccuaacggaaccauuguuaagacaaucaccaaugaucaaauugaggugacaaacgcuaccgaacuggugcagucuagcuccacaggcgggaucugcgacucuccgcaccagauccuugauggagagaauuguacccugauugacgcccuccugggcgauccccagugcgacggguuucaaaacaaaaagugggaucuguucgucgaaagaagcaaagccuauuccaauuguuacccuuaugacgugcccgauuacgcuucucuccggagccugaucgccuccagcggaacgcuugaguuuaacaaugaaucuuucaacuggaccggcguuacacagaauggcaccuccagcgcuugcaagcgcagaucuaacuccagcuuuuucucucggcugaauuggcucacacaucugaaguuuaaauauccugcccuuaacgugaccaugcccaauaacgaggaguucgacaagcuguacauuuggggaguccaccauccugggacggauaacgaccagaucucccucuaugcgcaggccagcggccgcauuacaguguccaccaaaagaucucaacagacaguuaucccgaauauugggagccggccccgcgugagagauaucccuucccggaucagcauuuacuggaccaucgucaagcccggagacauucugcugaucaacucuaccggcaaucucauugcuccucgcggguacuuuaaaaucagauccggaaagagcucuaucaugcggagcgacgcccccauuggcaaguguaacuccgaaugcaucacaccgaauggcucuauuccuaacgauaaacccuuccagaaugugaaccgcaucacguauggggcuuguccuagaagcgugaagcagaauacccugaaacuugccacaggaaugcggaacguccccgagaagcaaacccgcggcauuuuuggggcgaucgccggauucaucgaaaauggcugggaggggaugguugacggaugguacggcuuuagacaccagaacuccgagggcauugggcaggcugccgaucugaaaagcacacaagcugccaucgaccagauuaauggaaagcucaaccggcugaucggcaaaaccaaugaaaaguuccaccagauugagaaggaguucucugaaguggaagggagaauccaggaucuugagaaauauguggaggacacgaagauugaucugugguccuacaacgccgaacuccuggucgcucuggagaaccaacauacaaucgaccucaccgauagcgaaaugaauaaacuguuugagcgcaccaagaaacagcuucgggaaaacgcggaggacaugggaaauggcugcuucaagaucuaucacaagugugauaacgccugcauugggucuaucagaaauggcacauacgaccaugacguguaucgcgaugaggcucugaacaaucgguuucagauuaaaggaguugaacucaaguccggcuacaaagacuggauccuguggauuagcuucgccaucuccugcuuucuucuguguguggcccuccugggguucaucaugugggcuugccagaagggaaacauuagauguaauaucugcauuuga

SEQ ID NO: 193850 - RNA, 1701 nt, Artificial Sequence; identical to SEQ ID NO: 192145
  derived and/or modified CDS sequence (opt5) from hemagglutinin__InfluenzaA__ABU92623

SEQ ID NO: 193851 - RNA, 1701 nt, Artificial Sequence
  derived and/or modified CDS sequence (opt5) from hemagglutinin__InfluenzaA__ABU92624
augaagaccaucauugcccugagcuacauccucugccugguguucgcucagaaacuucccggcaacgacaauuccacagccacgcugugucucgggcaccaugcggucccuaacggaaccauuguuaagacaaucaccaaugaucaaauugaggugacaaacgcuaccgaacuggugcagaucucuagcacaggcgagaucugcgacuccccgcaccagauucuugauggggaaaauuguacccugaucgacgcccuccugggagauccccagugcgacggcuuucaaaacaaaaagugggaucuguucgucgagagaucuaaagccuauagcaauuguuacccuuaugacgugcccgauuacgcuucccuccggucucugguugccagcuccgggacgcuugaauuuaacaaugagagcuucgacuggaccggagugacacagaacggcaccucuuccgcuugcaagcgcagaagcgauaagucuuucuucucccggcugaauuggcucacacaucugaaauauaaguacccugcccuuaacgucaccaugcccaauaacgagaaauuugacaagcuguauauuuggggcgugcaccauccugggacggauagcgaccagaucucucucuacgcgcaggcccugggacgcauuacaguuuccaccaaaagaagccaacagacagugaucccgaauauuggcucccggccccgcgucagagacgugucuagccggaucuccaucuacuggaccauugugaagccuggggauauccugcucauuaacagcaccggaaaccugaucgcuccccgcggcuauuucaagauuagaucugggaaauccagcaucaugcggucugacgccccuaucggaaaguguaauagcgaaugcauuacacccaacggcuccaucccgaaugauaaaccuuuucagaacgucaaucgcauuacguacggcgcuugucccagauauguuaagcagaacacccuuaaacuggccacagggaugcggaaugugccugagaagcaaacccgcggaaucuucggcgcgauugccggguuuaucgaaaacggaugggagggcaugguggacgggugguacggauucagacaccagaauagcgagggcacaggccaggcugccgaucucaaaagcacccaagcugccaucaaccagauuaaugggaagcugaaccggcuuaucggaaagacgaaugaaaaauuucaccagauugagaaggaauuuuccgaggucgaaggcagaauccaggaccuggagaaauauguggaggauacaaagauugaccucuggagcuacaacgccgaacugcugguugcucucgagaaucaacauaccaucgaucugaccgacucugaaaugaacaaacuuuucgagcgcacaaagaagcagcugcgggaaaacgcggaggauauggggaauggaugcuuuaaaauuuaucacaagugugacaacgccugcaucggcuccaucagaaaugggaccuacgaccaugauguguaccgcgacgaggcucucaacaaucgguuccagauuaaaggcgucgaacugaagucuggauauaaagauuggauccuuuggauuucuuuugccaucuccugcuuccugcucuguguggcccugcugggcuuuauuaugugggcuugccagaaggggaacaucagauguaauaucugcauuuga

SEQ ID NO: 193852 - RNA, 1701 nt, Artificial Sequence; identical to SEQ ID NO: 193834
  derived and/or modified CDS sequence (opt5) from hemagglutinin__InfluenzaA__ABU92625

SEQ ID NO: 193853 - RNA, 1701 nt, Artificial Sequence; identical to SEQ ID NO: 192145
  derived and/or modified CDS sequence (opt5) from hemagglutinin__InfluenzaA__ABU92626

SEQ ID NO: 193854 - RNA, 1701 nt, Artificial Sequence
  derived and/or modified CDS sequence (opt5) from hemagglutinin__InfluenzaA__ABU92627
augaagaccaucauugcccugagcuacauccucugcaugguguucgcucagaaacugcccggcaacgacaauuccacagccacgcuuugucuggggcaccaugcggucccuaacggaaccauuguuaagacaaucaccaaugaucaaauugaggugacaaacgcuaccgaacucgugcagaucucuagcacaggcgagaucugcgacuccccgcaccagauucuggauggggaaaauuguacccuuaucgacgcccugcucggagauccccagugcgacggcuuucaaaacaaaaagugggaucuguucgucgagagaucuaaagccuauagcaauuguuacccuuaugacgugcccgauuacgcuucccugcggucucucguugccagcuccgggacgcuggaauuuaacaaugagagcuucgacuggaccggagugacacagaacggcaccucuuccgcuugcaagcgcagaagcgauaagucuuucuucucccggcuuaauuggcugacacaucucaaauauaaguacccugcccugaacgucaccaugcccaauaacgagaaauuugacaagcuguauauuuggggcgugcaccauccugggacggauagcgaccagaucucucuguacgcgcaggccuccggacgcauuacaguuagcaccaaaagaucccaacagacagugaucccgaauauuggcucucggccccgcgucagagacgugagcucccggaucagcaucuacuggaccauugugaagccuggggauauccuccugauuaaccgccccggaaaccugaucgcuccuagaggcuauuucaagauucggucugggaaauccagcaucaugcgcucugacgcccccaucggaaaguguaauagcgaaugcauuaccccgaacggcuccaucccuaaugauaaacccuuucagaacgucaauagaauuacauacggcgcuuguccucgguauguuaagcagaacacgcucaaacuggccaccgggaugcgcaaugugcccgagaagcaaacaagaggaaucuucggcgcgauugccggguuuaucgaaaacggaugggagggcaugguggacgggugguacggauuccggcaccaaaauucugagggcaccggccaggcugccgaucuuaaaagcacacaggcugccaucaaccagauuaaugggaagcugaacagacucaucggaaagaccaaugaaaaauuucaccagauugagaaggaauuuuccgaggucgaaggccgcauccaggaccuggagaaauauguggaggauacgaagauugaccuuuggagcuacaacgccgaacugcucguugcucuggagaaucaacauacaaucgaucugaccgacucugaaaugaacaaacucuucgagcggaccaagaagcagcugagagaaaacgcggaggauauggggaauggaugcuuuaaaauuuaucacaagugugacaacgccugcaucggcuccauccgcaaugggacauacgaccaugauguguaccgggacgaggcucuuaacaauagauuccagauuaaaggcgucgaacuuaagagcggauauaaagauuggauccucuggauuucuuuugccaucuccugcuuccugcuuuguguggcccugcucggcuuuauuaugugggcuugccagaaggggaacauccgcuguaauaucugcauuuga

SEQ ID NO: 193855 - RNA, 1701 nt, Artificial Sequence; identical to SEQ ID NO: 193834
  derived and/or modified CDS sequence (opt5) from hemagglutinin__InfluenzaA__ABU92628

SEQ ID NO: 193856 - RNA, 1701 nt, Artificial Sequence; identical to SEQ ID NO: 193834
  derived and/or modified CDS sequence (opt5) from hemagglutinin__InfluenzaA__ABU92631

SEQ ID NO: 193857 - RNA, 1701 nt, Artificial Sequence
  derived and/or modified CDS sequence (opt5) from hemagglutinin__InfluenzaA__ABU92632
augaagaccaucauugcccugagcuacauccucugccugguguucgcucagaaacuucccggcaacgacaauuccacagccacgcugugucucgggcaccaugcggucccuaacggaaccauuguuaagacaaucaccaaugaucaaauugaggugacaaacgcuaccgaacuggugcagucuagcuccacaggcgggaucugcgacucuccgcaccagauccuugauggagagaauuguacccugauugacgcccuccugggcgauccccagugcgacggguuucaaaacaaaaagugggaucuguucgucgaaagaagcaaagccuauuccaauuguuacccuuaugacgugcccgauuacgcuucucuccggagccugaucgccuccagcggaacgcuugaguuuaacaaugaaucuuucaacuggaccggcguuacacagaauggcaccuccagcgcuugcaagcgcagaucuaacaaguccuuuuucagccggcugaauuggcucacacaucugaaauauaaguacccugcccuuaacgugaccaugcccaauaacgagaaauuugacaagcuguauauuuggggaguccaccauccugggacggauucugaccagaucucccucuacgcgcaggccagcggccgcauuacaguguccaccaaaagaucucaacagacaguuaucccgaacauugggagccggccccgcgugagagaugucuccagccggaucucuaucuacuggaccauugugaagccuggagacauccugcugauuaauuccaccggcaaccucaucgcuccccgcggguauuucaagauuagaagcggaaaaucuagcaucaugcgguccgacgccccuaucggcaaguguaauucugagugcauuacacccaacggcagcaucccgaaugauaaaccuuuucagaacgugaaucgcauuacguacggggcuugucccagauaugucaagcagaacacccugaaacuugccacaggaaugcggaauguuccugaaaagcaaacccgcggcaucuucggggcgauugccggauuuaucgagaacggcugggaagggaugguggacggaugguacggcuucagacaccucaauuccgagggcacagggcaggcugccgaucugaaaagcacccaggcugccaucaaccaaauuaauggaaagcugaaccggcuuaucggcaagacgaaugagaaauuucaccagauugaaaaggaguucucugaaguggaggggagaauccaggaccuggaaaaauaugucgaggauacaaagauugaccucugguccuacaacgccgagcugcugguggcucucgaaaaccagcauaccaucgaucugaccgacagcgagaugaauaaacuuuucgaacgcacaaagaagcaacugcgggagaacgcggaagauaugggaaauggcugcuuuaaaauuuaucacaagugugacaacgccugcaucgggucuaucagaaauggcaccuacgaucaugacguuuaccgcgacgaggcucucaacaaucgguuccagauuaaaggaguggagcugaaguccggcuauaaagauuggauccuuuggauuagcuuugccaucuccugcuuccugcucugugucgcccugcugggguuuauuaugugggcuugccagaagggaaacaucagauguaauaucugcauuuga

SEQ ID NO: 193858 - RNA, 1701 nt, Artificial Sequence
  derived and/or modified CDS sequence (opt5) from hemagglutinin__InfluenzaA__ABU92635
augaagaccaucauugcccugagcuacauccucugccugguguucgcucagaaacuucccggcaacgacaauuccacagccacgcugugucucgggcaccaugcggucccuaacggaaccauuguuaagacaaucaccaaugaucaaauugaggugacaaacgcuaccgaacuggugcagucuagcuccacaggcgggaucugcgacucuccgcaccagauccuugauggagagaauuguacccugauugacgcccuccugggcgauccccagugcgacggguuucaaaacaaaaagugggaucuguucgucgaaagaagcaaagccuauuccaauuguuacccuuaugacgugcccgauuacgcuucucuccggagcaucguugccuccagcggaacgcuggaguuuaacaaugaaucuuucaacuggaccggcgugacacagaauggcaccuccagcgcuugcaagcgcaagucuaacaaauccuuuuucagcagacuuaauuggcugacacaucucaaguauaaauacccugcccugaacgucaccaugcccaauaacgagaaguuugacaaacuuuauauuuggggagugcaccauccugggacggauaacgaccagaucucucuguacgcgcaggccuccggccggauuacaguuagcaccaagcgcucccaacagacagugaucccgaauauugggucuagaccccggguccgcgaugugagcuccagaaucagcaucuacuggaccauugugaagccuggagacauccuccugauuaacucuaccggcaaucugaucgcuccccggggguauuucaaaauucgcuccggaaagagcucuaucaugagaagcgacgccccuaucggcaaauguaacuccgagugcauuacacccaauggcucuaucccgaacgauaagccuuuucagaaugucaaccggauuacguacggggcuuguccccgcuauguuaaacagaauacccucaagcuggccacaggaaugagaaacgugccugaaaaacaaacccggggcaucuucggggcgauugccggauuuaucgagaauggcugggaagggaugguggacggaugguacggcuuccgccaccagaacagcgagggcacagggcaggcugccgaucuuaaguccacccaagcugccaucaaucagauuaacggaaagcugaauagacucaucggcaaaacgaacgagaaguuucaccagauugaaaaagaguucagcgaagucgaggggcggauccaggaccuggaaaaguauguggaggauacaaaaauugaccuuuggucuuacaacgccgagcugcucguugcucuggaaaaucaacauaccaucgaucugaccgacuccgagaugaacaaacucuucgaaagaacaaagaagcagcugcgcgagaaugcggaagauaugggaaacggcugcuuuaagauuuaucacaaaugugacaaugccugcaucgggagcauccggaacggcaccuacgaucaugacguguacagagacgaggcucuuaauaaccgcuuccagauuaagggagucgagcugaaaucuggcuauaaggauuggauccucuggauuuccuuugccaucagcugcuuccugcuuuguguggcccugcucggguuuauuaugugggcuugccagaagggaaauauccgguguaacaucugcauuuga

SEQ ID NO: 193859 - RNA, 1701 nt, Artificial Sequence; identical to SEQ ID NO: 192702
  derived and/or modified CDS sequence (opt5) from hemagglutinin__InfluenzaA__ABU92636

SEQ ID NO: 193860 - RNA, 1701 nt, Artificial Sequence
  derived and/or modified CDS sequence (opt5) from hemagglutinin__InfluenzaA__ABU92637
augaagaccaucauugcccugagcuacauccucugccugguguucgcucagaaacuucccggcaacgacaauuccacagccacgcugugucucgggcaccaugcggucccuaacggaaccacaguuaagaccauuacaaaugaucaaaucgaggugaccaacgcuacagaacuggugcagucuagcuccaccggcgggauuugcgacucuccgcaccagauccuugauggagagaauuguacgcugaucgacgcccuccugggcgauccccagugcgacggguuucaaaacaaaaagugggaucuguucgucgaaagaagcaaagccuauuccaauuguuacccuuaugacgugcccgauuacguuucucuccggagccugguggcuuccagcggaacccuugaguuuaacaaugaaucuuucaacuggacaggcgucacccagaauggcacauccagcgccugcaagcgcagaucuaacaauuccuuuuucagccggcugaacuggcucacccaucugaaguuuaaauauccugcucuuaaugugacgaugcccaacaacgagaaguucgacaaacuguacauuuggggaguucaccauccugggacagauaaugaccagaucucucucuaugcccaggcguccggccgcauuaccgugagcacaaagagaucccaacagaccgucaucccgaacauugggucucggccccgcgugagagauaucccuagccggauuuccaucuacuggaccaucgugaaacccggagacauucugcugaucaauagcacaggcaaccucauugccccucgcggguacuuuaagaucagaucuggaaaguccagcauuaugcggucugacgcucccaucggcaaauguaauagcgagugcaucacgccgaacggcuccauuccuaaugauaagcccuuccagaacgucaaucgcaucaccuauggggccuguccuagauacguuaaacagaacacacugaaacuugcuaccggaaugcggaaugugcccgaaaaacaaacacgcggcauuuuuggggccaucgcgggauucauugagaacggcugggaagggaugguggacggaugguauggcuuuagacaccagaauagcgagggcaucgggcaggccgcugaucugaagucuacccaagccgcuaucaaccagauuaauggaaaacucaaccggcugaucggcaagacgaacgagaaguuccaccagauugaaaaagaguucuccgaagucgaggggagaauccaggaccuugaaaaguacguggaggauacaaaaauugaccuguggagcuauaaugccgagcuccugguugcccuggaaaaccaacauaccaucgaucucaccgacucugagaugaauaagcuguuugaacgcacaaagaagcagcuucgggagaacgcugaagauaugggaaauggcugcuucaagauuuaccacaaaugugacaacgcgugcaucggguccaucagaaauggcaccuaugaucaugacguguaccgcgacgaggcccugaacaaucgguuucagauuaagggagucgagcucaaaagcggcuacaaggauuggauccuguggauuucuuucgcuaucuccugcuuucuucuguguguggcccuccugggguucauuaugugggccugccagaaaggaaacaucagauguaauaucugcauuuga

SEQ ID NO: 193861 - RNA, 1701 nt, Artificial Sequence
  derived and/or modified CDS sequence (opt5) from hemagglutinin__InfluenzaA__ABU92639
augaagaccaucauugcccugagcuacauccucugccugguguucgcucagaaacuucccggcaacgacaauuccacagccacgcugugucucgggcaccaugcggucccuaacggaaccauuguuaagacaaucaccaaugaucaaauugaggugacaaacgcuaccgaacuggugcagaucucuagcacaggcgagaucugcgacuccccgcaccagauucuugauggggaaaauuguacccugaucgacgcccuccugggagauccccagugcgacggcuuucaaaacacgaaaugggaucuguucgucgagagaucuaaggccuauagcaauuguuacccuuaugacgugcccgauuacgcuucccuccggucucugguugccagcuccgggacccuugaauuuaacaaugagagcuucgacuggacaggagugacccagaacggcacaucuuccgcuugcaaacgcagaagcgauaagucuuucuucucccggcugaauuggcucacccaucugaaguauaaauacccugcccuuaacgucacgaugcccaauaacgagaaguuugacaaacuguauauuuggggcgugcaccauccugggacagauagcgaccagaucucucucuacgcgcaggccuccggacgcauuaccguuagcacaaagagaucccaacagaccgugaucccgaauauuggcucucggccccgcgucagagacgugagcucccggaucagcaucuacuggaccauugugaaaccuggggauauccugcugauuaacucuacaggaaaccucaucgcuccccgcggcuauuucaagauuagauccggaaagagcucuaucaugcggagcgacgccccuaucgggaaauguaauuccgaaugcauuacgcccaacggcucuaucccgaaugauaagccuuuucagaacgucaaucgcauuaccuacggcgcuugucccagauauguuaaacagaacacacugaaacuugccaccgggaugcggaaugugccugagaagcaaacacgcggaaucuucggcgcgauugccggguuuaucgaaaacggaugggagggcaugguggacgggugguacggauucagacaccagaauagcgagggcaccggccaggcugccgaucugaaguccacgcaagcugccaucaaccagauuaaugggaaacucaaccggcugaucggaaagacaaaugaaaaguuucaccagauugagaaagaauuuagcgaggucgaaggcagaauccaggaccuugagaaguauauugaggauaccaaaaucgaccuguggucuuacaacgccgaacuccugguggcucuggagaaucaacauaccauugaucucacagacuccgaaaugaacaagcuguucgagcgcaccaaaaagcagcuucgggaaaacgcggaggauauggggaauggaugcuuuaagaucuaucacaaaugugacaacgccugcaucggcagcauuagaaaugggacauacgaccaugauguuuaccgcgacgaggcucugaacaaucgguuccagaucaagggcguggaacucaaaucuggauauaaggauuggauucuguggaucuccuuugccauuagcugcuuccuucugugugucgcccuccugggcuuuaucaugugggcuugccagaaagggaacaucagauguaauauuugcaucuga

SEQ ID NO: 193862 - RNA, 1701 nt, Artificial Sequence
  derived and/or modified CDS sequence (opt5) from hemagglutinin__InfluenzaA__ABU92640
augaagaccaucauugcccugagcuacauccucugccugguguucgcucagaaacuucccggcaacgacaauuccacagccacgcugugucucgggcaccaugcggucccuaacggaaccauuguuaagacaaucaccaaugaucaaauugaggugacaaacgcuaccgaacuggugcagucuagcuccacaggcgagaucugcgacucuccgcaccagauccuugauggggaaaauuguacccugauugacgcccuccugggagauccccagugcgacggcuuucaaaacaaaaagugggaucuguucgucgagagaagcaaagccuauuccaauuguuacccuuaugacgugcccgauuacgcuucucuccggagccugguugccuccagcgggacgcuugaauuuaacaaugagucuuucaacuggaccggagugacacagaauggcaccuccagcgcuugcaagcgcagaucuaacaauuccuuuuucagccggcugaacuggcucacacaucugaaguuuaaauauccugcccuuaaugucaccaugcccaacaacgagaaguucgacaaacuguacaucuggggcgugcaccauccugggacggauaaugaccagauuuuucucuaugcgcaggccucuggacgcaucacaguuuccaccaagagaagccaacagacagugauuccgaacaucggcucccggccccgcgucagaaauauuccuucucggaucagcaucuacuggaccauugugaaacccggggauauccugcugauuaacuccaccggaaaucucaucgcuccucgcggcuacuucaagauuagaagcgggaagucuuccaucaugcggagcgacgcccccaucggaaaauguaacucugaaugcauuacaccgaauggcagcaucccuaacgacaagcccuuucagaaugugaaccgcauuacguauggcgcuuguccuagauacgucaaacagaauacccugaaacuugccacagggaugcggaacguucccgagaagcaaacccgcggaaucuucggcgcgauugccggguuuaucgaaaauggaugggagggcaugguggaugggugguauggauucagacaccagaacuccgagggcaucggccaggcugccgaccugaagucuacacaagcugccauuaaucagaucaacgggaaacucaaccggcugauuggaaagaccaaugaaaaguuccaccagaucgagaaagaauuuagcgagguggaaggccgcauucaggaucuugagaaguacgucgaggacacgaaaaucgaucugugguccuauaacgccgaacuccugguggcucuggagaaucaacauacaauugaccucaccgauagcgaaaugaacaagcuguucgagagaaccaaaaagcagcuucgggaaaaugcggaggacauggggaacggaugcuuuaagaucuaccacaaaugugauaaugccugcaucggcucuauuagaaacgggacauaugaccaugauguuuaccgcgacgaggcucugaauaaccgguuccagaucaagggcguggaacucaaauccggauacaaggacuggauucuguggaucagcuuugccauuucuugcuuccuucugugugccgcucuccugggcuuuaucaugugggccugccagaaagggaauaucagauguaacauuugcaucuga

SEQ ID NO: 193863 - RNA, 1701 nt, Artificial Sequence
  derived and/or modified CDS sequence (opt5) from hemagglutinin__InfluenzaA__ABU92641
augaagaccaucauugcccugagcuacauccucugccugguguucgcucagaaacuucccggcaacgacaauuccacagccacgcugugucucgggcaccaugcggucccuaacggaaccauuguuaagacaaucaccaaugaucaaauugaggugacaaacgcuaccgaacuggugcagucuagcuccacaggcgggaucugcgacucuccgcaccagauccuugauggagagaauuguacccugauugacgcccuccugggcgauccccagugcgacggguuucaaaacaaaaagugggaucuguucgucgaaagaagcaaagccuauuccaauuguuacccuuaugacgugcccgauuacgcuucucuccggagccugguugccuccagcggaacgcuugaguuuaacaaugaaucuuucaacuggaccggcgugacacagaauggcaccuccagcgcuugcaagcgcaagucuaacaauuccuuuuucagcagacugaacuggcucacacaucugaaauuuaaguauccugcccuuaaugucaccaugcccaacaacgagaaauucgacaagcuguacaucuggggagugcaccauccugggacggauaaugaccagauuucucucuaugcgcaggccuccggccggaucacaguuagcaccaaacgcucccaacagacagugauuccgaacaucgggucuagaccccggguccgcgauauuccuagcagaaucuccaucuacuggaccauugugaagcccggagacauccugcugauuaauagcaccggcaaccucaucgcuccucggggguacuuuaagauucgcucuggaaaauccagcaucaugagaucugacgcccccaucggcaaguguaauagcgagugcauuacaccgaacggcuccaucccuaaugauaaacccuuccagaacgugaaucggauuacguauggggcuuguccucgcuacgucaagcagaacacccugaaacuugccacaggaaugagaaauguucccgaaaagcaaacccggggcaucuuuggggcgauugccggauucaucgagaacggcugggaagggaugguggacggaugguauggcuuucgccaccaaaauucugagggcaucgggcaggcugccgaucugaaaagcacacaggcugccauuaaccagaucaauggaaagcucaacagacugauuggcaagaccaacgagaaauuccaccagaucgaaaaggaguucuccgaaguggaggggcggauucaggaccuugaaaaauacgucgaggauacgaagaucgaccuguggagcuauaaugccgagcuccugguggcucuggaaaaccaacauacaauugaucucaccgacucugagaugaauaaacuguuugaaagaaccaagaagcagcuucgcgagaacgcggaagauaugggaaauggcugcuucaaaaucuaccacaagugugacaacgccugcaucggguccauucggaauggcacauaugaucaugacguuuacagagacgaggcucugaacaaucgcuuucagaucaaaggaguggagcucaagagcggcuacaaagauuggauucuguggaucucuuucgccauuuccugcuuucuucugugugucgcccuccugggguucaucaugugggcuugccagaagggaaacauccgguguaauauuugcaucuga

SEQ ID NO: 193864 - RNA, 1701 nt, Artificial Sequence
  derived and/or modified CDS sequence (opt5) from hemagglutinin__InfluenzaA__ABU92642
augaagaccaucauugcccugagcuacauccucugccugguguucgcucagaaacuucccggcaacgacaauuccacagccacgcugugucucgggcaccaugcggucccuaacggaaccauuguuaagacaaucaccaaugaucaaauugaggugacaaacgcuaccgaacuggugcagucuagcuccacaggcgggaucugcgacucuccgcaccagauccuugauggagagaauuguacccugauugacgcccuccugggcgauccccagugcgacggguuucaaaacaaaaagugggaucuguucgucgaaagaagcaaagccuauuccaauuguuacccuuaugacgugcccgauuacgcuucucuccggagccugguugccuccagcggaacgcuugaguuuaacaaugaaucuuucaacuggaccggcgugacacagaauggcaccuccagcgcuugcaagcgcagaucuaacaauuccuuuuucagccggcugaacuggcucacacaucugaaguuuaaauauccugcccuuaaugucaccaugcccaacaacgagaaguucgacaaacuguacaucuggggagugcaccauccugggacggauaaugaccagauuuuucucuaugcgcaggccucuggccgcaucauuguuuccacaaagagaagccaacagaccgugaucccgaacauugggucccggccccgcgucagaaauaucccuucucggaucagcauuuacuggacaaucgugaaacccggagauauucugcugaucaacuccaccggcaaucucauugcuccucgcggguacuucaagaucagaagcggaaagucuuccaucaugcggagcgacgcccccauuggcaaauguaacucugagugcaucaccccgaauggcagcauuccuaacgacaagcccuuucagaaugugaaccgcaucacauauggggcuuguccuagauacgucaaacagaauacgcugaaacuugccaccggaaugcggaacguucccgaaaaacaaacacgcggcauuuucggggcgaucgccggauuuaucgagaauggcugggaagggaugguggauggaugguauggcuucagacaccagaacuccgagggcauugggcaggcugccgaccugaagucuacccaagcugccaucgaucagauuaauggaaaacucaaccggcugaucggcaagacaaacgagaaguuccaccagauugaaaaagaguuuagcgaaguggaggggagaauccaggaccuugaaaaguacgucgaggauaccaaaauugaccugugguccuauaaugccgagcuccugguggcucuggaaaaccaacauacgaucgaucucacagacagcgagaugaauaagcuguucgaaaagaccaagaagcagcuucgcgagaacgcggaagauaugggaaauggcugcuuuaaaaucuaccacaagugugacaacgccugcauugggucuauccggaauggcaccuaugaucaugacguuuacagagacgaggcucugaacaaucgcuuccagauuaaaggaguggagcucaaguccggcuacaaagauuggauccuguggauuagcuuugccaucucuugcuuccuucugugugucgcccuccugggguuuaucaugugggcuugccagaagggaaacauucgguguaauaucugcauuuga

SEQ ID NO: 193865 - RNA, 1701 nt, Artificial Sequence
  derived and/or modified CDS sequence (opt5) from hemagglutinin__InfluenzaA__ABU92643
augaagaccaucauugcccugagcuacauccucugccugguguucgcucagaaacuucccggcaacgacaauuccacagccacgcugugucucgggcaccaugcggucccuaacggaaccauuguuaagacaaucaccaaugaucaaauugaggugacaaacgcuaccgaacuggugcagaucucuagcacaggcgagaucugcgacuccccgcaccagauucuugauggggaaaauuguacccugaucgacgcccuccugggagauccccagugcgacggcuuucaaaacaaaaagugggaucuguucgucgagagaucuaaagccuauagcaauuguuacccuuaugacgugcccgauuacgcuucccuccggucucugguugccagcuccgggacgcuugaauuuaacaaugagagcuucgacuggaccggagugacacagaacggcaccucuuccgcuugcaagcgcagaagcgauaagucuuucuucucccggcugaauuggcucacacaucugaaauauaaguacccugcccuuaacgucaccaugcccaauaacgagaaauuugacaagcuguauauuuggggcgugcaccauccugggacggauagcgaccagaucucucucuacgcgcaggccuccggacgcauuacaguuagcaccaaaagaucccaacagacagugaucccgaauauuggcucucggccccgcgucagagacgugagcucccggaucagcaucuacuggaccauugugaagccuggggauauccugcugauuaacucuaccggaaaccucaucgcuccccgcggcuauuucaagauuagauccgggaaaagcucuaucaugcggagcgacgccccuaucggaaaguguaauuccgaaugcauuacacccaacggcucuaucccgaaugauaaaccuuuucagaacgucaaucgcauuacguacggcgcuugucccagauauguuaagcagaacacccugaaacuugccacagggaugcggaaugugccugagaagcaaacccgcggaaucuucggcgcgauugccggguuuaucgaaaacggaugggagggcaugguggacgggugguacggauucagacaccagaauagcgagggcacaggccaggcugccgaucugaaauccacccaagcugccaucaaccagauuaaugggaagcucaaccggcugaucggaaagacgaaugaaaaauuucaccagauugagaaggaauuuagcgaggucgaaggcagaauccaggaccuugagaaauauguggaggauacaaagauugaccuguggucuuacaacgccgaacuccugguugcucuggagaaucaacauaccaucgaucucaccgacuccgaaaugaacaaacuguucgagcgcacaaagaagcagcuucgggaaaacgcggaggauauggggaauggaugcuuuaaaauuuaucacaagugugacaacgccugcaucggcagcaucagaaaugggaccuacgaccauaacguguaccgcgaugaggcucugaauaaccgguuccagauuaaaggcgucgaacucaagucuggauauaaagacuggauccuguggauuuccuuugccaucagcugcuuccuucuguguguggcccuccugggcuuuauuaugugggcuugccagaaggggaauaucagauguaacaucugcauuuga

SEQ ID NO: 193866 - RNA, 1701 nt, Artificial Sequence
  derived and/or modified CDS sequence (opt5) from hemagglutinin__InfluenzaA__ABU92645
augaagaccaucauugcccugagcuacauccucugccugguguucgcucagaaacuucccggcaacgacaauuccacagccacgcugugucucgggcaccaugcggucccuaacggaaccauuguuaagacaaucaccaaugaucaaauugaggugacaaacgcuaccgaacuggugcagucuagcuccacaggcgagaucugcgacucuccgcaccagauccuugauggggaaaauuguacccugauugacgcccuccugggagauccccagugcgacggcuuucaaaacaaaaagugggaucuguucgucgagagaagcaaagccuauuccaauuguuacccuuaugacgugcccgauuacgcuucucuccggagccugguugccuccagcgggacgcuugaauuuaacaaugagucuuucaacuggaccggagugacacagaauggcaccuccagcgcuugcaagcgcagaucuaacaauuccuuuuucagccggcugaacuggcucacacaucugaaguuuaaauauccugcccuuaaugucaccaugcccaacaacgagaaguucgacaaacuguacaucuggggcgugcaccauccugggacggauaaugaccagauuuuucucuaugcgcaggccucuggacgcaucacaguuuccaccaagagaagccaacagacagugauuccgaacaucggcucccggccccgcgucagaaauauuccuucucggaucagcaucuacuggaccauugugaaacccggggauauccugcugauuaacuccaccggaaaucucaucgcuccucgcggcuacuucaagauuagaagcgggaagucuuccaucaugcggagcgacgcccccaucggaaaauguaacucugaaugcauuacaccgaauggcagcaucccuaacgacaagcccuuucagaaugugaaccgcauugcuuauggcgccuguccuagauacgucaaacagaauacgcugaaacuugcgaccgggaugcggaacguucccgagaagcaaacacgcggaaucuucggcgccauugcuggguuuaucgaaaauggaugggagggcaugguggaugggugguauggauucagacaccagaacuccgagggcaucggccaggccgcugaccugaagucuacccaagccgccauuaaucagaucaacgggaaacucaaccggcugauuggaaagacaaaugaaaaguuccaccagaucgagaaagaauuuagcgagguggaaggccgcauucaggaucuugagaaguacgucgaggacaccaaaaucgaucugugguccuauaacgcugaacuccugguggcgcuggagaaucaacauacgauugaccucacagauagcgaaaugaacaagcuguucgagagaaccaaaaagcagcuucgggaaaaugccgaggacauggggaacggaugcuuuaagaucuaccacaaaugugauaaugcuugcaucggcucuauuagaaacgggaccuaugaccaugauguuuaccgcgacgaggcccugaauaaccgguuccagaucaagggcauugaacucaaauccggauacaaggacuggauccuguggauuagcuuugccaucucuugcuuccuucugugugugguccuccugggcuuuaucaugugggcuugccagaaagggaauauuagauguaacaucugcauuuga

SEQ ID NO: 193867 - RNA, 1701 nt, Artificial Sequence
  derived and/or modified CDS sequence (opt5) from hemagglutinin__InfluenzaA__ABU92646
augaagaccaucauugcccugagcuacauccucugccugguguucgcucagaaacuucccggcaacgacaauuccacagccacgcugugucucgggcaccaugcggucccuaacggaaccauuguuaagacaaucaccaaugaucaaauugaggugacaaacgcuaccgaacuggugcagucuagcuccacaggcgggaucugcgacucuccgcaccagauccuugauggagagaauuguacccugauugacgcccuccugggcgauccccagugcgacggguuucaaaacaaaaagugggaucuguucgucgaaagaagcaaagccuauuccaauuguuacccuuaugacgugcccgauuacgcuucucuccggagccugguugccuccagcggaacgcuugaguuuaacaaugaaucuuucaacuggaccggcgugacacagaauggcaccuccagcgcuugcaagcgcagaucuaacaaguccuuuuucagccggcugaauuggcucacacaucugaaauuuaaguauccugcccuuaacgucaccaugcccaauaacgagaaauucgacaagcuguacaucuggggagugcaccauccugggacggauaacgaccagauuucucucuaugcgcaggccuccggccgcaucacaguuagcaccaaaagaucccaacagacagugauuccgaauaucgggucucggccccgcgucagagaugugccuagccggauuuccaucuacuggaccaucgugaagcccggagacauucugcugaucaacagcaccggcaaucucauugcuccucgcggguacuuuaagaucagaucuggaaaauccagcauuaugcggucugacgcccccaucggcaaguguaacagcgagugcaucacaccgaauggcuccauuccuaacgauaaacccuuccagaaugucaaccgcaucacguauggggcuuguccuagauacguuaagcagaauacccugaaacuugccacaggaaugcggaacgugcccgaaaagcaaacccgcggcauuuuuggggcgaucgccggauucauugagaauggcugggaagggaugguggacggaugguauggcuuuagacaccagaacucugagggcacagggcaggcugccgaucugaaaagcacccaagcugccaucaaucagaucaacggaaagcucaaucggcugauuggcaagacgaacgagaaauuccaccagaucgaaaaggaguucuccgaagucgaggggcgcauucaggaccuugaaaaauacguggaggauacaaagaucgaccuguggagcuauaacgccgagcuccugguugcucuggaaaaucaacauaccauugaucucaccgacucugagaugaacaaacuguuugaaagaacaaagaagcagcuucgggagaaugcggaagauaugggaaacggcugcuucaaaaucuaccacaagugugacaaugccugcauuggguccaucagaaacggcaccuaugaucaugacguguaccgcgacgaggcucugaauaaccgguuucagaucaaaggagucgagcucaagagcggcuacaaagauuggauucuguggaucucuuucgccauuuccugcuuucuucuguguguggcccuccugggguucaucaugugggcuugccagaagggaaauauuagauguaacaucugcaucuga

SEQ ID NO: 193868 - RNA, 1701 nt, Artificial Sequence; identical to SEQ ID NO: 192145
  derived and/or modified CDS sequence (opt5) from hemagglutinin__InfluenzaA__ABU92647

SEQ ID NO: 193869 - RNA, 1701 nt, Artificial Sequence
  derived and/or modified CDS sequence (opt5) from hemagglutinin__InfluenzaA__ABU92648
augaagaccaucauugcccugagcuacauccucugccugguguucgcucagaaacuucccggcaacgacaauuccacagccacgcugugucucgggcaccaugcggucccuaacggaaccauuguuaagacaaucaccaaugaucaaauugaggugacaaacgcuaccgaacuggugcagaucucuagcacaggcgagaucugcgacuccccgcaccagauucuugauggggaaaauuguacccugaucgacgcccuccugggagauccccagugcgacggcuuucaaaacaaaaagugggaucuguucgucgagagaucuaaagccuauagcaauuguuacccuuaugacgugcccgauuacgcuucccuccggucucugguugccagcuccgggacgcuugaauuuaacaaugagagcuucaacuggaccggagugacacagaauggcaccucuuccgcuugcaagcgcagaagcgacaagucuuucuucucccggcugaacuggcucacacaucugaaauauaaguacccugcccuuaaugucaccaugcccaacaaugagaaauuugauaagcuguauauuuggggcgugcaccauccugggacggacagcgaucagaucucucucuacgcgcaggccuccggacgcauuacaguuagcaccaaaagaucccaacagacagugaucccgaacauuggcucucggccccgcgucagagacgugagcucccggaucagcaucuacuggaccauugugaagccuggggacauccugcugauuaacucuaccggaaaucucaucgcuccccgcggcuauuucaagauuagauccgggaaaagcucuaucaugcggagcgaugccccuaucggaaaguguaacuccgaaugcauuacacccaauggcucuaucccgaacgacaaaccuuuucagaaugucaaccgcauuacguacggcgcuugucccagauauguuaagcagaauacccugaaacuugccacagggaugcggaacgugccugagaagcaaacccgcggaaucuucggcgcgauugccggguuuaucgaaaauggaugggagggcaugguggaugggugguacggauucagacaccagaacagcgagggcacaggccaggcugccgaccugaaauccacccaagcugccaucaaucagauuaacgggaagcucaaucggcugaucggaaagacgaacgaaaaauuucaccagauugagaaggaauuuagcgaggucgaaggcagaauccaggaucuugagaaauauguggaggacacaaagauugaucuguggucuuacaaugccgaacuccugguugcucuggagaaccaacauaccaucgaccucaccgauuccgaaaugaacaaacuguucgagcgcacaaagaagcagcuucgggaaaaugcggaggacauggggaacggaugcuuuaaaauuuaucacaagugugauaaugccugcaucggcagcaucagaaacgggaccuacgaccaugacguguaccgcgaugaggcucugaauaaccgguuccagauuaaaggcgucgaacucaagucuggauauaaagacuggauccuguggauuuccuuugccaucagcugcuuccuucuguguguggcccuccugggcuuuauuaugugggcuugccagaaggggaauaucagauguaacaucugcauuuga

SEQ ID NO: 193870 - RNA, 1701 nt, Artificial Sequence; identical to SEQ ID NO: 192145
  derived and/or modified CDS sequence (opt5) from hemagglutinin__InfluenzaA__ABU92649

SEQ ID NO: 193871 - RNA, 1701 nt, Artificial Sequence; identical to SEQ ID NO: 193834
  derived and/or modified CDS sequence (opt5) from hemagglutinin__InfluenzaA__ABU92650

SEQ ID NO: 193872 - RNA, 1701 nt, Artificial Sequence
  derived and/or modified CDS sequence (opt5) from hemagglutinin__InfluenzaA__ABU92651
augaagaccaucauugcccugagcuacauccucugccugguguucgcucagaaacuucccggcaacgacaauuccacagccacgcugugucucgggcaccaugcggucccuaacggaaccauuguuaagacaaucaccaaugaucaaauugaggugacaaacgcuaccgaacuggugcagaucucuagcacaggcgagaucugcgacuccccgcaccagauucuugauggggaaaauuguacccugaucgacgcccuccugggagauccccagugcgacggcuuucaaaacaaaaagugggaucuguucgucgagagaucuaaagccuauagcaauuguuacccuuaugacgugcccgauuacgcuucccuccggucucugguugccagcuccgggacgcuugaauuuuauaacgagagcuucgacuggaccggagugacacagaauggcaccucuuccgcuugcaagcgcagaagcgauaagucuuucuucucccggcugaacuggcucacacaucugaaauacaaguauccugcccuuaaugucaccaugcccaacaaugagaaauuugacaagcuguacauuuggggcgugcaccauccugggacggauagcgaccagaucucucucuacgcgcaggccuccggacgcauuacaguuagcaccaaaagaucccaacagacagugaucccgaacauuggcucucggccccgcgucagagacgugagcucccggaucagcaucuauuggaccauugugaagccuggggauauccugcugauuaauucuaccggaaaccucaucgcuccccgcggcuacuucaagauuagauccgggaaaagcucuaucaugcggagcgacgccccuaucggaaaguguaacuccgaaugcauuacacccaauggcucuaucccgaacgauaaaccuuuucagaaugucaaccgcauuacguauggcgcuugucccagauacguuaagcagaauacccugaaacuugccacagggaugcggaacgugccugagaagcaaacccgcggaaucuucggcgcgauugccggguuuaucgaaaauggaugggagggcaugguggacgggugguauggauucagacaccagaacagcgagggcacaggccaggcugccgaucugaaauccacccaagcugccaucaaucagauuaacgggaagcucaaucggcugaucggaaagacgaacgaaaaauuucaccagauugagaaggaauuuagcgaggucgaaggcagaauccaggaccuugagaaauacguggaggauacaaagauugaccuguggucuuauaaugccgaacuccugguugcucuggagaaccaacauaccaucgaucucaccgacuccgaaaugaauaaacuguucgagcgcacaaagaagcagcuucgggaaaacgcggaggauauggggaacggaugcuuuaaaauuuaccacaagugugacaaugccugcaucggcagcaucagaaacgggaccuacgaccaugauguguaucgcgacgaggcucugaauaaccgguuccagauuaaaggcgucgaacucaagucuggauacaaagauuggauccuguggauuuccuuugccaucagcugcuuccuucuguguguggcccuccugggcuuuauuaugugggcuugccagaaggggaauaucagauguaacaucugcauuuga

SEQ ID NO: 193873 - RNA, 1701 nt, Artificial Sequence
  derived and/or modified CDS sequence (opt5) from hemagglutinin__InfluenzaA__ABU92652
augaagaccaucauugcccugagcuacauccucugccugguguucgcucagaaacuucccggcaacgacaauuccacagccacgcugugucucgggcaccaugcggucccuaacggaaccauuguuaagacaaucaccaaugaucaaauugaggugacaaacgcuaccgaacuggugcagucuagcuccacaggcgggaucugcgacucuccgcaccagauccuugauggagagaauuguacccugauugacgcccuccugggcgauccccagugcgacggguuucaaaacaaaaagugggaucuguucgucgaaagaagcaaagccuauuccaauuguuacccuuaugacgugcccgauuacgcuucucuccggagccugguugccuccagcggaacgcuugaguuuaacaaugaaucuuucgacuggaccggcgugacacagaacggcaccuccagcgcuugcaagcgcagaucuaauaaguccuuuuucagccggcugaacuggcucacacaucugaaauauaaguacccugcccuuaaugucaccaugcccaacaaugagaaauuugauaagcuguauaucuggggagugcaccauccugggacggacucugaucagauuucccucuacgcgcaggccagcggccgcaucacaguuuccaccaaaagaucucaacagacagugauuccgaacaucgggagccggccccgcgucagagacguguccagccggauuucuaucuacuggaccaucgugaagccuggagacauucugcugaucaacuccaccggcaaucucauugcuccccgcggguauuucaagaucagaagcggaaaaucuagcauuaugcgguccgaugccccuaucggcaaguguaacucugagugcaucacacccaauggcagcauuccgaacgacaaaccuuuucagaaugucaaccgcaucacguacggggcuugucccagauauguuaagcagaauacccugaaacuugccacaggaaugcggaacgugccugaaaagcaaacccgcggcauuuucggggcgaucgccggauuuauugagaauggcugggaagggaugguggauggaugguacggcuucagacaccagaacuccgagggcacagggcaggcugccgaccugaaaagcacccaagcugccaucaaucagaucaacggaaagcucaaucggcugauuggcaagacgaacgagaaauuucaccagaucgaaaaggaguucucugaagucgaggggcgcauucaggaucuugaaaaauauguggaggacacaaagaucgaucugugguccuacaaugccgagcuccugguugcucuggaaaaccaacauaccauugaccucaccgauagcgagaugaacaaacuguucgaaagaacaaagaagcagcuucgggagaaugcggaagacaucggaaacggcugcuuuaaaauuuaucacaagugugauaaugccugcaucgggucuaucagaaacggcaccuacgaccaugacguguaccgcgaugaggcucugaauaaccgguuccagauuaaaggagucgagcucaaguccggcuauaaagacuggauccuguggauuagcuuugccaucuccugcuuccuucuguguguggcccuccugggguuuauuaugugggcuugccagaagggaaauaucagauguaacaucugcauuuga

SEQ ID NO: 193874 - RNA, 1701 nt, Artificial Sequence; identical to SEQ ID NO: 193834
  derived and/or modified CDS sequence (opt5) from hemagglutinin__InfluenzaA__ABU92653

SEQ ID NO: 193875 - RNA, 1701 nt, Artificial Sequence
  derived and/or modified CDS sequence (opt5) from hemagglutinin__InfluenzaA__ABU92654
augaagaccaucauugcccugagcuacauccucugccugguguucgcucagaaacuucccggcaacgacaauuccacagccacgcugugucucgggcaccaugcggucccuaacggaaccauuguuaagacaaucaccaaugaucaaauugaggugacaaacgcuaccgaacuggugcagucuagcuccacaggcgggaucugcgacucuccgcaccagauccuugauggagagaauuguacccugauugacgcccuccugggcgauccccagugcgacggguuucaaaacaaaaagugggaucuguucgucgaaagaagcaaagccuauuccaauuguuacccuuaugacgugcccgauuacgcuucucuccggagccugguugccuccagcggaacgcuugaguuuaacaaugaaucuuucaacuggaccggcgugacacagaauggcaccuccagcgcuugcaagcgcagaucuaacaaguccuuuuucagccggcugaauuggcucacacaucugaaauuuaaguauccugcccuuaacgucaccaugcccaauaacgagaaauucgacaagcuguacaucuggggagugcaccauccugggacggauaacgaccagauuucucucuaugcgcaggccuccggcaaaaucacaguuagcaccaagcgcucccaacagacagugauuccgaauaucgggucuagaccccggguccgcgaugugccuagcagaauuuccaucuacuggaccaucgugaagcccggagacauucugcugaucaacagcaccggcaaucucauugcuccucggggguacuuuaaaauccgcucuggaaaguccagcauuaugagaucugacgcccccaucggcaaauguaacagcgagugcaucacaccgaauggcuccauucugaacgauaagccuuuccagaaugucaaccggaucacguauggggcuuguccccgcuacguuaaacagaauacccuuaagcuggccacaggaaugagaaacgugccugaaaaacaaacccggggcauuuuuggggcgaucgccggauucauugagaauggcugggaagggaugguggacggaugguauggcuuucgccaccagaacgcugagggcacagggcaggccgcugaucucaagucuacccaagccgccaucaaucagaucaacggaaagcugaauagacuuauuggcaaaacgaacgagaaguuccaccagaucgaaaaagaguucagcgaagucgaggggcggauucaggaccuggaaaaguacguggaggauacaaaaaucgaccucugguccuauaacgcugagcugcugguugcgcucgaaaaucaacauaccauugaucugaccgacagcgagaugaacaaacuuuuugaaagaacaaagaagcagcugcgcgagaaugccgaagauaugggaaacggcugcuucaagaucuaccacaaaugugacaaugcuugcauugggucuauccggaacggcaccuaugaucaugacguguacagagacgaggcccucaauaaccgcuuucagaucaagggagucgagcugaaauccggcuacaaggauuggauucuuuggaucagcuucgccauuucuugcuuucugcucuguguggcucugcugggguucaucaugugggccugccagaagggaaauauucgguguaacaucugcaucuga

SEQ ID NO: 193876 - RNA, 1701 nt, Artificial Sequence
  derived and/or modified CDS sequence (opt5) from hemagglutinin__InfluenzaA__ABU92655
augaagaccaucauugcccugagcuacauccucugccugguguucgcucagaaacuucccggcaacgacaauuccacagccacgcugugucucgggcaccaugcggucccuaacggaaccauuguuaagacaaucaccaaugaucaaauugaggugacaaacgcuaccgaacuggugcagucuagcuccacaggcgggaucugcgacucuccgcaccagauccuugauggagagaauuguacccugauugacgcccuccugggcgauccccagugcgacggguuucaaaacaaaaagugggaucuguucgucgaaagaagcaaagccuauuccaauuguuacccuuaugacgugcccgauuacgcuucucuccggagccugguugccuccagcggaacgcuugaguuuaacaaugaaucuuucaacuggaccggcgugacacagaauggcaccuccagcgcuugcaagcgcagaucuaacaaguccuuuuucagccggcugaauuggcucacacaucugaaauuuaaguauccugcccuuaacgucaccaugcccaauaacgagaaauucgacaagcuguacaucuggggagugcaccauccugggacggauaacgaccagauuucucucuaugcgcaggccuccggccgcaucacaguuagcaccaaaagaucccaacagacagugauuccgaauaucgggucucggccccgcgucagagaugugccuagccggauuuccaucuacuggaccaucgugaagcccggagacauucugcugaucaacagcaccggcaaucucauugcuccucgcggguacuuuaagaucagaucuggaaaauccagcauuaugcggucugacgcccccaucggcaaguguaacagcgagugcaucacaccgaauggcuccauuccuaacgauaaacccuuccagaaugucaaccgcaucacguauggggcuuguccuagauacguuaagcagaauacccugaaacuugccacaggaaugcggaacgugcccgaaaagcaaacccgcggcauuuuuggggcgaucgccggauucauugagaauggcugggaagggaugguggacggaugguauggcuuuagacaccagaacgcugagggcacagggcaggccgcugaucugaaaucuacccaagccgccaucaaucagaucaacggaaagcucaaucggcugauuggcaagacgaacgagaaauuccaccagaucgaaaaggaguucagcgaagucgaggggcgcauucaggaccuugaaaaauacguggaggauacaaagaucgaccugugguccuauaacgcugagcuccugguugcgcuggaaaaucaacauaccauugaucucaccgacagcgagaugaacaaacuguuugaaagaacaaagaagcagcuucgggagaaugccgaagauaugggaaacggcugcuucaaaaucuaccacaagugugacaaugcuugcauugggucuaucagaaacggcaccuaugaucaugacguguaccgcgacgaggcccugaauaaccgguuucagaucaaaggagucgagcucaaguccggcuacaaagauuggauucuguggaucagcuucgccauuucuugcuuucuucuguguguggcucuccugggguucaucaugugggccugccagaagggaaauauuagauguaacaucugcaucuga

SEQ ID NO: 193877 - RNA, 1701 nt, Artificial Sequence; identical to SEQ ID NO: 193834
  derived and/or modified CDS sequence (opt5) from hemagglutinin__InfluenzaA__ABU92656

SEQ ID NO: 193878 - RNA, 1701 nt, Artificial Sequence; identical to SEQ ID NO: 192705
  derived and/or modified CDS sequence (opt5) from hemagglutinin__InfluenzaA__ABU92657

SEQ ID NO: 193879 - RNA, 1701 nt, Artificial Sequence; identical to SEQ ID NO: 193834
  derived and/or modified CDS sequence (opt5) from hemagglutinin__InfluenzaA__ABU92658

SEQ ID NO: 193880 - RNA, 1701 nt, Artificial Sequence; identical to SEQ ID NO: 192705
  derived and/or modified CDS sequence (opt5) from hemagglutinin__InfluenzaA__ABU92659

SEQ ID NO: 193881 - RNA, 1701 nt, Artificial Sequence; identical to SEQ ID NO: 193834
  derived and/or modified CDS sequence (opt5) from hemagglutinin__InfluenzaA__ABU92660

SEQ ID NO: 193882 - RNA, 1701 nt, Artificial Sequence
  derived and/or modified CDS sequence (opt5) from hemagglutinin__InfluenzaA__ABU92661
augaagaccaucauugcccugagcuacauccucugccugguguucgcucagaaacuucccggcaacgacaauuccacagccacgcugugucucgggcaccaugcggucccuaacggaaccauuguuaagacaaucaccaaugaucaaauugaggugacaaacgcuaccgaacuggugcagaucucuagcacaggcgagaucugcgacuccccgcaccagauucuugauggggaaaauuguacccugaucgacgcccuccugggagauccccagugcgacggcuuucaaaacaaaaagugggaucuguucgucgagagaucuaaagccuauagcaauuguuacccuuaugacgugcccgauuacgcuucccuccggucucugguugccagcuccgggacgcuugaauuuaacaaugagagcuucgacuggaccggagugacacagaacggcaccucuuccgcuugcaagcgcagaagcgauaagucuuucuucucccggcugaauuggcucacacaucugaaauauaaguacccugcccuuaacgucaccaugcccaauaacgagaaauuugacaagcuguauauuuggggcgugcaccauccugggacggauagcgaccagaucucucucuacgcgcaggccuccggacgcauuacaguuagcaccaaaagaucccaacagacagugaucccgaauauuggcucucggccccgcgucagagacgugagcucccggaucagcaucuacuggaccauugugaagccuggggauauccugcugauuaacucuaccggaaaccucaucgcuccccgcggcuauuucaagauuagauccgggaaaagcucuaucaugcggagcgacgccccuaucggaaaguguaauuccgaaugcauuacacccaacggcucuaucccgaaugauaaaccuuuucagaacgucaaucgcauuacguacggcgcuugucccagauauguuaagcagaacacccugaaacuugccacagggaugcggaaugugccugagaagcaaacccgcggaaucuucggcgcgauugccggguuuaucgaaaacggaugggagggcaugguggacgggugguacggauucagacaccagaauagcgagggcacaggccaggcugccgaucugaaauccacccaagcugccaucaaccagauuaaugggaagcucaaccggcugaucggaaagacgaaugaaaaauuucaccagauugagaaggaauuuagcgaggucgaaggcagaauccaggaccuugagaaauauguggaggauacaaagauugaccuguggucuuacaacgccgaacuccugguugcucuggagaaucaacauaccaucgaucucaccgacuccgaaaugaacaaacuguucgagcgcacaaagaagcagcuucgggaaaacgcggaggauauggggaauggaugcuuuaaaauuuaucacaagugugacaacgccugcaucggcagcaucagaaaugggaccuacgaccaugauguguaccgcgacgaggcucugaacaaucgguuccagauuaaaggcgucgaacucgagucuggauauaaggauuggauccuguggauuuccuuugccaucagcugcuuccuucuguguguggcccuccugggcuuuauuaugugggcuugccagaaagggaacaucagauguaauaucugcauuuga

SEQ ID NO: 193883 - RNA, 1701 nt, Artificial Sequence; identical to SEQ ID NO: 192145
  derived and/or modified CDS sequence (opt5) from hemagglutinin__InfluenzaA__ABU92662

SEQ ID NO: 193884 - RNA, 1701 nt, Artificial Sequence; identical to SEQ ID NO: 193834
  derived and/or modified CDS sequence (opt5) from hemagglutinin__InfluenzaA__ABU92663

SEQ ID NO: 193885 - RNA, 1701 nt, Artificial Sequence; identical to SEQ ID NO: 193834
  derived and/or modified CDS sequence (opt5) from hemagglutinin__InfluenzaA__ABU92664

SEQ ID NO: 193886 - RNA, 1701 nt, Artificial Sequence
  derived and/or modified CDS sequence (opt5) from hemagglutinin__InfluenzaA__ABU92665
augaagaccaucauugcccugagcuacauccucugccugguguucgcucagaaacuucccggcaacgacaauuccacagccacgcugugucucgggcaccaugcggucccuaacggaaccauuguuaagacaaucaccaaugaucaaauugaggugacaaacgcuaccgaacuggugcagucuagcuccacaggcgggaucugcgacucuccgcaccagauccuugauggagagaauuguacccugauugacgcccuccugggcgauccccagugcgacggguuucaaaacaaaaagugggaucuguucgucgaaagaagcaaagccuauuccaauuguuacccuuaugacgugcccgauuacgcuucucuccggagccugguugccuccagcggaacgcuugaguuuaacaaugaaucuuucaacuggaccggcgugacacagaauggcaccuccagcgcuugcaagcgcagaucuaacaaguccuuuuucagccggcugaauuggcucacacaucugaaauuuaaguauccugcccuuaacgucaccaugcccaauaacgagaaauucgacaagcuguacaucuggggagugcaccauccugggacggauaacgaccagauuucucucuaugcgcaggccuccggccgcaucacaguuagcaccaaaagaucccaacagacagugauuccgaauaucgggucucggccccgcgucagagaugugccuagccggauuuccaucuacuggaccaucgugaagcccggagacauucugcugaucaacagcaccggcaaucucauugcuccucgcggguacuuuaagaucagaucuggaaaauccagcauuaugcggucugacgcccccaucggcaaguguaacagcgagugcaucacaccgaauggcuccauuccuaacgauaaacccuuccagaaugucaaccgcaucacguauggggcuuguccuagauacguuacccagaauacacugaagcuggccaccggaaugcggaacgugcccgaaaaacaaacacgcggcauuuuuggggcgaucgccggauucauugagaauggcugggaagggaugguggacggaugguauggcuuuagacaccagaacucugagggcaccgggcaggcugccgaucuuaagagcacgcaagcugccaucaaucagaucaacggaaaacucaaucggcugauuggcaagacaaacgagaaguuccaccagaucgaaaaagaguucuccgaagucgaggggcgcauucaggaccuugaaaaguacguggaggauaccaaaaucgaccuguggagcuauaacgccgagcuccugguugcucuggaaaaucaacauaccauugaucucacagacucugagaugaacaagcuguuugaaagaaccaaaaagcagcuucgggagaaugcggaagauaugggaaacggcugcuucaagaucuaccacaaaugugacaaugccugcauuggguccaucagaaacggcacauaugaucaugacguguaccgcgacgaggcucugaauaaccgguuucagaucaagggagucgagcucaaaagcggcuacaaggauuggauucuguggaucucuuucgccauuuccugcuuucuucuguguguggcccuccugggguucaucaugugggcuugccagaaaggaaauauuagauguaacaucugcaucuga

SEQ ID NO: 193887 - RNA, 1701 nt, Artificial Sequence; identical to SEQ ID NO: 193834
  derived and/or modified CDS sequence (opt5) from hemagglutinin__InfluenzaA__ABU92666

SEQ ID NO: 193888 - RNA, 1701 nt, Artificial Sequence; identical to SEQ ID NO: 192144
  derived and/or modified CDS sequence (opt5) from hemagglutinin__InfluenzaA__ABU92667

SEQ ID NO: 193889 - RNA, 1701 nt, Artificial Sequence; identical to SEQ ID NO: 192144
  derived and/or modified CDS sequence (opt5) from hemagglutinin__InfluenzaA__ABU92668

SEQ ID NO: 193890 - RNA, 1701 nt, Artificial Sequence
  derived and/or modified CDS sequence (opt5) from hemagglutinin__InfluenzaA__ABU92669
augaagaccaucauugcccugagcuacauccucugccugguguucgcucagaaacuucccgucaacgacaauuccacagccacgcugugucucggccaccaugcgguuccuaacgggacccuggugaagacaauuaccaaugaucacaucgaggugacaaacgcuaccgaacuuguccaaucuagcuccacaggaagaauuugcgacucuccgcaucagauccuggauggcgagaauuguacccucaucgacgcccugcugggggauccccacugcgacggauuucagaacaaagaaugggaucucuucguggagcggagcacggccuauuccaauuguuacccuuaugacguucccgauuacgcuucucugcgcagccuuguggccuccagcggcacccuggaauuuaacaaugagucuuucaacuggacaggggucgcucagaauggaaccuccagcgccugcaagagacggucuauuaaauccuuuuucagccgccucaacuggcugcaucaacuuaaguauaaguacccugcgcugaaugugacaaugcccaacaaugagaaauuugacaagcucuauaucuggggcguucaccacccuucuaccgauuccgaccagauuagccuguacgcccaggcuuccggcagagugacggucucuacaaaacggagccagcaaaccgugaucccgaacauugggucccgccccugggugagaggagucagcucucggaucuccauuuacuggacaaucguuaagccuggcgauauccugcucauuaacagcaccgggaaucugaucgcuccccgcggauauuucaaaauuagaaacggcaagucuagcaucaugcgguccaaugccccuauugggaaguguaacucugaaugcaucacccccaauggaagcaucccgaacgacaaaccuuuucagaaugugaaccgcauuacauacggcgccugucccagauaugugaagcagaauacgcuuaaacuggcgaccggcaugcggaacgucccugagaagcagacacgcgggaucuucggagccauugcuggcuuuaucgaaaaugggugggagggaaugguggacggcugguacggguucagacaucaaaacuccgagggaaccggccaggccgcugaucucaaaagcacacaggccgccauuaaucaaaucaacggcaagcugaaucggcuuaucgagaaaaccaacgaaaaguuucaccagauugaaaaggaguucucugaaguugaggggagaauccaggaccuggagaaauauguggaagauacgaagauugaccucugguccuacaacgcugagcugcuggucgcgcucgaaaaucagcauacaaucgaucugaccgacagcgagaugaacaaacuuuucgaacgcacccggaagcaacugagagagaaugccgaggauaugggaaacggcugcuuuaaaauuuaucacaagugugacaaugcuugcaucgggucuauucgcaacggaacauacgaucacgacguguaccgggaugaagcccucaauaacagauuccagaucaagggcguugagcugaaauccggguauaaggacuggauccuuuggauuagcuuugccaucuccugcuuccugcucugugugguccugcugggcuuuauuaugugggcuugccagaaaggaaauauccgcuguaacauuugcaucuga

SEQ ID NO: 193891 - RNA, 1701 nt, Artificial Sequence; identical to SEQ ID NO: 192144
  derived and/or modified CDS sequence (opt5) from hemagglutinin__InfluenzaA__ABU92670

SEQ ID NO: 193892 - RNA, 1701 nt, Artificial Sequence
  derived and/or modified CDS sequence (opt5) from hemagglutinin__InfluenzaA__ABU92671
augaagaccaucauugcccugagccacauccucugccugguguucgcucagaaacuucccgucaacgacaauuccacagccacgcugugucucggccaucacgcgguuccuaacgggacccuggugaagacaauuaccaaugaucauaucgaggugacaaacgcuaccgaacuuguccaaucuagcuccacaggaagaauuugcgacaucccgcaccagauccuggauggcgagaauuguacccucauugacgcccugcugggggauccccauugcgacggauuucagaacaaagaaugggaucucuucguggagcggucuacggccuacagcaauuguuauccuuacgacguucccgauuaugcuucccugcgcucucuuguggccagcuccggcacccuggaauuuaacaaugagagcuucaacuggacaggggucgcucagaauggaaccucuuccgccugcaagagacggagcaucaaauccuuuuucucucgccucaacuggcugcaccaacuuaaguacaaguauccugcgcugaaugugacaaugcccaacaaugagaaauuugacaagcucuacauuuggggcguucaccauccuagcaccgauucugaccagaucucccuguaugcccaggcuccgggcagagugacggucagcacaaaacggucccagcaaaccgugauucccaacaucgggucucgcccuugggugagaggagucagcucccggauuagcaucuacuggacaaucguuaagcccggcgauauucugcucaucaacucuaccgggaaucugauugccccucgcggauacuucaaaaucagauccggcaagagcucuauuaugcggagcaacgcucccaucgggaaguguaauuccgaaugcaucaccccgaacggaucuauuccuaaugacaaacccuuucagaacgugaaucgcaucacauauggcgccuguccuagauacgugaagcagaacacgcuuaaacuggcgaccggcaugcggaauguccccgagaagcagacacgcgggauuuucggagccaucgcuggcuuuauugaaaacgggugggagggaaugguggacggcugguauggguucagacaccaaaauagcgagggaaccggccaggccgcugaucucaaauccacacaggccgccaucaaccaaaucaauggcaagcugaaccggcuuauugagaaaaccaaugaaaaguuucaucagaucgaaaaggaguucagcgaagcugaggggcgcauucaggaccuggagaaauacguugaagauacgaagaucgaccucuggucuuauaacgcggagcugcugguggcccucgaaaaccagcacacaauugaucugaccgacuccgagaugaauaaacuuuucgaaagaacccggaagcaacugagagagaacgcugaggauaugggaaauggcugcuuuaaaaucuaccacaagugugacaacgccugcauugggagcauccgcaauggaacauaugaucaugacgucuaccgggaugaagcccucaacaauagauuccagaucaagggcguggagcugaaaucuggguacaaggacuggauucuuuggaucuccuuugcuauuagcugcuuccugcucuguguugugcugcugggcuuuaucaugugggccugccagaaaggaaacauucgcuguaauaucugcaucuga

SEQ ID NO: 193893 - RNA, 1701 nt, Artificial Sequence; identical to SEQ ID NO: 192144
  derived and/or modified CDS sequence (opt5) from hemagglutinin__InfluenzaA__ABU92672

SEQ ID NO: 193894 - RNA, 1701 nt, Artificial Sequence; identical to SEQ ID NO: 192144
  derived and/or modified CDS sequence (opt5) from hemagglutinin__InfluenzaA__ABU92673

SEQ ID NO: 193895 - RNA, 1701 nt, Artificial Sequence
  derived and/or modified CDS sequence (opt5) from hemagglutinin__InfluenzaA__ABU92674
augaagaccaucauugcccugagcuacauccucugccugguguucgcucagaaacuucccgucaacgacaauuccacagccacgcugugucucggccaccaugcgguuccuaacgggacccuggugaagacaauuaccaaugaucacaucgaggugacaaacgcuaccgaacuuguccaaucuagcuccacaggaagaauuugcgacucuccgcaucagauccuggauggcgagaauuguacccucaucgacgcccugcugggggauccccacugcgacggauuucagaacaaagaaugggaucucuucguggagcggcgcacggccuauagcaauuguuacccuuaugacguucccgauuacgcuucccugagaucucuuguggccagcuccggcacccuggaauuuaacaaugagagcuucaacuggacaggggucgcucagaauggaaccucuuccgccugcaagcggcgcagcauuaaauccuuuuucucuagacucaacuggcugcaucaacuuaaguauaaguacccugcgcugaaugugacaaugcccaacaaugagaaauuugacaagcucuauaucuggggcguucaccacccuagcaccgauucugaccagauuucccuguacgcccaggcuagcggccgggugacggucuccacaaaacgcucucagcaaaccgugaucccgaacauugggagcagacccugggugcggggagucuccagccgcaucucuauuuacuggacaaucguuaagccuggcgauauccugcucauuaacuccaccgggaaucugaucgcccccagaggauauuucaaaauucggagcggcaagucuagcaucaugcgcuccaacgcuccuauugggaaguguaauucugaaugcaucacccccaacggaagcaucccgaaugacaaaccuuuucagaacgugaauagaauuacauacggcgccuguccccgguaugugaagcagaacacgcuuaaacuggcgaccggcaugcgcaaugucccugagaagcagacaagagggaucuucggagccauugcuggcuuuaucgaaaacgggugggagggaaugguggacggcugguacggguuccggcaucaaaauuccgagggaaccggccaggccgcugaucucaaaagcacacaggccgccauuaaccaaaucaauggcaagcugaacagacuuaucgagaaaaccaaugaaaaguuucaccagauugaaaaggaguucucugaaguugaggggcgcauccaggaccuggagaaauauguggaagauacgaagauugaccucugguccuacaacgcugagcugcuggucgcgcucgaaaaccagcauacaaucgaucugaccgacagcgagaugaauaaacuuuucgaacggaccagaaagcaacugcgcgagaacgccgaggauaugggaaauggcugcuuuaaaauuuaucacaagugugacaacgcuugcaucgggucuauucggaauggaacauacgaucacgacguguacagagaugaagcccucaacaaucgcuuccagaucaagggcguugagcugaaauccggguauaaggacuggauccuuuggauuagcuuugccaucuccugcuuccugcucugugugguccugcugggcuuuauuaugugggcuugccagaaaggaaacauccgguguaauauuugcaucuga

SEQ ID NO: 193896 - RNA, 1701 nt, Artificial Sequence
  derived and/or modified CDS sequence (opt5) from hemagglutinin__InfluenzaA__ABU92675
augaagaccaucauugcccugagcuacauccucugccugguguucgcucagaaacuucccggcaacgacaauuccacagccacgcugugucucgggcaccaugcggucccuaacggaaccauuguuaagacaaucaccaaugaucaaauugaggugacaaacgcuaccgaacuggugcagucuagcuccacaggcgggaucugcgacucuccgcaccagauccuugauggagagaauuguacccugauugacgcccuccugggcgauccccagugcgacggguuucaaaacaaaaagugggaucuguucgucgaaagaagcaaagccuauuccaauuguuacccuuaugacgugcccgauuacgcuucucuccggagccugaucgccuccagcggaacgcuugaguuuaacaaugaaucuuucaacuggaccggcguuacacagaauggcaccuccagcgcuugcaagcgcagaucuaacuccagcuuuuucucucggcugaauuggcucacacaucugaaguuuaaauauccugcccuuaacgugaccaugcccaauaacgaggaguucgacaagcuguacauuuggggaguccaccauccugggacggauaacgaccagaucucccucuaugcgcaggccagcggccgcauuacaguguccaccaaaagaucucaacagacaguuaucccgaauauugggagccggccccgcgugagagauaucccuucccggaucagcauuuacuggaccaucgucaagcccggagacauucugcugaucaacucuaccggcaaucucauugcuccucgcggguacuuuaaaaucagauccggaaagagcucuaucaugcggagcgacgcccccauuggcaaguguaacuccgaaugcaucacaccgaauggcucuauuccuaacgauaaacccuuccagaaugugaaccgcaucacguauggggcuuguccuagauacgugaagcagaauacccugaaacuugccacaggaaugcggaacguccccgagaagcaaacccgcggcauuuuuggggcgaucgccggauucaucgaaaauggcugggaggggaugguugacggaugguauggcuuuagacaccagaacagcgagggcauugggcaggcugccgaucugaaauccacacaagcugccaucgaccagauuaauggaaagcucaaccggcugaucggcaaaaccaaugaaaaguuccaccagauugagaaggaguucagcgaaguggaagggagaauccaggaucuugagaaauacguggaggacacgaagauugaucuguggucuuauaacgccgaacuccuggucgcucuggagaaccaacauacaaucgaccucaccgauuccgaaaugaauaaacuguuugagcgcaccaagaaacagcuucgggaaaacgcggaggacaugggaaauggcugcuucaagaucuaccacaagugugauaacgccugcauggggagcauuagaaauggcacauaugaccaugacguguaccgcgaugaggcucugaacaaucgguuucagaucaaaggaguugaacucaagucuggcuacaaagacuggauucuguggaucuccuucgccauuagcugcuuucuucuguguguggcccuccugggguucaucaugugggcuugccagaagggaaacaucagauguaauauuugcaucuga

SEQ ID NO: 193897 - RNA, 1701 nt, Artificial Sequence; identical to SEQ ID NO: 192705
  derived and/or modified CDS sequence (opt5) from hemagglutinin__InfluenzaA__ABU92676

SEQ ID NO: 193898 - RNA, 1701 nt, Artificial Sequence; identical to SEQ ID NO: 193825
  derived and/or modified CDS sequence (opt5) from hemagglutinin__InfluenzaA__ABU92677

SEQ ID NO: 193899 - RNA, 1701 nt, Artificial Sequence
  derived and/or modified CDS sequence (opt5) from hemagglutinin__InfluenzaA__ABU92678
augaagaccaucauugcccugagcuacauccucugccugguguucgcucagaaacuucccggcaacgacaauuccacagccacgcugugucucgggcaccaugcggucccuaacggaaccauuguuaagacaaucaccaaugaucaaauugaggugacaaacgcuaccgaacuggugcagucuagcuccacaggcgggaucugcgacucuccgcaccagauccuugauggagagaauuguacccugauugacgcccuccugggcgauccccagugcgacgggcugcaaaacaaaaagugggaucucuuugucgaaagaagcaaagccuauuccaauuguuacccuuaugacgugcccgauuacgcuucucugcggagccuuaucgccuccagcggaacgcuggaguucaacaaugaaucuuuuaacuggaccggcguuacacagaauggcaccuccagcgcuugcaagcgcagaucuaacaauuccuucuuuagccggcucaacuggcugacacaucuuaaguucaaauauccugcccugaaugugaccaugcccaacaacgaggaguuugacaagcucuacauuuggggaguccaccauccugggacggauaaugaccagaucucucuguaugcgcaggccuccggccgcauuacagugagcaccaaaagaucccaacagacaguuaucccgaacauugggucucggccccgcgugagagauaucccuagccggaucuccauuuacuggaccaucgucaagcccggagacauucugcucaucaauagcaccggcaaccugauugcuccucgcggguacuucaaaaucagaucuggaaaguccagcaucaugcggucugacgcccccauuggcaauuguaacagcgaaugcaucacaccgaauggcuccauuccuaacgauaagcccuuucagaaugugaaccgcaucacguauggggcuuguccuagauacgugaaacagaauacccuuaagcuggccacaggaaugcggaacguccccgagaaacaaacccgcggcauuuucggggcgaucgccggauuuaucgaaaauggcugggaggggaugguugacggaugguauggcuucagacaccagaacucugagggcauugggcaggcugccgaucucaagagcacacaagcugccaucgaccagauuaauggaaaacugaaccggcuuaucggcaagaccaacgaaaaauuucaccagauugagaaggaguucuccgaaguggaagggagaauccaggaucuggagaaguacguggaggacacgaaaauugaucucuggagcuauaaugccgaacugcuggucgcucucgagaaccaacauacaaucgaccugaccgauucugaaaugaauaaacuuuucgagcgcaccaagaagcagcugcgggaaaacgcggaggacaugggaaauggcugcuuuaaaaucuaccacaagugugauaacgccugcauuggguccaucagaaauggcacauaugaccaugacguguaccgcgaugaggcucucaacaaucgguuccagauuaagggaguugaacugaaaagcggcuacaaggacuggauccuuuggauuucuuuugccaucuccugcuuccugcucuguguggcccugcugggguuuaucaugugggcuugccagaaaggaaacauuagauguaauaucugcauuuga

SEQ ID NO: 193900 - RNA, 1701 nt, Artificial Sequence
  derived and/or modified CDS sequence (opt5) from hemagglutinin__InfluenzaA__ABU92680
augaagaccaucauugcccugagcuacauccucugccugguguucgcucagaaacuucccggcaacgacaauuccacagccacgcugugucucgggcaccaugcggucccuaacggaaccauuguuaagacaaucaccaaugaucaaauugaggugacaaacgcuaccgaacuggugcagucuagcuccacaggcgggaucugcgacucuccgcaccagauccuugauggagagaauuguacccugauugacgcccuccugggcgauccccagugcgacggguuucaaaacaaaaagugggaucuguucgucgaaagaagcaaagccuauuccaauuguuacccuuaugacgugcccgauuacgcuucucuccggagccugguugccuccagcggaacgcuugaguuuaacaaugaaucuuucaacuggaccggcgugacacagaauggcaccuccagcgcuugcaagcgcagaucuaacaauuccuuuuucagccggcugaacuggcucacacaucugaaguuuaaauauccugcccuuaaugucaccaugcccaacaacgagaaguucgacaaacuguacaucuggggagugcaccauccugggacggauaaugaccagauuuuucucuaugcgcaggccucuggccgcaucacaguuuccaccaagagaagccaacagacagugauuccgaacaucgggucccggccccgcgucagaaauauuccuucucggaucagcaucuacuggaccauugugaaacccggagauauccugcugauuaacuccaccggcaaucucaucgcuccucgcggguacuucaagauuagaagcggaaagucuuccaucaugcggagcgacgcccccaucggcaaauguaacucugagugcauuacaccgaauggcagcaucccuaacgacaagcccuuucagaaugugaaccgcauuacguauggggcuuguccuagauacgucaaacagaauacccugaaacuugccacaggaaugcggaacguucccgaaaaacaaacccgcggcaucuucggggcgauugccggauuuaucgagaauggcugggaagggaugguggauggaugguauggcuucagacaccagaacuccgagggcaucgggcaggcugccgaccugaagucuacacaagcugccauugaucagaucaauggaaaacucaaccggcugauuggcaagaccaacgagaaguuccaccagaucgaaaaagaguuuagcgaaguggaggggcgcauucaggaccuugaaaaguacgucgaggauacgaaaaucgaccugugguccuauaaugccgagcuccugguggcucuggaaaaccaacauacaauugaucucaccgacagcgagaugaauaagcuguucgaaaagaccaagaagcagcuuagagagaacgcggaagauaugggaaauggcugcuuuaaaaucuaccacaagugugacaacgccugcaucgggucuauucggaauggcacauaugaucaugacguuuacagagacgaggcucugaacaaucgcuuccagaucaaaggaguggagcucaaguccggcuacaaagauuggauucuguggaucagcuuugccauuucuugcuuccuucugugugucgcccuccugggguuuaucaugugggcuugccagaagggaaacauccgguguaauauuugcaucuga

SEQ ID NO: 193901 - RNA, 1701 nt, Artificial Sequence; identical to SEQ ID NO: 193829
  derived and/or modified CDS sequence (opt5) from hemagglutinin__InfluenzaA__ABU92681

SEQ ID NO: 193902 - RNA, 1701 nt, Artificial Sequence; identical to SEQ ID NO: 192145
  derived and/or modified CDS sequence (opt5) from hemagglutinin__InfluenzaA__ABU92682

SEQ ID NO: 193903 - RNA, 1701 nt, Artificial Sequence; identical to SEQ ID NO: 193834
  derived and/or modified CDS sequence (opt5) from hemagglutinin__InfluenzaA__ABU92683

SEQ ID NO: 193904 - RNA, 1701 nt, Artificial Sequence
  derived and/or modified CDS sequence (opt5) from hemagglutinin__InfluenzaA__ABU92684
augaagaccaucauugcccugagcuacauccucugccugguguucgcucagaaacuucccggcaacgacaauuccacagccacgcugugucucgggcaccaugcggucccuaacggaaccauuguuaagacaaucaccaaugaucaaauugaggugacaaacgcuaccgaacuggugcagaucucuagcacaggcgggaucugcgacuccccgcaccagauucuugauggagagaauuguacccugaucgacgcccuccugggcgauccccagugcgacggguuucaaaacaaaaagugggaucuguucauugaaagaucuaaagccuauagcaauuguuacccuuaugacguccccgauuacgcuucccuccggucucugguggccagcuccggaacgcuugaguuuaacaaugaaucuuucgacuggaccggcguuacacagaacggcaccucuuccgcuugcaagcgcagaagcaauaagagcuuuuucucccggcugaacuggcucacacaucugaaauauaaguacccugcccuuaaugugaccaugcccaacaaugagaaauuugauaagcuguauaucuggggaguccaccauccugggacggacagcgaucagauuucucucuacgcgcaggccccgggccgcaucacaguguccaccaaaagaagccaacagacaguuauucccaacaucgggucccggccucgcgugagagacgucucuagccggaucuccauuuacuggaccaucgugaagcccggagacauucugcugaucaacagcaccggcaaucucauugcuccucgcggguauuucaagaucagaucuggaaaauccagcaucaugcggucugaugcccccauuggcaaguguaacagcgagugcaucacaccgaauggcuccauuccuaacgacaaacccuuucagaaugugaaccgcaucacguacggggcuuguccuagauaugucaagcagaauacccugaaacuugccacaggaaugcggaacguucccgaaaagcaaacccgcggcauuuucggggcgaucgccggauuuaucgagaauggcugggaagggaugguggauggaugguacggcuucagacaccagaacucugagggcacagggcaggcugccgaccugaaaagcacccaagcugccauuaaucagaucaacggaaagcucaaucggcugauuggcaagacgaacgagaaauuucaccagaucgaaaaggaguucuccgaaguggaggggcgcauucaggaucuugaaaaauaugucgaggacacaaagaucgaucuguggagcuacaaugccgagcuccugguggcucuggaaaaccaacauaccauugaccucaccgauucugagaugaacaaacuguucgaaagaacaaagaagcagcuucgggagaaugcggaagacaugggaaacggcugcuuuaaaaucuaucacaagugugauaaugccugcaucggguccauuagaaacggcaccuacgaccaugacguuuaccgcgaugaggcucugaauaaccgguuccagaucaaaggaguggagcucaagagcggcuauaaagacuggauucuguggaucucuuuugccauuuccugcuuccuucugugugucgcccuccugggguuuaucaugugggcuugccagaagggaaauaucagauguaacauuugcaucuga

SEQ ID NO: 193905 - RNA, 1701 nt, Artificial Sequence
  derived and/or modified CDS sequence (opt5) from hemagglutinin__InfluenzaA__ABU92685
augaagaccaucauugcccugagcuacauccucugccugguguucgcucagaaacuucccggcaacgacaauuccacagccacgcugugucucgggcaccaugcggucccuaacggaaccauuguuaagacaaucaccaaugaucaaauugaggugacaaacgcuaccgaacuggugcagaucucuagcacaggcgggaucugcgacuccccgcaccagauucuugauggagagaauuguacccugaucgacgcccuccugggcgauccccagugcgacggguuucaaaacaaaaagugggaucuguucgucgaaagaucuaaagccuauagcaauuguuacccuuaugacgugcccgauuacgcuucccuccggucucugguugccagcuccggaacgcuugaguuuaacaaugaaucuuucgacuggaccggcgugacacagaacggcaccucuuccgcuugcaagcgcagaagcaauaagagcuuuuucucccggcugaacuggcucacacaucugaaauauaaguacccugcccuuaaugucaccaugcccaacaaugagaaauuugauaagcuguauauuuggggagugcaccauccugggacggacagcgaucagaucucucucuacgcgcaggccuccggccgcauuacaguuagcaccaaaagaucccaacagacagugaucccgaacauugggucucggccccgcgucagagacgugagcucccggaucagcaucuacuggaccauugugaagccuggagacauccugcugauuaacucuaccggcaaucucaucgcuccccgcggguauuucaagauuagauccggaaaaagcucuaucaugaaaagcgaugccccuaucggcaaguguaacuccgagugcauuacacccaauggcucuaucccgaacgacaagccuuuucagaaugucaaccggauuacguacggggcuuguccccgcuauguuaaacagaauacccugaaacuugccacaggaaugagaaacgugccugaaaagcaaacccggggcaucuucggggcgauugccggauuuaucgagaauggcugggaagggaugguggauggaugguacggcuuccgccaccagaacagcgagggcacagggcaggcugccgaccugaaguccacccaagcugccaucaaucagauuaacggaaagcucaauagacugaucggcaaaacgaacgagaaguuucaccagauugaaaaagaguucagcgaagucgaggggcggauccaggaucuugaaaaguauguggaggacacaaaaauugaucuguggucuuacaaugccgagcuccugguugcucuggaaaaccaacauaccaucgaccucaccgauuccgagaugaacaagcuguucgaaagaacaaagaaacagcuucgcgagaaugcggaagacaugggaaacggcugcuuuaagauuuaucacaaaugugauaaugccugcaucgggagcauccggaacggcaccuacgaccaugacguguacagagaugaggcucugaauaaccgcuuccagauuaagggagucgagcucaaaucuggcuauaaggacuggauccuguggauuuccuuugccaucagcugcuuccuucuguguguggcccuccugggguuuauuaugugggcuugccagaagggaaauauccgguguaacaucugcauuuga

SEQ ID NO: 193906 - RNA, 1701 nt, Artificial Sequence; identical to SEQ ID NO: 193834
  derived and/or modified CDS sequence (opt5) from hemagglutinin__InfluenzaA__ABU92686

SEQ ID NO: 193907 - RNA, 1701 nt, Artificial Sequence; identical to SEQ ID NO: 193834
  derived and/or modified CDS sequence (opt5) from hemagglutinin__InfluenzaA__ABU92687

SEQ ID NO: 193908 - RNA, 1701 nt, Artificial Sequence; identical to SEQ ID NO: 193867
  derived and/or modified CDS sequence (opt5) from hemagglutinin__InfluenzaA__ABU92688

SEQ ID NO: 193909 - RNA, 1701 nt, Artificial Sequence; identical to SEQ ID NO: 193834
  derived and/or modified CDS sequence (opt5) from hemagglutinin__InfluenzaA__ABU92689

SEQ ID NO: 193910 - RNA, 1701 nt, Artificial Sequence
  derived and/or modified CDS sequence (opt5) from hemagglutinin__InfluenzaA__ABU92691
augaagaccaucauugcccugagcuacauccucugccugguguucgcucagaaacuucccggcaacgacaauuccacagccacgcugugucucgggcaccaugcggucccuaacggaaccauuguuaagacaaucaccaaugaucaaauugaggugacaaacgcuaccgaacuggugcagaucucuagcacaggcgggaucugcgacuccccgcaccagauucuugauggagagaauuguacccugaucgacgcccuccugggcgauccccagugcgacggguuucaaaacaaaaagugggaucuguucgucgaaagaucuaaagccuauagcaauuguuacccuuaugacgugcccgauuacgcuucccuccggucucugguugccagcuccggaacgcuugaguuuaacaaugaaucuuucgacuggaccggcgugacacagaacggcaccucuuccgcuugcaagcgcagaagcaauaagagcuuuuucucccggcugaacuggcucacacaucugaaauauaaguacccugcccuuaaugucaccaugcccaacaaugagaaauuugauaagcuguauauuuggggagugcaccauccugggacggacagcgaucagaucucucucuacgcgcaggccuccggccgcauuacaguuagcaccaaaagaucccaacagacagugaucccgaacauugggucucggccccgcgucagagacgugagcucccggaucagcaucuacuggaccauugugaagccuggagacauccugcugauuaacucuaccggcaaucucaucgcuccccgcggguauuucaagauuagauccggaaaaagcucugucaugcggagcgaugccccuaucggcaaguguaacuccgagugcaucacacccaauggcucuauuccgaacgacaaaccuuuucagaauguuaaccgcaucacguacggggcuugucccagauaugugaagcagaauacccugaaacuugccacaggaaugcggaacgugccugaaaagcaaacccgcggcauuuucggggcgaucgccggauuuauugagaauggcugggaagggauggucgauggaugguacggcuucagacaccagaacagcgagggcacagggcaggcugccgaccugaaauccacccaagcugccaucaaucagaucaacggaaagcucaaucggcugauuggcaagacgaacgagaaauuucaccagaucgaaaaggaguucagcgaaguggaggggcgcauucaggaucuugaaaaauauguugaggacacaaagaucgaucuguggucuuacaaugccgagcuccugguggcucuggaaaaccaacauaccauugaccucaccgauuccgagaugaacaaacuguucgaaagaacaaagaagcagcuucgggagaaugcggaagacaucggaaacggcugcuuuaaaauuuaucacaagugugauaaugccugcaucgggagcaucagaaacggcaccuacgaccauaaugucuaccgcgacgaggcucugaacaaucgguuccagauuaaaggaguggagcucaagucuggcuauaaagauuggauccuguggauuuccuuugccaucagcugcuuccuucuguguguugcccuccugggguuuauuaugugggcuugccagaagggaaacaucagauguaauaucugcauuuga

SEQ ID NO: 193911 - RNA, 1701 nt, Artificial Sequence; identical to SEQ ID NO: 192762
  derived and/or modified CDS sequence (opt5) from hemagglutinin__InfluenzaA__ABU92692

SEQ ID NO: 193912 - RNA, 1701 nt, Artificial Sequence
  derived and/or modified CDS sequence (opt5) from hemagglutinin__InfluenzaA__ABU92693
augaaggccaucauugcucugagcuacauccucugccugguguucgcccagaaacuucccggcaacgacaauuccaccgcgacacugugucucgggcaccaugcugucccuaacggaacgauuguuaagaccaucacaaaugaucaaauugaggugaccaacgccacagaacuggugcagaucucuagcaccggcgagaucugcgacuccccgcaccagauucuugauggggaaaauuguacacugaucgacgcccuccugggagauccccagugcgacggcuuucaaaacaaaaagugggaucuguucgucgagagaucuaaagccuauagcaauuguuacccuuaugacgugcccgauuacgccucccuccggucucugguugcuagcuccgggacccuugaauuuaacaaugagagcuucgacuggacgggagugacccagaacggcacaucuuccgccugcaagcgcagaagcgauaagucuuucuucucccggcugaauuggcucacccaucugaaauauaaguacccugcgcuuaacgucacaaugcccaauaacgagaaauuugacaagcuguauauuuggggcgugcaccauccugggaccgauagcgaccagaucucucucuacgcccaggcuuccggacgcauuacgguuagcacaaaaagaucccaacagaccgugaucccgaauauuggcucucggccccgcgucagagacgugagcucccggaucagcaucuacuggacaauugugaagccuggggauauccugcugauuaacucuaccggaaaccucaucgcuccccgcggcuauuucaagauuagauccgggaaaagcucuaucaugcggagcgacgcuccuaucggaaaguguaauuccgaaugcauuacccccaacggcucuaucccgaaugauaaaccuuuucagaacgucaaucgcauuacauacggcgccugucccagauauguuaagcagaacacgcugaaacuugcgaccgggaugcggaaugugccugagaagcaaacacgcggaaucuucggcgccauugcuggguuuaucgaaaacggaugggagggcaugguggacgggugguacggauucagacaccagaauagcgagggcaccggccaggccgcugaucugaaauccacacaagccgccaucaaccagauuaaugggaagcucaaccggcugaucggaaagaccaaugaaaaauuucaccagauugagaaggaauuuagcgaggucgaaggcagaauccaggaccuugagaaauauguggaggauacgaagauugaccuguggucuuacaacgcugaacuccugguugcgcuggagaaucaacauacaaucgaucucaccgacuccgaaaugaacaaacuguucgagcgcaccaagaagcagcuucgggaaaacgccgaggauauggggaauggaugcuuuaaaauuuaucacaagugugacaacgcuugcaucggcagcaucagaaaugggacauacgaccaugauguguaccgcgacgaggcccugaacaaucgguuccagauuaaaggcgucgaacucaagucuggauauaaagauuggauccuguggauuuccuuugccaucagcugcuuccuucuguguguggcucuccugggcuuuauuaugugggccugccagaaggggaacaucagauguaauaucugcauuuga

SEQ ID NO: 193913 - RNA, 1701 nt, Artificial Sequence
  derived and/or modified CDS sequence (opt5) from hemagglutinin__InfluenzaA__ABU92694
augaagaccaucauugcccugagcuacauccucugccugguguucgcucagaaacuucccggcaacgacaauuccacagccacgcugugucucgggcaccaugcggucccuaacggaaccauuguuaagacaaucaccaaugaucaaauugaggugacaaacgcuaccgaacuggugcagucuagcuccacaggcgggaucugcgacucuccgcaccagauccuugauggagagaauuguacccugauugacgcccuccugggcgauccccagugcgacggguuucaaaacaaaaagugggaucuguucgucgaaagaagcaaagccuauuccaauuguuacccuuaugacgugcccgauuacgcuucucuccggagccugguugccuccagcggaacgcuugaguuuaacaaugaaucuuucaacuggaccggcgugacacagaauggcaccuccagcgcuugcaagcgcagaucuaacaauuccuuuuucagccggcugaacuggcucacacaucugaaguuuaaauauccugcccuuaaugucaccaugcccaacaacgagaaguucgacaaacuguacaucuggggagugcaccauccugggacggauaaugaccagauuucucucuaugcgcaggccuccggccgcaucacaguuagcaccaagagaucccaacagacagugauuccgaacaucgggucucggccccgcgucagagauauuccuagccggaucuccaucuacuggaccauugugaaacccggagacauccugcugauuaauagcaccggcaaccucaucgcuccucgcggguacuuuaagauuagaucuggaaaguccagcaucaugcggucugacgcccccaucggcaaauguaauagcgagugcauuacaccgaacggcuccaucccuaaugauaagcccuuccagaacgugaaucgcauuacguauggggcuuguccuagauacgucaaacagaacacccugaagcuggccacaggaaugcggaauguucccgaaaaacaaacccgcggcaucuuuggggcgauugccggauucaucgagaacggcugggaagggaugguggacggaugguauggcuuuagacaccaaaauucugagggcaucgggcaggcugccgaucuuaagagcacacaggcugccauuaaccagaucaauggaaaacucaaccggcugauuggcaagaccaacgagaaguuccaccagaucgaaaaagaguucuccgaaguggaggggcgcauucaggaccuugaaaaguacgucgaggauacgaaaguggaccuguggagcuauaaugccgagcuccugguugcucuggaaaaccaacauacaaucgaucucaccgacucugagaugaauaagcuguuugaaagaaccaaaaagcagcuucgggagaacgcggaagauaugggaaauggcugcuucaagauuuaccacaaaugugacaacgccugcaucggguccaucagaaauggcacauaugaucaugacguguaccgcgacgaggcucugaacaaucgguuucagauuaagggagucgagcucaaaagcggcuacaaggauuggauccuguggauuucuuucgccaucuccugcuuucuucuguguguggcccuccugggguucauuaugugggcuugccagaaaggaaacaucagauguaauaucugcauuuga

SEQ ID NO: 193914 - RNA, 1701 nt, Artificial Sequence; identical to SEQ ID NO: 193825
  derived and/or modified CDS sequence (opt5) from hemagglutinin__InfluenzaA__ABU92695

SEQ ID NO: 193915 - RNA, 1701 nt, Artificial Sequence
  derived and/or modified CDS sequence (opt5) from hemagglutinin__InfluenzaA__ABU92696
augaagaccaucauugcccugggcuacauccucugccugguguucgcucagaaacuucccgggaacgacaauagcacagccacgcugugucucggacaccaugcggucccuaacggcaccauuguuaagacaaucaccaaugaucaaauugaggugacaaacgcuaccgaacuggugcaguccucuagcacagggggaaucugcgacuccccgcaccagauccuugauggcgagaauuguacccugauugacgcccuccugggggauccccagugcgacggauuucaaaacaaaaagugggaucuguucgucgaaagaucuaaagccuauagcaauuguuacccuuaugacgugcccgauuacgcuucccuccggucucugaucgccagcuccggcacgcuugaguuuaacaaugagagcuucaacuggaccggcguuacacagaaugggaccucuuccgcuugcaagcgcagaagcaacucuuccuuuuucagccggcugaauuggcucacacaucugaaguuuaaauauccugcccuuaacgugaccaugcccaauaacgaagaguucgacaagcuguacauuuggggaguccaccauccuggcacggauaacgaccagaucucucucuaugcgcaggccuccgggcgcauuacagugagcaccaaaagaucccaacagacaguuaucccgaauauuggaucucggccccgcgugagagauaucccuagccggaucuccauuuacuggaccaucgucaagcccggcgacauucugcugaucaacagcaccgggaaucucauugcuccucgcggauacuuuaaaaucagaucuggcaaguccagcaucaugcggucugacgcccccauuggcaaguguaacagcgaaugcaucacaccgaauggguccauuccuaacgauaaacccuuccagaaugugaaccgcaucacguauggagcuuguccuagauacgugaagcagaauacccugaaacuugccacaggcaugcggaacguccccgagaagcaaacccgcgggauuuuuggagcgaucgccggcuucaucgaaaaugggugggagggaaugguugacggcugguauggcuuuagacaccagaacucugaggggauuggacaggcugccgaucugaaaagcacacaagcugccaucgaccagauuaauggcaagcucaaccggcugaucgggaaaaccaaugaaaaguuccaccagauugagaaggaguucuccgaaguggaaggaagaauccaggaucuugagaaauacguggaggacacgaagauugaucuguggagcuauaacgccgaacuccuggucgcucuggagaaccaacauacaaucgaccucaccgauucugaaaugaauaaacuguuugagcgcaccaagaaacagcuucgggaaaacgcggaggacaugggcaaugggugcuucaagaucuaccacaagugugauaacgccugcauuggcuccaucagaaauggaacauaugaccaugacguguaccgcgaugaggcucugaacaaucgguuucagauuaaaggcguugaacucaagagcggguacaaagacuggauccuguggauuucuuucgccaucuccugcuuucuucuguguguggcccuccugggauucaucaugugggcuugccagaagggcaacauuagauguaauaucugcauuuga

SEQ ID NO: 193916 - RNA, 1701 nt, Artificial Sequence; identical to SEQ ID NO: 192705
  derived and/or modified CDS sequence (opt5) from hemagglutinin__InfluenzaA__ABU92697

SEQ ID NO: 193917 - RNA, 1701 nt, Artificial Sequence; identical to SEQ ID NO: 192315
  derived and/or modified CDS sequence (opt5) from hemagglutinin__InfluenzaA__ABU92698

SEQ ID NO: 193918 - RNA, 1701 nt, Artificial Sequence
  derived and/or modified CDS sequence (opt5) from hemagglutinin__InfluenzaA__ABU92699
augaagaccaucauugcccugagcuacauccucugccugguguucgcucagaaacuucccggcaacgacaauuccacagccacgcugugucucgggcaccaugcggucccuaacggaaccauuguuaagacaaucaccaaugaucaaauugaggugacaaacgcuaccgaacuggugcagucuagcuccacaggcgggaucugcgacucuccgcaccagauccuugauggagagaauuguacccugauugacgcccuccugggcgauccccagugcgacggguuucaaaacaaaaagugggaucuguucgucgaaagaagcaaagccuauuccaauuguuacccuuaugacgugcccgauuacgcuucucuccggagccugguugccuccagcggaacgcuugaguuuaacaaugaaucuuucaacugggcuggcgugacccagaauggcacauccagcgccugcaagcgcagaucuaacaauuccuuuuucagccggcugaacuggcucacccaucugaaguuuaaauauccugcgcuuaaugucacaaugcccaacaacgagaaguucgacaaacuguacaucuggggagugcaccauccugggaccgauaaugaccagauuuuucucuaugcccaggcuucuggccgcaucacgguuuccacaaagagaagccaacagaccgugauuccgaacaucgggucccggccccgcgucagaaauauuccuucucggaucagcaucuacuggacaauugugaaacccggagauauccugcugauuaacuccaccggcaaucucaucgccccucgcggguacuucaagauuagaagcggaaagucuuccaucaugcggagcgacgcucccaucggcaaauguaacucugagugcauuaccccgaauggcagcaucccuaacgacaagcccuuucagaaugugaaccgcauuacauauggggccuguccuagauacgucaaacagaauacgcugaaacuugcgaccggaaugcggaacguucccgaaaaacaaacacgcggcaucuucggggccauugcuggauuuaucgagaauggcugggaagggaugguggauggaugguauggcuucagacaccagaacuccgagggcaucgggcaggccgcugaccugaagucuacccaagccgccauugaucagaucaauggaaaacucaaccggcugauuggcaagacaaacgagaaguuccaccagaucgaaaaagaguuuagcgaaguggaggggcgcauucaggaccuugaaaaguacgucgaggauaccaaaaucgaccugugguccuauaaugcugagcuccugguggcgcuggaaaaccaacauacgauugaucucacagacagcgagaugaauaagcuguucgaaaagaccaagaagcagcuuagagagaacgccgaagauaugggaaauggcugcuuuaaaaucuaccacaagugugacaacgcuugcaucgggucuauucggaauggcaccuaugaucaugacguuuacagagacgaggcccugaacaaucgcuuccagaucaaaggaguggagcucaaguccggcuacaaagauuggauucuguggaucagcuuugccauuucuugcuuccuucugugugucgcucuccugggguuuaucaugugggccugccagaagggaaacauccgguguaauauuugcaucuga

SEQ ID NO: 193919 - RNA, 1701 nt, Artificial Sequence
  derived and/or modified CDS sequence (opt5) from hemagglutinin__InfluenzaA__ABU92700
augaagaccaucauugcccugagcuacauccucugccugguguucgcucagaaacuucccgagaacgacaauuccacagccacgcugugucucggccaccaugcggucccuaacgggaccauuguuaagacaaucaccaaugaucaaauugaagugacaaacgcuaccgagcuggugcagucuagcuccacaggaggcaucugcgacucuccgcaccagauccuugauggggaaaauuguacccugauugacgcccuccugggagauccccagugcgacggcuuucaaaacaaaaagugggaucuguucgucgagagaagcaaagccuauuccaauuguuacccuuaugacgugcccgauuacgcuucucuccggagccugguugccuccagcgggacgcuugaauuuaacaaugagucuuucaacuggaccggagugacacagaauggcaccuccagcgcuugcaagcgcagaucuaacaauuccuuuuucagccggcugaacuggcucacacaucugaaguuuaaauauccugcccuuaaugucaccaugcccaacaacgagcgcuucgacaagcuguacaucuggggcgugcaccauccugggacggauaaugaccagauuuuucucuaugcgcaggccucuggaagaaucacaguuuccaccaaacggagccaacagacagugauuccgaacaucggcucccgccccagaguccggaauauuccuucucgcaucagcaucuacuggaccauugugaagcccggggauauccugcugauuaacuccaccggaaaucucaucgcuccuagaggcuacuucaaaauucggagcgggaagucuuccaucaugcgcagcgacgcccccaucggaaaguguaacucugaaugcauuacaccgaauggcagcaucccuaacgacaaacccuuucagaaugugaacagaauuacguauggcgcuuguccucgguacgucaagcagaauacccugaaacuugccacagggaugcgcaacguucccgagaagcaaaccagaggaaucuucggcgcgauugccggguuuaucgaaaauggaugggagggcaugguggaugggugguauggauuccggcaccagaacuccgagggcaucggccaggcugccgaccugaaaucuacacaagcugccauugaucagaucaaugggaagcucaacagacugauuggaaaaaccaacgaaaaguuccaccagaucgagaaggaauuuagcgagguggaaggccgcauucaggaccuugagaaauacgucgaggauacgaagaucgaccugugguccuauaaugccgaacuccugguggcucuggagaaccaacauacaauugaucucaccgacagcgaaaugaauaaacuguucgagaagaccaaaaagcagcuucgggaaaacgcggaggauauggggaauggaugcuuuaagaucuaccacaaaugugacaacgccugcaucggcucuauuagaaaugggacauaugaucaugacguuuaccgcgacgaggcucugaacaaucgguuccagaucaagggcguggaacucaaauccggauacaaggauuggauucuguggaucagcuuugccauuucuugcuuccuucugugugucgcccuccugggcuuuaucaugugggcuugccagaaagggaacaucagauguaauauuugcaucuga

SEQ ID NO: 193920 - RNA, 1701 nt, Artificial Sequence
  derived and/or modified CDS sequence (opt5) from hemagglutinin__InfluenzaA__ABU92701
augaagaccaucauugcccugagcuacauccucugccugguguucgcucagaaacuucccgagaacgacaauuccacagccacgcugugucucggccaccaugcggucccuaacgggaccauuguuaagacaaucaccaaugaucaaauugaagugacaaacgcuaccgagcuggugcagucuagcuccacaggaggcaucugcgacucuccgcaccagauccuugauggggaaaauuguacccugauugacgcccuccugggagauccccagugcgacggcuuucaaaacaaaaagugggaucuguucgucgagagaagcaaagccuauuccaauuguuacccuuaugacgugcccgauuacgcuucucuccggagccugguugccuccagcgggacgcuugaauuuaacaaugagucuuucaacuggaccggagugacacagaauggcaccuccagcgcuugcaagcgcagaucuaacaauuccuuuuucagccggcugaacuggcucacacaucugaaguuuaaauauccugcccuuaaugucaccaugcccaacaacgagcgcuucgacaagcuguacaucuggggcgugcaccauccugggacggauaaugaccagauuuuucucuaugcgcaggccucuggaagaaucacaguuuccaccaaacggagccaacagacagugauuccgaacaucggcucccgccccagaguccggaauauuccuucucgcaucagcaucuacuggaccauugugaagcccggggauauccugcugauuaacuccaccggaaaucucaucgcuccuagaggcuacuucaaaauucggagcgggaagucuuccaucaugcgcagcgacgcccccaucggaaaguguaacucugaaugcauuacaccgaauggcagcaucccuaacgacaaacccuuucagaaugugaacagaauuacguauggcgcuuguccucgguacgucaagcagaauacccugaaacuugccacagggaugcgcaacguucccgagaagcaaaccagaggaaucuucggcgcgauugccggguuuaucgaaaauggaugggagggcaugguggaugggugguauggauuccggcaccagaacuccgagggcaucggccaggcugccgaccugaaaucuacacaagcugccauugaucagaucaaugggaagcucaacagacugauuggaaaaaccaacgaaaaguuccaccagaucgagaaggaauuuagcgagguggaaggccgcauucaggaccuugagaaauacgucgaggauacgaagaucgaccugugguccuauaaugccgaacuccugguggcucuggagaaccaacauacaauugaucucaccgacagcgaaaugaauaaacuguucgagaagaccaaaaagcagcuucgggaaaacgcggaggauauggggaauggaugcuuuaagaucuaccacaaaugugacaacgccugcaucggcucuauuagaaaugggacauaugaucaugacguuuaccgcgacgaggcucugaacaaucggcuccagaucaagggcguggaacugaaauccggauacaaggauuggauucuuuggaucagcuucgccauuucuugcuuucugcucugugucgcccugcugggcuucaucaugugggcuugccagaaagggaacaucagauguaauauuugcaucuga

SEQ ID NO: 193921 - RNA, 1701 nt, Artificial Sequence; identical to SEQ ID NO: 192684
  derived and/or modified CDS sequence (opt5) from hemagglutinin__InfluenzaA__ABU92702

SEQ ID NO: 193922 - RNA, 1701 nt, Artificial Sequence; identical to SEQ ID NO: 193900
  derived and/or modified CDS sequence (opt5) from hemagglutinin__InfluenzaA__ABU92703

SEQ ID NO: 193923 - RNA, 1701 nt, Artificial Sequence
  derived and/or modified CDS sequence (opt5) from hemagglutinin__InfluenzaA__ABU92704
augaagaccaucauugcccugagcuacauccucugccugguguucgcucagaaacuucccggcaacgacaauuccacagccacgcugugucucgggcaccaugcggucccuaacggaaccauuguuaagacaaucaccaaugaucaaauugaggugacaaacgcuaccgaacuggugcagucuagcuccacaggcgggaucugcgacucuccgcaccagauccuugauggagagaauuguacccugauugacgcccuccugggcgauccccagugcgacggguuucaaaacaaaaagugggaucuguucgucgaaagaaauaaagccuauagcaacuguuacccuuaugacgugcccgauuacgcuucccuccggucucugguugccagcuccggaacgcuugaguuuaauaacgaaucuuucaauuggaccggcgugacacagaacggcaccucuuccgcuugcaagcgcagaagcaauaacagcuuuuucucccggcugaauuggcucacacaucugaaguuuaaauauccugcccuuaacgucaccaugcccaacaaugagaaguucgacaaacuguacaucuggggagugcaccauccugggacggauaacgaccagauuuuucucuaugcgcaggccagcggccgcaucacaguuucuaccaagagaucccaacagacagugauuccgaauaucgggagccggccccgcgucagaaacauuccuucccggaucucuaucuacuggaccauugugaaacccggagauauccugcugauuaauagcaccggcaaccucaucgcuccucgcggguacuucaagauuagauccggaaagagcucuaucaugcgguccgacgcccccaucggcaaauguaauagcgagugcauuacaccgaacggcucuaucccuaaugacaagcccuuucagaacgugaaucgcauuacguauggggcuuguccuagauacgucaaacagaacacccugaaacuugccacaggaaugcggaauguucccgaaaaacaaacccgcggcaucuucggggcgauugccggauuuaucgagaacggcugggaagggaugguggauggaugguauggcuucagacaccagaauagcgagggcaucgggcaggcugccgaccugaaguccacacaagcugccauugaucagaucaacggaaaacucaaccggcugauuggcaagaccaaugagaaguuccaccagaucgaaaaagaguuuucugaaguggaggggcgcauucaggaccuugaaaaguacgucgaggauacgaaaaucgaccuguggagcuauaacgccgagcuccugguggcucuggaaaaucaacauacaauugaucucaccgacuccgagaugaacaagcuguucgaaaagaccaagaagcagcuuagagagaaugcggaagauaugggaaacggcugcuuuaaaaucuaccacaagugugacaaugccugcaucgggagcauucggaacggcacauaugaucaugacguuuacagagacgaggcucugaauaaccgcuuccagaucaaaggaguggagcucaagucuggcuacaaagauuggauucuguggaucuccuuugccauuagcugcuuccuucugugugucgcccuccugggguuuaucaugugggcuugccagaagggaaauauccgguguaacauuugcaucuga

SEQ ID NO: 193924 - RNA, 1701 nt, Artificial Sequence
  derived and/or modified CDS sequence (opt5) from hemagglutinin__InfluenzaA__ABU92705
augaagaccaucauugcccugagcuacauccucugccugguguucgcucagaaacuucccggcaacgacaauuccacagccacgcugugucucgggcaccaugcggucccuaacggaaccauuguuaagacaaucaccaaugaucaaauugaggugacaaacgcuaccgaacuggugcagucuagcuccacaggcgggaucugcgacucuccgcaccagauccuugauggagagaauuguacccugauugacgcccuccugggcgauccccagugcgacggguuucaaaacaaaaagugggaucuguucgucgaaagaagcaaagccuauuccaauuguuacccuuaugacgugcccgauuacgcuucucuccggagccugaucgccuccagcggaacgcuugaguuuaacaaugaaucuuucaacuggaccggcguuacacagaauggcaccuccagcgcuugcaagcgcagaucuaacaauuccuuuuucagccggcugaacuggcucacacaucugaaguuuaaauauccugcccuuaaugugaccaugcccaacaacgaggaguucgacaagcuguacauuuggggaguccaccauccugggacggauaaugaccagaucucucucuaugcgcaggccccgggccgcauuacaguguccaccaaaagaagccaacagacaguuauccccaacauugggucccggccucgcgugagagauauccccucucggaucagcauuuacuggaccaucgucaagccuggagacauucugcugaucaauuccaccggcaaccucauugcuccccgcggguacuuuaaaaucagaagcggaaagucuuccaucaugcggagcgacgccccgauuggcaaguguaaaucugaaugcaucacaccuaauggcagcauucccaacgauaagccuuuccagaaugugaaccgcaucacguauggggcuugucccagauacgugaaacagaauacccugaaacuugccacaggaaugcggaacguccccgagaagcaaacccgcggcauuuuuggggcgaucgccggauucaucgaaaauggcugggaggggaugguugacggaugguauggcuuuagacaccagaacuccgagggcauugggcaggcugccgaucugaagucuacacaagcugccaucgaccagauuaauggaaaacucaaccggcugaucggcaagaccaaugaaaaguuccaccagauugagaaagaguucagcgaaguggaagggagaauccaggaucuugagaaguacguggaggacacgaaaauugaucugugguccuauaacgccgaacuccuggucgcucuggagaaccaacauacaaucgaccucaccgauagcgaaaugaauaagcuguuugagcgcaccaaaaagcagcuucgggaaaacgcggaggacaugggaaauggcugcuucaagaucuaccacaaaugugauaacgccugcauugggucuaucagaaauggcacauaugaccaugacguguaccgcgaugaggcucugaacaaucgguuuagaauuaaguccguugaacucaaaagcggauacaaggacuggauccuguggauuucuuucgccaucuccugcuuucuucuguguguggcccuccugggcuucaucaugugggcuugccagaaagggaacauucgcuguaauaucugcauuuga

SEQ ID NO: 193925 - RNA, 1701 nt, Artificial Sequence; identical to SEQ ID NO: 192145
  derived and/or modified CDS sequence (opt5) from hemagglutinin__InfluenzaA__ABU92706

SEQ ID NO: 193926 - RNA, 1701 nt, Artificial Sequence; identical to SEQ ID NO: 193834
  derived and/or modified CDS sequence (opt5) from hemagglutinin__InfluenzaA__ABU92707

SEQ ID NO: 193927 - RNA, 1701 nt, Artificial Sequence; identical to SEQ ID NO: 193834
  derived and/or modified CDS sequence (opt5) from hemagglutinin__InfluenzaA__ABU92708

SEQ ID NO: 193928 - RNA, 1701 nt, Artificial Sequence
  derived and/or modified CDS sequence (opt5) from hemagglutinin__InfluenzaA__ABU92709
augaagaccaucauugcccugagcuacauccucugccugguguucgcucagaaacuucccggcaacgacaauuccacagccacgcugugucucgggcaccaugcggucccuaacggaaccauuguuaagacaaucaccaaugaucaaauugaggugacaaacgcuaccgaacuggugcagucuagcuccacaggcgggaucugcgacucuccgcaccagauccuugauggagagaauuguacccugauugacgcccuccugggcgauccccagugcgacggguuucaaaacaaaaagugggaucuguucgucgaaagaagcaaagccuauuccaauuguuacccuuaugacgugcccgauuacgcuucucuccggagccugguugccuccagcggaacgcuugaguuuaacaaugaaucuuucaacugggcuggcgugacccagaauggcacauccagcgccugcaagcgcagaucuaacaaguccuuuuucagccggcugaauuggcucacccaucugaaauauaaguacccugcgcuuaacgucacaaugcccaauaacgagaaauuugacaagcuguauaucuggggagugcaccauccugggaccgauucugaccagauuucccucuacgcccaggcuagcggccgcaucacgguuuccacaaaaagaucucaacagaccgugauuccgaacaucgggagccggccccgcgucagagauguguccagccggauuucuaucuacuggacaaucgugaagccuggagacauucugcugaucaauuccaccggcaaccucauugcccccagaggguauuucaagaucagaagcggaaaaucuagcauuaugcgguccgacgcuccuaucggcaaguguaauucugagugcaucacccccaacggcagcauuccgaaugauaaaccuuuucagaacgucaaucgcaucacauacggggccugucccagauauguuaagcagaacacgcugaaacuugcgaccggaaugcggaaugugccugaaaagcaaacacgcggcauuuucggggccaucgcuggauuuauugagaacggcugggaagggaugguggacggaugguacggcuucagacaccaaaauuccgagggcaccgggcaggccgcugaucugaaaagcacacaggccgccaucaaccagaucaauggaaagcucaaccggcugauuggcaagaccaaugagaaauuucaccagaucgaaaaggaguucucugaagucgaggggcgcauucaggaccuugaaaaauauguggaggauacgaagaucgaccugugguccuacaacgcugagcuccugguugcgcuggaaaaccaacauacaauugaucucaccgacagcgagaugaauaaacuguucgaacgcaccaagaagcagcuucgggagaacgccgaagauaugggaaauggcugcuuuaaaaucuaucacaagugugacaacgcuugcauugagucuaucagaaaugggacauacgaucaugacguguaccgcgacgaggcccugaacaaucgguuccagaucaaaggcgucgaacucaaguccggauauaaagauuggauucuguggaucagcuuugccauuuccugcuuccuucuguguguggcucuccugggcuuuaucaugugggccugccagaaggggaacauuagauguaauaucugcaucuga

SEQ ID NO: 193929 - RNA, 1701 nt, Artificial Sequence; identical to SEQ ID NO: 192123
  derived and/or modified CDS sequence (opt5) from hemagglutinin__InfluenzaA__ABU92710

SEQ ID NO: 193930 - RNA, 1701 nt, Artificial Sequence; identical to SEQ ID NO: 192145
  derived and/or modified CDS sequence (opt5) from hemagglutinin__InfluenzaA__ABU92711

SEQ ID NO: 193931 - RNA, 1701 nt, Artificial Sequence; identical to SEQ ID NO: 192145
  derived and/or modified CDS sequence (opt5) from hemagglutinin__InfluenzaA__ABU92712

SEQ ID NO: 193932 - RNA, 1701 nt, Artificial Sequence; identical to SEQ ID NO: 193834
  derived and/or modified CDS sequence (opt5) from hemagglutinin__InfluenzaA__ABU92713

SEQ ID NO: 193933 - RNA, 1701 nt, Artificial Sequence; identical to SEQ ID NO: 193834
  derived and/or modified CDS sequence (opt5) from hemagglutinin__InfluenzaA__ABU92714

SEQ ID NO: 193934 - RNA, 1701 nt, Artificial Sequence
  derived and/or modified CDS sequence (opt5) from hemagglutinin__InfluenzaA__ABU92715
augaagaccaucauugcccugagcuacauccucugccugguguucgcucagaaacuucccggcaacgacaauuccacagccacgcugugucucgggcaccaugcggucccuaacggaaccauuguuaagacaaucaccaaugaucaaauugaggugacaaacgcuaccgaacuggugcagaucucuagcacaggcgagaucugcgacuccccgcaccagauucuugauggggaaaauuguacccugaucgacgcccuccugggagauccccagugcgacggcuuucaaaacaaaaagugggaucuguucgucgagagaucuaaagccuauagcaauuguuacccuuaugacgugcccgauuacgcuucccuccggucucugguugccagcuccgggacgcuugaauuuaacaaugagagcuucgacuggaccggagugacacagaacggcaccucuuccgcuugcaagcgcagaagcaauaaguccuuuuucucucggcugaacuggcucacacaucugaaauauaaguacccugcccuuaaugucaccaugcccaacaaugagaaauuugaaaagcuguauauuuggggcgugcaccauccugggacggauagcgaccagaucaaccucuacgcgcaggccucuggacgcauuacaguuuccaccaaaagaagccaacagacagugaucccgaacauuggcucccggccccgcgucagagaugugucuagccggaucuccaucuacuggaccauugugaagccuggggacauccugcugauuaauagcaccggaaaccucaucgcuccccgcggcuauuucaagauuagaucugggaaauccagcaucaugcggucugacgccccuaucggaaaguguaauagcgagugcauuacacccaacggcuccaucccgaaugauaaaccuuuucagaacgucaaucgcauuacguacggcgcuugucccagauauguuaagcagaacacccugaaacuugccacagggaugcggaaugugccugaaaagcaaacccgcggaaucuucggcgcgauugccggguuuaucgagaacggaugggagggcaugguggacgggugguacggauucagacaccaaaauucugaaggcacaggccaggcugccgaucugaaaagcacccaggcugccaucaaccagauuaaugggaagcucaaccggcugaucggaaagacgaaugagaaauuucaccagauugaaaaggaguucuccgaagucgagggcagaauccaggaccuugagaaauauguggaagauacaaagauugaccuguggagcuacaacgccgagcuccugguugcucuggaaaaccaacauaccaucgaucucaccgacucugagaugaauaaacuguucgaacgcacaaagaagcagcuucgggagaacgcggaggauauggggaauggaugcuuuaaaauuuaucacaagugugacaacgccugcaucggcuccaucagaaaugggaccuacgaucaugacguguaccgcgacgaagcucugaacaaucgguuccagauuaaaggcgucgagcucaagagcggauauaaagauuggauccuguggauuucuuuugccaucuccugcuuccuucuguguguggcccuccugggcuuuauuaugugggcuugccagaaggggaacaucagauguaauaucugcauuuga

SEQ ID NO: 193935 - RNA, 1701 nt, Artificial Sequence; identical to SEQ ID NO: 193834
  derived and/or modified CDS sequence (opt5) from hemagglutinin__InfluenzaA__ABU92716

SEQ ID NO: 193936 - RNA, 1701 nt, Artificial Sequence; identical to SEQ ID NO: 193834
  derived and/or modified CDS sequence (opt5) from hemagglutinin__InfluenzaA__ABU92717

SEQ ID NO: 193937 - RNA, 1701 nt, Artificial Sequence; identical to SEQ ID NO: 192145
  derived and/or modified CDS sequence (opt5) from hemagglutinin__InfluenzaA__ABU92718

SEQ ID NO: 193938 - RNA, 1701 nt, Artificial Sequence; identical to SEQ ID NO: 192145
  derived and/or modified CDS sequence (opt5) from hemagglutinin__InfluenzaA__ABU92719

SEQ ID NO: 193939 - RNA, 1701 nt, Artificial Sequence
  derived and/or modified CDS sequence (opt5) from hemagglutinin__InfluenzaA__ABU92720
augaagaccaucauugcccugagcuacauccucugccugguguucgcucagaaacuucccggcaacgacaauuccacagccacgcugugucucgggcaccaugcggucccuaacggaaccauuguuaagacaaucaccaaugaucaaauugaggugacaaacgcuaccgaacuggugcagaucucuagcacaggcgagaucugcgacuccccgcaccagauucuugauggggaaaauuguacccugaucgacgcccuccugggagauccccagugcgacggcuuucaaaacaaaaagugggaucuguucgucgagagaucuaaagccuauagcaauuguuacccuuaugacgugcccgauuacuccucucuccggagccugguugcuuccagcgggacgcuugaauuuaacaaugagucuuucgacuggaccggagugacacagaacggcaccuccagcgccugcaagcgcagaucugauaaguccuuuuucagccggcugaauuggcucacacaucugaaauauaaguacccugcucuuaacgucaccaugcccaauaacgagaaauuugacaagcuguauauuuggggcgugcaccauccugggacggauucugaccagaucucccucuacgcccaggcgagcggacgcauuacaguuuccaccaaaagaucucaacagacagugaucccgaauauuggcagccggccccgcgucagagacguguccagccggaucucuaucuacuggaccauugugaagccuggggauauccugcugauuaacuccaccggaaaccucaucgcuccccgcggcuauuucaagauuagaagcgggaaaucuagcaucaugcgguccgacgccccuaucggaaaguguaauucugaaugcauuacacccaacggcagcaucccgaaugauaaaccuuuucagaacgucaaucgcauuacguacggcgccugucccagauauguuaagcagaacacccugaaacuugcuacagggaugcggaaugugccugagaagcaaacccgcggaaucuucggcgccauugcgggguuuaucgaaaacggaugggagggcaugguggacgggugguacggauucagacaccaaaauuccgagggcacaggccaggccgcugaucugaaaagcacccaggccgcuaucaaccagauuaaugggaagcucaaccggcugaucggaaagacgaaugaaaaauuucaccagauugagaaggaguucucugaagucgaaggcagaauccaggaccuugagaaauauguggaggauacaaagauugaccugugguccuacaacgccgaacuccugguugcccuggagaaucaacauaccaucgaucucaccgacagcgaaaugaacaaacuguucgagcgcacaaagaagcagcuucgggaaaacgcugaggauauggggaauggaugcuuuaaaauuuaucacaagugugacaacgcgugcaucggcucuaucagaaaugggaccuacgaccaugauguguaccgcgacgaggcccugaacaaucgguuccagauuaaaggcgucgaacucaaguccggauauaaagauuggauccuguggauuagcuuugcuaucuccugcuuccuucuguguguggcccuccugggcuuuauuaugugggccugccagaaggggaacaucagauguaauaucugcauuuga

SEQ ID NO: 193940 - RNA, 1701 nt, Artificial Sequence
  derived and/or modified CDS sequence (opt5) from hemagglutinin__InfluenzaA__ABU92721
augaagaccaucauugcccugagcuacauccucugccugguguucgcucagaaacuucccggcaacgacaauuccacagccacgcugugucucgggcaccaugcggucccuaacggaaccauuguuaagacaaucaccaaugaucaaauugaggugacaaacgcuaccgaacuggugcagaucucuagcacaggcgagaucugcgacuccccgcaccagauucuugauggggaaaauuguacccugaucgacgcccuccugggagauccccagugcgacggcuuucaaaacaaaaagugggaucuguucgucgagagaucuaaagccuauagcaauuguuacccuuaugacgugcccgauuacgcuucccuccggucucugguugccagcuccgggacgcuugaauuuaacaaugagagcuucgacuggaccggagugacacagaacggcaccucuuccgcuugcaagcgcagaagcgauaagucuuucuucucccggcugaauuggcucacacaucugaaauauaaguacccugcccuuaacgucaccaugcccaauaacgagaaauuugacaagcuguauauuuggggcgugcaccauccugggacggauagcgaccagaucucucucuacgcgcaggccuccggacgcauuacaguuagcaccaaaagaucccaacagacagugaccccgaauaucggcucucggccccgcgucagagacgugagcucccggauuagcaucuacuggaccaucgugaagccuggggauauucugcugaucaacucuacaggaaaccucauugcuccccgcggcuauuucaagaucagauccgggaaaagcucuauuaugcggagcgacgccccuaucggaaaguguaauuccgaaugcaucacgcccaacggcucuauuccgaaugauaaaccuuuucagaacgucaaucgcaucaccuacggcgcuugucccagauauguuaagcagaacacacugaaacuugccaccgggaugcggaaugugccugagaagcaaacacgcggaauuuucggcgcgaucgccggguuuauugaaaacggaugggagggcaugguggacgggugguacggauucagacaccagaauagcgagggcaccggccaggcugccgaucugaaauccacgcaagcugccaucaaccagaucaaugggaagcucaaccggcugauuggaaagacaaaugaaaaauuucaccagaucgagaaggaauuuagcgaggucgaaggccgcauucaggaccuugagaaauauguggaggauaccaagaucgaccuguggucuuacaacgccgaacuccugguugcucuggagaaucaacauaccauugaucucacagacuccgaaaugaacaaacuguucgagagaaccaagaagcagcuucgggaaaacgcggaggauauggggaauggaugcuuuaaaaucuaucacaagugugacaacgccugcauuggcagcaucagaaaugggacauacgaccaugauguguaccgcgacgaggcucugaacaaucgguuccagaucaaaggcgucgaacucaagucuggauauaaagauuggauucuguggaucuccuuugccauuagcugcuuccuucuguguguggcccuccugggcuuuaucaugugggcuugccagaaggggaacauuagauguaauaucugcaucuga

SEQ ID NO: 193941 - RNA, 1701 nt, Artificial Sequence; identical to SEQ ID NO: 193825
  derived and/or modified CDS sequence (opt5) from hemagglutinin__InfluenzaA__ABU92722

SEQ ID NO: 193942 - RNA, 1701 nt, Artificial Sequence; identical to SEQ ID NO: 192145
  derived and/or modified CDS sequence (opt5) from hemagglutinin__InfluenzaA__ABU92723

SEQ ID NO: 193943 - RNA, 1701 nt, Artificial Sequence; identical to SEQ ID NO: 193928
  derived and/or modified CDS sequence (opt5) from hemagglutinin__InfluenzaA__ABU92724

SEQ ID NO: 193944 - RNA, 1701 nt, Artificial Sequence
  derived and/or modified CDS sequence (opt5) from hemagglutinin__InfluenzaA__ABU92725
augaagaccaucauugcccugagcuacauccucugccugguguucgcucagaaacuucccggcaacgacaauuccacagccacgcugugucucgggcaccaugcggucccuaacggaaccauuguuaagacaaucaccaaugaucaaauugaggugacaaacgcuaccgaacuggugcagucuagcuccacaggcgggaucugcgacucuccgcaccagauccuugauggagagaauuguacccugauugacgcccuccugggcgauccccagugcgacggguuucaaaacaaaaagugggaucuguucgucgaaagaagcaaagccuauuccaauuguuacccuuaugacgugcccgauuacgcuucucuccggagccugguugccuccagcggaacgcuugaguuuaacaaugaaucuuucaacuggaccggcgugacacagaauggcaccuccagcgcuugcaagcgcagaucuaacaaguccuuuuucagccggcugaauuggcucacacaucugaaauauaaguacccugcccuuaacgucaccaugcccaauaacgagaaauuugacaagcuguauaucuggggagugcaccauccugggacggauucugaccagauuaaccucuacgcgcaggccuccggccgcaucacaguuagcaccaaaagaucccaacagacagugauuccgaauaucgggucucggccccgcgucagagaugugccuagccggauuuccaucuacuggaccaucgugaagcccggagaccugcugcucauuaacagcaccggcaaucugaucgcuccucgcggguauuucaagauuagaucuggaaaauccagcaucaugcggucugacgcccccauuggcaaguguaacagcgagugcaucacaccgaauggcuccaucccuaacgauaaacccuuucagaaugucaaccgcauuacguacggggcuuguccuagauauguuaagcagaauacccuuaaacuggccacaggaaugcggaacgugcccgaaaagcaaacccgcggcaucuucggggcgauugccggauuuaucgagaauggcugggaagggaugguggacggaugguacggcuucagacaccagaacucugagggcacagggcaggcugccgaucucaaaagcacccaagcugccauuaaucagaucaacggaaagcugaaucggcuuaucggcaagacgaacgagaaauuucaccagauugaaaaggaguucuccgaagucgaggggagaauccaggaccuggaaaaauauguggaggauacaaagauugaccucuggagcuacaacgccgagcugcugguugcucucgaaaaucaacauaccaucgaucugaccgacucugagaugaacaaacuuuucgaacgcacaaagaagcagcugcgggagaaugcggaagauaugggaaacggcugcuuuaaaauuuaucacaagugugacaaugccugcaucggguccauuagaaacggcaccuacgaucaugacguguaccgcgacgaggcucucaauaaccgguuccagaucaaaggagucgagcuuaagagcggcuauaaagauuggauccuguggauuucuuuugccaucuccugcuuccugcucuguguggcccugcugggguuuauuaugugggcuugccagaagggaaauaucagauguaacauuugcaucuga

SEQ ID NO: 193945 - RNA, 1701 nt, Artificial Sequence; identical to SEQ ID NO: 193928
  derived and/or modified CDS sequence (opt5) from hemagglutinin__InfluenzaA__ABU92726

SEQ ID NO: 193946 - RNA, 1701 nt, Artificial Sequence
  derived and/or modified CDS sequence (opt5) from hemagglutinin__InfluenzaA__ABU92727
augaagaccaucauugcccugagcuacauccucugccugguguucgcucagaaacuucccggcaacgacaauuccacagccacgcugugucucgggcaccaugcggucccuaacggaaccauuguuaagacaaucaccaaugaucaaauugaggugacaaacgcuaccgaacuggugcagucuagcuccacaggcgggaucugcgacucuccgcaccagauccuugauggagagaauuguacccugauugacgcccuccugggcgauccccagugcgacggguuucaaaacaaaaagugggaucuguucgucgaaagaagcaaagccuauuccaauuguuacccuuaugacgugcccgauuacgcuucucuccggagccugaucgccuccagcggaacgcuugaguuuaacaaugaaucuuucaacuggaccggcguuacacagaauggcaccuccagcgcuugcaagcgcagaucuaacuccagcuuuuucucucggcugaauuggcucacacaucugaaguuuaaauauccugcccuuaacgugaccaugcccaauaacgaggacuucgauaagcuguacauuuggggaguccaccauccugggacggacaacgaucagaucucccucuaugcgcaggccagcggccgcauuacaguguccaccaaaagaucucaacagacaguuaucccgaauauugggagccggccccgcgugagagacaucccuucccggaucagcauuuacuggaccaucgucaagcccggagacauucugcugaucaacucuaccggcaaucucauugcuccucgcggguacuuuaaaaucagauccggaaagagcucuaucaugcggagcgaugcccccauuggcaaguguaacuccgagugcaucacaccgaauggcucuauuccuaacgacaaacccuuccagaaugugaaccgcaucacguauggggcuuguccuagauacgugaagcagaauacccugaaacuugccacaggaaugcggaacguccccgaaaagcaaacccgcggcauuuuuggggcgaucgccggauucaucgagaauggcugggaagggaugguugauggaugguauggcuuuagacaccagaacagcgagggcauugggcaggcugccgaccugaaauccacacaagcugccaucgaucagauuaauggaaagcucaaccggcugaucggcaaaaccaaugagaaguuccaccagauugaaaaggaguucagcgaaguggaggggagaauccaggaccuugaaaaauacguggaggauacgaagauugaccuguggucuuauaacgccgagcuccuggucgcucuggaaaaccaacauacaaucgaucucaccgacuccgagaugaauaaacuguuugaacgcaccaagaaacagcuucgggagaacgcggaagauaugggaaauggcugcuucaagaucuaccacaagugugacaacgccugcauugggagcaucagaaauggcacauaugaccaugauguguaccgcgacgaggcucugaacaaucgguuucagauuaaaggaguugagcucaagucuggcuacaaagauuggauccuguggauuuccuucgccaucagcugcuuucuucuguguguggcccuccugggguucaucaugugggcuugccagaagggaaacauuagauguaauaucugcauuuga

SEQ ID NO: 193947 - RNA, 1701 nt, Artificial Sequence
  derived and/or modified CDS sequence (opt5) from hemagglutinin__InfluenzaA__ABU92728
augaagaccaucauugcccugagcuacauccucugccagguguucgcucaaaaacugcccggcaacgacaauuccacagccacgcuuugucuggggcaccaugcggucccuaacggaaccauuguuaagacaaucaccaaugaucagauugaggugacaaacgcuaccgaacucgugcagaucucuagcacaggcgagaucugcgacuccccgcaccagauucuggauggggaaaauuguacccuuaucgacgcccugcucggagauccccaaugcgacggcuuucagaacaaaaagugggaucuguucgucgagagaucuaaagccuauagcaauuguuacccuuaugacgugcccgauuacgcuucccugcggucucucguugccagcuccgggacgcuggaauuuaacaaugagagcuucgacuggaccggagugacacagaacggcaccucuuccgcuugcaagcgcagaagcgauaagucuuucuucucccggcuuaauuggcugacacaucucaaauauaaguacccugcccugaacgucaccaugcccaauaacgagaaauuugacaagcuguauauuuggggcgugcaccauccugggacggauaaugaccagaucagccuguacgcgcaagccucuggacgcauuacaguuuccaccaaaagaagccagcagacagugaucccgaacauuggcucccggccccgcgucagagacgugucuagccggaucuccaucuacuggaccauugugaagccuggggauauccuccugauuaacagcaccggaaaucugaucgcuccccgcggcuauuucaagauuagaucugggaaauccagcaucaugcggucugacgccccuaucggaaaguguaacagcgaaugcauuacacccaauggcuccaucccgaacgauaaaccuuuucagaaugucaaccgcauuacguacggcgcuugucccagauauguuaagcaaaauacccucaaacuggccacagggaugcggaacgugccugagaagcagacccgcggaaucuucggcgcgauugccggguuuaucgaaaauggaugggagggcaugguggacgggugguacggauucagacaccagaacucugagggcacaggccaagcugccgaucuuaaaagcacccaggcugccaucaaucagauuaacgggaagcugaaucggcucaucggaaagacgaacgaaaaauuucaccagauugagaaggaauuuuccgaggucgaaggcagaauccaagaccuggagaaauauguggaggauacaaagauugaccuuuggagcuacaaugccgaacugcucguugcucuggagaaccagcauaccaucgaucugaccgacucugaaaugaacaaacucuucgagcgcacaaagaagcagcugcgggaaaaugcggaggauauggggaacggaugcuuuaaaauuuaucacaagugugacaaugccugcaucggcuccaucagaaacgggaccuacgaccaugauguguaccgcgacgaggcucuuaauaaccgguuccagauuaaaggcgucgaacuuaagagcggauauaaagauuggauccucuggauuucuuuugccaucuccugcuuccugcuuuguguggcccugcucggcuuuauuaugugggcuugccaaaaggggaauaucagauguaacaucugcauuuga

SEQ ID NO: 193948 - RNA, 1701 nt, Artificial Sequence; identical to SEQ ID NO: 193947
  derived and/or modified CDS sequence (opt5) from hemagglutinin__InfluenzaA__ABU92729

SEQ ID NO: 193949 - RNA, 1701 nt, Artificial Sequence; identical to SEQ ID NO: 193825
  derived and/or modified CDS sequence (opt5) from hemagglutinin__InfluenzaA__ABU92730

SEQ ID NO: 193950 - RNA, 1701 nt, Artificial Sequence
  derived and/or modified CDS sequence (opt5) from hemagglutinin__InfluenzaA__ABU92731
augaagaccaucauugcccugagcuacauccucugccugguguucgcucagaaacuucccggcaacgacaauuccacagccacgcugugucucgggcaccaugcggucccuaacggaaccauuguuaagacaaucaccaaugaucaaauugaggugacaaacgcuaccgaacuggugcagucuagcuccacaggcgggaucugcgacucuccgcaccagauccuugauggagagaauuguacccugauugacgcccuccugggcgauccccagugcgacggguuucaaaacaaaaagugggaucuguucgucgaaagaagcaaagccuauuccaauuguuacccuuaugacgugcccgauuacgcuucucuccggagccugaucgccuccagcggaacgcuugaguuuaacaaugaaucuuucaacuggaccggcguuacacagaauggcaccuccagcgcuugcaagcgcagaucuaacuccagcuuuuucucucggcugaauuggcucacacaucugaaguuuaaauauccugcccuuaacgugaccaugcccaauaacgaggaguucgacaagcuguacgucuggggagugcaccauccugggacguauaacgaucagauuucccucuacgcgcaggccagcggccgcaucacaguuuccaccaaaagaucucaacagacagugauuccgaauaucgggagccggccccgcgucagagacauuccuucccggaucagcaucuacuggaccauugugaagcccggagauauccugcugauuaacucuaccggcaaucucaucgcuccucgcggguauuuuaaaauuagauccggaaagagcucuaucaugcggagcgacgcccccaucggcaaguguaacuccgaaugcauuacaccgaauggcucuaucccuaacgacaaacccuuccagaaugugaaccgcauuacguacggggcuuguccuagauaugucaagcagaauacccugaaacuugccacaggaaugcggaacguucccgagaagcaaacccgcggcaucuuuggggcgauugccggauucaucgaaaauggcugggaggggaugguggauggaugguacggcuuuagacaccagaacagcgagggcaucgggcaggcugccgaccugaaauccacacaagcugccauugaucagaucaauggaaagcucaaccggcugauuggcaaaaccaaugaaaaguuccaccagaucgagaaggaguucagcgaaguggaagggcgcauucaggaccuugagaaauaugucgaggauacgaagaucgaccuguggucuuacaacgccgaacuccugguggcucuggagaaccaacauacaauugaucucaccgacuccgaaaugaauaaacuguuugagagaaccaagaaacagcuucgggaaaacgcggaggauaugggaaauggcugcuucaagaucuaucacaagugugacaacgccugcaucgggagcauuagaaauggcacauacgaucaugacguuuaccgcgacgaggcucugaacaaucgguuucagaucaaaggaguggaacucaagucuggcuauaaagauuggauucuguggaucuccuucgccauuagcugcuuucuucugugugucgcccuccugggguucaucaugugggcuugccagaagggaaacaucagauguaauauuugcaucuga

SEQ ID NO: 193951 - RNA, 1701 nt, Artificial Sequence
  derived and/or modified CDS sequence (opt5) from hemagglutinin__InfluenzaA__ABU92732
augaagaccaucauugcccugagcuacauccucugccugguguucgcucagaaacuucccggcaacgacaauuccacagccacgcugugucucgggcaccaugcggucccuaacggaaccauuguuaagacaaucaccaaugaucaaauugaggugacaaacgcuaccgaacuggugcagucuagcuccacaggcgggaucugcgacucuccgcaccagauccuugauggagagaauuguacccugauugacgcccuccugggcgauccccagugcgacggguuucaaaacaaaaagugggaucuguucgucgaaagaagcaaagccuauuccaauuguuacccuuaugacgugcccgauuacgcuucucuccggagccugaucgccuccagcggaacgcuugaguuuaacaaugaaucuuucaacuggaccggcguuacacagaauggcaccuccagcgcuugcaagcgcagaucuaacuccagcuuuuucucucggcugaauuggcucacacaucugaaguuuaaauauccugcccuuaacgugaccaugcccaauaacgaggaguucgacaagcuguacauuuggggaguccaccauccugggacguauaacgaucagaucucccucuacgcgcaggccagcggccgcauuacaguguccaccaaaagaucucaacagacaguuaucccgaauauugggagccggccccgcgugagagacaucccuucccggaucagcauuuacuggaccaucgucaagcccggagauauucugcugaucaacucuaccggcaaucucauugcuccucgcggguauuuuaaaaucagauccggaaagagcucuaucaugcggagcgacgcccccauuggcaaguguaacuccgaaugcaucacaccgaauggcucuauuccuaacgacaaacccuuccagaaugugaaccgcaucacguacggggcuuguccuagauaugugaagcagaauacccugaaacuugccacaggaaugcggaacguccccgagaagcaaacccgcggcauuuuuggggcgaucgccggauucaucgaaaauggcugggaggggaugguugauggaugguacggcuuuagacaccagaacagcgagggcauugggcaggcugccgaccugaaauccacacaagcugccaucgaucagauuaauggaaagcucaaccggcugaucggcaaaaccaaugaaaaguuccaccagauugagaaggaguucagcgaaguggaagggagaauccaggaccuugagaaauauguggaggauacgaagauugaccuguggucuuacaacgccgaacuccuggucgcucuggagaaccaacauacaaucgaucucaccgacuccgaaaugaauaaacuguuugagcgcaccaagaaacagcuucgggaaaacgcggaggauaugggaaauggcugcuucaagaucuaucacaagugugacaacgccugcauugggagcaucagaaauggcacauacgaucaugacguguaccgcgacgaggcucugaacaaucgguuucagauuaaaggaguugaacucaagucuggcuauaaagauuggauccuguggauuuccuucgccaucagcugcuuucuucugugugugguccuccugggguucaucaugugggccugccagaagggaaacauuagauguaauaucugcauuuga

SEQ ID NO: 193952 - RNA, 1701 nt, Artificial Sequence
  derived and/or modified CDS sequence (opt5) from hemagglutinin__InfluenzaA__ABU92733
augaagaccaucauugcccugagcuacauccucugccugguguucgcucagaaacuucccggcaacgacaauuccacagccacgcugugucucgggcaccaugcggucccuaacggaaccauuguuaagacaaucaccaaugaucaaauugaggugacaaacgcuaccgaacuggugcagucuagcuccacaggcgggaucugcgacucuccgcaccagauccuugauggagagaauuguacccugauugacgcccuccugggcgauccccagugcgacggguuucaaaacaaaaagugggaucuguucaucgaaagaagcaaagccuauuccaauuguuacccuuaugacguccccgauuacgcuucucuccggagccugguggccuccagcggaacgcuugaguuuaacaaugaaucuuucaacuggaccggcguuacacagaauggcaccuccagcgcuugcaagcgcagaucuaacaauuccuuuuucagccggcugaacuggcucacacaucugaaguuuaaauauccugcccuuaaugugaccaugcccaacaacgagaaguucgacaaacuguacauuuggggaguccaccauccugggacggauaaugaccagaucucucucuaugcgcaggccuccggccgcauuacagugagcaccaagagaucccaacagacaguuaucccgaacauugggucucggccccgcgugagagauaucccuagccggaucuccauuuacuggaccaucgucaaacccggagacauucugcugaucaauagcaccggcaaccucauugcuccucgcggguacuuuaagaucagaucuggaaaguccagcaucaugcggucugacgcccccauuggcaaauguaauagcgagugcaucacaccgaacggcuccauuccuaaugauaagcccuuccagaacgugaaucgcaucacguauggggcuuguccuagauacgugaaacagaacacccugaagcuggccacaggaaugcggaauguccccgaaaaacaaacccgcggcauuuuuggggcgaucgccggauucaucgagaacggcugggaagggaugguugacggaugguauggcuuuagacaccaaaauucugagggcauugggcaggcugccgaucuuaagagcacacaggcugccaucaaccagauuaauggaaaacucaaccggcugaucggcaagaccaacgagaaguuccaccagauugaaaaagaguucuccgaaguggaggggagaauccaggaccuugaaaaguacguggaggauacgaaagucgaccuguggagcuauaaugccgagcuccugguggcucuggaaaaccaacauacaauugaucucaccgacucugagaugaauaagcuguuugaacgcaccaaaaagcagcuucgggagaacgcggaagauaugggaaauggcugcuucaagaucuaccacaaaugugacaacgccugcaucggguccauuagaaauggcacauauaaccaugauguuuaccgcgacgaggcucugaauaaccgguuucagaucaagggaguggagcucaaaagcggcuacaaggacuggauucuguggaucucuuucgccauuuccugcuuucuucugugugucgcccuccugggguucaucaugugggcuugccagaaaggaaauaucagauguaacauuugcaucuga

SEQ ID NO: 193953 - RNA, 1701 nt, Artificial Sequence; identical to SEQ ID NO: 193825
  derived and/or modified CDS sequence (opt5) from hemagglutinin__InfluenzaA__ABU92734

SEQ ID NO: 193954 - RNA, 1701 nt, Artificial Sequence
  derived and/or modified CDS sequence (opt5) from hemagglutinin__InfluenzaA__ABU92735
augaagaccaucauugcccugagcuacauccucugccugguguucgcucagaaacuucccggcaacgacaauuccacagccacgcugugucucgggcaccaugcggucccuaacggaaccauuguuaagacaaucaccaaugaucaaauugaggugacaaacgcuaccgaacuggugcagucuagcuccacaggcgggaucugcggaucuccgcaccagauccuugacggcgagaauuguacccugauugaugcccuccugggggacccccagugcgauggauuucaaaacaaaaagugggaccuguucgucgaaagaagcaaagccuauuccaauuguuacccuuaugaugugcccgacuacgcuucucuccggagccugguugccuccagcggcacgcuugaguuuaacaaugaaucuuucaacuggaccggcgugacacagaaugggaccuccagcgcuugcaagcgcagaucuaacaauuccuuuuucagccggcugaacuggcucacacaucugaaguuuaaauauccugcccuuaaugucaccaugcccaacaacgagaaguucgauaaacuguacaucuggggagugcaccauccuggcacggacaaugaucagauuucucucuaugcgcaggccccggcucgcaucacaguuuccaccaagagaagccaacagacagugauucccaacaucgggucccggccucgcgucagagacauucccucucggaucagcaucuacuggaccauugugaaaccuggagauauccugcugauuaauuccaccggcaaccucaucgcuccccgcggguacuuuaagauucugagcggaaagucuuccaucaugagaagcgacgccccgaucggcaaauguaauucugagugcauuacaccuaacggcagcauccccaaugacaagccuuuccagaacgugaaucggauuacguauggggccuguccccgcuacgucaaacagaacacccuuaagcuggcgacaggaaugagaaauguucccgaaaaacaaacccggggcaucuuuggggccauugcuggauucaucgagaacggcugggaagggaugguggauggaugguauggcuuucgccaccaaaauuccgagggcaucgggcaggccgcugaccucaagucuacacaggccgccauuaaccagaucaauggaaaacugaacagacuuauuggcaagaccaacgagaaguuccaccagaucgaaaaagaguucagcgaaguggaggggcggauucaggaucuggaaaaguacgucgaggacacgaaaaucgaucucugguccuauaaugcugagcugcugguggcgcucgaaaaccaacauacaauugaccugaccgauagcgagaugaauaaacuuuuugaaagaaccaagaagcagcugcgcgagaacgccgaagacaugggaaauggcugcuucaagaucuaccacaaaugugauaacgcuugcaucgggucuauucggaauggcacauaugaccaugauguuuacagagacgaggcccucaacaaucgcuuucagaucaagggaguggagcugaaauccggcuacaaggacuggauucuuuggaucagcuucgccaugucuugcuuucugcucugugucgcucugcugggguucauuaugugggccugccagaaaggaaacauccgguguaauaucugcauuuga

SEQ ID NO: 193955 - RNA, 1701 nt, Artificial Sequence; identical to SEQ ID NO: 193900
  derived and/or modified CDS sequence (opt5) from hemagglutinin__InfluenzaA__ABU92737

SEQ ID NO: 193956 - RNA, 1701 nt, Artificial Sequence
  derived and/or modified CDS sequence (opt5) from hemagglutinin__InfluenzaA__ABU92738
augaagaccaucauugcccugagcuacauccucugccugguguucgcucagaaacuucccggcaacgacaauuccacagccacgcugugucucgggcaccaugcggucccuaacggaaccauuguuaagacaaucaccaaugaucaaauugaggugacaaacgcuaccgaacuggugcagucuagcuccacaggcgggaucugcgacucuccgcaccagauccuugauggagagaauuguacccugauugacgcccuccugggcgauccccagugcgacggguuucaaaacaaaaagugggaucuguucgucgaaagaagcaaagccuauuccaauuguuacccuuaugacgugcccgauuacgcuucucuccggagccugaucgccuccagcggaacgcuugaguuuaacaaugaaucuuucaacuggaccggcguuacacagaauggcaccuccagcgcuugcaagcgcagaucuaacaauuccuuuuucagccggcugaacuggcucacacaucugaaguuuaaauauccugcccuuaaugugaccaugcccaacaacgagaaguucgacaaacuguacauuuggggaguccaccauccugggacggauaaugaccagaucucucucuaugcgcaggccccgggccgcauuacaguguccaccaagagaagccaacagacaguuauccccaacauugggucccggccucgcgugagagauauccccucucggaucagcauuuacuggaccaucgucaaaccuggagacauucugcugaucaauuccaccggcaaccucauugcuccccgcggguacuuuaagaucagaagcggaaagucuuccaucaugcggagcgacgccccgauuggcaaauguaauucugagugcaucacaccuaacggcagcauucccaaugauaagccuuuccagaacgugaaucgcaucacguauggggcuugucccagauacgugaaacagaacacccugaaacuugccacaggaaugcggaauguccccgaaaagcaaacccgcggcauuuuuggggcgaucgccggauucaucgagaacggcugggaagggaugguugacggaugguauggcuuuagacaccaaaauuccgagggcauugggcaggcugccgaucugaagucuacacaggcugccaucgaccagauuaacggaaaacucaaucggcugaucggcaagaccaacgagaaguuccaccagauugaaaaagaguucagcgaaguggaggggagaauccaggaucuugaaaaguacguggaggacacgaaaauugaucugugguccuauaacgccgagcuccuggucgcucuggaaaaucaacauacaaucgaccucaccgauagcgagaugaacaagcuguuugaacgcaccaaaaagcagcuucgggagaaugcggaagacaugggaaacggcugcuucaagaucuaccacaaaugugauaaugccugcauugggucuaucagaaacggcacauaugaccaugacguguaccgcgaugaggcucugaauaaccgguuucagauuaagggaguugagcucaaauccggcuacaaggacuggauccuguggauuagcuucgccaucucuugcuuucuucugugugugguccuccugggguucaucaugugggccugccagaaaggaaauauuagauguaacaucugcauuuga

SEQ ID NO: 193957 - RNA, 1701 nt, Artificial Sequence; identical to SEQ ID NO: 193834
  derived and/or modified CDS sequence (opt5) from hemagglutinin__InfluenzaA__ABU92739

SEQ ID NO: 193958 - RNA, 1701 nt, Artificial Sequence
  derived and/or modified CDS sequence (opt5) from hemagglutinin__InfluenzaA__ABU92740
augaagaccaucauugcccugagcuacauccucugccugguguucgcucagaaacuucccggcaacgacaauuccacagccacgcugugucucgggcaccaugcggucccuaacggaaccauuguuaagacaaucaccaaugaucaaauugaggugacaaacgcuaccgaacuggugcagucuagcuccacaggcgagaucugcgacucuccgcaccagauccuugauggggaaaauuguacccugauugacacgcuccugggagauccccagugcgacggcuuucaaaacaaaaagugggaucuguucgucgagagaagcaaagccuauuccaauuguuacccuuaugacgugcccgauuacgccucucuccggagccugguugcuuccagcgggacccuugaauuuaacaaugagucuuucaacuggacaggagugacccagaauggcacauccagcgccugcaagcgcagaucuaacaauuccuuuuucagccggcugaacuggcucacccaucugaaguuuaaauauccugcucuuaaugucacgaugcccaacaacgagaaguucgacaaacuguacaucuggggcgugcaccauccugggacagauaaugaccagauuuuucucuaugcccaggcgucuggacgcaucaccguuuccacaaagagaagccaacagaccgugauuccgaacaucggcucccggccccgcgucagaaauauuccuucucggaucagcaucuacuggaccauugugaaacccggggauauccugcugauuaacuccacaggaaaucucaucgccccucgcggcuacuucaagauuagaagcgggaagucuuccaucaugcggagcgacgcucccaucggaaaauguaacucugaaugcauuacgccgaauggcagcaucccuaacgacaagcccuuucagaaugugaaccgcauuaccuauggcgccuguccuagauacgucaaacagaauacacugaaacuugcuaccgggaugcggaacguucccgagaaacaaacacgcggaaucuucggcgccauugcgggguuuaucgaaaauggaugggagggcaugguggaugggugguauggauucagacaccagaacuccgagggcaucggccaggccgcugaccugaagucuacccaagccgcuauuaaucagaucaacgggaaacucaaccggcugauuggaaagacgaaugaaaaguuccaccagaucgagaaagaauuuagcgagguggaaggccgcauucaggaucuugagaaguacgucgaggacacaaaaaucgaucugugguccuauaacgccgaacuccugguggcccuggagaaucaacauaccauugaccucaccgauagcgaaaugaacaagcuguucgagagaacaaagaagcagcuucgggaaaaugcugaggacauggggaacggaugcuuuaagaucuaccacaaaugugauaaugcgugcaucggcucuauuagaaacgggaccuaugaccaugauguuuaccgcgacgaggcccugaauaaccgguuccagaucaagggcguggaacucaaauccggauacaaggacuggauucuguggaucagcuuugcuauuucuugcuuccuucugugugucgcccuccugggcuuuaucaugugggccugccagaaagggaauaucagauguaacauuugcaucuga

SEQ ID NO: 193959 - RNA, 1701 nt, Artificial Sequence
  derived and/or modified CDS sequence (opt5) from hemagglutinin__InfluenzaA__ABU92741
augaagaccaucauugcccugagcuacauccucugccugguguucgcucagaaacuucccggcaacgacaauuccacagccacgcugugucucgggcaccaugcggucccuaacggaaccauuguuaagacaaucaccaaugaucaaauugaggugacaaacgcuaccgaacuggugcagucuagcuccacaggcgggaucugcgacucuccgcaccagauccuugauggagagaauuguacccugauugacgcccuccugggcgauccccagugcgacggguuucaaaacaaaaagugggaucuguucgucgaaagaagcaaagccuauuccaauuguuacccuuaugacgugcccgauuacgcuucucuccggagccugaucgccuccagcggaacgcuugaguuuaacaaugaaucuuucaacuggaccggcguuacacagaauggcaccuccagcgcuugcaagcgcagaucuaacaauuccuuuuucagccggcugaacuggcucacacaucugaaguuuaaauauccugcccuuaaugugaccaugcccaacaacgaggaguucgacaagcuguacauuuggggaguccaccauccugggacggauaaugaccagaucucucucuaugcgcaggccccgggccgcauuacaguguccaccaaaagaagccaacagacaguuauccccaacauugggucccggccucgcgugagagauauccccucucggaucagcauuuacuggaccaucgucaagccuggagacauucugcugaucaauuccaccggcaaccucauugcuccccgcggguacuuuaaaaucagaagcggaaagucuuccaucaugcggagcgacgccccgauuggcaaguguaauucugaaugcaucacaccuaacggcagcauucccaaugauaaaccuuuccagaacgugaaucgcaucacguauggggcuugucccagauacgugaagcagaacacccugaaacuugccacaggaaugcggaauguccccgagaagcaaacccgcggcauuuuuggggcgaucgccggauucaucgaaaacggcugggaggggaugguugacggaugguauggcuuuagacaccaaaauuccgagggcauugggcaggcugccgaucugaaaucuacacaggcugccaucgaccagauuaacggaaagcucaaucggcugaucggcaaaaccaacgaaaaguuccaccagauugagaaggaguucagcgaaguggaagggagaauccaggaucuugagaaauacguggaggacacgaagauugaucugugguccuauaacgccgaacuccuggucgcucuggagaaucaacauacaaucgaccucaccgauagcgaaaugaacaaacuguuugagcgcaccaagaaacagcuucgggaaaaugcggaggacaugggaaacggcugcuucaagaucuaccacaagugugauaaugccugcauugggucuaucagaaacggcacauaugaccaugacauuuaccgcgaugaggcucugaauaaccgguuucagaucaaaggaguggaacucaaguccggcuacaaagacuggauucuguggaucagcuucgccaucucuugcuuucuucuguguguugugcuccugggguucauuaugugggccugccagaagggaaauaucagauguaacauuugcaucuga

SEQ ID NO: 193960 - RNA, 1701 nt, Artificial Sequence; identical to SEQ ID NO: 193900
  derived and/or modified CDS sequence (opt5) from hemagglutinin__InfluenzaA__ABU92742

SEQ ID NO: 193961 - RNA, 1701 nt, Artificial Sequence
  derived and/or modified CDS sequence (opt5) from hemagglutinin__InfluenzaA__ABU92743
augaagaccaucauugcccugagcuacauccucuaucugguguucgcucagaaacuucccgagaacgacaauuccacagccacgcugugccucggccaccaugcggucccuaacgggaccauuguuaagacaaucaccaaugaucaaauugaagugacaaacgcuaccgagcuggugcagucuagcuccacaggaggcaucugugacucuccgcaccagauccuugauggggaaaauugcacccugauugacgcccuccugggagauccccagugugacggcuuucaaaacaaaaagugggaucuguucgucgagagaagcaaagccuacuccaauugcuauccuuacgacgugcccgauuaugcuucucuccggagccugguugccuccagcgggacgcuugaauuuaacaaugagucuuucaacuggaccggagugacacagaauggcaccuccagcgcuuguaagcgcagaucuaacaauuccuuuuucagccggcugaacuggcucacacaucugaaguuuaaauacccugcccuuaaugucaccaugcccaacaacgagaaguucgacaaacuguauaucuggggcgugcaccauccugggacggauaaugaccagauuuuucucuacgcgcaggccucuggacgcaucacaguuuccaccaagagaagccaacagacagugauuccgaacaucggcucccggccccgcgucagaaauauuccuucucggaucagcaucuacuggaccauugugaaacccggggauauccugcugauuaacuccaccggaaaucucaucgcuccucgcggcuauuucaagauuagaagcgggaagucuuccaucaugcggagcgacgcccccaucggaaaaugcaacucugaauguauuacaccgaauggcagcaucccuaacgacaagcccuuucagaaugugaaccgcauuacguacggcgcuugcccuagauaugucaaacagaauacccugaaacuugccacagggaugcggaacguucccgagaagcaaacccgcggaaucuucggcgcgauugccggguuuaucgaaaauggaugggagggcaugguggaugggugguacggauucagacaccagaacuccgagggcaucggccaggcugccgaccugaagucuacacaagcugccauugaucagaucaaugggaaacucaaccggcugauuggaaagaccaacgaaaaguuccaccagaucgagaaagaauuuagcgagguggaaggccgcauucaggaccuugagaaguaugucgaggauacgaaaaucgaccugugguccuacaaugccgaacuccugguggcucuggagaaccaacauacaauugaucucaccgacagcgaaaugaauaagcuguucgagaaaaccaagaagcagcuuagagaaaacgcggaggauauggggaauggauguuuuaaaaucuaucacaagugcgacaacgccuguaucggcucuauucggaaugggacauacgaucaugacguuuacagagacgaggcucugaacaaucgcuuccagaucaaaggcguggaacucaaguccggauauaaagauuggauucuguggaucagcuuugccauuucuugcuuccuucugugcgucgcccuccugggcuuuaucaugugggcuugucagaaggggaacauccggugcaauauuuguaucuga

SEQ ID NO: 193962 - RNA, 1701 nt, Artificial Sequence; identical to SEQ ID NO: 193900
  derived and/or modified CDS sequence (opt5) from hemagglutinin__InfluenzaA__ABU92744

SEQ ID NO: 193963 - RNA, 1701 nt, Artificial Sequence
  derived and/or modified CDS sequence (opt5) from hemagglutinin__InfluenzaA__ABU92745
augaagaccaucauugcccugagcuacauccucugccugguguucgcucagaaacuucccggcaacgacaauuccacagccacgcugugucucgggcaccaugcggucccuaacggaaccauuguuaagacaaucaccaaugaucaaauugaggugacaaacgcuaccgaacuggugcagucuagcuccacaggcgggaucugcgacucuccgcaccagauccuugauggagagaauuguacccugauugacgcccuccugggcgauccccagugcgacggguuucaaaacaaaaagugggaucuguucgucgaaagaagcaaagccuauuccaauuguuacccuuaugacgugcccgauuacgcuucucuccggagccugaucgccuccagcggaacgcuugaguuuaacaaugaaucuuucaacuggaccggcguuacacagaauggcaccuccagcgcuugcaagcgcagaucuaacaauuccuuuuucagccggcugaacuggcucacacaucugaaguuuaaauauccugcccuuaaugugaccaugcccaacaacgaggaguucgacaagcuguacauuuggggaguccaccauccugggacggauaaugaccagaucucucucuaugcgcaggccccgggccgcauuacaguguccaccaaaagaagccaacagacaguuauccccaacauugggucccggccucgcgugagagauauccccucucggaucagcauuuacuggaccaucgucaagccuggagacauucugcugaucaauuccaccggcaaccucauugcuccccgcggguacuuuaaaaucagaaucggaaagagcucuauuaugcgguccgacgccccgaucggcaaguguaauagcgaaugcauuacaccuaacggcucuauccccaaugauaaaccuuuccagaacgugaaucgcauuacguauggggcuugucccagauacgugaagcagaacacccugaaacuugccacaggaaugcggaauguccccgagaagcaaacccgcggcaucuuuggggcgaucgccggauucauugaaaacggcugggaggggaugguugacggaugguauggcuuuagacaccagaauagcgagggcaucgggcaggcugccgaucugaaauccacacaagcugccauugaccagaucaacggaaagcucaaucggcugauuggcaaaaccaacgaaaaguuccaccagaucgagaaggaguucucugaaguggaagggcgcauucaggaucuugagaaauacguggaggacacgaagaucgaucuguggagcuauaacgccgaacuccuggucgcucuggagaaucaacauacaaucgaccucaccgauuccgaaaugaacaaacuguuugagagaaccaagaaacagcuucgggaaaaugcggaggacaugggaaacggcugcuucaagauuuaccacaagugugauaaugccugcaucgggagcauuagaaacggcacauaugaccaugacguguaccgcgaugaggcucugaauaaccgguuucagaucaaaggaguugaacucaagucuggcuacaaagacuggauucuguggaucuccuucgccaucagcugcuuucuucugugugugguccuccugggguucauuaugugggccugccagaagggaaauaucagauguaacauuugcaucuga

SEQ ID NO: 193964 - RNA, 1701 nt, Artificial Sequence; identical to SEQ ID NO: 193900
  derived and/or modified CDS sequence (opt5) from hemagglutinin__InfluenzaA__ABU92746

SEQ ID NO: 193965 - RNA, 1701 nt, Artificial Sequence; identical to SEQ ID NO: 192145
  derived and/or modified CDS sequence (opt5) from hemagglutinin__InfluenzaA__ABU92747

SEQ ID NO: 193966 - RNA, 1701 nt, Artificial Sequence
  derived and/or modified CDS sequence (opt5) from hemagglutinin__InfluenzaA__ABU92748
augaagaccaucauugcccugagcuacauccucugccugguguucgcucagaaacuucccggcaacgacaauuccacagccacgcugugucucgggcaccaugcggucccuaacggaaccauuguuaagacaaucaccaaugaucaaauugaggugacaaacgcuaccgaacuggugcagucuagcuccacaggcgagaucugcgacucuccgcaccagauccuugauggggaaaauuguacccugauugacgcccuccugggagauccccagugcgacggcuuucaaaacaaaaagugggaucuguucgucgagagaagcaaagccuauuccaauuguuacccuuaugacgugcccgauuacgcuucucuccggagccugguugccuccagcgggacgcuugaauuuaacaaugagucuuucaacuggaccggagugacacagaauggcaccuccagcgcuugcaagcgcagaucuaacaauuccuuuuucagccggcugaacuggcucacacauucuaaguuuaaauauccugcccugaaugucaccaugcccaacaacgagaaguucgacaaacuuuacaucuggggcgugcaccauccugggacggauaaugaccagacauuucuguaugcgcaggccuccggacgcauuaccguuagcacaaagagaucccaacagaccgugaucccgaacauuggcucucggccccgcgucagaaauaucccuagccggauuuccaucuacuggaccaucgugaaacccggggauauucuccugaucaacagcacaggaaaucugauugcuccucgcggcuacuucaagaucagaucugggaaguccagcauuaugcggucugacgcccccaucggaaaauguaacagcgaaugcaucacgccgaauggcuccauuccuaacgacaagcccuuucagaaugugaaccgcaucaccuauggcgcuuguccuagauacgucaaacagaauacacucaagcuggccaccgggaugcggaacguucccgagaaacaaacacgcggaauuuucggcgcgaucgccggguuuauugaaaauggaugggagggcaugguggaugggugguauggauucagacaccagaacucugagggcaucggccaggcugccgaccuuaagagcacccaagcugccaucaaucagauuaacgggaaacugaaccggcucaucggaaagacgaaugaaaaguuccaccagauugagaaagaauuuuccgagguggaaggcagaauccaggaucuggagaaguacgucgaggacacaaaaauugaucuuuggagcuauaacgccgaacugcucguggcucuggagaaucaacauaccaucgaccugaccgauucugaaaugaacaaacucuucgagcgcacaaagaagcagcugcgggaaaaugcggaggacauggggaacggaugcuuuaagauuuaccacaaaugugauaaugccugcaucggcuccaucagaaacgggaccuaugaccaugauguuuaccgcgacgaggcucuuaauaaccgguuccagauuaagggcguggaacugaaaagcggauacaaggacuggauccucuggauuucuuuugccaucuccugcuuccugcuuugugucgugcugcucggcuuuauuaugugggccugccagaaagggaauaucagauguaacaucugcauuuga

SEQ ID NO: 193967 - RNA, 1701 nt, Artificial Sequence; identical to SEQ ID NO: 192145
  derived and/or modified CDS sequence (opt5) from hemagglutinin__InfluenzaA__ABU92749

SEQ ID NO: 193968 - RNA, 1701 nt, Artificial Sequence
  derived and/or modified CDS sequence (opt5) from hemagglutinin__InfluenzaA__ABU92750
augaagaccaucauugcccugagcuacauccucugccugguguucgcucagaaacuucccggcaacgacaauagaacagccacgcugugucucgggcaccaugcggucccuaacggaaccauuguuaagacaaucaccaaugaucaaauugaggugacaaacgcuaccgaacuggugcagaucuccucuacaggcgggaucugcgacagcccgcaccagauucuugauggagagaauuguacccugaucgacgcccuccugggcgauccccagugcgacggguuucaaaacaaaaagugggaucuguucgucgaacgguccaaagccuauucuaauuguuacccuuaugacgugcccgauuacgcuagccuccgcucccugguugccucuagcggaacgcuugaguuuaacaaugaauccuucgacuggaccggcgugacacagaacggcaccagcucugcuugcaagagacgguccaauaagagcuuuuucucucgccugaacuggcucacacaucugaaauauaaguacccugcccuuaaugucaccaugcccaacaaugagaaauuugauaagcuguauauuuggggagugcaccauccugggacggacuccgaucagaucagccucuacgcgcaggccucuggcagaauuacaguuuccaccaaacggagccaacagacagugaucccgaacauugggucccgccccagaguccgggacgugucuagccgcaucuccaucuacuggaccauugugaagccuggagacauccugcugauuaacagcaccggcaaucucaucgcucccagaggguauuucaagauucggucuggaaaauccagcaucaugcgcucugaugccccuaucggcaaguguaacagcgagugcauuacacccaauggcuccaucccgaacgacaaaccuuuucagaaugucaacagaauuacguacggggcuuguccccgguauguuaagcagaauacccugaaacuugccacaggaaugcgcaacgugccugaaaagcaaaccagaggcaucuucggggcgauugccggauuuaucgagaauggcugggaagggaugguggauggaugguacggcuuccggcaccagaacucugagggcacagggcaggcugccgaccugaaaagcacccaagcugccaucaaucagauuaacggaaagcucaauagacugaucggcaagacgaacgagaaauuucaccagauugaaaaggaguucuccgaagucgaggggcgcauccaggaucuugaaaaauauguggaggacacaaagauugaucuguggagcuacaaugccgagcuccugguugcucuggaaaaccaacauaccaucgaccucaccgauucugagaugaacaaacuguucgaacggacaaagaagcagcuuagagagaaugcggaagacaugggaaacggcugcuuuaaaauuuaucacaagugugauaaugccugcaucggguccauccgcaacggcaccuacgaccaugacguguaccgggaugaggcucugaauaacagauuccagauuaaaggagucgagcucaagagcggcuauaaagacuggauccuguggauuucuuuugccaucuccugcuuccuucuguguguggcccuccugggguuuauuaugugggcuugccagaagggaaauauccgcuguaacaucugcauuuga

SEQ ID NO: 193969 - RNA, 1701 nt, Artificial Sequence
  derived and/or modified CDS sequence (opt5) from hemagglutinin__InfluenzaA__ABU92751
augaagaccaucauugcccugagcuacauccucugccugguguucgcucagaaacuucccggcaacgacaauuccacagccacgcugugucucgggcaccaugcggucccuaacggaaccauuguuaagacaaucaccaaugaucaaauugaggugacaaacgcuaccgaacuggugcagucuagcuccacaggcgggaucugcgacucuccgcaccagauccuugauggagagaauuguacccugauugacgcccuccugggcgauccccagugcgacggguuucaaaacaaaaagugggaucuguucgucgaaagaagcaaagccuauuccaauuguuacccuuaugacgugcccgauuacgcuucucuccggagccugguugccuccagcggaacgcuugaguuuaacaaugaaucuuucaacuggaccggcgugacacagaauggcaccuccagcgcuugcaagcgcagaucuaacaaguccuuuuucagccggcugaauuggcucacacaucugaaauauaaguacccugcccuuaacgucaccaugcccaauaacgagaaauuugacaagcuguauaucuggggagugcaccauccugggacggauucugaccagauuucccucuacgcgcaggccagcggccgcaucacaguuuccaccaaaagaucucaacagacagugauuccgaacaucgggagccggccccgcgucagagauguguccagccggauuucuaucuacuggaccaucgugaagccuggagacauucugcugaucaauuccaccggcaaccucauugcuccccgcggguauuucaagaucagaagcggaaaaucuagcauuaugcgguccgacgccccuaucggcaaguguaauucugagugcaucacacccaacggcagcauuccgaaugauaaaccuuuucagaacgucaaucgcaucacguacggggcuugucccagauauguuaagcagaacacccugaaacuugccacaggaaugcggaaugugccugaaaagcaaacccgcggcauuuucggggcgaucgccggauuuauugagaacggcugggaagggaugguggacggaugguacggcuucagacaccaaaauuccgagggcacagggcaggcugccgaucugaaaagcacccaggcugccaucaaccagaucaauggaaagcucaaccggcugauuggcaagacgaaugagaaauuucaccagaucgaaaaggaguucucugaagucgaggggcgcauucaggaccuugaaaaauauguggaggauacaaagaucgaccugugguccuacaacgccgagcuccugguugcucuggaaaaccaacauaccauugaucucaccgacagcgagaugaauaaacuguucgaaagaacaaagaagcagcuucgggagaacgcggaagauaugggaaauggcugcuuuaaaaucuaucacaagugugacaacgccugcauugggucuaucagaaauggcaccuacgaucaugacguguaccgcgacgaggcucugaacaaucgguuccagaucaaaggagucgagcucaaguccggcuauaaagauuggauucuguggaucagcuuugccauuuccugcuuccuucuguguguggcccuccugggguuuaucaugugggcuugccagaagggaaacauuagauguaauaucugcaucuga

SEQ ID NO: 193970 - RNA, 1701 nt, Artificial Sequence; identical to SEQ ID NO: 193834
  derived and/or modified CDS sequence (opt5) from hemagglutinin__InfluenzaA__ABU92752

SEQ ID NO: 193971 - RNA, 1701 nt, Artificial Sequence; identical to SEQ ID NO: 192145
  derived and/or modified CDS sequence (opt5) from hemagglutinin__InfluenzaA__ABU92753

SEQ ID NO: 193972 - RNA, 1701 nt, Artificial Sequence; identical to SEQ ID NO: 193834
  derived and/or modified CDS sequence (opt5) from hemagglutinin__InfluenzaA__ABU92754

SEQ ID NO: 193973 - RNA, 1701 nt, Artificial Sequence
  derived and/or modified CDS sequence (opt5) from hemagglutinin__InfluenzaA__ABU92755
augaagaccaucauugcccugagcuacauccucugccugguguucgcucagaaacuucccggcaacgacaaugggacagccacgcugugucucggacaccaugcggucccuaacggcaccauuguuaagacaaucaccaaugaucaaauugaggugacaaacgcuaccgaacuggugcaguccucuagcacagggggaaucugcgacuccccgcaccagauccuugauggcgagaauuguacccugauugacgcccuccugggggauccccagugcgacggauuucaaaacaaaaagugggaucuguucgucgaaagaucuaaagccuauagcaauuguuacccuuaugacgugcccgauuacgcuucccuccggucucugguugccagcuccggcacgcuugaguuuaacaaugaaucuuucaacuggaccggcgugacacagaaugggaccucuuccgcuugcaagcgcagaagcaacaagagcuuuuucucccggcugaauuggcucacacaucugaaauuuaaguauccugcccuuaacgucaccaugcccaauaacgagaaauucgacaagcuguacaucuggggagugcaccauccuggcacggauaacgaccagauuagccucuaugcgcaggccucugggcgcaucacaguuuccaccaaaagaagccaacagacagugauuccgaauaucggaucccggccccgcgucagagaugugccuucucggauuagcaucuacuggaccaucgugaagcccggcgacauucugcugaucaacuccaccgggaaucucauugcuccucgcggauacuuuaagaucagaagcggcaaaucuuccauuaugcggagcgacgcccccaucggcaaguguaacucugagugcaucacaccgaaugggagcauuccuaacgauaaacccuuccagaaugucaaccgcaucacguauggagcuuguccuagauacguuaagcagaauacccugaaacuugccacaggcaugcggaacgugcccgaaaagcaaacccgcgggauuuuuggagcgaucgccggcuucauugagaaugggugggaaggaaugguggacggcugguauggcuuuagacaccagaacgcugaggggacaggacaggccgcugaucugaaauccacccaagccgccaucaaucagaucaacggcaagcucaaucggcugauugggaagacgaacgagaaauuccaccagaucgaaaaggaguucucugaagucgagggacgcauucaggaccuugaaaaauacguggaggauacaaagaucgaccuguggagcuauaacgcugagcuccugguugcgcuggaaaaucaacauaccauugaucucaccgacuccgagaugaacaaacuguuugaaagaacaaagaagcagcuucgggagaaugccgaagauaugggcaacgggugcuucaaaaucuaccacaagugugacaaugcuugcauuggcagcaucagaaacggaaccuaugaucauaauguguaccgcgacgaggcccugaacaaucgguuucagaucaaaggcgucgagcucaagucuggguacaaagacuggauucuguggaucuccuucgccauuagcugcuuucuucugugugugguucuccugggauucaucaugugggcuugccagaagggcaacauuagauguaauaucugcaucuga

SEQ ID NO: 193974 - RNA, 1701 nt, Artificial Sequence
  derived and/or modified CDS sequence (opt5) from hemagglutinin__InfluenzaA__ABU92756
augaagaccaucauugcccugagcuacauccucugccugguguucgcucagaaacuucccggcaacgacaauuccacagccacgcugugucucgggcaccaugcggucccuaacggaaccauuguuaagacaaucaccaaugaucaaauugaggugacaaacgcuaccgaacuggugcagaucucuagcacaggcgggaucugcgacuccccgcaccagauucuugauggagagaauuguacccugaucgacgcccuccugggcgauccccagugcgacggguuucaaaacaaaaagugggaucuguucgucgaaagaucuaaagcccauagcaauuguuauccuuacgacgugcccgauuaugcuucccuccggucucugguugccagcuccggaacgcuugaguuuaacaaugaaucuuucgacuggaccggcgugacacagaacggcaccucuuccgcuugcaagcgcagaagcaauaagagcuuuuucucccggcugaacuggcucacacaccugaaauacaaguauccugcccuuaaugucaccaugcccaacaaugagaaauuugauaagcuguacauuuggggagugcaucacccugggacggacagcgaucagaucucucucuaugcgcaggccuccggccgcauuacaguuagcaccaaaagaucccaacagacagugaucccgaacauugggucucggccccgcgucagagacgugagcucccggaucagcaucuacuggaccauugugaagccuggagacauccugcugauuaacucuaccggcaaucucaucgcuccccgcggguacuucaagauuagauccggaaaaagcucuaucaugcggagcgaugccccuaucggcaaguguaacuccgagugcauuacacccaauggcucuaucccgaacgacaaaccuuuucagaaugucaaccgcauuacguauggggcuugucccagauacguuaagcagaauacccugaaacuugccacaggaaugcggaacgugccugaaaagcaaacccgcggcaucuucggggcgauugccggauuuaucgagaauggcugggaagggaugguggauggaugguauggcuucagacaccagaacagcgagggcacagggcaggcugccgaccugaaauccacccaagcugccaucaaucagauuaacggaaagcucaaucggcugaucggcaagacgaacgagaaauuucaucagauugaaaaggaguucagcgaagucgaggggagaauccaggaucuugaaaaauacguggaggacacaaagauugaucuguggucuuauaaugccgagcuccugguugcucuggaaaaccaacacaccaucgaccucaccgauuccgagaugaacaaacuguucgaacgcacaaagaagcagcuucgggagaaugcggaagacaugggaaacggcugcuuuaaaauuuaccauaagugugauaaugccugcaucgggagcaucagaaacggcaccuaugaccacgacguguaccgcgaugaggcucugaauaaccgguuccagauuaaaggagucgagcucaagucuggcuacaaagacuggauccuguggauuuccuuugccaucagcugcuuccuucuguguguggcccuccugggguuuauuaugugggcuugccagaagggaaauaucagauguaacaucugcauuuga

SEQ ID NO: 193975 - RNA, 1701 nt, Artificial Sequence
  derived and/or modified CDS sequence (opt5) from hemagglutinin__InfluenzaA__ABU92757
augaagaccaucauugcccugagcuacauccucugccugguguucgcucagaaacuucccggcaacgacaauuccacagccacgcugugucucgggcaccaugcggucccuaacggaaccauuguuaagacaaucaccaaugaucaaauugaggugacaaacgcuaccgaacuggugcagaucucuagcacaggcgagaucugcgacuccccgcaccagauucuugauggggaaaauuguacccugaucgacgcccuccugggagauccccagugcgacggcuuucaaaacaaaaagugggaucuguucgucgagagaucuaaagccuauagcaauuguuacccuuaugacgugcccgauuacgcuucccuccggucucugguugccagcuccgggacgcuugaauuuaacaaugagagcuucgacuggaccggagugacacagaacggcaccucuuccgcuugcaagcgcagaagcgauaagucuuucuucucccggcugaauuggcucacacaucugaaauauaaguacccugcccuuaacgucaccaugcccaauaacgagaaauuugacaagcuguauauuuggggcgugcaccauccugggacggauagcgaccagaucucucucuacgcgcaggccuccggacgcauuacaguuagcaccaaaagaucccaacagacagugaucccgaauauuggcucucggccccgcgucagagacgugagcucccggaucagcaucuacuggaccauugugaagccuggggauauccugcugauuaacucuaccggaaaccucaucgcuccccgcggcuauuucaagauuagacgggggaaauccagcaucaugcgcucugacgccccuaucggaaaguguaauagcgaaugcauuacacccaacggcuccaucccgaaugauaaaccuuuucagaacgucaauagaauuacguacggcgcuuguccccgguauguuaagcagaacacccugaaacuugccacagggaugcgcaaugugccugagaagcaaaccagaggaaucuucggcgcgauugccggguuuaucgaaaacggaugggagggcaugguggacgggugguacggauuccggcaccaaaauucugagggcacaggccaggcugccgaucugaaaagcacccaggcugccaucaaccagauuaaugggaagcucaacagacugaucggaaagacgaaugaaaaauuucaccagauugagaaggaauuuuccgaggucgaaggccgcauccaggaccuugagaaauauguggaggauacaaagauugaccuguggagcuacaacgccgaacuccugguugcucuggagaaucaacauaccaucgaucucaccgacucugaaaugaacaaacuguucgagcggacaaagaagcagcuuagagaaaacgcggaggauauggggaauggaugcuuuaaaauuuaucacaagugugacaacgccugcaucggcuccauccgcaaugggaccuacgaccaugauguguaccgggacgaggcucugaacaauagauuccagauuaaaggcgucgaacucaagagcggauauaaagauuggauccuguggauuucuuuugccaucuccugcuuccuucuguguguggcccuccugggcuuuauuaugugggcuugccagaaggggaacauccgcuguaauaucugcauuuga

SEQ ID NO: 193976 - RNA, 1701 nt, Artificial Sequence; identical to SEQ ID NO: 193834
  derived and/or modified CDS sequence (opt5) from hemagglutinin__InfluenzaA__ABU92758

SEQ ID NO: 193977 - RNA, 1701 nt, Artificial Sequence; identical to SEQ ID NO: 193834
  derived and/or modified CDS sequence (opt5) from hemagglutinin__InfluenzaA__ABU92759

SEQ ID NO: 193978 - RNA, 1701 nt, Artificial Sequence
  derived and/or modified CDS sequence (opt5) from hemagglutinin__InfluenzaA__ABU92760
augaagaccaucauugcccugagcuacauccucugccugguguucgcucagaaacuucccggcaacgacaauuccacagccacgcugugucucgggcaccaugcggucccuaacggaaccauuguuaagacaaucaccaaugaucaaauugaggugacaaacgcuaccgaacuggugcagaucucuagcacaggcgagaucugcaauuccccgcaccagauucuugacggggaaaacuguacccugaucgaugcccuccugggagacccccagugcgauggcuuucaaaauaaaaagugggaccuguucgucgagagaucuaaagccuauagcaacuguuacccuuaugaugugcccgacuacgcuucccuccggucucugguugccagcuccgggacgcuugaauuuaauaacgagagcuucgauuggaccggagugacacagaauggcaccucuuccgcuugcaagcgcagaagcgacaagucuuucuucucccggcugaacuggcucacacaucugaaauauaaguacccugcccuuaaugucaccaugcccaacaaugagaaauuugauaagcuguauauuuggggcgugcaccauccugggacggacagcgaucagaucucucucuacgcgcaggccuccggacgcauuacaguuagcaccaaaagaucccaacagacagugaucccgaacauuggcucucggccccgcgucagagacgugagcucccggaucagcaucuacuggaccauugugaagccuggggacauccugcugauuaacucuaccggaaaucucaucgcuccccgcggcuauuucaagauuagauccgggaaaagcucuaucaugcggagcgaugccccuaucggaaaguguaacuccgaaugcauuacacccaauggcucuaucccgaacgacaaaccuuuucagaaugucaaccgcauuacguacggcgcuugucccagauauguuaagcagaauacccugaaacuugccacagggaugcggaacgugccugagaagcaaacccgcggaaucuucggcgcgauugccggguuuaucgaaaauggaugggagggcaugguggaugggugguacggauucagacaccagaacagcgagggcacaggccaggcugccgaccugaaauccacccaagcugccaucaaucagauuaacgggaagcucaaucggcugaucggaaagacgaacgaaaaauuucaccagauugagaaggaauuuagcgaggucgaaggcagaauccaggaucuugagaaauauguggaggacacaaagauugaucuguggucuuacaaugccgaacuccugguugcucuggagaaccaacauaccaucgaccucaccgauuccgaaaugaacaaacuguucgagcgcacaaagaagcagcuucgggaaaaugcggaggacauggggaacggaugcuuuaaaauuuaucacaagugugauaaugccugcaucggcagcaucagaaacgggaccuacgaccaugacguguaccgcgaugaggcucugaauaaccgguuccagauuaaaggcgucgaacucaagucuggauauaaagacuggauccuguggauuuccuuugccaucagcugcuuccuucuguguguggcccuccugggcuuuauuaugugggcuugccagaaggggaauaucagauguaacaucugcauuuga

SEQ ID NO: 193979 - RNA, 1698 nt, Artificial Sequence
  derived and/or modified CDS sequence (opt5) from hemagglutinin__InfluenzaA__ABV29579
augaaggugaaacugcucguccugcuuugcaccuucacagccacguacgcugacaccaucuguauuggcuaucacgccaacaauagcacagauaccguugacacagugcuggagaagaacgugaccgucacacauuccgugaaucuccuggaagauucucacaacgggaaacuuugccugcucaagggaaucgcgccccugcagcugggcaauuguagcguugcuggguggauucucggaaacccugagugcgaacugcuuaucuccaaagagucuuggagcuacauuguggaaaccccgaaucccgagaacggcacguguuauccuggguacuuugccgacuaugaggaacugagagagcaacucuccucugucagcuccuucgaacgguuugagaucuuccccaaggagagcucuuggccuaaucauaccgugacaggaguuuccgccagcugcucucacaacggcaaguccagcuuuuaccgcaaucugcuuuggcugaccggcaaaaacgggcucuaucccaaucugucuaaguccuacgcuaacaauaaagaaaaggaggugcugguccucuggggagugcaucacccuccgaacaucggcgaucagagagcccuguaccacacagaaaacgcuuaugugagcgucguuuccucucauuacagccggcgcuucacccccgagauugccaaaagaccuaaggugcgggaccaggaagggcgcaucaauuauuacuggacgcuucuggagcccggagauacaauuaucuuugaggcgaacggcaaucucauugccccuagauucgcuuuugcccugucccggggguucggaagcggcaucauuaccucuaacgcucccauggacgaaugugaugccaagugccagacaccgcaaggcgcgaucaauuccagccuuccuuuucagaacgugcaccccgucaccaucggggaguguccuaaauaugugcgcucuaccaagcugagaaugguuacaggacuccggaauauucccagcauccagucccgcggccuguucggggccauugcuggauuuaucgaaggcggguggacgggaaugguggacggcugguacggcuaucaucaccagaacgagcaagggucuggauacgccgcugaucagaaaagcacccagaaugccauuaacggcaucacaaauaaggucaacuccgugaucgaaaagaugaauacccaguucacagccguugggaaagaguucaacaaacuggagaagagaauggaaaaucucaacaagaaaguggacgauggauuucuggacauuuggaccuacaacgcugagcuucugguccuccuggaaaaugagcggacgcuugacuuccacgauagcaacgugaagaaucuguaugaaaaagucaagucucaacucaaaaacaaugcgaaggagaucggcaacgggugcuuugaguucuaccauaaguguaaugacgaaugcauggaguccgugaaaaacggcacauaugauuaccccaaguauagcgaagagucuaaacugaaucgcgagaagauugacggaguuaaacuggaauccaugggcguguaccagauccucgccauuuauagcaccgucgcuuccucucuggugcuucugguuagccucggggccaucuccuuuuggaugugcucuaacggaagccugcaguguagaaucugcauuuga

SEQ ID NO: 193980 - RNA, 1698 nt, Artificial Sequence
  derived and/or modified CDS sequence (opt5) from hemagglutinin__InfluenzaA__ABV29612
augaaggugaaacugcucauccugcuuugcaccuucacagccacguacgcugacaccauuuguaucggcuaucacgccaacaauagcacagauaccgucgacacaguucuggagaagaacgugaccgugacacauuccgucaaucuccuggaagauucucacaacgggaaacuuugccugcucaagggaauugcgccccugcagcugggcaauuguagcguggcuggguggauccucggaaacccugagugcgaacugcuuauuuccaaagagucuuggagcuacaucguugaaaccccgaaucccgagaacggcacguguuauccuggguacuuugccgacuaugaggaacugagagagcaacucuccucugugagcuccuucgaacgguuugagaucuuccccaaggagagcucuuggccuaaucauaccgucacaggaguguccgccagcugcucucacaacggcaaguccagcuuuuaccgcaaucugcuuuggcugaccggcaaaaacgggcucuaucccaaucugucuaaguccuacgcuaacaauaaagaaaaggagguucuggugcucuggggaguccaucacccuccgaacauuggcgaucagagagcccuguaccacacagaaaacgcuuaugugagcguggucuccucucauuacagccggcgcuucacccccgagguugccaaaagaccuaaggugcgggaccaggaagggcgcaucaauuauuacuggacgcuucuggagcccggagauacaauuaucuuugaggcgaacggcaaucucauugccccuagauucgcuuuugcccugucccggggguucggaagcggcaucauuaccucuaacgcucccauggacgaaugugaugccaagugccagacaccgcaaggcgcgaucaauuccagccuuccuuuucagaacgugcaccccgucaccaucggggaguguccuaaauaugugcgcucuaccaagcugagaaugguuacaggacuccggaauauucccagcauccagucccgcggccuguucggggccauugcuggauuuaucgaaggcggguggacgggaaugguggacggcugguacggcuaucaucaccagaacgagcaagggucuggauacgccgcugaucagaaaagcacccagaaugccauuaacggcaucacaaauaaggucaacuccgugaucgaaaagaugaauacccaguucacagccguugggaaagaguucaacaaacuggagagacggauggaaaaucucaacaagaagguggacgauggauuucuggacauuuggaccuacaacgcugagcuucugguccuccuggaaaaugagcgcacgcuugacuuccacgauagcaacgugaaaaaucuguaugaaaaggucaaaucucaacucaagaacaaugcgaaagagaucggcaacgggugcuuugaguucuaccauaaguguaaugacgaaugcauggaguccgugaagaacggcacauaugauuaccccaaauauagcgaagagucuaagcugaauagagagaaaauugacggaguuaagcuggaauccaugggcguguaccagauccucgccauuuauagcaccgucgcuuccucucuggugcuucugguuagccucggggccaucuccuuuuggaugugcucuaacggaagccugcagugucggaucugcauuuga

SEQ ID NO: 193981 - RNA, 1698 nt, Artificial Sequence
  derived and/or modified CDS sequence (opt5) from hemagglutinin__InfluenzaA__ABV29634
augaaggugaaacugcucguccugcuuugcaccuucacagccacguacgcugacaccaucuguauuggcuaucacgccaacaauagcacagauaccguugacacagugcuggagaagaacgugaccgucacacauuccgugaaucuccuggaagauucucacaacgggaaacuuugccugcucaagggaaucgcgccccugcagcugggcaauuguagcguugcuggguggauucucggaaacccugagugcgaacugcuuaucuccaaagagucuuggagcuacauuguggaagccccgucccccgagaauggcaccuguuauccuggguacuuugccgacuaugaggaacugagagagcaacucucuagcgucuccagcuucgaacgguuugagaucuuccccaaggagucuuccuggccuaaccauacggugaccggaguuagcgcuucuugcucccacaauggcaagagcucuuuuuaccgcaaccugcuuuggcugacaggcaaaaaugggcucuaucccaaccuguccaagagcuacgccaauaacaaagaaaaggaggugcugguccucuggggagugcaucacccuccgaauaucggcgaucagagagcucuguaccacaccgaaaacgccuauguguccgucguuucuagccauuacucccggcgcuucacacccgagauugcgaaaagaccuaaggugcgggaccaggaagggcgcaucaacuauuacuggacccuucuggagcccggagauacgauuaucuuugaggccaauggcaaccucauugcuccuagauucgccuuugcucugagccggggguucggaucuggcaucauuacauccaaugcccccaugggcgaaugugacgcgaagugccagaccccgcaaggggccaucaacagcucucuuccuuuucagaaugugcaccccgucacaaucggagaguguccuaaauaugugcgcagcgcuaagcugagaaugguuaccggccuccggaacauucccuccauccagucucgcgggcuguucggagccauugcuggcuuuaucgaagggggauggaccggcaugguggauggcugguacggguaucaucaccagaaugagcaaggaagcggcuacgccgccgaccagaaauccacacagaacgcuauuaaugggaucacgaacaaggucaauagcgugaucgaaaagaugaacacccaguucacagcgguuggaaaagaguucaauaaacuggagagacggauggaaaaccucaauaagaagguggaugacggcuuucuggauauuuggaccuacaacgccgagcuucugguccuccuggaaaacgagcgcacacuugacuuccacgacucuaaugugaaaaaccuguaugaaaaggucaaaucccaacucaagaauaacgcuaaagagaucgggaauggcugcuuugaguucuaccauaaguguaacgaugaaugcauggagagcgugaagaauggaaccuaugacuaccccaaauauucugaagaguccaagcugaacagagagaaaauugauggcguuaagcuggaaagcauggggguguaccagauccucgccauuuauuccacggucgccucuagccuggugcuucugguuucccucggagcuaucucuuuuuggaugugcagcaauggcucccugcagugucggaucugcauuuga

SEQ ID NO: 193982 - RNA, 1698 nt, Artificial Sequence
  derived and/or modified CDS sequence (opt5) from hemagglutinin__InfluenzaA__ABV29645
augaaggugaaacugcucauccugcuuugcaccuucacagccacguacgcugacaccauuuguaucggcuaucacgccaacaauagcacagauaccgucgacacaguucuggagaagaacgugaccgugacacauuccgucaaucuccuggaagauucucacaacgggaaacuuugccugcucaagggaauugcgccccugcagcugggcaauuguagcguggcuggguggauccucggaaacccugagugcgaacugcuuauuuccaaagagucuuggagcuacaucguugaaaccccgaaucccgagaacggcacguguuauccuggguacuuugccgacuaugaggaacugagagagcaacucuccucugugagcuccuucgaacgguuugagaucuuccccaaggagagcucuuggccuaaucauaccgucacaggaguguccgccagcugcucucacaacggcaaguccagcuuuuaccgcaaucugcuuuggcugaccggcaaaaacgggcucuaucccaaucugucuaaguccuacgcuaacaauaaagaaaaggagguucuggugcucuggggaguccaucacccuccgaacauuggcgaucagagagcccuguaccacacagaaaacgcuuaugugagcguggucuccucucauuacagccggcgcuucacccccgagaucgccaaaagaccuaagguucgggaccaggaagggcgcauuaauuauuacuggacgcuucuggagcccggagauacaaucauuuuugaggcgaacggcaaucucaucgccccuagauucgcuuuugcccugucccggggguucggaagcggcauuaucaccucuaacgcucccauggacgaaugugaugccaagugccagacaccgcaaggcgcgaucaauuccagccuuccuuuucagaacgugcaccccgugaccauuggggaguguccuaaauauguccgcucuaccaagcugagaauggugacaggacuccggaauauccccagcauucagucccgcggccuguucggggccaucgcuggauuuauugaaggcggguggacgggaaugguugacggcugguacggcuaucaucaccagaacgagcaagggucuggauacgccgcugaucagaaaagcacccagaaugccaucaacggcaucacaaauaaggugaacuccgucauugaaaagaugaauacccaguucacagccguggggaaagaguucaacaaacuggagagacggauggaaaaucucaacaagaagguugacgauggauuucuggacaucuggaccuacaacgcugagcuucuggugcuccuggaaaaugagcgcacgcuugacuuccacgauagcaacgucaaaaaucuguaugaaaaggugaaaucucaacucaagaacaaugcgaaagagauuggcaacgggugcuuugaguucuaccauaaguguaaugacgaaugcauggaguccgucaagaacggcacauaugauuaccccaaauauagcgaagagucuaagcugaauagagagaaaaucgacggagugaagcuggaauccaugggcguuuaccagauucucgccaucuauagcaccguggcuuccucucugguccuucuggugagccucggggccaucuccuuuuggaugugcucuaacggaagccugcagugucggauuugcaucuga

SEQ ID NO: 193983 - RNA, 1698 nt, Artificial Sequence; identical to SEQ ID NO: 193982
  derived and/or modified CDS sequence (opt5) from hemagglutinin__InfluenzaA__ABV29667

SEQ ID NO: 193984 - RNA, 1698 nt, Artificial Sequence
  derived and/or modified CDS sequence (opt5) from hemagglutinin__InfluenzaA__ABV29678
augaaggugaaacugcucauccugcuuugcaccuucacagccacguacgcugacaccauuuguaucggcuaucacgccaacaauagcacagauaccgucgacacaguucuggagaagaacgugaccgugacacauuccgucaaucuccuggaagauucucacaacgggaaacuuugccugcucaagggaauugcgccccugcagcugggcaauuguagcguggcuggguggauccucggaaacccugagugcgaacugcuuauuuccaaagagucuuggagcuacaucguugaaaccccgaaucccgagaacggcacguguuauccuggguacuuugccgacuaugaggaacugagagagcaacucuccucugugagcuccuucgaacgguuugagaucuuccccaaggagagcucuuggccuaaucauaccgucacaggaguguccgccagcugcucucacaacggcaaguccagcuuuuaccgcaaucugcuuuggcugaccggcaaaaacgggcucuaucccaaucugucuaaguccuacgcuaacaauaaagaaaaggagguucuggugcucuggggaguccaucacccuccgaacauuggcgaucagagagcccuguaccacacagaaaacgcuuaugugagcguggucuccucucauuacagccggcgcuucacccccgagaucgccaaaagaccuaagguucgggaccaggaagggcgcauuaauuauuacuggacgcuucuggagcccggagauacaaucauuuuugaggcgaacggcaaucucaucgccccuagauucgcuuuugcccugucccggggguucggaagcggcauuaucaccucuaacgcucccguggacgaaugugaugccaagugccagacaccgcaaggcgcgaucaauuccagccuuccuuuucagaacgugcaccccgucaccauuggggaguguccuaaauaugugcgcucuaccaagcugagaaugguuacaggacuccggaauauccccagcauucagucccgcggccuguucggggccaucgcuggauuuauugaaggcggguggacgggaaugguggacggcugguacggcuaucaucaccagaacgagcaagggucuggauacgccgcugaucagaaaagcacccagaaugccaucaacggcaucacaaauaaggucaacuccgugauugaaaagaugaauacccaguucacagccguugggaaagaguucaacaaacuggagagacggauggaaaaucucaacaagaagguggacgauggauuucuggacaucuggaccuacaacgcugagcuucugguccuccuggaaaaugagcgcacgcuugacuuccacgauagcaacgugaaaaaucuguaugaaaaggucaaaucucaacucaagaacaaugcgaaagagauuggcaacgggugcuuugaguucuaccauaaguguaaugacgaaugcauggaguccgugaagaacggcacauaugauuaccccaaauauagcgaagagucuaagcugaauagagagaaaaucgacggaguuaagcuggaauccaugggcguguaccagauucucgccaucuauagcaccgucgcuuccucucuggugcuucugguuagccucggggccaucuccuuuuggaugugcucuaacggaagccugcagugucggauuugcaucuga

SEQ ID NO: 193985 - RNA, 1698 nt, Artificial Sequence
  derived and/or modified CDS sequence (opt5) from hemagglutinin__InfluenzaA__ABV29689
augaaggugaaacugcucguccugcuuugcaccuucacagccacguacgcugacaccaucuguauuggcuaucacgccaacaauagcacagauaccguugacacagugcuggagaagaacgugaccgucacacauuccgugaaucuccuggaagauucucacaacgggaaacuuugccugcucaagggaaucgcgccccugcagcugggcaauuguagcguugcuggguggauucucggaaacccugagugcgaacugcuuaucuccaaagagucuuggagcuacauuguggaaaccccgaaucccgagaacggcacguguuauccuggguacuuugccgacuaugaggaacugagagagcaacucuccucugucagcuccuucgaacgguuugagaucuuccccaaggagagcucuuggccuaaucauaccgugacaggaguuuccgccagcugcucucacaacggcaaguccagcuuuuaccgcaaucugcuuuggcugaccggcaaaaacgggcucuaucccaaucugucuaaguccuacgcuaacaauaaagaaaaggaggugcugguccucuggggagugcaucacccuccgaacaucggcgaucagagagcccuguaccacacagaaaacgcuuaugugagcgucguuuccucucauuacagccggcgcuucacccccgagauugccaaaagaccuaaggugcgggaccaggaagggcgcaucaauuauuacuggacgcuucuggagcccggagauacaauuaucuuugaggcgaacggcaaucucauugccccuagauucgcuuuugcccugucccggggguucggaagcggcaucauuaccucuaacgcucccauggacgaaugugaugccaagugccagacaccgcaaggcgcgaucaauuccagccuuccuuuucagaacgugcaccccgucaccaucggggaguguccuaaauaugugcgcucuaccaagcugagaaugguuacaggacuccggaauauucccagcauccagucccgcggccuguucggggccauugcuggauuuaucgaaggcggguggauuggaaugguggacggcugguacggcuaucaucaccagaacgagcaagggucuggauacgccgcugaucagaaaagcacgcagaaugccaucaacggcaucaccaauaaggucaacuccgugauugaaaagaugaauacacaguucaccgccguugggaaagaguucaacaaacuggagagacggauggaaaaucucaacaagaagguggacgauggauuucuggacaucuggacauacaacgcugagcuucugguccuccuggaaaaugagcgcacccuugacuuccacgauagcaacgugaaaaaucuguaugaaaaggucaaaucucaacucaagaacaaugcgaaagagauuggcaacgggugcuuugaguucuaccauaaguguaaugacgaaugcauggaguccgugaagaacggcacguaugauuaccccaaauauagcgaagagucuaagcugaauagagagaaaaucgacggaguuaagcuggaauccaugggcguguaccagauucucgccaucuauagcacagucgcuuccucucuggugcuucugguuagccucggggccaucuccuuuuggaugugcucuaacggaagccugcagugucggauuugcaucuga

SEQ ID NO: 193986 - RNA, 1698 nt, Artificial Sequence
  derived and/or modified CDS sequence (opt5) from hemagglutinin__InfluenzaA__ABV29700
augaaggugaaacugcucguccugcuuugcaccuucacagccacguacgcugacaccaucuguauuggcuaucacgccaacaauagcacagauaccguugacacagugcuggagaagaacgugaccgucacacauuccgugaaucuccuggaagauucucacaacgggaaacuuugccugcucaagggaaucgcgccccugcagcugggcaauuguagcguugcuggguggauucucggaaacccugagugcgaacugcuuaucuccaaagagucuuggagcuacauuguggaaaccccgaaucccgagaacggcacguguuauccuggguacuuugccgacuaugaggaacugagagagcaacucuccucugucagcuccuucgaacgguuugagaucuuccccaaggagagcucuuggccuaaucauaccgugacaggaguuuccgccagcugcucucacaacggcaaguccagcuuuuaccgcaaucugcuuuggcugaccggcaaaaacgggcucuaucccaaucugucuaaguccuacgcuaacaauaaagaaaaggaggugcugguccucuggggagugcaucacccuccgaacaucggcgaucagagagcccuguaccacacagaaaacgcuuaugugagcgucguuuccucucauuacagccggcgcuucacccccgagauugccaaaagaccuaaggugcgggaccaggaagggcgcaucaauuauuacuggacgcuucuggagcccggagauacaauuaucuuugaggcgaacggcaaucucauugccccuagauucgcuuuugcccugucccggggguucggaagcggcaucauuaccucuaacgcucccauggacgaaugugaugccaagugccagacaccgcaaggcgcgaucaauuccagccuuccuuuucagaacgugcaccccgucaccaucggggaguguccuaaauaugugcgcucuaccaagcugagaaugguuacaggacuccggaauauucccagcauccagucccgcggccuguucggggccauugcuggauuuaucgaaggcggguggacgggaaugguggacggcugguacggcuaucaucaccagaacgagcaagggucuggauacgccgcugaucagaaaagcacccagaaugccauuaacggcaucacaaauaaggucaacuccgugaucgaaaagaugaauacccaguucacagccguugggaaagaguucaacaaacuggagagacggauggaaaaucucaacaagaagguggacgauggauuucuggacauuuggaccuacaacgcugagcuucugguccuccuggaaaaugagcgcacgcuugacuuccacgauagcaacgugaaaaaucuguaugaaaaggucaaaucucaacucaagaacaaugcgaaagagaucggcaacgggugcuuugaguucuaccauaaguguaaugacgaaugcauggaguccgugaagaacggcacauaugauuaccccaaauauagcgaagagucuaagcugaauagagagaaaauugacggaguuaagcuggaauccaugggcguguaccagauccucgccauuuauagcaccgucgcuuccucucuggugcuucugguuagccucggggccaucuccuuuuggaugugcucuaacggaagccugcagugucggaucugcauuuga

SEQ ID NO: 193987 - RNA, 1701 nt, Artificial Sequence
  derived and/or modified CDS sequence (opt5) from hemagglutinin__InfluenzaA__ABV29711
augaagaccaucauugcccugagcuacauccucugccugguguucgcucagaaacuucccggcaacgacaauuccacagccacgcugugucucgggcaccaugcggucccuaacggaaccauuguuaagacaaucaccaaugaucaaauugaggugacaaacgcuaccgaacuggugcagucuagcuccacaggcgagaucugcgacucuccgcaccagauccuugauggggaaaauuguacccugauugacgcccuccugggagauccccagugcgacggcuuucaaaacaaaaagugggaucuguucgucgagagaagcaaagccuauuccaauuguuacccuuaugacgugcccgauuacgcuucucuccggagccugguugccuccagcgggacgcuugaauuuaacaaugagucuuucaacuggaccggagugacacagaauggcaccuccagcgcuugcauccgcagaucuaacaauuccuuuuucagccggcugaacuggcucacacaucugaaguuuaaguauccugcccuuaaugucaccaugcccaacaacgagaaauucgacaagcuguacauuuggggcgugcaccauccugggacggauaaugaccagaucuuucucuaugcgcaggccucuggacgcauuacaguuuccaccaaaagaagccaacagacagugaucccgaacauuggcucccggccccgcgucagaaauaucccuucucggaucagcauuuacuggaccaucgugaagcccggggauauucugcugaucaacuccaccggaaaucucauugcuccucgcggcuacuucaaaauccagagcgggaagucuuccaucaugagaagcgacgcccccauuggaaaguguaacucugaaugcaucacaccgaauggcagcauuccuaacgacaaacccuuucagaaugugaaccggaucacguauggcgcuuguccucgcuacgucaagcaaaauacccugaaacuugccacagggaugagaaacguucccgagaagcagacccggggaauuuucggcgcgaucgccggguuuaucgaaaauggaugggagggcaugguggaugggugguauggauuccgccaccagaacuccgagggcauuggccaagcugccgaccugaaaucuacacaggcugccaucgaucagauuaaugggaagcucaacagacugaucggaaaaaccaacgaaaaguuccaccagauugagaaggaauuuagcgagguggaaggccggauccaagaccuugagaaauacgucgaggauacgaagauugaccugugguccuauaaugccgaacuccugguggcucuggagaaccagcauacaaucgaucucaccgacagcgaaaugaauaaacuguucgagaagaccaaaaagcagcuuagagaaaacgcggaggauauggggaauggaugcuuuaagaucuaccacaaaugugacaacgccugcauuggcucuauccgcaaugggacauaugaucaugacguuuaccgggacgaggcucugaacaauagauuccagauuaagggcguggaacucaaauccggauacaaggauuggauccuguggauuagcuuugccaucucuugcuuccuucugugugucgcccuccugggcuuuaucaugugggcuugccaaaaagggaacauucgcuguaauaucugcauuuga

SEQ ID NO: 193988 - RNA, 1701 nt, Artificial Sequence
  derived and/or modified CDS sequence (opt5) from hemagglutinin__InfluenzaA__ABV29722
augaagaccaucauugcccugagcuacauccucugccugguguucgcucagaaacuucccggcaacgacaauuccacagccacgcugugucucgggcaccaugcggucccuaacggaaccauuguuaagacaaucaccaaugaucaaauugaggugacaaacgcuaccgaacuggugcagucuagcuccacaggcgagaucugcgacucuccgcaccagauccuugauggggaaaauuguacccugauugacgcccuccugggagauccccagugcgacggcuuucaaaacaaaaagugggaucuguucgucgagagaagcaaagccuauuccaauuguuacccuuaugacgugcccgauuacgcuucucuccggagccugguugccuccagcgggacgcuugaauuuaacaaugagucuuucaacuggaccggagugacacagaauggcaccuccagcgcuugcauccgcagaucuaacaauuccuuuuucagccggcugaacuggcucacacaucugaaguuuaaguauccugcccuuaaugucaccaugcccaacaacgagaaauucgacaagcuguacauuuggggcgugcaccauccugggacggauaaugaccagaucuuucucuaugcgcaggccucuggacgcauuacaguuuccaccaaaagaagccaacagacagugaucccgaacauuggcucccggccccgcgucagaaauaucccuucucggaucagcauuuacuggaccaucgugaagcccggggauauucugcugaucaacuccaccggaaaucucauugcuccucgcggcuacuucaaaaucagaagcgggaagucuuccaucaugcggagcgacgcccccauuggaaaguguaacucugaaugcaucacaccgaauggcagcauuccuaacgacaaacccuuucagaaugugaaccgcaucacguauggcgcuuguccuagauacgucaagcagaauacccugaaacuugccacagggaugcggaacguucccgagaagcaaacccgcggaauuuucggcgcgaucgccggguuuaucgaaaauggaugggagggcaugguggaugggugguauggauucagacaccagaacuccgagggcauuggccaggcugccgaccugaaaucuacacaagcugccaucgaucagauuaaugggaagcucaaccggcugaucggaaaaaccaacgaaaaguuccaccagauugagaaggaauuucuugagguggaaggcagaauccaggaccuggagaaauacgucgaggauacgaagauugaccucuggagcuauaaugccgaacugcugguggcucucgagaaccaacauacaaucgaucugaccgacuccgaaaugaauaaacuuuucgagaagaccaaaaagcagcugcgcgaaaacgcggaggauauggggaauggaugcuuuaagaucuaccacaaaugugacaacgccugcauuggcagcauccggaaugggacauaugaucaugacguuuacagagacgaggcucucaacaaucgcuuccagauuaagggcguggaacugaaaucuggauacaaggauuggauccuuuggauuuccuuugccaucagcugcuuccugcucugugucgcccugcugggcuuuaucaugugggcuugccagaaagggaacauucgguguaauaucugcauuuga

SEQ ID NO: 193989 - RNA, 1698 nt, Artificial Sequence
  derived and/or modified CDS sequence (opt5) from hemagglutinin__InfluenzaA__ABV29733
augaaggugaaacugcucguccugcuuugcaccuucacagccacguacgcugacaccaucuguauuggcuaucacgccaacaauagcacagauaccguugacacagugcuggagaagaacgugaccgucacacauuccgugaaucuccuggaagauucucacaacgggaaacuuugccugcucaagggaaucgcgccccugcagcugggcaauuguagcguugcuggguggauucucggaaacccugagugcgaacugcuuaucuccaaagagucuuggagcuacauuguggaaaccccgaaucccgagaacggcacguguuauccuggguacuuugccgacuaugaggaacugagagagcaacucuccucugucagcuccuucgaacgguuugagaucuuccccaaggagagcucuuggccuaaucauaccgugacaggaguuuccgccagcugcucucacaacggcgaauccagcuuuuaccgcaaucugcuuuggcugaccggcaagaacgggcucuaucccaaucugucuaaauccuacgcuaacaauaaggagaaagaagugcugguccucuggggagugcaucacccuccgaacaucggcgaucagagagcccuguaccacacagagaacgcuuaugugagcgucguuuccucucauuacagccggcgcuucacccccgaaauugccaagagaccuaaagugcgggaccaggaggggcgcaucaauuauuacuggacgcuucuggagcccggagauacaauuaucuuugaagcgaacggcaaucucauugccccuagauucgcuuuugcccugucccggggguucggaagcggcaucauuaccucuaacgcucccauggacaagugugaugccaagugccagacaccgcaaggcgcgaucaauuccagccuuccuuuucagaacgugcaccccgucaccaucggggaguguccuaaauaugugcgcucuaccaagcugagaaugguuacaggacuccggaauauucccagcauccagucccgcggccuguucggggccauugcuggauuuaucgaaggcggguggacgggaaugguggacggcugguacggcuaucaucaccagaacgagcaagggucuggauacgccgcugaucagaaaagcacccagaaugccauuaacggcaucacaaauaaggucaacuccgugaucgaaaagaugaauacccaguucacagccguugggaaagaguucaacaaacuggagagacggauggaaaaucucaacaagaagguggacgauggauuucuggacauuuggaccuacaacgcugagcuucugguccuccuggaaaaugagcgcacgcuugacuuccacgauagcaacgugaaaaaucuguaugaaaaggucaaaucucaacucaagaacaaugcgaaagagaucggcaacgggugcuuugaguucuaccauaagugugacgaugaaugcauggaguccgugaagaauggcacauaugacuaccccaaauauagcgaagagucuaagcugaacagagagaaaauugauggaguuaagcuggaauccaugggcguguaccagauccucgccauuuauagcaccgucgcuuccucucuggugcuucugguuagccucggggccaucuccuuuuggaugugcucuaauggaagccugcagugucggaucugcauuuga

SEQ ID NO: 193990 - RNA, 1698 nt, Artificial Sequence; identical to SEQ ID NO: 193982
  derived and/or modified CDS sequence (opt5) from hemagglutinin__InfluenzaA__ABV29744

SEQ ID NO: 193991 - RNA, 1698 nt, Artificial Sequence
  derived and/or modified CDS sequence (opt5) from hemagglutinin__InfluenzaA__ABV29755
augaaggugaaacugcucguccugcuuugcaccuucacagccacguacgcugacaccaucuguauuggcuaucacgccaacaauagcacagauaccguugacacagugcuggagaagaacgugaccgucacacauuccgugaaucuccuggaagauucucacaacgggaaacuuugccugcucaagggaaucgcgccccugcagcugggcaauuguagcguugcuggguggauucucggaaacccugagugcgaacugcuuaucuccaaagagucuuggagcuacauuguggaaaccccgucccccgagaauggcacguguuauccuggguacuuugccgacuaugaggaacugagagagcaacucucuagcgucuccagcuucgaacgguuugagaucuuccccaaggagucuuccuggccuaaccauaccgugacaggaguuagcgccucuugcucccacaauggcaagagcucuuuuuaccgcaaccugcuuuggcugaccggcaaaaaugggcucuaucccaaccuguccaagagcuacgcuaauaacaaagaaaaggaggugcugguccucuggggagugcaucacccuccgaauaucggcgaucagagagcccuguaccacacagaaaacgcuuauguguccgucguuucuagccauuacucccggcgcuucacccccgagauugccaaaagaccuaaggugcgggaccaggaagggcgcaucaacuauuacuggacgcuucuggagcccggagauacaauuaucuuugaggcgaauggcaaccucauugccccuagauucgcuuuugcccugagccggggguucggaucuggcaucauuaccuccaaugcucccaugggcaagugugacgccaaaugccagacaccgcaaggggcgaucaacagcucucuuccuuuucagaaugugcaccccgucaccaucggagaauguccuaaguaugugcgcagcgccaaacugagaaugguuaccggccuccggaacauucccuccauccagucucgcgggcuguucggagcuauugccggcuuuaucgaagggggauggacaggcaugguggauggcugguacggguaucaucaccagaaugaacaaggaagcggcuacgcugccgaccagaaguccacgcagaacgccauuaaugggaucaccaacaaagucaauagcgugaucgagaagaugaacacacaguucaccgcuguuggaaaagaguucaauaagcuggagagacggauggagaaccucaauaagaaaguggaugacggcuuucuggauauuuggacauacaacgcggaacuucugguccuccuggagaacgaacgcacccuugacuuccacgacucuaaugugaagaaccuguaugagaaagucaagucccaacucaaaaauaacgccaaggaaaucgggaauggcugcuuugaguucuaccauaaguguaacgaugagugcauggaaagcgugaaaaauggaacguaugacuaccccaaguauucugaggaauccaaacugaacagagagaagauugauggcguuaaacuggagagcauggggguguaccagauccucgcuauuuauuccacagucgccucuagccuggugcuucugguuucccucggagccaucucuuuuuggaugugcagcaauggcucccugcagugucggaucugcauuuga

SEQ ID NO: 193992 - RNA, 1698 nt, Artificial Sequence; identical to SEQ ID NO: 193982
  derived and/or modified CDS sequence (opt5) from hemagglutinin__InfluenzaA__ABV29766

SEQ ID NO: 193993 - RNA, 1698 nt, Artificial Sequence
  derived and/or modified CDS sequence (opt5) from hemagglutinin__InfluenzaA__ABV29777
augaaggugaaacugcucguccugcuuugcaccuucacagccacguacgcugacaccaucuguauuggcuaucacgccaacaauagcacagauaccguugacacagugcuggagaagaacgugaccgucacacauuccgugaaucuccuggaagauucucacaacgggaaacuuugccugcucaagggaaucgcgccccugcagcugggcaauuguagcguugcuggguggauucucggaaacccugagugcgaacugcuuaucuccaaagagucuuggagcuacauuguggaaaccccgaaucccgagaacggcacguguuauccuggguacuuugccgacuaugaggaacugagagagcaacucuccucugucagcuccuucgaacgguuugagaucuuccccaaggagagcucuuggccuaaucauaccgugacaggaguuuccgccagcugcucucacaacggcgaauccagcuuuuaccgcaaucugcuuuggcugaccggcaagaacgggcucuaucccaaucugucuaaauccuacgcuaacaauaaggagaaagaagugcugguccucuggggagugcaucacccuccgaacaucggcgaucagagagcccuguaccacacagagaacgcuuaugugagcgucguuuccucucauuacagccggcgcuucacccccgaaauugccaagagaccuaaagugcgggaccaggaggggcgcaucaauuauuacuggacgcuucuggagcccggagauacaauuaucuuugaagcgaacggcaaucucauugccccuagauucgcuuuugcccugucccggggguucggaagcggcaucauuaccucuaacgcucccauggacaagugugaugccaagugccagacaccgcaaggcgcgaucaauuccagccuuccuuuucagaacgugcaccccgucaccaucggggaguguccuaaauaugugcgcucuaccaagcugagaaugguuacaggacuccggaauauucccagcauccagucccgcggccuguucggggccauugcuggauuuaucgaaggcggguggacgggaaugguggacggcugguacggcuaucaucaccagaacgagcaagggucuggauacgccgcugaucagaaaagcacccagaaugccauuaacggcaucacaaauaaggucaacuccgugaucgaaaagaugaauacccaguucacagccguugggaaagaguucaacaaacuggagagacggauggaaaaucucaacaagaagguggacgauggauuucuggacauuuggaccuacaacgcugagcuucugguccuccuggaaaaugagcgcacgcuugacuuccacgauagcaacgugaaaaaucuguaugaaaaggucaaaucucaacucaagaacaaugcgaaagagaucggcaacgggugcuuugaguucuaccauaaguguaaugacgaaugcauggaguccgugaagaacggcacauaugauuaccccaaauauagcgaagagucuaagcugaauagagagaaaauugacggaguuaagcuggaauccaugggcguguaccagauccucgccauuuauagcaccgucgcuuccucucuggugcuucugguuagccucggggccaucuccuuuuggaugugcucuaacggaagccugcagugucggaucugcauuuga

SEQ ID NO: 193994 - RNA, 1698 nt, Artificial Sequence; identical to SEQ ID NO: 193982
  derived and/or modified CDS sequence (opt5) from hemagglutinin__InfluenzaA__ABV29788

SEQ ID NO: 193995 - RNA, 1698 nt, Artificial Sequence; identical to SEQ ID NO: 193986
  derived and/or modified CDS sequence (opt5) from hemagglutinin__InfluenzaA__ABV29799

SEQ ID NO: 193996 - RNA, 1701 nt, Artificial Sequence
  derived and/or modified CDS sequence (opt5) from hemagglutinin__InfluenzaA__ABV29821
augaagaccaucauugcccugagcuacauccucugccugguguucgcucagaaacuucccggcaacgacaauuccacagccacgcugugucucgggcaccaugcggucccuaacggaaccauuguuaagacaaucaccaaugaucaaauugaggugacaaacgcuaccgaacuggugcagucuagcuccacaggcgagaucugcgacucuccgcaccagauccuugauggggaaaauuguacccugauugacgcccuccugggagauccccagugcgacggcuuucaaaacaaaaagugggaucuguucgucgagagaagcaaagccuauuccaauuguuacccuuaugacgugcccgauuacgcuucucuccggagccugguugccuccagcgggacgcuugaauuuaacaaugagucuuucaacuggaccggagugacacagaauggcaccuccagcgcuugcauccgcagaucuaacaauuccuuuuucagccggcugaacuggcucacacaucugaaguuuaaguauccugcccuuaaugucaccaugcccaacaacgagaaauucgacaagcuguacauuuggggcgugcaccauccugggacggauaaugaccagguuuuucucuaugcgcaggccucuggacgcaucacaguguccaccaaaagaagccaacagacagucauuccgaacaucggcucccggccccgcgugagaaauauuccuucucggaucagcaucuacuggaccauugugaagcccggggauauccugcugauuaacuccaccggaaaucucaucgcuccucgcggcuacuucaaaauuagaagcgggaagucuuccaucaugcggagcgacgcccccaucggaaaguguaacucugaaugcauuacaccgaauggcagcaucccuaacgacaaacccuuucagaaugucaaccgcauuacguauggcgcuuguccuagauacguuaagcagaauacccugaaacuugccacagggaugcggaacgugcccgagaagcaaacccgcggaaucuucggcgcgauugccggguuuaucgaaaauggaugggagggcaugguggaugggugguauggauucagacaccagaacuccgagggcaucggccaggcugccgaccugaaaucuacacaagcugccauugaucagaucaaugggaagcucaaccggcugauuggaaaaaccaacgaaaaguuccaccagaucgagaaggaauuuagcgaggucgaaggccgcauucaggaccuugagaaauacguggaggauacgaagaucgaccugugguccuauaaugccgaacuccugguugcucuggagaaccaacauacaauugaucucaccgacagcgaaaugaauaaacuguucgagaagaccaaaaagcagcuuagagaaaacgcggaggauauggggaauggaugcuuuaagaucuaccacaaaugugacaacgccugcaucggcucuauucggaaugggacauaugaucaugacguguacagagacgaggcucugaacaaucgcuuccagaucaagggcgucgaacucaaauccggauacaaggauuggauucuguggaucagcuuugccauuucuugcuuccuucuguguguggcccuccugggcuuuaucaugugggcuugccagaaagggaacaucaaguguaauauuugcaucuga

SEQ ID NO: 193997 - RNA, 1698 nt, Artificial Sequence; identical to SEQ ID NO: 193986
  derived and/or modified CDS sequence (opt5) from hemagglutinin__InfluenzaA__ABV29832

SEQ ID NO: 193998 - RNA, 1698 nt, Artificial Sequence; identical to SEQ ID NO: 193982
  derived and/or modified CDS sequence (opt5) from hemagglutinin__InfluenzaA__ABV29865

SEQ ID NO: 193999 - RNA, 1698 nt, Artificial Sequence; identical to SEQ ID NO: 193982
  derived and/or modified CDS sequence (opt5) from hemagglutinin__InfluenzaA__ABV29876

SEQ ID NO: 194000 - RNA, 1701 nt, Artificial Sequence
  derived and/or modified CDS sequence (opt5) from hemagglutinin__InfluenzaA__ABV29898
augaagaccaucauugcccugagcuacauccucugccugguguucgcucagaaacuucccggcaacgacaauuccacagccacgcugugucucgggcaccaugcggucccuaacggaaccauuguuaagacaaucaccaaugaucaaauugaggugacaaacgcuaccgaacuggugcagucuagcuccacaggcgagaucugcgacucuccgcaccagauccuugauggggaaaauuguacccugauugacgcccuccugggagauccccagugcgacggcuuucaaaacaaaaagugggaucuguucgucgagagaagcaaagccuauuccaauuguuacccuuaugacgugcccgauuacgcuucucuccggagccugguugccuccagcgggacgcuugaauuuaacaaugagucuuucaacuggaccggagugacacagaauggcaccuccagcgcuugcauccgcagaucuaacaauuccuuuuucagccggcugaacuggcucacacaucugaaguuuaaguauccugcccuuaaugucaccaugcccaacaacgagaaauucgacaagcuguacauuuggggcgugcaccauccugggacggauaaugaccagaucuuucucuaugcgcaggccucuggacgcauuacaguuuccaccaaaagaagccaacagacagugaucccgaacauuggcucccggccccgcgucagaaauaucccuucucggaucagcauuuacuggaccaucgugaagcccggggauauucugcugaucaacuccaccggaaaucucauugcuccucgcggcuacuucaaaaucagaagcgggaagucuuccaucaugcggagcgacgcccccauuggaaaguguaacucugaaugcaucacaccgaauggcagcauuccuaacgacaaacccuuucagaaugugaaccgcaucacguauggcgcuuguccuagauacgucaagcagaauacccugaaacuugccacagggaugcggaacguucccgagaagcaaacccgcggaauuuucggcgcgaucgccggguuuaucgaaaauggaugggagggcaugguggaugggugguauggauucagacaccagaacuccgagggcauuggccaggcugccgaccugaaaucuacacaagcugccaucgaucagauuaaugggaagcucaaccggcugaucggaaaaaccaacgaaaaguuccaccagauugagaaggaauuuagcgagguggaaggcagaauccaggaccuugagaaauacgucgaggauacgaagauugaccugugguccuauaaugccgaacuccugguggcucuggagaaccaacauacaaucgaucucaccgacagcgaaaugaauaaacuguucgagaagaccaaaaagcagcuucgcgaaaacgcggaggauauggggaauggaugcuuuaagaucuaccacaaaugugacaacgccugcauuggcucuauccggaaugggacauaugaucaugacguuuacagagacgaggcucugaacaaucgcuuccagauuaagggcguggaacucaaauccggauacaaggauuggauccuguggauuagcuuugccaucucuugcuuccuucugugugucgcccuccugggcuuuaucaugugggcuugccagaaagggaacauucgguguaauaucugcauuuga

SEQ ID NO: 194001 - RNA, 1701 nt, Artificial Sequence
  derived and/or modified CDS sequence (opt5) from hemagglutinin__InfluenzaA__ABV29909
augaagaccaucauugcccugagcuacauccucugccugguguucgcucagaaacuucccggcaacgacaauuccacagccacgcugugucucgggcaccaugcggucccuaacggaaccauuguuaagacaaucaccucugaucaaauugaggugacaaaugcuaccgaacuggugcagaacagcuccaucggcgggaucugcaauucuccgcaccagauucuugacggagagaacuguacacugaucgaugcccuccugggcgacccccagugcgauggguuucaaaauaaaaagugggaccuguucgucgaaagaagcaaagccuauuccaacuguuacccuuaugaugugcccgacuacgcuucucuccggagccugauugccuccagcggaacccuugaguuuaauaacgaaucuuucaauuggacgggcguuacccagaacggcacauccagcgcuugcaagcgcagaucuaauaacuccuuuuucagccggcugaauuggcucacccaucugaaguuuaaauauccugcccuuaacgugacaaugcccaacaaugaggaguucgauaagcuguacaucuggggaguccaccauccugggaccgacaacgaucagauuucucucuaugcgcaggccccgggccgcaucacgguguccacaaaaagaagccaacagaccguuauucccaauaucgggucccggccucgcgugagagacauccccucucggauuagcaucuacuggacaauugucaagccuggagauauccugcugauuaacuccaccggcaaucucaucgcuccccgcggguacuuuaaaaucagaagcggaaagucuuccauuaugcggagcgacgccccgaucgacaaguguaacucugaaugcauuaccccuaauggcagcauccccaacgauaaaccuuuccagaaugugaaccgcauuacauauggcgcuugucccagauacgugaagcagaauacgcugaaacuugccaccgggaugcggaacguccccgagaagcaaacacgcggaaucuuuggcgcgaucgccggguucauugaaaauggaugggagggcaugguugacgggugguauggauuuagacaccagaacuccgagggcaucggccaggcugccgaucugaaaucuacccaagcugccauugaccagaucaaugggaagcucaaccggcugauuggaaaaacaaacgaaaaguuccaccagaucgagaaggaguucagcgaaguggaaggccgcauucaggaucuugagaaauacguggaggacaccaagaucgaucugugguccuauaaugccgaacuccuggucgcucuggagaaccaacauacgaucgaccucacagauagcgaaaugaauaaacuguuugagagaaccaagaaacagcuucgggaaaacgcggaggacauggggaauggaugcuucaagauuuaccacaagugugauaacgccugcaucggcucuauuagaaaugggaccuaugaccaugacguguaccgcgaugaggcucugaacaaucgguuucagaucaaaggcguugaacucaaguccggauacaaagacuggauucuguggaucagcuucgccaucucuugcuuucuucuguguguggcccuccugggcuucauuaugugggcuugccagaaggggaacaucagauguaauauuugcaucuga

SEQ ID NO: 194002 - RNA, 1698 nt, Artificial Sequence
  derived and/or modified CDS sequence (opt5) from hemagglutinin__InfluenzaA__ABV29920
augaaggugaaacugcucguccugcuuugcaccuucacagccacguacgcugacaccaucuguauuggcuaucacgccaacaauagcacagauaccguugacacagugcuggagaagaacgugaccgucacacauuccgugaaucuccuggaagauucucacaacgggaaacuuugccugcucaagggaaucgcgccccugcagcugggcaauuguagcguugcuggguggauucucggaaacccugagugcgaacugcuuaucuccaaagagucuuggagcuacauuguggaaaccccgaaucccgagaacggcacguguuauccuggguacuuugccgacuaugaggaacugagagagcaacucuccucugucagcuccuucgaacgguuugagaucuuccccaaggagagcucuuggccuaaucauaccgugacaggaguuuccgccagcugcucucacaacggcaaguccagcuuuuaccgcaaucugcuuuggcugaccggcaaaaacgggcucuaucccaaucugucuaaguccuacgcuaacaauaaagaaaaggaggugcugguccucuggggagugcaucacccuccgaacaucggcgaucagagagcccuguaccacacagaaaacgcuuaugugagcgucguuuccucucauuacagccggcgcuucacccccgagauugccaaaagaccuaaggugcgggaccaggaagggcgcaucaauuauuacuggacgcuucuggagcccggagauacaauuaucuuugaggcgaacggcaaucucauugccccuagauucgcuuuugcccugucccggggguucggaagcggcaucauuaccucuaacgcucccaugggcgaaugugacgccaagugccagacaccgcaaggggcgaucaauuccagccuuccuuuucagaacgugcaccccgucaccaucggagaguguccuaaauaugugcgcucugccaagcugagaaugguuaccggccuccggaauauucccagcauccagucccgcgggcuguucggagcuauugccggcuuuaucgaagggggauggacaggcaugguggauggcugguacggguaucaucaccagaacgagcaaggaucuggcuacgcugccgaccagaaaagcacgcagaaugccauuaacgggaucaccaauaaggucaacuccgugaucgaaaagaugaauacacaguucaccgcuguuggaaaagaguucaacaaacuggagagacggauggaaaaucucaacaagaagguggaugacggcuuucuggauauuuggacauacaacgcggagcuucugguccuccuggaaaaugagcgcacccuugacuuccacgacagcaacgugaaaaaucuguaugaaaaggucaaaucucaacucaagaacaaugccaaagagaucgggaacggcugcuuugaguucuaccauaaguguaaugaugaaugcauggaguccgugaagaacggaacguaugacuaccccaaauauagcgaagagucuaagcugaauagagagaaaauugauggcguuaagcuggaauccauggggguguaccagauccucgcuauuuauagcacagucgccuccucucuggugcuucugguuagccucggagccaucuccuuuuggaugugcucuaacggcagccugcagugucggaucugcauuuga

SEQ ID NO: 194003 - RNA, 1698 nt, Artificial Sequence; identical to SEQ ID NO: 193993
  derived and/or modified CDS sequence (opt5) from hemagglutinin__InfluenzaA__ABV29942

SEQ ID NO: 194004 - RNA, 1698 nt, Artificial Sequence; identical to SEQ ID NO: 193986
  derived and/or modified CDS sequence (opt5) from hemagglutinin__InfluenzaA__ABV29953

SEQ ID NO: 194005 - RNA, 1698 nt, Artificial Sequence; identical to SEQ ID NO: 193986
  derived and/or modified CDS sequence (opt5) from hemagglutinin__InfluenzaA__ABV29964

SEQ ID NO: 194006 - RNA, 1698 nt, Artificial Sequence; identical to SEQ ID NO: 193982
  derived and/or modified CDS sequence (opt5) from hemagglutinin__InfluenzaA__ABV29986

SEQ ID NO: 194007 - RNA, 1698 nt, Artificial Sequence; identical to SEQ ID NO: 193986
  derived and/or modified CDS sequence (opt5) from hemagglutinin__InfluenzaA__ABV29997

SEQ ID NO: 194008 - RNA, 1698 nt, Artificial Sequence; identical to SEQ ID NO: 193982
  derived and/or modified CDS sequence (opt5) from hemagglutinin__InfluenzaA__ABV30008

SEQ ID NO: 194009 - RNA, 1698 nt, Artificial Sequence; identical to SEQ ID NO: 193986
  derived and/or modified CDS sequence (opt5) from hemagglutinin__InfluenzaA__ABV30019

SEQ ID NO: 194010 - RNA, 1698 nt, Artificial Sequence; identical to SEQ ID NO: 193986
  derived and/or modified CDS sequence (opt5) from hemagglutinin__InfluenzaA__ABV30030

SEQ ID NO: 194011 - RNA, 1698 nt, Artificial Sequence
  derived and/or modified CDS sequence (opt5) from hemagglutinin__InfluenzaA__ABV30041
augaaggugaaacugcucguccugcuuugcaccuucacagccacguacgcugacaccaucuguauuggcuaucacgccaacaauagcacagauaccguugacacagugcuggagaagaacgugaccgucacacauuccgugaaucuccuggaagauucucacaacgggaaacuuugccugcucaagggaaccgcgccccugcagcugggcaauuguagcguugcuggguggauccucggaaacccugagugcgaacugcuuauuuccaaagagucuuggagcuacaucguggaaacgccgaaucccgagaacggcaccuguuauccuggguacuuugccgacuaugaggaacugagagagcaacucuccucugucagcuccuucgaacgguuugagauuuuccccaaggagagcucuuggccuaaucauacagugaccggaguuuccgccagcugcucucacaacggcaaguccagcuuuuaccgcaaucugcuuuggcugacaggcaaaaacgggcucuaucccaaucugucuaaguccuacgcuaacaauaaagaaaaggaggugcugguccucuggggagugcaucacccuccgaacaucggcgaucagagagcccuguaccacaccgaaaacgcuuaugugagcgucguuuccucucauuacagccggcgcuucacgcccgagaucgccaaaagaccuaaggugcgggaccaggaagggcgcauuaauuauuacuggacacuucuggagcccggagauaccaucauuuuugaggcgaacggcaaucucaucgccccuagauucgcuuuugcccugucccggggguucggaagcggcauuaucacaucuaacgcucccaugggcgaaugugacgccaagugccagaccccgcaaggggcgauuaauuccagccuuccuuuucagaacgugcaccccgucaccaucggagaguguccuaaauaugugcgcucugccaagcugagaaugguuacaggccuccggaauauccccagcauucagucccgcgggcuguucggagcuaucgccggcuuuauugaagggggauggacgggcaugguggauggcugguacggguaucaucaccagaacgagcaaggaucuggcuacgcugccgaccagaaaagcacccagaaugccaucaacgggauuacaaauaaggucaacuccgugaucgaaaagaugaauacccaguucacagcuguuggaaaagaguucaacaaacuggagagacggauggaaaaucucaacaagaagguggaugacggcuuucuggauaucuggaccuacaacgcggagcuucugguccuccuggaaaaugagcgcacgcuugacuuccacgacagcaacgugaaaaaucuguaugaaaaggucaaaaaccaacucaagaauaacgccaaagagauugggaauggcugcuuugaguucuaccauaaguguaacgaugaaugcauggagucugugaagaauggaacauaugacuaccccaaauauuccgaagagagcaagcugaacagagagaaaaucgauggcguuaagcuggaaucuauggggguguaccagauucucgcuaucuauuccaccgucgccagcucccuggugcuucugauuucucucggagccaucagcuuuuggaugugcuccaauggcucucugcagugucggaucugcauuuga

SEQ ID NO: 194012 - RNA, 1701 nt, Artificial Sequence; identical to SEQ ID NO: 194000
  derived and/or modified CDS sequence (opt5) from hemagglutinin__InfluenzaA__ABV30063

SEQ ID NO: 194013 - RNA, 1701 nt, Artificial Sequence; identical to SEQ ID NO: 194000
  derived and/or modified CDS sequence (opt5) from hemagglutinin__InfluenzaA__ABV30074

SEQ ID NO: 194014 - RNA, 1698 nt, Artificial Sequence; identical to SEQ ID NO: 193986
  derived and/or modified CDS sequence (opt5) from hemagglutinin__InfluenzaA__ABV30085

SEQ ID NO: 194015 - RNA, 1698 nt, Artificial Sequence; identical to SEQ ID NO: 193986
  derived and/or modified CDS sequence (opt5) from hemagglutinin__InfluenzaA__ABV30096

SEQ ID NO: 194016 - RNA, 1698 nt, Artificial Sequence; identical to SEQ ID NO: 193982
  derived and/or modified CDS sequence (opt5) from hemagglutinin__InfluenzaA__ABV30107

SEQ ID NO: 194017 - RNA, 1698 nt, Artificial Sequence
  derived and/or modified CDS sequence (opt5) from hemagglutinin__InfluenzaA__ABV30129
augaaggugaaacugcucguccugcuuugcaccuucacagccacguacgcugacaccaucuguauuggcuaucacgccaacaauagcacagauaccguugacacagugcuggagaagaacgugaccgucacacauuccgugaaucuccuggaagauucucacaacgggaaacuuugccugcucaagggaaucgcgccccugcagcugggcaauuguagcguugcuggguggauucucggaaacccugagugcgaacugcuuaucuccaaagagucuuggagcuacauuguggaaaccccgaaucccgagaacggcacguguuauccugggaauuuugccgacuacgaggaacugagagagcaacucuccucugucagcuccuucgaacgguuugagaucuuccccaaggagagcucuuggccuaaccauaccgugacaggaguuuccgccagcugcucucacaauggcaaguccagcuuuuaucgcaaccugcuuuggcugaccggcaaaaaugggcucuaccccaaccugucuaaguccuaugcuaauaacaaagaaaaggaggugcugguccucuggggagugcaucacccuccgaacaucggcgaucagagagcccuguaccacacagaaaaugcuuacgugagcgucguuuccucucauuauagccggcgcuucacccccgagauugccaaaagaccuaaggugcgggaccaggaagggcgcaucaacuacuauuggacgcuucuggagcccggagauacaauuaucuuugaggcgaauggcaaccucauugccccuagauucgcuuuugcccugucccggggguucggaagcggcaucauuaccucuaaugcucccauggacgaaugugaugccaagugccagacaccgcaaggcgcgaucaacuccagccuuccuuuucagaaugugcaccccgucaccaucggggaguguccuaaauacgugcgcucugccaagcugagaaugguuaccggacuccggaacauucccagcauccagucccgcggccuguucggggcuauugccggauuuaucgaaggcggguggacaggaaugguggacggcugguauggcuaccaucaccagaaugagcaagggucuggauaugcugccgaucagaaaagcacgcagaacgccauuaauggcaucaccaacaaggucaauuccgugaucgaaaagaugaacacacaguucaccgcuguugggaaagaguucaauaaacuggagagacggauggaaaaccucaacaagaagguggacgauggauuucuggacauuuggacauacaaugcggagcuucugguccuccuggaaaacgagcgcacccuugacuuccacgauagcaaugugaaaaaccuguacgaaaaggucaaaucucaacucaagaauaacgccaaagagaucggcaaugggugcuuugaguucuaucauaaguguaacgacgaaugcauggaguccgugaagaauggcacguacgauuaucccaaauacagcgaagagucuaagcugaacagagagaaaauugacggaguuaagcuggaauccaugggcguguaucagauccucgcuauuuacagcacagucgccuccucucuggugcuucugguuagccucggggccaucuccuuuuggaugugcucuaauggaagccugcagugucggaucugcauuuga

SEQ ID NO: 194018 - RNA, 1698 nt, Artificial Sequence
  derived and/or modified CDS sequence (opt5) from hemagglutinin__InfluenzaA__ABV30140
augaaggugaaacugcucguccugcuuugcaccuucacagccacguacgcugacaccaucuguauuggcuaucacgccaacaauagcacagauaccguugacacagugcuggagaagaacgugaccgucacacauuccgugaaucuccuggaagauagacacaacgggaaacuuugccugcucaagggaaucgcgccccugaaacugggcaauuguucuguugcuggguggauucucggaaacccugagugcgaacugcuuaucagcaaggaguccuggucuuacauuguggaaaccccgaaucccgagaacggcacguguuauccuggguacuuugccgacuaugaggaacugcgggagcagcucagcuccgucucuagcuucgaacgcuuugagaucuuccccaaggaguccagcuggccuaaucauaccgugacaggaguuucugccuccugcagccacaacggcaaaucuuccuuuuacagaaaucugcuuuggcugaccggcaagaacgggcucuaucccaaucugagccggucuuacgcuaacaauaaagaaaaggaggugcugguccucuggggagugcaucacccuccgaacaucggcgaucaacgcgcccuguaccacacagaaaacgcuuauguguccgucguuagcucccauuacucuagacgguucacccccgagauugccaaacgcccuaaggugagagaccaggaagggcggaucaauuauuacuggacgcuucuggagcccggagauacaauuaucuuugaggcgaacggcaaucucauugccccucgcuucgcuuuugcccugagcagaggguucggauccggcaucauuaccagcaacgcucccauggacgaaugugaugccaagugccagacaccgcagggcgcgaucaauucuucccuuccuuuucaaaacgugcaccccgucaccaucggggaguguccuaaauaugugcggagcgccaagcugcgcaugguuaccggacucagaaauauucccucuauccagagccggggccuguucggggcuauugccggauuuaucgaaggcggguggacaggaaugguggacggcugguacggcuaucaucaccagaacgagcagggguccggauacgcugccgaucaaaaaucuacgcagaaugccauuaacggcaucaccaauaaggucaacagcgugaucgaaaagaugaauacacaguucaccgcuguugggaaagaguucaacaaacuggagcgcagaauggaaaaucucaacaagaagguggacgauggauuucuggacauuuggacauacaacgcggagcuucugguccuccuggaaaaugagcggacccuugacuuccacgauuccaacgugaaaaaucuguaugaaaaggucaaaagccagcucaagaacaaugccaaagagaucggcaacgggugcuuugaguucuaccauaaguguaaugacgaaugcauggagucugugaagaacggcacguaugauuaccccaaauauuccgaagagagcaagcugaauagagagaaaauugacggaguuaagcuggaaucuaugggcguguaccaaauccucgcuauuuauuccacagucgccagcucccuggugcuucugguuucucucggggccaucagcuuuuggaugugcuccaacggaucucugcagugucgcaucugcauuuga

SEQ ID NO: 194019 - RNA, 1698 nt, Artificial Sequence
  derived and/or modified CDS sequence (opt5) from hemagglutinin__InfluenzaA__ABV30151
augaaggugaaacugcucguccugcuuugcaccuucacagccacguacgcugacaccaucuguauuggcuaucacgccaacaauagcacagauaccguugacacagugcuggagaagaacgugaccgucacacauuccgugaaucuccuggaagauucucacaacgggaaacuuugccugcucaagggaaucgcgccccugcagcugggcaauuguagcguugcuggguggauucucggaaacccugagugcgaacugcuuaucuccaaagagucuuggagcuacauuguggaaaccccgaaucccgagaacggcacguguuauccuggguacuuugccgacuaugaggaacugagagagcaacucuccucugucagcuccuucgaacgguuugagaucuuccccaaggagagcucuuggccuaaucauaccgugacaggaguuuccgccagcugcucucacuccggcaagagcucuuuuuaccgcaaccugcuuuggcugaccggcaaaaaugggcucuaucccaaccuguccaagagcuacgcuaauaacaaagaaaaggaggugcugguccucuggggagugcaucacccuccgaauaucggcgaucagagagcccuguaccacacagaaaacgcuuauguguccgucguuucuagccauuacucccggcgcuucacccccgagauugccaaaagaccuaaggugcgggaccaggaagggcgcaucaacuauuacuggacgcuucuggagcccggagauacaauuaucuuugaggcgaauggcaaccucauugccccuagauucgcuuuugcccugagccggggguucggaucuggcaucauuaccuccaaugcucccaugggcgaaugugacgccaagugccagacaccgcaaggggcgaucaacagcucucuuccuuuucagaaugugcaccccgucaccaucggagaguguccuaaauaugugcgcagcgccaagcugagaaugguuaccggccuccggaacauucccuccauccagucucgcgggcuguucggagcuauugccggcuuuaucgaagggggauggacaggcaugguggauggcugguacggguaucaucaccagaaugagcaaggaagcggcuacgcugccgaccagaaauccacgcagaacgccauuaaugggaucaccaacaaggucaauagcgugaucgaaaagaugaacacacaguucaccgcuguuggaaaagaguucaauaaacuggagagacggauggaaaaccucaauaagaagguggaugacggcuuucuggauauuuggacauacaacgcggagcuucugguccuccuggaaaacgagcgcacccuugacuuccacgacucuaaugugaaaaaccuguaugaaaaggucaaaucccaacucaagaauaacgccaaagagaucgggaauggcugcuuugaguucuaccauaaguguaacgaugaaugcauggagagcgugaagaauggaacguaugacuaccccaaauauucugaagaguccaagcugaacagagagaaaauugauggcguuaagcuggaaagcauggggguguaccagauccucgcuauuuauuccacagucgccucuagccuggugcuucugguuucccucggagccaucucuuuuuggaugugcagcaauggcucccugcagugucggaucugcauuuga

SEQ ID NO: 194020 - RNA, 1698 nt, Artificial Sequence
  derived and/or modified CDS sequence (opt5) from hemagglutinin__InfluenzaA__ABV30162
augaaggugaaacugcucguccugcuuugcaccuucacagccacguacgcugacaccaucuguauuggcuaucacgccaacaauagcacagauaccguugacacagugcuggagaagaacgugaccgucacacauuccgugaaucuccuggaagauucucacaacgggaaacuuugccugcucaagggaaucgcgccccugcagcugggcaauuguagcguugcuggguggauucucggaaacccugagugcgaacugcuuaucuccagagagucuuggagcuacauuguggaaaccccgaaucccgagaacggcacguguuauccuggguacuuugccgacuaugaggaacugcgggagcaacucuccucugucagcuccuucgaacgcuuugagaucuuccccaaagagagcucuuggccuaaucauaccgugacaggaguuuccgccagcugcucucacaacggcaaguccagcuuuuacagaaaucugcuuuggcugaccggcaagaacgggcucuaucccaaucugucuaaauccuacgcuaacaauaaggaaaaagaggugcugguccucuggggagugcaucacccuccgaacaucggcgaucagcgggcccuguaccacacagaaaacgcuuaugugagcgucguuuccucucauuacagccgcagauucacccccgagauugccaagcggccuaaagugcgcgaccaggaagggagaaucaauuauuacuggacgcuucuggagcccggagauacaauuaucuuugaggcgaacggcaaucucauugccccucgguucgcuuuugcccugucccgcggguucggaagcggcaucauuaccucuaacgcucccauggacgaaugugaugccaagugccagacaccgcaaggcgcgaucaauuccagccuuccuuuucagaacgugcaccccgucaccaucggggaguguccuaaguaugugagaucuaccaaacugcggaugguuacaggacuccgcaauauucccagcauccaguccagaggccuguucggggccauugcuggauuuaucgaaggcggguggacgggaaugguggacggcugguacggcuaucaucaccagaacgagcaagggucuggauacgccgcugaucaaaagagcacccagaaugccauuaacggcaucacaaauaaagucaacuccgugaucgaaaagaugaauacccaguucacagccguugggaaagaguucaacaagcuggagcggcgcauggaaaaucucaacaaaaagguggacgauggauuucuggacauuuggaccuacaacgcugagcuucugguccuccuggaaaaugagagaacgcuugacuuccacgauagcaacgugaagaaucuguaugaaaaagucaagucucagcucaaaaacaaugcgaaggagaucggcaacgggugcuuugaguucuaccauaaauguaaugacgaaugcauggaguccgugaagaacggcacauaugauuaccccaaguauagcgaagagucuaaacugaaucgggagaagauugacggaguuaaacuggaauccaugggcguguaccagauccucgccauuuauagcaccgucgcuuccucucuggugcuucugguuagccucggggccaucuccuuuuggaugugcucuaacggaagccugcaguguagaaucugcauuuga

SEQ ID NO: 194021 - RNA, 1698 nt, Artificial Sequence; identical to SEQ ID NO: 193986
  derived and/or modified CDS sequence (opt5) from hemagglutinin__InfluenzaA__ABV30173

SEQ ID NO: 194022 - RNA, 1698 nt, Artificial Sequence; identical to SEQ ID NO: 193986
  derived and/or modified CDS sequence (opt5) from hemagglutinin__InfluenzaA__ABV30184

SEQ ID NO: 194023 - RNA, 1701 nt, Artificial Sequence; identical to SEQ ID NO: 194000
  derived and/or modified CDS sequence (opt5) from hemagglutinin__InfluenzaA__ABV30217

SEQ ID NO: 194024 - RNA, 1701 nt, Artificial Sequence; identical to SEQ ID NO: 194000
  derived and/or modified CDS sequence (opt5) from hemagglutinin__InfluenzaA__ABV30228

SEQ ID NO: 194025 - RNA, 1701 nt, Artificial Sequence
  derived and/or modified CDS sequence (opt5) from hemagglutinin__InfluenzaA__ABV30261
augaagaccaucauugcccugagcuacauccucugccugguguucgcucagaaacuucccggcauugacaacuccacagccacgcugugucucgggcaccaugcggucccuaauggaaccaucguuaagacaauuaccaacgaucaaguggaggugacaaaugcuaccgaacugguccagucuagcuccacaggcgggaucugcgacucuccgcaccagauccuugauggagagaacuguacccugauugacgcccuccugggcgauccccagugcgacggguuucaaaauaaaaagugggaucuguucguggaaagaagcaaagccuauuccaacuguuacccuuaugacguucccgauuacgcuucucuccggagccugguggccuccagcggaacgcuugaguuuaauaacgaaucuuucaauugggcuggcgucacccagaacggcacauccagcgccugcaagcgcgggucuaauaacuccuuuuucagcagacugaauuggcucacccauucuaaguuuaaauauccugcgcugaacgugacaaugcccaauaacgaggaguucgacaaacuuuacaucuggggaguucaccauccuggcaccgauaacgaccagauuuuucuguaugcccaggcuuccgggcggaucacggugagcacaaagcgcucccaacagaccgucauuccgaauaucggaucuagaccccgggugcgcaacauuccuagcagaaucuccaucuacuggacaauugugaagcccggcgauauccuccugauuaauagcaccgggaaccugaucgccccucggggauacuucaaaauucgcucuggcaaguccagcaucaugagaucugacgcucccaucggcaaguguaauagcgaaugcauuaccccgaacggguccaucccuaaugacaaacccuuucagaacgucaaucggauuacauauggagccuguccucgcuacguuaagcagaacacgcucaaacuggcgaccggcaugagaaaugugcccgagaagcaaacacgggggaucuucggagccauugcuggcuuuaucgaaaacgggugggagggaaugguggauggcugguauggcuuccgccaccaaaauucugaggggaugggacaggccgcugaccuuaaaagcacccaggccgccaucgaucagauuaacggcaagcugaauagacucaucgggaaaacaaacgaaaaguuccaccagauugagaaggaauuuuccgaggucgaaggacggauccaggaccuggagaaauacguggaggauaccaagauugaccuuuggagcuauaacgcugaacugcucguugcgcuggagaaucaacauacgaucgaucugacagacucugaaaugaacaaacucuucgagaagaccaaaaagcagcugagagaaaaugccgaggauaugggcaacgggugcuuuaagauuuaccacaaaugugacaaugcuugcaucggcuccauccgcaacggaaccuaugaucaugacguguaccgggccgaggcccuuaauaacagauuccagauuaagggcgucgaacugaaaagcggguacaaggacuggauccucuggauuucuuuugcuaucuccugcuuccugcuuuguguggcccugcucggauuuauuaugugggcgugccagaaaggcaauauccgcuguaacaucugcauuuga

SEQ ID NO: 194026 - RNA, 1701 nt, Artificial Sequence
  derived and/or modified CDS sequence (opt5) from hemagglutinin__InfluenzaA__ABV30272
augaagaccaucauugcccugagcuacauccucugccugguguucgcucagaaacuucccggcaacgacaauuccacagccacgcugugucucgggcaccaugcggucccuaacggaaccauuguuaagacaaucaccaaugaucaaauugaggugacaaacgcuaccgaacuggugcagucuagcuccacaggcgagaucugcgacucuccgcaccagauccuugauggggaaaauuguacccugauugacgcccuccugggagauccccagugcgacggcuuucaaaacaaaaagugggaucuguucgucgagagaagcaaagccuauuccaauuguuacccuuaugacgugcccgauuacgcuucucuccggagccugguugccuccagcgggacgcuugaauuuaacaaugagucuuucaacuggaccggagugacacagaauggcaccuccagcgcuugcauccgcagaucuaacaauuccuuuuucagcaagcugaacuggcucacacaucugaaguuuaaauauccugcccuuaaugucaccaugcccaacaacgagaaguucgacaaacuguacauuuggggcgugcaccauccugggacggauaaugaccagaucuuucucuaugcgcaggccucuggacggauuacaguuuccaccaagcgcagccaacagacagugaucccgaacauuggcuccagaccccggguccgcaauaucccuucuagaaucagcauuuacuggaccaucgugaaacccggggauauucugcugaucaacuccaccggaaaucucauugcuccucggggcuacuucaagauccgcagcgggaagucuuccaucaugagaagcgacgcccccauuggaaaauguaacucugaaugcaucacaccgaauggcagcauuccuaacgacaagcccuuucagaaugugaaccggaucacguauggcgcuuguccucgcuacgucaaacagaauacccugaaacuugccacagggaugagaaacguucccgagaagcaaacccggggaauuuucggcgcgaucgccggguuuaucgaaaauggaugggagggcaugguggaugggugguauggauuccgccaccagaacuccgagggcauuggccaggcugccgaccugaagucuacacaagcugccaucgaucagauuaaugggaaacucaacagacugaucggaaagaccaacgaaaaguuccaccagauugagaaagaauuuagcgagguggaaggccggauccaggaccuugagaaguacgucgaggauacgaaaauugaccugugguccuauaaugccgaacuccugguggcucuggagaaccaacauacaaucgaucucaccgacagcgaaaugaauaagcuguucgagaaaaccaagaagcagcuuagagaaaacgcggaggauauggggaauggaugcuuuaaaaucuaccacaagugugacaacgccugcauuggcucuauccgcaaugggacauaugaucaugacguuuaccgggacgaggcucugaacaauagauuccagauuaaaggcguggaacucaaguccggauacaaagauuggauccuguggauuagcuuugccaucucuugcuuccuucugugugucgcccuccugggcuuuaucaugugggcuugccagaaggggaacauucgcuguaauaucugcauuuga

SEQ ID NO: 194027 - RNA, 1698 nt, Artificial Sequence
  derived and/or modified CDS sequence (opt5) from hemagglutinin__InfluenzaA__ABV30283
augaaggugaaacugcucguccugcuuugcaccuucacagccacguacgcugacaccaucuguauuggcuaucacgccaacaauagcacagauaccguugacacagugcuggagaagaacgugaccgucacacauuccgugaaucuccuggaagauucucacaacgggaaacuuugccugcucaagggaaucgcgccccugcagcugggcaauuguagcguugcuggguggauucucggaaacccugagugcgaacugcuuaucuccaaagagucuuggagcuacauuguggaaaccccgaaucccgagaacggcacguguuauccugggaauuuugccgacuacgaggaacugagagagcaacucuccucugucagcuccuucgaacgguuugagaucuuccccaaggagagcucuuggccuaaccauaccgugacaggaguuuccgccagcugcucucacaauggcaaguccagcuuuuaucgcaaccugcuuuggcugaccggcaaaaaugggcucuaccccaaccugucuaaguccuaugcuaauaacaaagaaaaggaggugcugguccucuggggagugcaucacccuccgaacaucggcgaucagagagcccuguaccacacagaaaaugcuuacgugagcgucguuuccucucauuauagccggcgcuucacccccgagauugccaaaagaccuaaggugcgggaccaggaagggcgcaucaacuacuauuggacgcuucuggagcccggagauacaauuaucuuugaggcgaauggcaaccucauugccccuagauucgcuuuugcccugucccggggguucggaagcggcaucauuaccucuaaugcucccauggacgaaugugaugccaagugccagacaccgcaaggcgcgaucaacuccagccuuccuuuucagaaugugcaccccgucaccaucggggaguguccuaaauacgugcgcucugccaagcugagaaugguuaccggacuccggaacauucccagcauccagucccgcggccuguucggggcuauugccggauuuaucgaaggcggguggacaggaaugguggacggcugguauggcuaccaucaccagaaugagcaagggucuggauaugcugccgaucagaaaagcacgcagaacgccauugacggcaucaccaauaaggucaacuccgugaucgaaaagaugaauacacaguucaccgcuguugggaaagaguucaacaaacuggagagacggauggaaaaucucaacaagaagguggaugacggauuucuggacauuuggacauacaacgcggagcuucugguccuccuggaaaaugagcgcacccuugauuuccacgacagcaacgugaaaaaucuguacgaaaaggucaaaucucaacucaagaacaaugccaaagagaucggcaacgggugcuuugaguucuaucauaaguguaaugaugaaugcauggaguccgugaagaacggcacguacgacuaucccaaauacagcgaagagucuaagcugaauagagagaaaauugauggaguuaagcuggaauccaugggcguguaucagauccucgcuauuuacagcacagucgccuccucucuggugcuucugguuagccucggggccaucuccuuuuggaugugcucuaacggaagccugcagugucggaucugcauuuga

SEQ ID NO: 194028 - RNA, 1698 nt, Artificial Sequence
  derived and/or modified CDS sequence (opt5) from hemagglutinin__InfluenzaA__ABV30294
augaaggugaaacugcucguccugcuuugcaccuucacagccacguacgcugacaccaucuguauuggcuaucacgccaacaauagcacagauaccguugacacagugcuggagaagaacgugaccgucacacauuccgugaaucuccuggaagauagacacaacgggaaacuuugccugcucaagggaaucgcgccccugcagcugggcaauuguucuguugcuggguggauucucggaaacccugagugcgaacugcuuaucagcaaagaguccuggucuuacauuguggaaaccccgaaucccgagaacggcacguguuauccuggguacuuugccgacuaugaggaacugcgggagcaacucagcuccgucucuagcuucgaacgcuuugagaucuuccccaaggaguccagcuggccuaaucauaccgugacaggaguuucugccuccugcagccacaacggcaagucuuccuuuuacagaaaucugcuuuggcugaccggcaaaaacgggcucuaucccaaucugagccggucuuacgcuaacaauaaggaaaaagaggugcugguccucuggggagugcaucacccuccgaacaucggcgaucagcgcgcccuguaccacacagaaaacgcuuauguguccgucguuagcucccauuacucuagacgguucacccccgagauugccaagcgcccuaaagugagagaccaggaagggcggaucaauuauuacuggacgcuucuggagcccggagauacaauuaucuuugaggcgaacggcaaucucauugccccucgcuucgcuuuugcccugagcagaggguucggauccggcaucauuaccagcaacgcucccauggacgaaugugaugccaagugccagacaccgcaaggcgcgaucaauucuucccuuccuuuucagaacgugcaccccgucaccaucggggaguguccuaaguaugugcggagcgccaaacugcgcaugguuaccggacucagaaauauucccucuauccagagccggggccuguucggggcuauugccggauuuaucgaaggcggguggacaggaaugguggacggcugguacggcuaucaucaccagaacgagcaaggguccggauacgcugccgaucagaagucuacgcagaaugccauuaacggcaucaccaauaaagucaacagcgugaucgaaaagaugaauacacaguucaccgcuguugggaaagaguucaacaagcuggagcgcagaauggaaaaucucaacaaaaagguggacgauggauuucuggacauuuggacauacaacgcggagcuucugguccuccuggaaaaugagcggacccuugacuuccacgauuccaacgugaagaaucuguaugaaaaagucaagagccaacucaaaaacaaugccaaggagaucggcaacgggugcuuugaguucuaccauaaauguaaugacgaaugcauggagucugugaagaacggcacguaugauuaccccaaguauuccgaagagagcaaacugaauagagagaagauugacggaguuaaacuggaaucuaugggcguguaccagauccucgcuauuuauuccacagucgccagcucccuggugcuucugguuucucucggggccaucagcuuuuggaugugcuccaacggaucucugcagugucgcaucugcauuuga

SEQ ID NO: 194029 - RNA, 1698 nt, Artificial Sequence
  derived and/or modified CDS sequence (opt5) from hemagglutinin__InfluenzaA__ABV30305
augaaggugaaacugcucguccugcuuugcaccuucacagccacguacgcugacaccaucuguauuggcuaucacgccaacaauagcacagauaccguugacacagugcuggagaagaacgugaccgucacacauuccgugaaucuccuggaagauucucacaacgggaaacuuugccugcucaagggaaucgcgccccugcagcugggcaauuguagcguugcuggguggauucucggaaacccugagugcgaacugcuuaucuccaaagagucuuggagcuacauuguggaaaccccgaaucccgagaacggcacguguuauccuggguacuuugccgacuaugaggaacugagagagcaacucuccucugucagcuccuucgaacgguuugagaucuuccccaaggagagcucuuggccuaaucauaccgugacaggaggcuccgccagcugcucucacaacggcaaguccagcuuuuaccgcaaucugcuuuggcugaccgggaaaaacggacucuaucccaaucugucuaaguccuacgcuaacaauaaagaaaaggagguucuggugcucuggggcguccaucacccuccgaacaucggggaucagagagcccuguaccacacagaaaacgcuuaugugagcguggucuccucucauuacagccggcgcuucacccccgagauugccaaaagaccuaagguucgggaccaggaaggacgcaucaauuauuacuggacgcuucuggagcccggcgauacaauuaucuuugaggcgaacgggaaucucauugccccuagauucgcuuuugcccugucccggggauucggcagcggcaucauuaccucuaacgcucccauggacgaaugugaugccaagugccagacaccgcaaggggcgaucaauuccagccuuccuuuucagaacgugcaccccgugaccaucggagaguguccuaaauauguccgcucuaccaagcugagaauggugacaggccuccggaauauucccagcauccagucccgcgggcuguucggagccauugcuggcuuuaucgaagggggauggacgggcaugguugacggcugguacggguaucaucaccagaacgagcaaggaucuggcuacgccgcugaucagaaaagcacccagaaugccauuaacgggaucacaaauaaggugaacuccgucaucgaaaagaugaauacccaguucacagccgugggaaaagaguucaacaaacuggagagacggauggaaaaucucaacaagaagguugacgauggcuuucuggacauuuggaccuacaacgcugagcuucuggugcuccuggaaaaugagcgcacgcuugacuuccacgauagcaacgucaaaaaucuguaugaaaaggugaaaucucaacucaagaacaaugcgaaagagaucgggaacggcugcuuugaguucuaccauaaguguaauaacgaaugcauggaguccgucaagaauggaacauaugacuaccccaaauauagcgaagagucuaagcugaacagagagaaaauugauggcgugaagcuggaauccauggggguuuaccagauccucgccauuuauagcaccguggcuuccucucugguccuucuggugagccucggagccaucuccuuuuggaugugcucuaauggcagccugcagugucggaucugcauuuga

SEQ ID NO: 194030 - RNA, 1698 nt, Artificial Sequence; identical to SEQ ID NO: 193982
  derived and/or modified CDS sequence (opt5) from hemagglutinin__InfluenzaA__ABV30316

SEQ ID NO: 194031 - RNA, 1698 nt, Artificial Sequence; identical to SEQ ID NO: 194028
  derived and/or modified CDS sequence (opt5) from hemagglutinin__InfluenzaA__ABV30327

SEQ ID NO: 194032 - RNA, 1698 nt, Artificial Sequence; identical to SEQ ID NO: 193982
  derived and/or modified CDS sequence (opt5) from hemagglutinin__InfluenzaA__ABV30338

SEQ ID NO: 194033 - RNA, 1698 nt, Artificial Sequence; identical to SEQ ID NO: 193986
  derived and/or modified CDS sequence (opt5) from hemagglutinin__InfluenzaA__ABV30349

SEQ ID NO: 194034 - RNA, 1698 nt, Artificial Sequence
  derived and/or modified CDS sequence (opt5) from hemagglutinin__InfluenzaA__ABV30360
augaaggugaaacugcucguccugcuuugcaccuucacagccacguacgcugacaccaucuguauuggcuaucacgccaacaauagcacagauaccguugacacagugcuggagaagaacgugaccgucacacauuccgugaaucuccuggaagauucucacaacgggaaacuuugccugcucaagggaaucgcgccccugcagcugggcaauuguagcguugcuggguggauucucggaaacccugagugcgaacugcuuaucuccaaagagucuuggagcuacauuguggaaaccccgaaucccgagaacggcacguguuauccugggaauuuugccgacuacgaggaacugagagagcaacucuccucugucagcuccuucgaacgguuugagaucuuccccaaggagagcucuuggccuaaccauaccgugacaggaguuuccgccagcugcucucacaauggcaaguccagcuuuuaucgcaaccugcuuuggcugaccggcaaaaaugggcucuaccccaaccugucuaaguccuaugcuaauaacaaagaaaaggaggugcugguccucuggggagugcaucacccuccgaacaucggcgaucagagagcccuguaccacacagaaaaugcuuacgugagcgucguuuccucucauuauagccggcgcuucacccccgagauugccaaaagaccuaaggugcgggaccaggaagggcgcaucaacuacuauuggacgcuucuggagcccggagauacaauuaucuuugaggcgaauggcaaccucauugccccuagauucgcuuuugcccugucccggggguucggaagcggcaucauuaccucuaaugcucccauggacgaaugugaugccaagugccagacaccgcaaggcgcgaucaacuccagccuuccuuuucagaaugugcaccccgucaccaucggggaguguccuaaauacgugcgcucugccaagcugagaaugguuaccggacuccggaacauucccagcauccagucccgcggccuguucggggcuauugccggauuuaucgaaggcggguggacaggaaugguggacggcugguauggcuaccaucaccagaaugagcaagggucuggauaugcugccgaucagaaaagcacgcagaacgccauugacggcaucaccaauaaggucaacuccgugaucgaaaagaugaauacacaguucaccgcuguugggaaagaguucaacaaacuggagagacggauggaaaaucucaacaagaagguggaugacggauuucuggacauuuggacauacaacgcggagcuucugguccuccuggaaaaugagcgcacccuugauuuccacgacagcaacgugaaaaaucuguacgaaaaggucaaaucucaacucaagaacaaugccaaagagaucggcaacgggugcuuugaguucuaucauaaguguaaugaugaaugcauggaguccgugaagaacggcacguacgacuaucccaaauacagcgaagagucuaagcugaauagagagaaaauugauggaaucaagcuggaauccaugggcguuuaucagauucucgcuaucuacagcacaguggccuccucucugguccuucuggugagccucggggccaucuccuuuuggaugugcucuaacggaagccugcagugucggauuugcaucuga

SEQ ID NO: 194035 - RNA, 1698 nt, Artificial Sequence; identical to SEQ ID NO: 193986
  derived and/or modified CDS sequence (opt5) from hemagglutinin__InfluenzaA__ABV30371

SEQ ID NO: 194036 - RNA, 1701 nt, Artificial Sequence; identical to SEQ ID NO: 193801
  derived and/or modified CDS sequence (opt5) from hemagglutinin__InfluenzaA__ABV30382

SEQ ID NO: 194037 - RNA, 1701 nt, Artificial Sequence; identical to SEQ ID NO: 192702
  derived and/or modified CDS sequence (opt5) from hemagglutinin__InfluenzaA__ABV30393

SEQ ID NO: 194038 - RNA, 1701 nt, Artificial Sequence
  derived and/or modified CDS sequence (opt5) from hemagglutinin__InfluenzaA__ABV30404
augaagaccaucauugcccugagcuacauccucugccugguguucgcucagaaacuucccggcaacgacaauuccacagccacgcugugucucgggcaccaugcggucccuaacggaaccauuguuaagacaaucaccaaugaucaaauugaggugacaaacgcuaccgaacuggugcagucuagcuccacaggcgagaucugcgacucuccgcaccagauccuugauggggaaaauuguacccugauugacgcccuccugggagauccccagugcgacggcuuucaaaacaaaaagugggaucuguucgucgagagaagcaaagccuauuccaaguguuacccuuaugacgugcccgauuacgcuucucuccggagccugguugccuccagcgggacgcuugaauuuaauaacgagucuuucaauuggaccggagugacacagaacggcaccuccagcgcuugcauccgcagaucuaauaacuccuuuuucagccggcugaauuggcucacacaucugaaguuuaaauauccugcccuuaacgucaccaugcccaauaacgagaaguucgacaaacuguacauuuggggcgugcaccauccugggacggauaacgaccagaucuuucucuaugcgcaggccucuggacgcauuacaguuuccaccaagagaagccaacagacagugaucccgaauauuggcucccggccccgcgucagaaacaucccuucucggaucagcauuuacuggaccaucgugaaacccggggauauucugcugaucaauuccaccggaaaccucauugcuccucgcggcuacuucaagaucagaagcgggaagucuuccaucaugcggagcgacgcccccauuggaaaauguaauucugaaugcaucacaccgaacggcagcauuccuaaugacaagcccuuucagaacgugaaucgcaucacguauggcgcuuguccuagauacgucaaacagaacacccugaaacuugccacagggaugcggaauguucccgagaaacaaacccgcggaauuuucggcgcgaucgccggguuuaucgaaaacggaugggagggcaugguggaugggugguauggauucagacaccaaaauuccgagggcauuggccaggcugccgaccugaagucuacacaggcugccaucgaucagauuaacgggaaacucaaucggcugaucggaaagaccaacgaaaaguuccaccagauugagaaagaauuuagcgagguggaaggcagaauccaggaccuugagaaguacgucgaggauacgaaaauugaccugugguccuauaacgccgaucuccugguggcucuggaaaaucaacauacaaucgaccucaccgauagcgagaugaacaagcuguucgaaaagaccaagaagcagcuucgcgagaaugcggaagacauggggaacggaugcuuuaaaaucuaccacaagugugauaaugccugcauuggcucuauccggaacgggacauaugaccaugacguuuacagagaugaggcucugaauaaccgcuuccagauuaaaggcguggagcucaaguccggauacaaagacuggauccuguggauuagcuuugccaucucuugcuuccuucugugugucgcccuccugggcuuuaucaugugggcuugccagaaggggaauauucgguguaacaucugcauuuga

SEQ ID NO: 194039 - RNA, 1701 nt, Artificial Sequence
  derived and/or modified CDS sequence (opt5) from hemagglutinin__InfluenzaA__ABV30415
augaagaccaucauugcccugagcuacauccucugccugguguucgcucagaaacuucccggcauugacaacuccacagccacgcugugucucgggcaccaugcggucccuaauggaaccaucguuaagacaauuaccaacgaucaaaucgaggugacaaaugcuaccgaacuggugcagucuagcuccacaggcgggaucugcgacucuccgcaccagauucuugauggagagaacuguacccugaucgacgcccuccugggcgauccccagugcgacggguuucaaaauaaaaagugggaucuguucgucgaaagaagcaaagccuauuccaacuguuacccuuaugacgugcccgauuacgcuucucuccggagccugguugccuccagcggaacgcuugaguuuaauaacgaaucuuucaauugggcuggcgugacccagaacggcacauccagcgccugcaagcgcgggucuaauaacuccuuuuucagcagacugaauuggcucacccauucuaaguuuaaauauccugcgcugaacgucacaaugcccaauaacgaggaguucgacaaacuuuacauuuggggagugcaccauccuggcaccgauaacgaccagaucuuucuguaugcccaggcuuccgggcggauuacgguuagcacaaagcgcucccaacagaccgugaucccgaauauuggaucuagaccccggguccgcaacaucccuagcagaaucuccauuuacuggacaaucgugaagcccggcgauauucuccugaucaauagcaccgggaaccugauugccccucggggauacuucaaaauccgcucuggcaaguccagcaucaugagaucugacgcucccauuggcaaguguaauagcgaaugcaucaccccgaacggguccauuccuaaugacaaacccuuucagaacgugaaucggaucacauauggagccuguccucgcuacgucaagcagaacacgcucaaacuggcgaccggcaugagaaauguucccgagaagcaaacacgggggauuuucggagccaucgcuggcuuuaucgaaaacgggugggagggaaugguggauggcugguauggcuuccgccaccaaaauucugaggggauuggacaggccgcugaccuuaaaagcacccaggccgccaucgaucagauuaacggcaagcugaauagacucaucgggaaaacaaacgaaaaguuccaccagauugagaaggaauuuuccgagguggaaggacggauccaggaccuggagaaauacgucgaggauaccaagauugaccuuuggagcuauaacgcugaacugcucguggcgcuggagaaucaacauacgaucgaucugacagacucugaaaugaacaaacucuucgagaagaccaaaaagcagcugagagaaaaugccgaggauaugggcaacgggugcuuuaagaucuaccacaaaugugacaaugcuugcauuggcuccauccgcaacggaaccuaugaucaugacguuuaccgggacgaggcccuuaauaacagauuccagauuaagagcguggaacugaaaucuggcuacaaggauuggauccucuggauuuccuuugccaucagcugcuuccugcuuugugucgcucugcucggguuuaucaugugggccugccagaaaggaaauauucgcuguaacaucugcauuuga

SEQ ID NO: 194040 - RNA, 1701 nt, Artificial Sequence; identical to SEQ ID NO: 194000
  derived and/or modified CDS sequence (opt5) from hemagglutinin__InfluenzaA__ABV30426

SEQ ID NO: 194041 - RNA, 1701 nt, Artificial Sequence
  derived and/or modified CDS sequence (opt5) from hemagglutinin__InfluenzaA__ABV30437
augaagaccaucauugcccugagcuacauccucugccugguguucgcucagaaacuucccggcaacgacaauuccacagccacgcugugucucgggcaccaugcggucccuaacggaaccauuguuaagacaaucaccaaugaucaaauugaggugacaaacgcuaccgaacuggugcagucuagcuccacaggcgagaucugcgacucuccgcaccagauccuugauggggaaaauuguacccugauugacgcccuccugggagauccccagugcgacggcuuucaaaacaaaaagugggaucuguucgucgagagaagcaaagccuauuccaauuguuacccuuaugacgugcccgauuacgcuucucuccggagccugguugccuccagcgggacgcuugaauuuaacaaugagucuuucaacuggaccggagugacacagaauggcaccuccagcgcuugcauccgcagaucuaaccauuccuuuuucagccggcugaauuggcucacacaccugaaguuuaaguauccugcccuuaacgucaccaugcccaauaacgagaaauucgacaagcuguacauuuggggcgugcaucacccugggacggauaacgaccagaucuuucucuaugcgcaggccucuggacgcauuacaguuuccaccaaaagaagccaacagacagugaucccgaauauuggcucccggccccgcgucagaaacaucccuucucggaucagcauuuacuggaccaucgugaagcccggggauauucugcugaucaauuccaccggaaaccucauugcuccucgcggcuacuucaaaaucagaagcgggaagucuuccaucaugcggagcgacgcccccauuggaaaguguaauucugaaugcaucacaccgaacggcagcauuccuaaugacaaacccuuucagaacgugaaucgcaucacguauggcgcuuguccuagauacgucaagcagaacacccugaaacuugccacagggaugcggaauguucccgagaagcaaacccgcggaauuuucggcgcgaucgccggguuuaucgaaaacggaugggagggcaugguggaugggugguauggauucagacaccaaaauuccgagggcauuggccaggcugccgaccugaaaucuacacaggcugccaucgaucagauuaacgggaagcucaaucggcugaucggaaaaaccaacgaaaaguuccaucagauugagaaggaauuuagcgagguggaaggcagaauccaggaccuugagaaauacgucgaggauacgaagauugaccugugguccuauaacgccgaacuccugguggcucuggagaaucaacacacaaucgaucucaccgacagcgaaaugaacaaacuguucgagaagaccaaaaagcagcuucgcgaaaaugcggaggauauggggaacggaugcuuuaagaucuaccauaaaugugacaaugccugcauuggcucuauccggaacgggacauaugaucacgacguuuacagagacgaggcucugaauaaccgcuuccagauuaagggcguggaacucaaauccggauacaaggauuggauccuguggauuagcuuugccaucucuugcuuccuucugugugucgcccuccugggcuuuaucaugugggcuugccagaaagggaauauucgguguaacaucugcauuuga

SEQ ID NO: 194042 - RNA, 1701 nt, Artificial Sequence; identical to SEQ ID NO: 194000
  derived and/or modified CDS sequence (opt5) from hemagglutinin__InfluenzaA__ABV30448

SEQ ID NO: 194043 - RNA, 1698 nt, Artificial Sequence
  derived and/or modified CDS sequence (opt5) from hemagglutinin__InfluenzaA__ABV30459
augaaggugaaacugcucauccugcuuugcaccuucacagccacguacgcugacaccauuuguaucggcuaucacgccaacaauagcacagauaccgucgacacaguucuggagaagaacgugaccgugacacauuccgucaaucuccuggaagauucucacaacgggaaacuuugccugcucaagggaauugcgccccugcagcugggcaauuguagcguggcuggguggauccucggaaacccugagugcgaacugcuuauuuccaaagagucuuggagcuacaucguugaagccccgaaucccgagaacggcaccuguuauccuggguacuuugccgacuaugaggaacugagagagcaacucuccucugugagcuccuucgaacgguuugagaucuuccccaaggagagcucuuggccuaaucauacggucaccggaguguccgcuagcugcucucacaacggcaaguccagcuuuuaccgcaaucugcuuuggcugacaggcaaaaacgggcucuaucccaaucugucuaaguccuacgccaacaauaaagaaaaggagguucuggugcucuggggaguccaucacccuccgaacauuggcgaucagagagcucuguaccacaccgaaaacgccuaugugagcguggucuccucucauuacagccggcgcuucacacccgagaucgcgaaaagaccuaagguucgggaccaggaagggcgcauuaauuauuacuggacccuucuggagcccggagauacgaucauuuuugaggccaacggcaaucucaucgcuccuagauucgccuuugcucugucccggggguucggaagcggcauuaucacaucuaacgcccccauggacgaaugugaugcgaagugccagaccccgcaaggcgccaucaauuccagccuuccuuuucagaacgugcaccccgugacaauuggggaguguccuaaauauguccgcucuaccaagcugagaauggugaccggacuccggaauauccccagcauucagucccgcggccuguucggggcuaucgccggauuuauugaaggcggguggacaggaaugguugacggcugguacggcuaucaucaccagaacgagcaagggucuggauacgcugccgaucagaaaagcacgcagaaugccaucaacggcaucaccaauaaggugaacuccgucauugaaaagaugaauacacaguucaccgcuguggggaaagaguucaacaaacuggagagacggauggaaaaucucaacaagaagguugacgauggauuucuggacaucuggacauacaacgcggagcuucuggugcuccuggaaaaugagcgcacccuugacuuccacgauagcaacgucaaaaaucuguaugaaaaggugaaaucucaacucaagaacaaugccaaagagauuggcaacgggugcuuugaguucuaccauaaguguaaugacgaaugcauggaguccgucaagaacggcacguaugauuaccccaaauauagcgaagagucuaagcugaauagagagaaaaucgacggagugaagcuggaauccaugggcguuuaccagauucucgcuaucuauagcacaguggccuccucucugguccuucuggugagccucggggccaucuccuuuuggaugugcucuaacggaagccugcagugucggauuugcaucuga

SEQ ID NO: 194044 - RNA, 1701 nt, Artificial Sequence; identical to SEQ ID NO: 194000
  derived and/or modified CDS sequence (opt5) from hemagglutinin__InfluenzaA__ABV30470

SEQ ID NO: 194045 - RNA, 1698 nt, Artificial Sequence; identical to SEQ ID NO: 193982
  derived and/or modified CDS sequence (opt5) from hemagglutinin__InfluenzaA__ABV30492

SEQ ID NO: 194046 - RNA, 1698 nt, Artificial Sequence
  derived and/or modified CDS sequence (opt5) from hemagglutinin__InfluenzaA__ABV30503
augaaggugaaacugcucauccugcuuugcaccuucacagccacguacgcugacaccauuuguaucggcuaucacgccaacaauagcacagauaccgucgacacaguucuggagaagaacgugaccgugacacauuccgucaaucuccuggaagauucucacaacgggaaacuuugccugcucaagggaauugcgccccugcagcugggcaauuguagcguggcuggguggauccucggaaacccugagugcgaacugcuuauuuccaaagagucuuggagcuacaucguugaaaccccgaaucccgagaacggcacguguuauccuggguacuuugccgacuaugaggaacugagagagcaacucuccucugugagcuccuucgaacgguuugagaucuuccccaaggagagcucuuggccuaaucauaccauuacaggagucuccgccagcugcucucacaacggcaaguccagcuuuuaccgcaaucugcuuuggcugaccggcaaaaacgggcucuaucccaaucugucuaaguccuacgcuaacaauaaagaaaaggaggugcugguucucuggggagugcaucacccuccgaacaucggcgaucagagagcccuguaccacacagaaaacgcuuaugucagcgugguguccucucauuacagccggcgcuucacccccgagauugccaaaagaccuaagguccgggaccaggaagggcgcaucaauuauuacuggacgcuucuggagcccggagauacaauuaucuuugaggcgaacggcaaucucauugccccuagauucgcuuuugcccugucccggggguucggaagcggcaucaucaccucuaacgcucccauggacgaaugugaugccaagugccagacaccgcaaggcgcgauuaauuccagccuuccuuuucagaacguucaccccgugaccaucggggaguguccuaaauaugugcgcucuaccaagcugagaauggucacaggacuccggaauauucccagcauccagucccgcggccuguucggggccauugcuggauuuaucgaaggcggguggacgggaaugguggacggcugguacggcuaucaucaccagaacgagcaagggucuggauacgccgcugaucagaaaagcacccagaaugccaucaacggcauuacaaauaagguuaacuccgugaucgaaaagaugaauacccaguucacagccgucgggaaagaguucaacaaacuggagagacggauggaaaaucucaacaagaagguggacgauggauuucuggacauuuggaccuacaacgcugagcuucugguucuccuggaaaaugagcgcacgcuugacuuccacgauagcaacgugaaaaaucuguaugaaaaggucaaaucucaacucaagaacaaugcgaaagagaucggcaacgggugcuuugaguucuaccauaaguguaaugacgaaugcauggaguccgugaagaacggcacauaugauuaccccaaauauagcgaagagucuaagcugaauagagagaaaauugacggagucaagcuggaauccaugggcguguaccagauccucgccaucuauagcaccguugcuuccucucuggugcuucuggucagccucggggccauuuccuuuuggaugugcucuaacggaagccugcagugucggaucugcauuuga

SEQ ID NO: 194047 - RNA, 1701 nt, Artificial Sequence; identical to SEQ ID NO: 194000
  derived and/or modified CDS sequence (opt5) from hemagglutinin__InfluenzaA__ABV30514

SEQ ID NO: 194048 - RNA, 1698 nt, Artificial Sequence
  derived and/or modified CDS sequence (opt5) from hemagglutinin__InfluenzaA__ABV30525
augaaggugaaacugcucguccugcuuugcaccuucacagccacguacgcugacaccaucuguauuggcuaucacgccaacaauagcacagauaccguugacacagugcuggagaagaacgugaccgucacacauuccgugaaucuccuggaagauucucacaacgggaaacuuugccugcucaagggaaucgcgccccugcagcugggcaauuguagcguugcuggguggauucucggaaacccugagugcgaacugcuuaucuccaaagagucuuggagcuacauuguggaaaccccgaaucccgagaacggcacguguuauccuggguacuuugccgacuaugaggaacugagagagcaacucuccucugucagcuccuucgaacgguuugagaucuuccccaaggagagcucuuggccuaaucauaccgugacaggaguuuccgccagcugcucucacuccggcaagagcucuuuuuaccgcaaccugcuuuggcugaccggcaaaaaugggcucuaucccaaccuguccaagagcuacgcuaauaacaaagaaaaggaggugcugguccucuggggagugcaucacccuccgaauaucggcgaucagagagcccuguaccacacagaaaacgcuuauguguccgucguuucuagccauuacucccggcgcuucacccccgagauugccaaaagaccuaaggugcgggaccaggaagggcgcaucaacuauuacuggacgcuucuggagcccggagauacaauuaucuuugaggcgaauggcaaccucauugccccuagauucgcuuuugcccugagccggggguucggaucuggcaucauuaccuccaauacacccaugggcgaaugugacgcuaagugccagaccccgcaaggggccaucaacagcucucuuccuuuucagaaugugcaccccgucaccaucggagaguguccuaaauaugugcgcagcgcgaagcugagaaugguuacaggccuccggaacauucccuccauccagucucgcgggcuguucggagccauugcuggcuuuaucgaagggggauggacgggcaugguggauggcugguacggguaucaucaccagaaugagcaaggaagcggcuacgccgcugaccagaaauccacccagaacgccauuaaugggaucacaaacaaggucaauagcgugaucgaaaagaugaacacccaguucacagccguuggaaaagaguucaauaaacuggagagacggauggaaaaccucaauaagaagguggaugacggcuuucuggauauuuggaccuacaacgcugagcuucugguccuccuggaaaacgagcgcacgcuugacuuccacgacucuaaugugaaaaaccuguaugaaaaggucaaaucccaacucaagaauaacgcgaaagagaucgggaauggcugcuuugaguucuaccauaaguguaacgaugaaugcauggagagcgugaagaauggaacauaugacuaccccaaauauucugaagaguccaagcugaacagagagaaaauugauggcguuaagcuggaaagcauggggguguaccagauccucgccauuuauuccaccgucgcuucuagccuggugcuucugguuucccucggagccaucucuuuuuggaugugcagcaauggcucccugcagugucggaucugcauuuga

SEQ ID NO: 194049 - RNA, 1698 nt, Artificial Sequence; identical to SEQ ID NO: 193986
  derived and/or modified CDS sequence (opt5) from hemagglutinin__InfluenzaA__ABV30536

SEQ ID NO: 194050 - RNA, 1698 nt, Artificial Sequence; identical to SEQ ID NO: 193993
  derived and/or modified CDS sequence (opt5) from hemagglutinin__InfluenzaA__ABV30547

SEQ ID NO: 194051 - RNA, 1698 nt, Artificial Sequence; identical to SEQ ID NO: 193986
  derived and/or modified CDS sequence (opt5) from hemagglutinin__InfluenzaA__ABV30558

SEQ ID NO: 194052 - RNA, 1698 nt, Artificial Sequence
  derived and/or modified CDS sequence (opt5) from hemagglutinin__InfluenzaA__ABV30569
augaaggugaaacugcucauccugcuuugcaccuucacagccacguacgcugacaccauuuguaucggcuaucacgccaacaauagcacagauaccgucgacacaguucuggagaagaacgugaccgugacacauuccgucaaucuccuggaagauaaccacaaugggaaacuuugccugcucaagggaauugcgccccugcagcugggcaacuguucuguggcuggguggauccucggaaauccugagugcgaacugcuuauuagcaaagaguccuggucuuacaucguugaaaccccgaaccccgagaauggcacguguuauccuggguacuuugccgacuaugaggaacugagagagcaacucagcuccgugucuagcuucgaacgguuugagaucuuccccaaggaguccagcuggccuaaccauaccgucacaggagugucugccuccugcagccacaauggcaagucuuccuuuuaccgcaaccugcuuuggcugaccggcaaaaaugggcucuaucccaaccugagcaagucuuacgcuaauaacaaagaaaaggagguucuggugcucuggggaguccaucacccuccgaacauuggcgaucagagagcccuguaccacacagaaaaugcuuauguguccguggucagcucccauuacucucggcgcuucacccccgagaucgccaaaagaccuaagguucgggaccaggaagggcgcauuaacuauuacuggacgcuucuggagcccggagauacaaucauuuuugaggcgaauggcaaccucaucgccccuagauucgcuuuugcccugagccggggguucggauccggcauuaucaccagcaaugcucccauggacgaaugugaugccaagugccagacaccgcaaggcgcgaucaacucuucccuuccuuuucagaaugugcaccccgugaccauuggggaguguccuaaauauguccgcagcaccaagcugagaauggugacaggacuccggaacauccccucuauucagagccgcggccuguucggggccaucgcuggauuuauugaaggcggguggacgggaaugguugacggcugguacggcuaucaucaccagaaugagcaaggguccggauacgccgcugaucagaaaucuacccagaacgccaucaauggcaucacaaacaaggugaauagcgucauugaaaagaugaacacccaguucacagccguggggaaagaguucaauaaacuggagagacggauggaaaaccucaacaagaagguugacgauggauuucuggacaucuggaccuacaaugcugagcuucuggugcuccuggaaaacgagcgcacgcuugacuuccacgauuccaaugucaaaaaccuguaugaaaaggugaaaagccaacucaagaauaacgcgaaagagauuggcaaugggugcuuugaguucuaccauaaguguaacgacgaaugcauggagucugucaagaauggcacauaugauuaccccaaauauuccgaagagagcaagcugaacagagagaaaaucgacggagugaagcuggaaucuaugggcguuuaccagauucucgccaucuauuccaccguggcuagcucccugguccuucuggugucucucggggccaucagcuuuuggaugugcuccaauggaucucugcagugucggauuugcaucuga

SEQ ID NO: 194053 - RNA, 1698 nt, Artificial Sequence; identical to SEQ ID NO: 193986
  derived and/or modified CDS sequence (opt5) from hemagglutinin__InfluenzaA__ABV30580

SEQ ID NO: 194054 - RNA, 1698 nt, Artificial Sequence; identical to SEQ ID NO: 193982
  derived and/or modified CDS sequence (opt5) from hemagglutinin__InfluenzaA__ABV30591

SEQ ID NO: 194055 - RNA, 1698 nt, Artificial Sequence; identical to SEQ ID NO: 193982
  derived and/or modified CDS sequence (opt5) from hemagglutinin__InfluenzaA__ABV30602

SEQ ID NO: 194056 - RNA, 1698 nt, Artificial Sequence
  derived and/or modified CDS sequence (opt5) from hemagglutinin__InfluenzaA__ABV30613
augaaggugaaacugcucauccugcuuugcaccuucacagccacguacgcugacaccauuuguaucggcuaucacgccaacaauagcacagauaccgucgacacaguucuggagaagaacgugaccgugacacauuccgucaaucuccuggaagauucucacaacgggaaacuuugccugcucaagggaauugcgccccugcagcugggcaauuguagcguggcuggguggauccucggaaacccugagugcgaacugcuuauuuccaaagagucuuggagcuacaucguugaaaccccgaaucccgagaacggcacguguuauccuggguacuuugccgacuaugaggaacugagagagcaacucuccucugugagcuccuucgaacgguuugagaucuuccccaaggagagcucuuggccuaaucauaccgucacaggaguguccgccagcugcucucacaacggcaaguccagcuuuuaccgcaaucugcuuuggcugaccggcaaaaacgggcucuaucccaaucugucuaaguccuacgcuaacaauaaagaaaaggagguucuggugcucuggggaguccaucacccuccgaacauuggcgaucagagagcccuguaccacacagaaaacgcuuaugugagcguggucuccucucauuacagccggcgcuucacccccgagaucgccaaaagaccuaagguucgggaccaggaagggcgcauuaauuauuacuggacgcuucuggagcccggagauacaaucauuuuugaggcgaacggcaaucucaucgccccuagauucgcuuuugcccugucccggggguucggaagcggcauuaucaccucuaacgcucccauggacgaaugugaugccaagugccagacaccgcaaggcgcgaucaauuccagccuuccuuuucagaacgugcaccccgugaccauuggggaguguccuaaauauguccgcucuaccaagcugagaauggugacaggacuccggaauauccccagcauucagucccgcggccuguucggggccaucgcuggauuuauugaaggcggguggacgggaaugguugacggcugguacggcuaucaucaccagaacgagcaagggucuggauacgccgcugaucagaaaagcacccagaaugccaucaacggcaucacaaauaaggugaacuccgucauugaaaagaugaauacccaguucacagccguggggaaagaguucaacaaacuggagagacggaugaagaaucucaacaagaaaguugacgauggauuucuggacaucuggaccuacaacgcugaacuucuggugcuccuggagaaugaacgcacgcuugacuuccacgauagcaacgucaagaaucuguaugagaaagugaagucucaacucaaaaacaaugcgaaggaaauuggcaacgggugcuuugaguucuaccauaaguguaaugacgagugcauggaauccgucaaaaacggcacauaugauuaccccaaguauagcgaggaaucuaaacugaauagagagaagaucgacggagugaaacuggaguccaugggcguuuaccagauucucgccaucuauagcaccguggcuuccucucugguccuucuggugagccucggggccaucuccuuuuggaugugcucuaacggaagccugcagugucggauuugcaucuga

SEQ ID NO: 194057 - RNA, 1698 nt, Artificial Sequence; identical to SEQ ID NO: 193982
  derived and/or modified CDS sequence (opt5) from hemagglutinin__InfluenzaA__ABV30624

SEQ ID NO: 194058 - RNA, 1701 nt, Artificial Sequence
  derived and/or modified CDS sequence (opt5) from hemagglutinin__InfluenzaA__ABV30646
augaagaccaucauugcccugagcuacauccucugccugguguucgcucagaaacuucccggcaacgacaauuccacagccacgcugugucucgggcaccaugcggucccuaacggaaccauuguuaagacaaucaccaaugaucaaauugaggugacaaacgcuaccgaacuggugcagucuagcuccacaggcgagaucugcgacucuccgcaccagauccuugauggggaaaauuguacccugauugacgcccuccugggagauccccagugcgacggcuuucaaaacaaaaagugggaucuguucgucgagagaagcaaagccuauuccaauuguuacccuuaugacgugcccgauuacgcuucucuccggagccugguugccuccagcgggacgcuugaauuuaacaaugagucuuucaacuggaccggagugacacagaauggcaccuccagcgcuugcauccgcagaucuaacaauuccuuuuucagccggcugaacuggcucacacaucugaaguuuaaguauccugcccuuaaugucaccaugcccaacaacgagaaauucgacaagcuguacauuuggggcgugcaccauccugggacguauaaugaucagaucuuucucuacgcgcaggccucuggacgcauuacaguuuccaccaaaagaagccaacagacagugaucccgaacauuggcucccggccccgcgucagaaauaucccuucucggaucagcauuuacuggaccaucgugaagcccggggacauucugcugaucaacuccaccggaaaucucauugcuccucgcggcuauuucaaaaucagaagcgggaagucuuccaucaugcggagcgaugcccccauuggaaaguguaacucugaaugcaucacaccgaauggcagcauuccuaacgacaaacccuuucagaaugugaaccgcaucacguacggcgcuuguccuagauaugucaagcagaauacccugaaacuugccacagggaugcggaacguucccgagaagcaaacccgcggaauuuucggcgcgaucgccggguuuaucgaaaauggaugggagggcaugguggacgggugguacggauucagacaccagaacuccgagggcauuggccaggcugccgaucugaaaucuacacaagcugccaucgaccagauuaaugggaagcucaaccggcugaucggaaaaaccaacgaaaaguuccaccagauugagaaggaauuuagcgagguggaaggcagaauccaggaucuugagaaauaugucgaggacacgaagauugaucugugguccuacaaugccgaacuccugguggcucuggagaaccaacauacaaucgaccucaccgauagcgaaaugaauaaacuguucgagaagaccaaaaagcagcuucgcgaaaacgcggaggacauggggaauggaugcuuuaagaucuaucacaaaugugauaacgccugcauuggcucuauccggaaugggacauacgaccaugauguuuacagagacgaggcucugaacaaucgcuuccagauuaagggcguggaacucaaauccggauauaaggacuggauccuguggauuagcuuugccaucucuugcuuccuucugugugucgcccuccugggcuuuaucaugugggcuugccagaaagggaacauucgguguaauaucugcauuuga

SEQ ID NO: 194059 - RNA, 1701 nt, Artificial Sequence
  derived and/or modified CDS sequence (opt5) from hemagglutinin__InfluenzaA__ABV30657
augaagaccaucauugcccugagcuacauccucugccugguguucgcucagaaacuucccggcaacgacaauuccacagccacgcugugucucgggcaccaugcggucccuaacggaaccauuguuaagacaaucaccaaugaucaaauugaggugacaaacgcuaccgaacuggugcagucuagcuccacaggcgagaucugcgacucuccgcaccagauccuugauggggaaaauuguacccugauugacgcccuccugggagauccccagugcgacggcuuucaaaacaaaaagugggaucuguucgucgagagaagcaaagccuauuccaauuguuacccuuaugacgugcccgauuacgcuucucuccggagccugguugccuccagcgggacgcuugaauuuaacaaugagucuuucaacuggaccggagugacacagaauggcaccuccagcgcuugcauccgcagaucuaacaauuccuuuuucagccggcugaacuggcucacacaucugaaguuuaaguauccugcccuuaaugucaccaugcccaacaacgagaaauucgacaagcuguacauuuggggcgugcaccauccugggacggauaaugaccagguuuuucucuaugcgcaggccucuggacgcaucacaguguccaccaaaagaagccaacagacagucauuccgaacaucggcucccggccccgcgugagaaauauuccuucucggaucagcaucuacuggaccauugugaagcccggggauauccugcugauuaacuccaccggaaaucucaucgcuccucgcggcuacuucaaaauuagaagcgggaagucuuccaucaugcggagcgacgcccccaucggaaaguguaacucugaaugcauuacaccgaauggcagcaucccuaacgacaaacccuuucagaaugucaaccgcauuacguauggcgcuuguccuagauacguuaagcagaauacccugaaacuugccacagggaugcggaacgugcccgagaagcaaacccgcggaaucuucggcgcgauugccggguuuaucgaaaauggaugggagggcaugguggaugggugguauggauucagacaccagaacuccgagggcaucggccaggcugccgaccugaaaucuacacaagcugccauugaucagaucaaugggaagcucaaccggcugauuggaaaaaccaacgaaaaguuccaccagaucgagaaggaauuuagcgaggucgaaggccgcauucaggaccuugagaaauacguggaggauacgaagaucgaccugugguccuauaaugccgaacuccugguugcucuggagaaccaacauacaauugaucucaccgacagcgaaaugaauaaacuguucgagaagaccaaaaagcagcuuagagaaaacgcggaggauauggggaauggaugcuuuaagaucuaccacaaaugugacaacgccugcaucggcucuauucggaaugggacauaugaucaugacguguacagagacgaggcucugaacaaucgcuuccagaucaagggcgucgaacucaaauccggauacaaggauuggauucuguggaucagcuuugccauuucuugcuuccuucuguguguggcccuccugggcuuuaucaugugggcuugccagaaagggaacauccgguguaauauuugcaucuga

SEQ ID NO: 194060 - RNA, 1701 nt, Artificial Sequence; identical to SEQ ID NO: 194059
  derived and/or modified CDS sequence (opt5) from hemagglutinin__InfluenzaA__ABV45860

SEQ ID NO: 194061 - RNA, 1698 nt, Artificial Sequence; identical to SEQ ID NO: 194027
  derived and/or modified CDS sequence (opt5) from hemagglutinin__InfluenzaA__ABV45871

SEQ ID NO: 194062 - RNA, 1698 nt, Artificial Sequence; identical to SEQ ID NO: 193986
  derived and/or modified CDS sequence (opt5) from hemagglutinin__InfluenzaA__ABV45882

SEQ ID NO: 194063 - RNA, 1698 nt, Artificial Sequence; identical to SEQ ID NO: 193993
  derived and/or modified CDS sequence (opt5) from hemagglutinin__InfluenzaA__ABV45893

SEQ ID NO: 194064 - RNA, 1701 nt, Artificial Sequence; identical to SEQ ID NO: 193801
  derived and/or modified CDS sequence (opt5) from hemagglutinin__InfluenzaA__ABV45904

SEQ ID NO: 194065 - RNA, 1698 nt, Artificial Sequence; identical to SEQ ID NO: 193993
  derived and/or modified CDS sequence (opt5) from hemagglutinin__InfluenzaA__ABV45926

SEQ ID NO: 194066 - RNA, 1698 nt, Artificial Sequence
  derived and/or modified CDS sequence (opt5) from hemagglutinin__InfluenzaA__ABV45937
augaaggugaaacugcucguccugcuuugcaccuucacagccacguacgcugacaccaucuguauuggcuaucacgccaacaauagcacagauaccguugacacagugcuggagaagaacgugaccgucacacauuccgugaaucuccuggaagauucucacaacgggaaacuuugccugcucaagggaaucgcgccccugcagcugggcaauuguagcguugcuggguggauucucggaaacccugagugcgaacugcuuaucuccaaagagucuuggagcuacauuguggaaaccccgaaucccgagaacggcacguguuauccuggguacuuugccgacuaugaggaacugagagagcaacucuccucugucagcuccuucgaacgguuugagaucuuccccaaggagagcucuuggccuaaucauaccgugacaggaguuuccgccagcugcucucacaacggcaaguccagcuuuuaccgcaaucugcuuuggcugaccggcaaaaacgggcucuaucccaaucugucuaaguccuacgcuaacaauaaagaaaaggaggugcugguccucuggggagugcaucacccuccgaacaucggcgaucagagagcccuguaccacacagaaaacgcuuaugugagcgucguuuccucucauuacagccggcgcuucacccccgagauugccaaaagaccuaaggugcgggaccaggaagggcgcaucaauuauuacuggacgcuucuggagcccggagauacaauuaucuuugagaccaacggcaaucucauugcgccuagauucgccuuugcucugucccggggguucggaagcggcaucauuacaucuaacgcccccaugggcgaaugugacgcuaagugccagaccccgcaaggggccaucaauuccagccuuccuuuucagaacgugcaccccgucaccaucggagaguguccuaaauaugugcgcucugcgaagcugagaaugguuacaggccuccggaauauucccagcauccagucccgcgggcuguucggagccauugcuggcuuuaucgaagggggauggacgggcaugguggauggcugguacggguaucaucaccagaacgagcaaggaucuggcuacgccgcugaccagaaaagcacccagaaugccauuaacgggaucacaaauaaggucaacuccgugaucgaaaagaugaauacccaguucacagccguuggaaaagaguucaacaaacuggagagacggauggaaaaucucaacaagaagguggaugacggcuuucuggauauuuggaccuacaacgcugagcuucugguccuccuggaaaaugagcgcacgcuugacuuccacgacagcaacgugaaaaaucuguaugaaaaggucaaaucucaacucaagaacaaugcgaaagagaucgggaacggcugcuuugaguucuaccauaaguguaaugaugaaugcauggaguccgugaagaacggaacauaugacuaccccaaauauagcgaagagucuaagcugaauagagagaaaauugauggcguuaagcuggaauccauggggguguaccagauccucgccauuuauagcaccgucgcuuccucucuggugcuucugguuagccucggagccaucuccuuuuggaugugcucuaacggcagccugcagugucggaucugcauuuga

SEQ ID NO: 194067 - RNA, 1698 nt, Artificial Sequence; identical to SEQ ID NO: 194019
  derived and/or modified CDS sequence (opt5) from hemagglutinin__InfluenzaA__ABV45948

SEQ ID NO: 194068 - RNA, 1698 nt, Artificial Sequence; identical to SEQ ID NO: 193986
  derived and/or modified CDS sequence (opt5) from hemagglutinin__InfluenzaA__ABV45959

SEQ ID NO: 194069 - RNA, 1701 nt, Artificial Sequence
  derived and/or modified CDS sequence (opt5) from hemagglutinin__InfluenzaA__ABV45970
augaagaccaucauugcccugagcuacauccucugccugguguucgcucagaaacuucccggcaacgacaauuccacagccacgcugugucucgggcaccaugcggucccuaacggaaccauuguuaagacaaucaccaaugaucaaauugaggugacaaacgcuaccgaacuggugcagucuagcuccacaggcgagaucugcgacucuccgcaccagauccuugauggggaaaauuguacccugauugacgcccuccugggagauccccagugcgacggcuuucaaaacaaaaagugggaucuguucgucgagagaagcaaagccuauuccaauuguuacccuuaugacgugcccgaucaugcuucucuccggagccugguugccuccagcgggacgcuugaauuuaacaaugagucuuucaacuggaccggagugacacagaauggcaccuccagcgcuugcauccgcagaucuaacaauuccuuuuucagccggcugaacuggcucacacaccugaaguuuaaguacccugcccuuaaugucaccaugcccaacaacgagaaauucgacaagcuguauauuuggggcgugcaucacccugggacggauaaugaccagaucuuucucuacgcgcaggccucuggacgcauuacaguuuccaccaaaagaagccaacagacagugaucccgaacauuggcucccggccccgcgucagaaauaucccuucucggaucagcauuuauuggaccaucgugaagcccggggauauucugcugaucaacuccaccggaaaucucauugcuccucgcggcuacuucaaaauccagagcgggaagucuuccaucaugagaagcgacgcccccauuggaaaguguaacucugaaugcaucacaccgaauggcagcauuccuaacgacaaacccuuucagaaugugaaccggaucacguacggcgcuuguccucgcuaugucaagcaaaauacccugaaacuugccacagggaugagaaacguucccgagaagcagacccggggaauuuucggcgcgaucgccggguuuaucgaaaauggaugggagggcaugguggaugggugguacggauuccgccaccagaacuccgagggcauuggccaagcugccgaccugaaaucuacacaggcugccaucgaucagauuaaugggaagcucaacagacugaucggaaaaaccaacgaaaaguuccaucagauugagaaggaauuuagcgagguggaaggccggauccaagaccuugagaaauaugucgaggauacgaagauugaccugugguccuacaaugccgaacuccugguggcucuggagaaccagcacacaaucgaucucaccgacagcgaaaugaauaaacuguucgagaagaccaaaaagcagcuuagagaaaacgcggaggauauggggaauggaugcuuuaagaucuaucauaaaugugacaacgccugcauuggcucuauccgcaaugggacauacgaucacgacguuuaucgggacgaggcucugaacaauagauuccagauuaagggcguggaacucaaauccggauacaaggauuggauccuguggauuagcuuugccaucucuugcuuccuucugugugucgcccuccugggcuuuaucaugugggcuugccaaaaagggaacauucgcuguaauaucugcauuuga

SEQ ID NO: 194070 - RNA, 1701 nt, Artificial Sequence
  derived and/or modified CDS sequence (opt5) from hemagglutinin__InfluenzaA__ABV45981
augaagaccaucauugcccugagcuacauccucugccugguguucgcucagaaacuucccggcaacgacaauuccacagccacgcugugucucgggcaccaugcggucccuaacggaaccauuguuaagacaaucaccaaugaucaaauugaggugacaaacgcuaccgaacuggugcagucuagcuccacaggcgagaucugcgacucuccgcaccagauccuugauggggaaaauuguacccugauugacgcccuccugggagauccccagugcgacggcuuucaaaacaaaaagugggaucuguucgucgagagaagcaaagccuauuccaauuguuacccuuaugacgugcccgauuacgcuucucuccggagccugguugccuccagcgggacgcuugaauuuaacaaugagucuuucaacuggaccggagugacacagaauggcaccuccagcgcuugcauccgcagaucuaacaauuccuuuuucagccggcugaacuggcucacacaucugaaguuuaaguauccugcccuuaaugucaccaugcccaacaacgagaaauucgacaagcuguacauuuggggcgugcaccauccugggacggauaaugaccagaucuuucucuaugcgcaggccucuggacgcauuacaguuuccaccaaaagaagccaacagacagugaucccgaacauuggcucccggccccgcgucagaaauaucccuucucggaucagcauuuacuggaccaucgugaagcccggggauauucugcugaucaacuccaccggaaaucucauugcuccucgcggcuacuucaaaaucagaagcgggaagucuuccaucaugcggagcgacgcccccauuggaaaguguaacucugaaugcaucacaccgaauggcagcauuccuaacgacaaacccuuucagaaugugaaccgcaucacguauggcgcuuguccuagauacgucaagcagaauacccugaaacuugccacagggaugcggaacguucccgagaagcaaacccgcggaauuuucggcgcgaucgccggguuuaucgaaaauggaugggagggcaugguggaugggugguauggauucagacaccagaacuccgagggcauuggccaggcugccgaccugaaaucuacacaagcugccaucgaucagauuaaugggaagcucaaccggcugaucggaaaaaccaacgaaaaguuccaccagauugagaaggaauuuagcgagguggaaggcagaauccaggaccuugagaaauacgucgaggauacgaagauugaccugugguccuauaaugccgaacuccugguggcucuggagaaccaacauacaaucgaucucaccgacagcgaaaugaauaaacuguucgagaagaccaaaaagcagcuucgcgaaaacgcggaggauauggggaauggaugcuuuaagaucuaccacaaaugugacaacgccugcauuggcucuauccggaaugggacauaugaucaugacguuuacagagacgaggcucugaacaaucgcuuccagauuaagggcguggaacucaaauccggauacaaggauuggaucauuuggaucagcuuugccaucucuugcuuccugcuuugugucgcccugcucggcuuuauuaugugggcuugccagaaagggaacauccgguguaauauuugcaucuga

SEQ ID NO: 194071 - RNA, 1698 nt, Artificial Sequence
  derived and/or modified CDS sequence (opt5) from hemagglutinin__InfluenzaA__ABV82551
augaaggugaaacugcucguccugcuuugcaccuucacagccacguacgcugacaccaucuguauuggcuaucacgccaacaauagcacagauaccguugacacagugcuggagaagaacgugaccgucacacauuccgugaaucuccuggaagauucucacaacgggaaacuuugccugcucaagggaaucgcgccccugcagcugggcaauuguagcguugcuggguggauucucggaaacccugagugcgaacugcuuaucuccaaagagucuuggagcuacauuguggaaaccccgaaucccgagaacggcacguguuauccuggguacuuugccgacuaugaggaacugagagagcaacucuccucugucagcuccuucgaacgguuugagaucuuccccaaggagagcucuuggccuaaucauaccgugacaggaguuuccgccagcugcucucacaacggcgaauccagcuuuuaccgcaaucugcuuuggcugaccgagaagaacggccucuaucccaaucugucuaaauccuacgcuaacaauaaggaaaaagaggugcugguccucuggggagugcaucacccuccgaacaucggggaucagagagcccuguaccacacagaaaacgcuuaugugagcgucguuuccucucauuacagccggcgcuucacccccgagauugccaagagaccuaaagugcgggaccaggagggccgcaucaauuauuacuggacgcuucuggaacccggggauacaauuaucuuugaggcgaacggaaaucucauugccccuagauucgcuuuugcccugucccggggcuucgggagcggaaucauuaccucuaacgcucccauggacaagugugaugccaagugccagacaccgcaaggcgcgaucaauuccagccuuccuuuucagaacgugcaccccgucaccaucggcgaauguccuaaauaugugcgcucuaccaagcugagaaugguuacagggcuccggaauauucccagcauccagucccgcggacuguucggcgccauugcuggguuuaucgagggaggcuggacggggaugguggacggaugguacggcuaucaucaccagaacgaacaaggcucuggguacgccgcugaucagaaaagcacccagaaugccauuaacggaaucacaaauaaggucaacuccgugaucgagaaaaugaauacccaguucacagccguuggcaaggaguucaacaaacuggaaagacggauggagaaucucaacaagaagguggacgauggguuucuggacauuuggaccuacaacgcugaacuucugguccuccuggagaaugaacgcacgcuugacuuccacgauagcaacgugaaaaaucuguaugagaaggucaaaucucaacucaagaacaaugcgaaagagaucggaaacggcugcuuugaguucuaccauaaguguaaugacgaaugcauggaauccgugaagaacgggacauaugauuaccccaaauauagcgaggagucuaagcugaauagagagaaaauugacggcguuaagcuggaauccaugggaguguaccagauccucgccauuuauagcaccgucgcuuccucucuggugcuucugguuagccucggcgccaucuccuuuuggaugugcucuaacgggagccugcagugucggaucugcauuuga

SEQ ID NO: 194072 - RNA, 1701 nt, Artificial Sequence; identical to SEQ ID NO: 194000
  derived and/or modified CDS sequence (opt5) from hemagglutinin__InfluenzaA__ABV82562

SEQ ID NO: 194073 - RNA, 1701 nt, Artificial Sequence; identical to SEQ ID NO: 194000
  derived and/or modified CDS sequence (opt5) from hemagglutinin__InfluenzaA__ABW36168

SEQ ID NO: 194074 - RNA, 1698 nt, Artificial Sequence; identical to SEQ ID NO: 193986
  derived and/or modified CDS sequence (opt5) from hemagglutinin__InfluenzaA__ABW36179

SEQ ID NO: 194075 - RNA, 1698 nt, Artificial Sequence; identical to SEQ ID NO: 194029
  derived and/or modified CDS sequence (opt5) from hemagglutinin__InfluenzaA__ABW36190

SEQ ID NO: 194076 - RNA, 1698 nt, Artificial Sequence; identical to SEQ ID NO: 193986
  derived and/or modified CDS sequence (opt5) from hemagglutinin__InfluenzaA__ABW36201

SEQ ID NO: 194077 - RNA, 1698 nt, Artificial Sequence
  derived and/or modified CDS sequence (opt5) from hemagglutinin__InfluenzaA__ABW36212
augaaggugaaacugcucguccugcuuugcaccuucacagccacguacgcugacaccaucuguauuggcuaucacgccaacaauagcacagauaccguugacacagugcuggagaagaacgugaccgucacacauuccgugaaucuccuggaagauucucacaacgggaaacuuugccugcucaagggaaucgcgccccugcagcugggcaauuguagcguugcuggguggauucucggaaacccugagugcgaacugcuuaucuccaaagagucuuggagcuacauuguggaaaccccgaaucccgagaacggcacguguuauccuggguacuuugccgacuaugaggaacugagagagcaacucuccucugucagcuccuucgaacgguuugagaucuuccccaaggagaauagcuggccuaaccauaccgugacaggaguuucugccuccugcagccacaauggcaagucuuccuuuuaccgcaaccugcuuuggcugaccggcaaaaaugggcucuaucccaaccugagcaagucuuacgcuaauaacaaagaaaaggaggugcugguccucuggggagugcaucacccuccgaacaucggcgaucagagagcccuguaccacacagaaaaugcuuauguguccgucguuagcucccauuacucucggcgcuucacccccgagauugccaaaagaccuaaggugcgggaccaggaagggcgcaucaacuauuacuggacgcuucuggagcccggagauacaauuaucuuugaggcgaauggcaaccucauugccccuagauucgcuuuugcccugagccgggggcuuggauccggcaucauuaccagcaaugcucccauggacgaaugugaugccaagugccagacaccgcaaggcgcgaucaacucuucccugccuuuccagaaugugcaccccgucaccaucggggaguguccuaaauaugugcgcagcgccaagcucagaaugguuaccggacugcggaacauucccucuauccagagccgcggccuguuuggggcuauugccggauucaucgaaggcggguggacaggaaugguggacggcugguacggcuaucaucaccagaaugagcaaggguccggauacgcugccgaucagaaaucuacgcagaacgccauuaauggcaucaccaacaaggucaauagcgugaucgaaaagaugaacacacaguuuaccgcuguugggaaagaguucaauaaacucgagagacggauggaaaaccugaacaagaagguggacgauggauuccuugacauuuggacauacaaugcggagcugcucguccugcuugaaaacgagcgcacccuggacuuucacgauuccaaugugaaaaaccucuaugaaaaggucaaaggccaacugaagaauaacgccaaagagaucgggaauggcugcuucgaguuuuaccauaaguguaacgacgaaugcauggagagcgugaagaauggaacguaugauuaccccaaauauucugaagaguccaagcugaacagagagaaaauugacggcguuaagcucgaaagcauggggguguaccagauccuggcuauuuauucuacagucgccuccagccuugugcugcucguuucccugggagccaucucuuucuggaugugcagcaauggcucccugcagugucggaucugcauuuga

SEQ ID NO: 194078 - RNA, 1698 nt, Artificial Sequence; identical to SEQ ID NO: 193982
  derived and/or modified CDS sequence (opt5) from hemagglutinin__InfluenzaA__ABW36223

SEQ ID NO: 194079 - RNA, 1698 nt, Artificial Sequence; identical to SEQ ID NO: 193982
  derived and/or modified CDS sequence (opt5) from hemagglutinin__InfluenzaA__ABW36245

SEQ ID NO: 194080 - RNA, 1698 nt, Artificial Sequence; identical to SEQ ID NO: 193982
  derived and/or modified CDS sequence (opt5) from hemagglutinin__InfluenzaA__ABW36267

SEQ ID NO: 194081 - RNA, 1698 nt, Artificial Sequence; identical to SEQ ID NO: 193986
  derived and/or modified CDS sequence (opt5) from hemagglutinin__InfluenzaA__ABW36278

SEQ ID NO: 194082 - RNA, 1698 nt, Artificial Sequence
  derived and/or modified CDS sequence (opt5) from hemagglutinin__InfluenzaA__ABW36289
augaagcugaaacuccuggugcuucugugcaccuucacagccacguacgcugacaccaucuguauuggcuaucacgccaacaauagcacagauaccgucgacacaguucucgagaagaacgugaccgugacacauuccgucaaucugcuugaagauucucacaacgggaaacugugccuccugaagggaaucgcgccccugcagcucggcaauuguagcguggcuggguggauucugggaaacccugagugcgaacuucugaucuccaaagagucuuggagcuacauuguugaaaccccgaaucccgagaacggcacguguuauccuggguacuuugccgacuaugaggaacucagagagcaacuguccucugugagcuccuucgaacgguuugagaucuuccccaaggagagcucuuggccuaaucauaccgucacaggaguguccgccagcugcucucacaacggcaaguccagcuuuuaccgcaaucuucuguggcucaccggcaaaaacgggcuguaucccaaucugucuaaguccuacgcuaacaauaaagaaaaggagguucucgugcuguggggaguccaucacccuccgaacaucggcgaucagagagcccuuuaccacacagaaaacgcuuaugugagcguggucuccucucauuacagccggcgcuucacccccgagauugccaaaagaccuaagguucgggaccaggaagggcgcaucaauuauuacuggacgcugcucgagcccggagauacaauuaucuuugaggcgaacggcaaucugauugccccuagauucgcuuuugcccuuucccggggguucggaagcggcaucauuaccucuaacgcucccauggacgaaugugaugccaagugccagacaccgcaaggcgcgaucaauuccagccugccuuuucagaacgugcaccccgugaccaucggggaguguccuaaauauguccgcucuaccaagcucagaauggugacaggacugcggaauauucccagcauccagucccgcggccuguucggggccauugcuggauuuaucgaaggcggguggacgggaaugguugacggcugguacggcuaucaucaccagaacgagcaagggucuggauacgccgcugaucagaaaagcacccagaaugccauuaacggcaucacaaauaaggugaacuccgucaucgaaaagaugaauacccaguucacagccguggggaaagaguucaacaaacucgagagacggauggaaaaucugaacaagaagguugacgauggauuucuugacauuuggaccuacaacgcugagcugcucgugcugcuugaaaaugagcgcacgcuggacuuccacgauagcaacgucaaaaaucucuaugaaaaggugaaaucucaacugaagaacaaugcgaaagagaucggcaacgggugcuuugaguucuaccauaaguguaaugacgaaugcauggaguccgucaagaacggcacauaugauuaccccaaauauagcgaagagucuaagcugaauagagagaaaauugacggagugaagcucgaauccaugggcguuuaccagauccuggccauuuauagcaccguggcuuccucucuuguccugcucgugagccugggggccaucuccuuuuggaugugcucuaacggaagccugcagugucggaucugcauuuga

SEQ ID NO: 194083 - RNA, 1698 nt, Artificial Sequence; identical to SEQ ID NO: 193993
  derived and/or modified CDS sequence (opt5) from hemagglutinin__InfluenzaA__ABW36300

SEQ ID NO: 194084 - RNA, 1701 nt, Artificial Sequence
  derived and/or modified CDS sequence (opt5) from hemagglutinin__InfluenzaA__ABW36311
augaaggccaaacugcucgugcugcuuugcgcucugagcgccaccgacgcggauacaaucuguauuggcuaccacgcuaacaauuccacggacaccgucgauacaguucucgagaagaacgugaccgugacacauucugucaaucugcuugaagacagccacaacgggaaacugugcagacucaagggaaucgcuccccugcagcugggcaaauguuccauugccggguggauccucggaaauccugagugcgaaucucuguucagcaagaaguccuggucuuauauugccgagaccccgaacagcgaaaauggcacauguuaccccggguauuuugccgauuacgaggagcuucgggaacaacuguccagcgugucuuccuucgagcgcuuugaaaucuucccuaaagagagaagcuggcccaagcauaacguuacccggggagugacggcuucuugcucccacaaaggcaagagcucuuuuuaucgcaaucuccuguggcuuaccgagaaaaacggcuccuacccuaaucugagcaaguccuaugucaacaauaaggaaaaagaggugcucguucuguggggagugcaucaccccucuaacaucgaagaccagaagacaauuuacagaaaagagaaugccuacgucagcgugguguccagcaacuauaaccggcgcuucaccccugaaaucgcgaagagaccgaaaguccgggaucaggaggggcgcauuaauuacuauuggacacugcucgagcccggcgacaccaucauuuuugaagccaacgggaaucugaucgcuccuugguacgccuucgcucuuucuagaggauuuggcuccgggauuaucacgagcaacgccucuauggaugagugugacacaaagugccagacaccccaaggagcgaucaauagcucccugccuuuccagaacguucaccccgugaccauuggcgaauguccgaaauaugugcggucuaccaagcuccgcauggucaccggccugagaaauaucccuagcauucagucccgggggcuuuuuggagccaucgcuggcuucauugaagggggauggacaggcaugaucgaugggugguacggauaucaucaccagaacgaacaaggcagcggcuacgccgcugaccagaagucuacgcagaaugccaucaacgggauuaccaauaaagugaacuccguuaucgagaagaugaauacacaguuuaccgccgugggaaaagaguucaacaagcuggaaaaacgcauggagaaucucaacaagaaggucgaugacggcuuccuggacauuuggacauacaacgcugaacugcucgugcugcuugagaaugaaagaacccuggauagccaugacucuaacguuaaaaaucucuaugagaaggugaaaucccaacugaagaacaaugcgaaagagaucgggaacggaugcuuugaguucuaccacaaguguaauaacgagugcauggaaagcgucaagaauggcacguaugauuaccccaaauauuccgaggagucuaaacuuaaccgggaaaagauugacggggugaagcuggagagcaugggcgucuaccagauccucgccaucuauuccacaguggcuucuagccugguucugcucgugucccugggagccauuagcuuuuggaugugcucuaauggcucccuucaguguagaaucugcauuuga

SEQ ID NO: 194085 - RNA, 1701 nt, Artificial Sequence
  derived and/or modified CDS sequence (opt5) from hemagglutinin__InfluenzaA__ABW38363
augaagaccaucauugcccugagcuacauccucugccugguguucgcucagaaacuucccggcaacgacaauuccacagccacgcugugucucgggcaccaugcggucccuaacggaaccauuguuaagacaaucaccaaugaucaaauugaggugacaaacgcuaccgaacuggugcagucuagcuccacaggcgagaucugcgacucuccgcaccagauccuugauggggaaaauuguacccugauugacgcccuccugggagauccccagugcgacggcuuucaaaacaaaaagugggaucuguucgucgagagaagcaaagccuauuccaauuguuacccuuaugacgugcccgauuacgcuucucuccggagccugguugccuccagcgggacgcuugaauuuaacaaugagucuuucaacuggaccggagugacacagaauggcaccuccagcgcuugcaagcgcagaucuaacaauuccuuuuucagccggcugaacuggcucacacaucugaaguuuaaauauccugcccuuaaugucaccaugcccaacaacgagaaguucgacaaacuguacaucuggggcgugcaccauccugggacggauaaugaccagauuuuucucuaugcgcaggccucuggacgcaucacaguuuccaccaagagaagccaacagacagugauuccgaacaucggcucccggccccgcgucagaaauauuccuucucggaucagcaucuacuggaccauugugaaacccggggauauccugcugauuaacuccaccggaaaucucaucgcuccucgcggcuacuucaagauuagaagcgggaagucuuccaucaugcggagcgacgcccccaucggaaaauguaacucugaaugcauuacaccgaauggcagcaucccuaacgacaagcccuuucagaaugugaaccgcauuacguauggcgcuuguccuagauacgucaaacagaauacccugaaacuugccacagggaugcggaacguucccgagaagcaaacccgcggaaucuucggcgcgauugccggguuuaucgaaaauggaugggagggcaugguggaugggugguauggauucagacaccagaacuccgagggcaucggccaggcugccgaccugaagucuacacaagcugccauugaucagaucaaugggaaacucaaccggcugauuggaaagaccaacgaaaaguuccaccagaucgagaaagaauuuagcgagguggaaggccgcauucaggaccuugagaaguacgucgaggauacgaaaaucgaccugugguccuauaaugccgaacucauuguggcucuggagaaccaacauacaaucgaucugaccgacagcgaaaugaauaaacucuucgagagaaccaagaagcagcugcgggaaaacgcggaggauauggggaauggaugcuuuaagaucuaccacaaaugugacaacgccugcauuggcucuaucagaaaugggacauaugaucaugacguuuaccgcgacgaggcucuuaacaaucgguuccagauuaagggcguggaacugaaauccggauacaaggauuggauccucuggauuagcuuugccaucucuugcuuccugcuuugugucgcccugcucggcuuuaucaugugggcuugccagaaagggaacauuagauguaauaucugcauuuga

SEQ ID NO: 194086 - RNA, 1698 nt, Artificial Sequence
  derived and/or modified CDS sequence (opt5) from hemagglutinin__InfluenzaA__ABW39777
augaaggugaaacugcucguccugcuuugcaccuucacagccacguacgcugacaccaucuguauuggcuaucacgccaacaauagcacagauaccguugacacagugcuggagaagaacgugaccgucacacauuccgugaaucuccuggaagauucucacaacgggaaacuuugccugcucaagggaaucgcgccccugcagcugggcaauuguagcguugcuggguggauucucggaaacccugagugcgaacugcuuaucuccaaagagucuuggagcuacauuguggaaaccccgaaucccgagaacggcacguguuauccuggguacuuugccgacuaugaggaacugagagagcaacucuccucugucagcuccuucgaacgguuugagaucuuccccaaggagaauagcuggccuaaccauaccgugacaggaguuucugccuccugcagccacaauggcaagucuuccuuuuaccgcaaccugcuuuggcugaccggcaaaaaugggcucuaucccaaccugagcaagucuuacgcuaauaacaaagaaaaggaggugcugguccucuggggagugcaucacccuccgaacaucggcgaucagagagcccuguaccacacagaaaaugcuuauguguccgucguuagcucccauuacucucggcgcuucacccccgagauugccaaaagaccuaaggugcgggaccaggaagggcgcaucaacuauuacuggacgcuucuggagcccggagauacaauuaucuuugaggcgaauggcaaccucauugccccuagauucgcuuuugcccugagccgggggcuuggauccggcaucauuaccagcaaugcucccauggacgaaugugaugccaagugccagacaccgcaaggcgcgaucaacucuucccugccuuuccagaaugugcaccccgucaccaucggggaguguccuaaauaugugcgcagcgccaagcucagaaugguuaccggacugcggaacauucccucuauccagagccgcggccuguuuggggcuauugccggauucaucgaaggcggguggacaggaaugguggacggcugguacggcuaucaucaccagaaugagcaaggguccggauacgcugccgaucagaaaucuacgcagaacgccauuaauggcaucaccaacaaggucaauagcgugaucgaaaagaugaacacacaguuuaccgcuguugggaaagaguucaauaaacucgagagacggauggaaaaccugaacaagaagguggacgauggauuccuugacauuuggacauacaaugcggagcugcucguccugcuugaaaacgagcgcacccuggacuuucacgauuccaaugugaaaaaccucuaugaaaaggucaaaagccaacugaagaauaacgccaaagagaucggcaaugggugcuucgaguuuuaccauaaguguaacgacgaaugcauggagucugugaagaauggcacguaugauuaccccaaauauuccgaagagagcaagcugaacagagagaaaauugacggaguuaagcucgaaucuaugggcguguaccagauccuggcuauuuauuccacagucgccagcucccuugugcugcucguuucucugggggccaucagcuucuggaugugcuccaauggaucucugcagugucggaucugcauuuga

SEQ ID NO: 194087 - RNA, 1698 nt, Artificial Sequence; identical to SEQ ID NO: 193986
  derived and/or modified CDS sequence (opt5) from hemagglutinin__InfluenzaA__ABW39806

SEQ ID NO: 194088 - RNA, 1698 nt, Artificial Sequence; identical to SEQ ID NO: 193993
  derived and/or modified CDS sequence (opt5) from hemagglutinin__InfluenzaA__ABW39817

SEQ ID NO: 194089 - RNA, 1698 nt, Artificial Sequence
  derived and/or modified CDS sequence (opt5) from hemagglutinin__InfluenzaA__ABW39828
augaaggugaaacugcucguccugcuuugcaccuucacagccacguacgcugacaccaucuguauuggcuaucacgccaacaauagcacagauaccguugacacagugcuggagaagaacgugaccgucacacauuccgugaaucuccuggaagauaaccacaaugggaaacuuugccugcucaagggaaucgcgccccugcagcugggcaacuguucuguugcuggguggauucucggaaauccugagugcgaacugcuuaucagcaaagaguccuggucuuacauuguggaaaagccgaaccccgagaauggcaccuguuauccugggcauuuugccgacuacgaggaacugagagagcaacucagcuccgucucuagcuucgaacgguuugagaucuuccccaaggaguccagcuggccuaaccacacggugaccggaguuucugccuccugcagccauaauggcgaaucuuccuuuuauaaaaaccugcuuuggcugacaggcaagaaugggcucuaccccaaccugagcaaaucuuaugcuaauaacaaggagaaagaagugcugguccucuggggagugcaccacccuccgaacaucggcgaucagaugacccuguaccauaaggagaaugccuacguguccgucguuagcucccacuauucucgcaaguucacacccgaaauugcuaaaagaccuaaggugcgggaccaggaggggcgcaucaacuacuauuggacccuucuggagcccggagauacgauuaucuuugaagccaauggcaaccucauugcgccuagauacgccuucgcucugagccggggguuuggauccggcaucauuaauagcaacgcccccauggacgagugugaugcuaaaugccagacaccgcaaggcgccaucaauucuucccuuccuuuccagaacgugcaucccgucaccaucggggaauguccuaaguaugugcgcagcgcgaaacugagaaugguuacaggacuccggaauauucccucuauccagagccgcggccuguuuggggccauugcuggauucaucgagggcggguggaccggaaugguggacggcugguacggcuaucaccaccagaacgaacaaggguccggauacgccgcugaucagaagucuacccagaaugccauuaacggcaucacaaauaaagucaacagcgugaucgagaagaugaauacgcaguuuaccgccguugggaaggaguucaacaaacuggaaagacggauggagaaccucaauaagaaaguggacgauggauucauugacgucuggacauacaacgcugaacugcuugugcugcucgagaaugaacgcacccuggacuuucaugauuccaacgucaagaaucuuuaugagaaagugaagaaccaacugaagaauaacgcgaaagagaucggcaaugggugcuucgaauuuuaccacaaguguaacgacgagugcauggaaagcguuaaaaauggcacauaugauuaccccaaguauucugaggaguccaaacucagcagagaaaagauugacggagugaagcuggagucuaugggcgucuaccagauccuggccauuuauuccaccguggcuagcucccucguucugcuugugucucugggggccaucagcuucuggaugugcuccaacggaucucuccagugucggaucugcauuuga

SEQ ID NO: 194090 - RNA, 1698 nt, Artificial Sequence
  derived and/or modified CDS sequence (opt5) from hemagglutinin__InfluenzaA__ABW39839
augaaggugaaacugcucguccugcuuugcaccuucacagccacguacgcugacaccaucuguauuggcuaucacgccaacaauagcacagauaccguugacacagugcuggagaagaacgugaccgucacacauuccgugaaucuccuggaagauucucacaacgggaaacuuugccugcucaagggaaucgcgccccugcagcugggcaauuguagcguugcuggguggauucucggaaacccugagugcgaacugcuuaucuccaaagagucuuggagcuacauuguggaaaccccgaaucccgagaacggcacguguuauccuggguacuuugccgacuaugaggaacugagagagcaacucuccucugucagcuccuucgaacgguuugagaucuuccccaaggagagcucuuggccuaaucauaccgugacaggaguuuccgccagcugcucucacaacggcaaguccagcuuuuaccgcaaucugcuuuggcugaccggcaaaaacgggcucuaucccaaucugucuaaguccuacagcaacaauaaagaaaaggaggugcugguccucuggggagugcaucacccuccgaacaucggcgaucagagagcucuguaccacacagaaaacgccuauguguccgucguuucuagccauuacucccggcgcuucacccccgagauugcuaaaagaccuaaggugcgggaccaggaagggcgcaucaauuauuacuggacgcuucuggagcccggagauacaauuaucuuugaggccaacggcaaucucauugcgccuagauucgccuuugcucugagccggggguucggaucuggcaucauuaccuccaacgcccccaugggcgaaugugacgcuaagugccagacaccgcaaggggccaucaauagcucucuuccuuuucagaacgugcaccccgucaccaucggagaguguccuaaauaugugcgcagcgcgaagcugagaaugguuaccggccuccggaauauucccuccauccagucucgcgggcuguucggagccauugcuggcuuuaucgaagggggauggacaggcaugguggauggcugguacggguaucaucaccagaacgagcaaggaagcggcuacgccgcugaccagaaauccacgcagaaugccauuaacgggaucaccaauaaggucaacagcgugaucgaaaagaugaauacacaguucaccgccguuggaaaagaguucaacaaacuggagagacggauggaaaaucucaacaagaagguggaugacggcuuucuggauauuuggacauacaacgcugagcuucugguccuccuggaaaaugagcgcacccuugacuuccacgacucuaacgugaaaaaucuguaugaaaaggucaaaucccaacucaagaacaaugcgaaagagaucgggaacggcugcuuugaguucuaccauaaguguaaugaugaaugcauggagagcgugagaaacggaacguaugacuaccccaaguauucugaagaguccaaacugaaucgggagaagauugauggcguuaaacuggaaagcauggggguguaccagauccucgccauuuauuccacagucgcuucuagccuggugcuucugguuucccucggagccaucucuuuuuggaugugcagcaacggcucccugcaguguagaaucugcauuuga

SEQ ID NO: 194091 - RNA, 1698 nt, Artificial Sequence
  derived and/or modified CDS sequence (opt5) from hemagglutinin__InfluenzaA__ABW39850
augaaggugaaacugcucguccugcuuugcaccuucacagccacgaacgcugacaccaucuguauuggcuaccacgccaauaacagcacagauaccguugacacagugcuggagaagaaugugaccgucacacauuccgugaaccuccuggaaaauucucacaacgggaaacuuugccugcucaagggaaucgcgccccugcagcugggcaauuguagcguugcuggguggauucucggaaacccugagugcgaacugcuuaucuccaaagagucuuggagcuauauuguggaaaagccgaaucccgagaacggcaccuguuacccugggcauuuugccgauuaugaggaacugagagagcaacucuccucugucagcuccuucgaacgguuugagaucuuccccaaggagagcucuuggccuaaucacacggugaccggaguuuccgccagcugcucucauaacggcgaauccagcuuuuaccgcaaucugcuuuggcugacaggcaaaaacgggcucuaucccaaucugucuaaguccuacgcuaacaacaaagagaaggaagugcugguccucuggggagugcaccacccuccgaauaucggcgaccagaaagcccuguaucauaccgagaacgcuuacgugagcgucguuuccucucacuacagcagaaaguucacacccgaaauugccaagcggccuaaagugcgcgaucaggaggggagaaucaauuauuacuggacccuucuggagcccggagacacgauuaucuuugaagcgaacggcaaucucauugccccucgguaugcuuucgcccugucccgcggguuuggaagcggcaucauuaacucuaaugcucccauggauaagugugacgccaaaugccagacaccgcaaggcgcgaucaacuccagccuuccuuuccagaaugugcaucccgucaccaucggggaguguccuaaguacgugagaucugccaaacugcggaugguuacaggacuccgcaacauucccagcauccaguccagaggccuguuuggggcuauugccggauucaucgaaggcggguggaccggaaugguggauggcugguauggcuaccaccaccagaaugagcaagggucuggauaugcugccgaccaaaagagcacccagaacgccauuaauggcaucacaaacaaagucaauuccgugaucgaaaagaugaacacgcaguuuaccgcuguugggaaggaguucaacaaacuggagcggcgcauggaaaaucucaacaagaaaguggaugacggauucauugauaucuggacauacaaugcggagcugcuuguccugcucgaaaacgagagaacccuggacuuucaugacagcaaugugaagaaccuuuacgaaaaagucaagggccagcugaagaauaacgccaaagagauugggaauggcugcuucgaguuuuaucacaaguguaacgaugaaugcauggagucugugaaaaauggaacauacgacuaucccaaguacuccgaagagagcaaacucaaccgggagaagaucgauggcguuaagcuggaaucuauggggguguaucagauucuggcuaucuacuccaccgucgccagcucccucgugcugcuuguuucucugggagccaucagcuucuggaugugcuccaauggcucucuccagugucgcauuugcaucuga

SEQ ID NO: 194092 - RNA, 1698 nt, Artificial Sequence; identical to SEQ ID NO: 194017
  derived and/or modified CDS sequence (opt5) from hemagglutinin__InfluenzaA__ABW39861

SEQ ID NO: 194093 - RNA, 1701 nt, Artificial Sequence; identical to SEQ ID NO: 194000
  derived and/or modified CDS sequence (opt5) from hemagglutinin__InfluenzaA__ABW39872

SEQ ID NO: 194094 - RNA, 1698 nt, Artificial Sequence
  derived and/or modified CDS sequence (opt5) from hemagglutinin__InfluenzaA__ABW39883
augaaggugaaacugcucguccugcuuugcaccuucacagccacguacgcugacaccaucuguauuggcuaucacgccaacaauagcacagauaccguugacacagugcuggagaagaacgugaccgucacacauuccgugaaucuccuggaagauucucacaacgggaaacuuugccugcucaagggaaucgcgccccugcagcugggcaauuguagcguugcuggguggauucucggaaacccugagugcgaacugcuuaucuccaaagagucuuggagcuacauuguggaaaccccgaaucccgagaacggcacguguuauccuggguacuuugccgacuaugaggaacugagagagcaacucuccucugucagcuccuucgaacgguuugagaucuuccccaaggagagcucuuggccuaaucauaccgugacaggaguuuccgccagcugcucucacaacggcaaguccagcuuuuaccgcaaucugcuuuggcugaccggcaaaaacgggcucuaucccaaucugucuaaguccuacgcuaacaauaaagaaaaggaggugcugguccucuggggagugcaucacccucacaacaucggcgaucagagagcccuguaccauacagaaaacgcuuaugugagcgucguuuccucucacuacagccggcgcuucaccccggagauugccaaaagacccaaggugcgggaccaggaagggcgcaucaauuauuacuggacgcuucuggagccuggagauacaauuaucuuugaggcgaacggcaaucucauugcccccagauucgcuuuugcccugucccggggguucggaagcggcaucauuaccucuaacgcuccuauggacgaaugugaugccaagugccagacaccccaaggcgcgaucaauuccagccuuccguuucagaacgugcauccugucaccaucggggagugucccaaauaugugcgcucuaccaagcugagaaugguuacaggacuccggaauauuccuagcauccagucccgcggccuguucggggccauugcuggauuuaucgaaggcggguggacgggaaugguggacggcugguacggcuaucaccaccagaacgagcaagggucuggauacgccgcugaucagaaaagcacccagaaugccauuaacggcaucacaaauaaggucaacuccgugaucgaaaagaugaauacccaguucacagccguugggaaagaguucaacaaacuggagagacggauggaaaaucucaacaagaagguggacgauggauuucuggacauuuggaccuacaacgcugagcuucugguccuccuggaaaaugagcgcacgcuugacuuccaugauagcaacgugaaaaaucuguaugaaaaggucaaaucucaacucaagaacaaugcgaaagagaucggcaacgggugcuuugaguucuaccacaaguguaaugacgaaugcauggaguccgugaagaacggcacauaugauuaccccaaauauagcgaagagucuaagcugaauagagagaaaauugacggaguuaagcuggaauccaugggcguguaccagauccucgccauuuauagcaccgucgcuuccucucuggugcuucugguuagccucggggccaucuccuuuuggaugugcucuaacggaagccugcagugucggaucugcauuuga

SEQ ID NO: 194095 - RNA, 1698 nt, Artificial Sequence; identical to SEQ ID NO: 194027
  derived and/or modified CDS sequence (opt5) from hemagglutinin__InfluenzaA__ABW39894

SEQ ID NO: 194096 - RNA, 1698 nt, Artificial Sequence; identical to SEQ ID NO: 193982
  derived and/or modified CDS sequence (opt5) from hemagglutinin__InfluenzaA__ABW39905

SEQ ID NO: 194097 - RNA, 1698 nt, Artificial Sequence; identical to SEQ ID NO: 193986
  derived and/or modified CDS sequence (opt5) from hemagglutinin__InfluenzaA__ABW39927

SEQ ID NO: 194098 - RNA, 1701 nt, Artificial Sequence
  derived and/or modified CDS sequence (opt5) from hemagglutinin__InfluenzaA__ABW39938
augaagaccaucauugcccugagcuacauccucugccugguguucgcucagaaaauucccggcaacgacaauuccacagccacgcuuugucuggggcaccaugcggucccuaacggaaccaucguuaagacaauuaccaaugaucaaaucgaggugacaaacgcuaccgaacucgugcagucuagcuccacaggcgagaucugcgacucuccgcaccagauucuggauggggaaaauuguacccuuaucgacgcccugcucggagauccccagugcgacggcuuucaaaacaaaaagugggaucuguucgucgagagaagcaaagccuauuccaauuguuacccuuaugacgugcccgauuacgcuucucugcggagccucguugccuccagcgggacgcuggaauuuaacaaugagucuuucaacuggaccggagugacacagaauggcaccuccagcgcuugcauucgcagaucuaacaauuccuuuuucagccggcuuaacuggcugacacaucucaaguuuaaguauccugcccugaaugucaccaugcccaacaacgagaaauucgacaaacuuuacaucuggggcgugcaccauccugggacggauaaugaccagauuuuucuguaugcgcaggccucuggacgcaucacaguuuccaccaagagaagccaacagacagugauuccgaacaucggcucccggccccgcgucagaaauaucccuucucggauuagcaucuacuggaccauugugaagcccggggauauccuccugauuaacuccaccggaaaucugaucgcuccucgcggcuacuucaaaaucagaagcgggaagucuuccauuaugcggagcgacgcccccaucggaaaguguaacucugaaugcauuacaccgaauggcagcaucccuaacgacaaacccuuucagaaugugaaccgcauuacguauggcgcuuguccuagauacgucaagcagaauacccucaaacuggccacagggaugcggaacguucccgagaagcaaacccgcggaaucuucggcgcgaucgccggguuuauugaaaauggaugggagggcaugguggaugggugguauggauucagacaccagaacuccgagggcaucggccaggcugccgaccuuaaaucuacacaagcugccauugaucagaucaaugggaagcugaaccggcucauuggaaaaaccaacgaaaaguuccaccagaucgagaaggaauuuagcgagguggaaggccgcauucaggaccuggagaaauacgucgaggauacgaagaucgaccuuugguccuauaaugccgaacugcucguggcucuggagaaccaacauacaaucgaucugaccgacagcgaaaugaauaaacucuucgagaagaccaaaaagcagcugagagaaaacgcggaggauauggggaauggaugcuuuaagauuuaccacaaaugugacaacgccugcaucggcucuauucggaaugggacauaugaucaugacgcuuacagagacgaggcccuuaacaaucgcuuccagaucaagggcguugaacugaaauccggauacaaggauuggauucucuggaucagcuuugccaucucuugcuuccugcuuuguguggcucugcucggcuuuauuaugugggccugccagaaagggaacauccgguguaauauuugcaucuga

SEQ ID NO: 194099 - RNA, 1698 nt, Artificial Sequence; identical to SEQ ID NO: 193986
  derived and/or modified CDS sequence (opt5) from hemagglutinin__InfluenzaA__ABW39949

SEQ ID NO: 194100 - RNA, 1698 nt, Artificial Sequence; identical to SEQ ID NO: 194027
  derived and/or modified CDS sequence (opt5) from hemagglutinin__InfluenzaA__ABW39960

SEQ ID NO: 194101 - RNA, 1698 nt, Artificial Sequence; identical to SEQ ID NO: 193982
  derived and/or modified CDS sequence (opt5) from hemagglutinin__InfluenzaA__ABW39982

SEQ ID NO: 194102 - RNA, 1698 nt, Artificial Sequence; identical to SEQ ID NO: 194002
  derived and/or modified CDS sequence (opt5) from hemagglutinin__InfluenzaA__ABW39993

SEQ ID NO: 194103 - RNA, 1698 nt, Artificial Sequence; identical to SEQ ID NO: 193982
  derived and/or modified CDS sequence (opt5) from hemagglutinin__InfluenzaA__ABW40004

SEQ ID NO: 194104 - RNA, 1698 nt, Artificial Sequence; identical to SEQ ID NO: 194028
  derived and/or modified CDS sequence (opt5) from hemagglutinin__InfluenzaA__ABW40015

SEQ ID NO: 194105 - RNA, 1701 nt, Artificial Sequence; identical to SEQ ID NO: 194059
  derived and/or modified CDS sequence (opt5) from hemagglutinin__InfluenzaA__ABW40026

SEQ ID NO: 194106 - RNA, 1698 nt, Artificial Sequence; identical to SEQ ID NO: 193982
  derived and/or modified CDS sequence (opt5) from hemagglutinin__InfluenzaA__ABW40037

SEQ ID NO: 194107 - RNA, 1698 nt, Artificial Sequence
  derived and/or modified CDS sequence (opt5) from hemagglutinin__InfluenzaA__ABW40048
augaaggugaaacugcucguccugcuuugcaccuucacagccacguacgcugacaccaucuguauuggcuaucacgccaacaauagcacagauaccguugacacagugcuggagaagaacgugaccgucacacauuccgugaaucuccuggaagauucucacaacgggaaacuuugccugcucaagggaaucgcgccccugcagcugggcaauuguagcguugcuggguggauucucggaaacccugagugcgaacugcuuaucuccaaagagucuuggagcuacauuguggaaaccccgaaucccgagaacggcacguguuauccuggguacuuugccgacuaugaggaacugagagagcaacucuccucugucagcuccuucgaacgguuugagaucuuccccaaggagagcucuuggccuaaucauaccgugacaggaguuuccgccagcugcucucacaacggcaaguccagcuuuuaccgcaaucugcuuuggcugaccggcaaaaacgggcucuaucccaaucugucuaaguccuacgcuaacaauaaagaaaaggaggugcugguccucuggggagugcaucacccuccgaacaucggcgaucagaaagcccuguaccacacagaaaacgcuuaugugagcgucguuuccucucauuacagcagacgguucacccccgagauugccaagcgcccuaaggugagagaccaggaagggcggaucaauuauuacuggacgcuucuggagcccggagauacaauuaucuuugaggcgaacggcaaucucauugccccucgcuucgcuuuugcccuguccagaggguucggaagcggcaucauuaccucuaacgcucccauggacgaaugugaugccaaaugccagacaccgcaaggcgcgaucaauuccagccuuccuuuucagaacgugcaccccgucaccaucggggaguguccuaaguaugugcggucuaccaaacugcgcaugguuacaggacucagaaauauucccagcauccagucccggggccuguucggggccauugcuggauuuaucgaaggcggguggacgggaaugguggacggcugguacggcuaucaucaccagaacgagaaggggucuggauacgccgcugaucagaaaagcacccaaaaugccauuaacggcaucacaaauaaggucaacuccgugaucgaaaagaugaauacccaguucacagccguugggaaagaguucaacaagcuggagcgcagaauggaaaaucucaacaaaaagguggacgauggauuucuggacauuuggaccuacaacgcugagcuucugguccuccuggaaaaugagcggacgcuugacuuccacgauagcaacgugaaaaaucuguaugaaaaggucaaaucucagcucaagaacaaugcgaaggagaucggcaacgggugcuuugaguucuaccauaaauguaaugacgaaugcauggaguccgugaagaacggcacauaugauuaccccaaauauagcgaagagucuaagcugaaucgcgagaaaauugacggaguuaagcuggaauccaugggcguguaccaaauccucgccauuuauagcaccgucgcuuccucucuggugcuucugguuagccucggggccaucuccuuuuggaugugcucuaacggaagccugcaguguagaaucugcauuuga

SEQ ID NO: 194108 - RNA, 1698 nt, Artificial Sequence; identical to SEQ ID NO: 193986
  derived and/or modified CDS sequence (opt5) from hemagglutinin__InfluenzaA__ABW40059

SEQ ID NO: 194109 - RNA, 1698 nt, Artificial Sequence
  derived and/or modified CDS sequence (opt5) from hemagglutinin__InfluenzaA__ABW40070
augaaggugaaacugcucguccugcuuugcaccuucacagccacguacgcugacaccaucuguauuggcuaucacgccaacaauagcacagauaccguugacacagugcuggagaagaacgugaccgucacacauuccgugaaucuccuggaaaacucucacaaugggaaacuuugccugcucaagggaaucgcgccccugcagcugggcaacuguagcguugcuggguggauucucggaaauccugagugcgaacugcuuaucuccaaagagucuuggagcuacauuguggaaaagccgaaccccgagaauggcaccuguuauccugggcauuuugccgauuacgaggaacugagagagcaacucuccucugucagcuccuucaagcgguuugaaaucuuccccaaagagagcucuuggccuaaccacacggugaccggaguuuccgccagcugcucucauaauggcgaguccagcuuuuaucgcaaccugcuuuggcugacaggcaagaaugggcucuaccccaaccugucuaaauccuaugcuaauaacaaggaaaaagaggugcugguccucuggggagugcaccacccuccgaacaucggcgaccagaaggcccuguaccauaccgaaaaugcuuacgugagcgucguuuccucucacuauagcagaaaguucacacccgagauugccaaacggccuaaggugcgcgaucaggaagggagaaucaacuacuauuggacccuucuggagcccggagacacgauuaucuuugaggcgaauggcaaccucauugccccucgguacgcuuucgcccugucccgcggguuuggaagcggcaucauuaauucuaacgcucccauggauaaaugugacuccaagugccagacaccgcaaggcgccaucaauagcucucuuccuuuccagaacgugcaucccgucaccaucggggaauguccuaaauaugugagaagcgcgaagcugcggaugguuacaggacuccgcaauauucccuccauccagucuagaggccuguuuggggccauugcuggauucaucgagggcggguggaccggaaugguggauggcugguacggcuaucaccaccagaacgaacaagggagcggauacgccgcugaccagaaauccacccagaaugccauuaacggcaucacaaauaaggucaacagcgugaucgagaagaugaauacgcaguuuaccgccguugggaaagaguucaacaagcuggaacggcgcauggagaaccucaauaaaaagguggaugacggauucauugauaucuggacauacaacgcugaacugcuuguccugcucgagaaugaaagaacccuggacuuucaugacucuaacgugaaaaaucuuuaugagaaggucaagucccaacugaaaaacaaugcgaaggaaauuggcaacgggugcuucgaguuuuaccacaaauguaaugaugagugcauggaaagcgugaagaacggcacauaugacuaccccaaauauucugaggaauccaagcucaaucgggagaagaucgauggaguuaaacuggagagcaugggcguguaccagauucuggccaucuauuccaccgucgcuucuagccucgugcugcuuguuucccugggggccaucucuuucuggaugugcagcaacggaucccuccagugucgcauuugcaucuga

SEQ ID NO: 194110 - RNA, 1701 nt, Artificial Sequence; identical to SEQ ID NO: 194000
  derived and/or modified CDS sequence (opt5) from hemagglutinin__InfluenzaA__ABW40081

SEQ ID NO: 194111 - RNA, 1698 nt, Artificial Sequence
  derived and/or modified CDS sequence (opt5) from hemagglutinin__InfluenzaA__ABW40092
augaaggugaaacugcucauccugcuuugcaccuucacagccacguacgcugacaccauuuguaucggcuaucacgccaacaauagcacagauaccgucgacacaguucuggagaagaacgugaccgugacacauuccgucaaucuccuggaagauucucacaacgggaaacuuugccugcucaagggaauugcgccccugcagcugggcaauuguagcguggcuggguggauccucggaaacccugagugcgaacugcuuauuuccaaagagucuuggagcuacaucguugaaaccccgaaucccgagaacggcacguguuauccuggguacuuugccgacuaugaggaacugagagagcaacucuccucugugagcuccuucaagcgguuugaaaucuuccccaaggagagcucuuggccuaaucauaccgucacaggaguguccgccagcugcucucacaacggcaaauccagcuuuuaccgcaaucugcuuuggcugaccggcaagaacgggcucuaucccaaucugucuaaauccuacgcuaacaauaaggagaaagaaguucuggugcucuggggaguccaucacccuccgaacauuggcgaucagagagcccuguaccacacagagaacgcuuaugugagcguggucuccucucauuacagccggcgcuucacccccgaaaucgccaagagaccuaagguucgggaccaggaggggcgcauuaauuauuacuggacgcuucuggaacccggagauacaaucauuuuugaggcgaacggcaaucucaucgccccuagauucgcuuuugcccugucccggggguucggaagcggcauuaucaccucuaacgcucccauggacgagugugaugccaaaugccagacaccgcaaggcgcgaucaauuccagccuuccuuuucagaacgugcaccccgugaccauuggggaauguccuaaguauguccgcucuaccaaacugagaauggugacaggacuccggaauauccccagcauucagucccgcggccuguucggggccaucgcuggauuuauugagggcggguggacgggaaugguugacggcugguacggcuaucaucaccagaacgaacaagggucuggauacgccgcugaucaaaagagcacccagaaugccaucaacggcaucacaaauaaagugaacuccgucauugagaagaugaauacccaguucacagccguggggaaagaguucaacaagcuggaaagacggauggagaaucucaacaagaaaguugacgauggauuucuggacaucuggaccuacaacgcugaacuucuggugcuccuggagaaugaacgcacgcuugacuuccacgauagcaacgucaagaaucuguaugagaaagugaagucucagcucaaaaacaaugcgaaggaaauuggcaacgggugcuuugaguucuaccauaaguguaaugacgagugcauggaauccgucaaaaacggcacauaugauuaccccaaguauagcgaggaaucuaaacugaauagagagaagaucgacggagugaaacuggaguccaugggcguuuaccagauucucgccaucuauagcaccguggcuuccucucugguccuucuggugagccucggggccaucuccuuuuggaugugcucuaacggaagccugcagugucggauuugcaucuga

SEQ ID NO: 194112 - RNA, 1698 nt, Artificial Sequence; identical to SEQ ID NO: 194029
  derived and/or modified CDS sequence (opt5) from hemagglutinin__InfluenzaA__ABW40103

SEQ ID NO: 194113 - RNA, 1698 nt, Artificial Sequence
  derived and/or modified CDS sequence (opt5) from hemagglutinin__InfluenzaA__ABW40114
augaaggugaaacugcucauccugcuuugcaccuucacagccacguacgcugacaccauuuguaucggcuaucacgccaacaauagcacagauaccgucgacacaguucuggagaagaacgugaccgugacacauuccgucaaucuccuggaagauucucacaacgggaaacuuugccugcucaagggaauugcgccccugcagcugggcaauuguagcguggcuggguggauccucggaaacccugagugcgaacugcuuauuuccaaagagucuuggagcuacaucguugaaaccccgaaucccgagaacggcacguguuauccuggguacuuugccgacuaugaggaacugagagagcaacucuccucugugagcuccuucgaacgguuugagaucuuccccaaggagagcucuuggccuaaucauaccgucacaggaguguccaccagcugcucucacaacggcaaguccagcuuuuaccgcaaucugcuuuggcugacaggcaaaaacgggcucuaucccaaucugucuaaguccuacgccaacaauaaagaaaaggagguucuggugcucuggggaguccaucacccuccgaacauuggcaaccagagagcucuguaccacaccgaaaaugccuaugugagcguggucuccucucauuacagccggcgcuucacgcccgagaucgcuaaaagaccuaagguucgggaucaggaagggcgcauuaacuauuacuggacacuucuggagcccggagacaccaucauuuuugaggccaauggcaaccucaucgcgccuagauucgccuuugcucugucccggggguucggaagcggcauuaucacaucuaaugcccccauggaugaaugugacgcuaagugccagaccccgcaaggcgccaucaacuccagccuuccuuuucagaaugugcaccccgugaccauuggggaguguccuaaauauguccgcucuacaaagcugagaauggugacgggacuccggaacauccccagcauucagucccgcggccuguucggggcgaucgccggauuuauugaaggcggguggaccggaaugguugauggcugguacggcuaucaucaccagaaugagcaagggucuggauacgcugccgaccagaaaagcacacagaacgcuaucaauggcaucaccaacaaggucaauuccgugauugaaaagaugaacacacaguucaccgccguggggaaagaguucaauaaacuggagagacggauggaaaaccucaacaagaagguugaugacggauuucuggauaucuggacguacaaugccgagcuucuggugcuccuggaaaacgagcgcacacuugacuuccacgacagcaaugucaaaaaccuguaugaaaaggugaaaucucaacucaagaauaacgcuaaagagauuggcaaugggugcuuugaguucuaccauaaguguaacgaugaaugcauggaguccgucaagaauggcaccuaugacuaccccaaauauagcgaagagucuaagcugaacagagagaaaaucgauggagugaagcuggaauccaugggcguuuaccagauucucgcgaucuauagcaccguggccuccucucugguccuucuggugagccucggggcuaucuccuuuuggaugugcucuaauggaagccugcagugucggauuugcaucuga

SEQ ID NO: 194114 - RNA, 1698 nt, Artificial Sequence; identical to SEQ ID NO: 193982
  derived and/or modified CDS sequence (opt5) from hemagglutinin__InfluenzaA__ABW40125

SEQ ID NO: 194115 - RNA, 1701 nt, Artificial Sequence; identical to SEQ ID NO: 194000
  derived and/or modified CDS sequence (opt5) from hemagglutinin__InfluenzaA__ABW40136

SEQ ID NO: 194116 - RNA, 1698 nt, Artificial Sequence; identical to SEQ ID NO: 194017
  derived and/or modified CDS sequence (opt5) from hemagglutinin__InfluenzaA__ABW40147

SEQ ID NO: 194117 - RNA, 1698 nt, Artificial Sequence; identical to SEQ ID NO: 193986
  derived and/or modified CDS sequence (opt5) from hemagglutinin__InfluenzaA__ABW40158

SEQ ID NO: 194118 - RNA, 1698 nt, Artificial Sequence; identical to SEQ ID NO: 193986
  derived and/or modified CDS sequence (opt5) from hemagglutinin__InfluenzaA__ABW40180

SEQ ID NO: 194119 - RNA, 1701 nt, Artificial Sequence; identical to SEQ ID NO: 194000
  derived and/or modified CDS sequence (opt5) from hemagglutinin__InfluenzaA__ABW40191

SEQ ID NO: 194120 - RNA, 1698 nt, Artificial Sequence; identical to SEQ ID NO: 194002
  derived and/or modified CDS sequence (opt5) from hemagglutinin__InfluenzaA__ABW40202

SEQ ID NO: 194121 - RNA, 1698 nt, Artificial Sequence; identical to SEQ ID NO: 193982
  derived and/or modified CDS sequence (opt5) from hemagglutinin__InfluenzaA__ABW40213

SEQ ID NO: 194122 - RNA, 1698 nt, Artificial Sequence; identical to SEQ ID NO: 193982
  derived and/or modified CDS sequence (opt5) from hemagglutinin__InfluenzaA__ABW40224

SEQ ID NO: 194123 - RNA, 1698 nt, Artificial Sequence; identical to SEQ ID NO: 193986
  derived and/or modified CDS sequence (opt5) from hemagglutinin__InfluenzaA__ABW40235

SEQ ID NO: 194124 - RNA, 1701 nt, Artificial Sequence
  derived and/or modified CDS sequence (opt5) from hemagglutinin__InfluenzaA__ABW40246
augaagaccaucauugcccugagcuacauccucugccugguguucgcucagaaacuucccggcaacgacaauuccacagccacgcugugucucgggcaccaugcggucccuaacggaaccauuguuaagacaaucaccaaugaucaaauugaggugacaaacgcuaccgaacuggugcagucuagcuccacaggcgagaucugcgacucuccgcaccagauccuugauggggaaaauuguacccugauugacgcccuccugggagauccccagugcgacggcuuucaaaacaaaaagugggaucuguucgucgagagaagcaaagccuauuccaauuguuacccuuaugacgugcccgauuacgcuucucuccggagccugguugccuccagcgggacgcuugaauuuaacaaugagucuuucaacuggaccggagugacacagaauggcaccuccagcgcuugcauccgcagaucuaacaauuccuuuuucagccggcugaacuggcucacacaucugaaguuuaaguauccugcccuuaaugucaccaugcccaacaacgagaaauucgacaagcuguacauuuggggcgugcaccauccugggacggauaaugaccagguuuuucucuaugcgcaggccucuggacgcaucacaguguccaccaaaagaagccaacagacagucauuccgaacaucggcucccggccccgcgugagaaauauuccuucucggaucagcaucuacuggaccauugugaagcccggggauauccugcugauuaacuccaccggaaaucucaucgcuccucgcggcuacuuccggauuagaagcgggaaaucuuccaucaugcgcagcgacgcccccaucggaaaguguaacucugaaugcauuacaccgaauggcagcaucccuaacgacaagcccuuucagaaugucaacagaauuacguauggcgcuuguccucgguacguuaaacagaauacccugaaacuugccacagggaugcgcaacgugcccgagaagcaaaccagaggaaucuucggcgcgauugccggguuuaucgaaaauggaugggagggcaugguggaugggugguauggauuccggcaccagaacuccgagggcaucggccaggcugccgaccugaagucuacacaagcugccauugaucagaucaaugggaaacucaacagacugauuggaaagaccaacgaaaaauuccaccagaucgagaaggaauuuagcgaggucgaaggccgcauucaggaccuugagaaguacguggaggauacgaaaaucgaccugugguccuauaaugccgaacuccugguugcucuggagaaccaacauacaauugaucucaccgacagcgaaaugaauaagcuguucgagaaaaccaagaaacagcuucgggaaaacgcggaggauauggggaauggaugcuuuaagaucuaccacaagugugacaacgccugcaucggcucuauuagaaaugggacauaugaucaugacguguaccgcgacgaggcucugaacaaucgguuccagaucaaaggcgucgaacucaaguccggauacaaagauuggauucuguggaucagcuuugccauuucuugcuuccuucuguguguggcccuccugggcuuuaucaugugggcuugccagaaggggaacaucagauguaauauuugcaucuga

SEQ ID NO: 194125 - RNA, 1698 nt, Artificial Sequence
  derived and/or modified CDS sequence (opt5) from hemagglutinin__InfluenzaA__ABW40257
augaaggugaaacugcucauccugcuuugcaccuucacagccacguacgcugacaccauuuguaucggcuaucacgccaacaauagcacagauaccgucgacacaguucuggagaagaacgugaccgugacacauuccgucaaucuccuggaagauucucacaacgggaaacuuugccugcucaagggaauugcgccccugcagcugggcaauuguagcguggcuggguggauccucggaaacccugagugcgaacugcuuauuuccaaagagucuuggagcuacaucguugaaaccccgaaucccgagaacggcacguguuauccuggguacuuugccgacuaugaggaacugagagagcaacucuccucugugagcuccuucgaacgguuugagaucuuccccaaggagagcucuuggccuaaucauaccgucacaggaguguccgccagcugcucucacaacggcaaguccagcuuuuaccgcaaucugcuuuggcugaccggcaaaaacgggcucuaucccaaucugucuaaguccuacgcuaacaauaaagaaaaggagguucuggugcucuggggaguccaucacccuccgaacauuggcgaucagagagcccuguaccacacagaaaacgcuuaugugagcguggucuccucucauuacagccggcgcuucacccccgagaucgccaaaagaccuaagguucgggaccaggaagggcgcauuaauuauuacuggacgcuucuggagcccggagauacaaucauuuuugaggcgaacggcaaucucaucgccccuagauucgcuuuugcccugucccggggguucggaagcggcauuaucaccucuaacgcucccauggacgaaugugaugccaagugccagacaccgcaaggcgcgaucaauuccagccuuccuuuucagaacgugcaccccgugaccauuggggaguguccuaaauauguccgcucuaccaagcugagaauggugacaggacuccggaauauccccagcauucagucccgcggccuguucggggccaucgcuggauuuauugaaggcggguggacgggaaugguugacggcugguacggcuaucaucaccagaacgagcaagggucuggauacgccgcugaucagaaaagcacccagaaugccaucaacggcaucacaaauaaggugaacuccauuaucgaaaagaugaauacccaguucacagccgucgggaaagaguucaacaaacuggagagacggauggaaaaucucaacaagaagguggacgauggauuucuggacauuuggaccuacaacgcugagcuucugguucuccuggaaaaugagcgcacgcuugacuuccacgauagcaacgugaaaaaucuguaugaaaaggucaaaucucaacucaagaacaaugcgaaagagaucggcaacgggugcuuugaguucuaccauaaguguaaugacgaaugcauggaguccgugaagaacggcacauaugauuaccccaaauauagcgaagagucuaagcugaauagagagaaaauugacggagucaagcuggaauccaugggcguguaccagauccucgccaucuauagcaccguugcuuccucucuggugcuucuggucagccucggggccauuuccuuuuggaugugcucuaacggaagccugcagugucggaucugcauuuga

SEQ ID NO: 194126 - RNA, 1701 nt, Artificial Sequence; identical to SEQ ID NO: 194059
  derived and/or modified CDS sequence (opt5) from hemagglutinin__InfluenzaA__ABW40268

SEQ ID NO: 194127 - RNA, 1698 nt, Artificial Sequence
  derived and/or modified CDS sequence (opt5) from hemagglutinin__InfluenzaA__ABW40312
augaaggugaaacugcucguccugcuuugcaccuucacagccacguacgcugacaccaucuguauuggcuaucacgccaacaauagcacagauaccguugacacagugcuggagaagaacgugaccgucacacauuccgugaaucuccuggaagauucucacaacgggaaacuuugccugcucaagggaaucgcgccccugcagcugggcaauuguagcguugcuggguggauucucggaaacccugagugcgaacugcuuaucuccaaagagucuuggagcuacauuguggaaaccccgaaucccgagaacggcacguguuauccuggguacuuugccgacuaugaggaacugagagagcaacucuccucugucagcuccuucgaacgguuugagaucuuccccaaggagagcucuuggccuaaucauaccgugacaggaguuuccgccagcugcucucacaacggccgcuccagcuuuuacagaaaucugcuuuggcugaccggcaagaacgggcucuaucccaaucugucuaaauccuacgcuaacaauaaggaaaaagaggugcugguccucuggggagugcaucacccuccgaacaucggcgaucagcgggcccuguaccacacagaaaacgcuuaugugagcgucguuuccucucauuacagccgcagauucacccccgagauugccaagcggccuaaagugcgcgaccaggaagggagaaucaauuauuacuggacgcuucuggagcccggagauacaauuaucuuugaggcgaacggcaaucucauugccccucgguucgcuuuugcccugucccgcggguucggaagcggcaucauuaccucuaacgcucccauggacgaaugugaugccaagugccagacaccgcaaggcgcgaucaauuccagccuuccuuuucagaacgugcaccccgucaccaucggggaguguccuaaguaugugagaucuaccaaacugcggaugguuacaggacuccgcaauauucccagcauccaguccagaggccuguucggggccauugcuggauuuaucgaaggcggguggacgggaaugguggacggcugguacggcuaucaucaccagaacgagcaagggucuggauacgccgcugaucaaaagagcacccagaaugccauuaacggcaucacaaauaaagucaacuccgugaucgaaaagaugaauacccaguucacagccguugggaaagaguucaacaagcuggagcggcgcauggaaaaucucaacaaaaagguggacgauggauuucuggacauuuggaccuacaacgcugagcuucugguccuccuggaaaaugagagaacgcuugacuuccacgauagcaacgugaagaaucuguaugaaaaagucaagucucagcucaaaaacaaugcgaaggagaucggcaacgggugcuuugaguucuaccauaaauguaaugacgaaugcauggaguccgugaagaacggcacauaugauuaccccaaguauagcgaagagucuaaacugaaucgggagaagauugacggaguuaaacuggaauccaugggcguguaccagauccucgccauuuauagcaccgucgcuuccucucuggugcuucugguuagccucggggccaucuccuuuuggaugugcucuaacggaagccugcaguguagaaucugcauuuga

SEQ ID NO: 194128 - RNA, 1701 nt, Artificial Sequence; identical to SEQ ID NO: 194000
  derived and/or modified CDS sequence (opt5) from hemagglutinin__InfluenzaA__ABW40323

SEQ ID NO: 194129 - RNA, 1698 nt, Artificial Sequence; identical to SEQ ID NO: 194028
  derived and/or modified CDS sequence (opt5) from hemagglutinin__InfluenzaA__ABW40334

SEQ ID NO: 194130 - RNA, 1698 nt, Artificial Sequence; identical to SEQ ID NO: 194028
  derived and/or modified CDS sequence (opt5) from hemagglutinin__InfluenzaA__ABW40345

SEQ ID NO: 194131 - RNA, 1698 nt, Artificial Sequence
  derived and/or modified CDS sequence (opt5) from hemagglutinin__InfluenzaA__ABW40356
augaaggugaaacugcucguccugcuuugcaccuucacagccacguacgcugacaccaucuguauuggcuaucacgccaacaauagcacagauaccguugacacagugcuggagaagaacgugaccgucacacauuccgugaaucuccuggaagauucucacaacgggaaacuuugccugcucaagggaaucgcgccccugcagcugggcaauuguagcguugcuggguggauucucggaaacccugagugcgaacugcuuaucuccaaagagucuuggagcuacauuguggaaaccccgaaucccgagaacggcacguguuauccuggguacuuugccgacuaugaggaacugagagagcaacucuccucugucagcuccuucgaacgguuugagaucuuccccaaggagagcucuuggccuaaucauaccgugacaggaguuuccgccagcugcucucacaacggcaaguccagcuuuuaccgcaaucugcuuuggcugaccggcaaaaacgggcucuaucccaaucugucuaaguccuacgcuaacaauaaagaaaaggaggugcuggucauguggggagugcaucacccuccgaacaucggcgaucagagagcccucuaccacacagaaaacgcuuaugugagcgucguuuccucucauuacagccggcgcuucacccccgagauugccaaaagaccuaaggugcgggaccaggaagggcgcaucaauuauuacuggacgcugcuugagcccggagauacaauuaucuuugaggcgaacggcaaucugauugccccuagauucgcuuuugcccucucccggggguucggaagcggcaucauuaccucuaacgcucccaugggcgaaugugacgccaagugccagacaccgcaaggggcgaucaauuccagccugccuuuucagaacgugcaccccgucaccaucggagaguguccuaaauaugugcgcucugccaaacuuagaaugguuaccggccugcggaauauucccagcauccagucccgcggacucuucggggcuauugccggcuuuaucgaagggggauggacaggcaugguggauggcugguacggguaucaucaccagaacgagcaaggaucuggcuacgcugccgaccagaaaagcacgcagaaugccauuaacgggaucaccaauaaggucaacuccgugaucgaaaagaugaauacacaguucaccgcuguuggaaaggaguucaacaaacuggagagacggauggaaaaucugaacaagaagguggaugacggcuuucucgauauuuggacauacaacgcggagcugcuuguccugcucgaaaaugagcgcacccuggacuuccacgacagcaacgugaaaaaucuuuaugaaaaggucaaaucucaacugaagaacaaugccaaagagaucgggaacggcugcuuugaguucuaccauaaguguaaugaugaaugcauggaguccgugaagaacggaacguaugacuaccccaaauauagcgaagagucuaagcucaauagagagaaaauugauggcguuaagcuggaauccauggggguguaccagauccuggcuauuuauagcacagucgccuccucucucgugcugcuuguuagccugggagccaucuccuuuuggaugugcucuaacggcagccuccagugucggaucugcauuuga

SEQ ID NO: 194132 - RNA, 1698 nt, Artificial Sequence; identical to SEQ ID NO: 193986
  derived and/or modified CDS sequence (opt5) from hemagglutinin__InfluenzaA__ABW40367

SEQ ID NO: 194133 - RNA, 1701 nt, Artificial Sequence; identical to SEQ ID NO: 194000
  derived and/or modified CDS sequence (opt5) from hemagglutinin__InfluenzaA__ABW40378

SEQ ID NO: 194134 - RNA, 1698 nt, Artificial Sequence; identical to SEQ ID NO: 193986
  derived and/or modified CDS sequence (opt5) from hemagglutinin__InfluenzaA__ABW40389

SEQ ID NO: 194135 - RNA, 1698 nt, Artificial Sequence; identical to SEQ ID NO: 193982
  derived and/or modified CDS sequence (opt5) from hemagglutinin__InfluenzaA__ABW40400

SEQ ID NO: 194136 - RNA, 1698 nt, Artificial Sequence; identical to SEQ ID NO: 193982
  derived and/or modified CDS sequence (opt5) from hemagglutinin__InfluenzaA__ABW40411

SEQ ID NO: 194137 - RNA, 1698 nt, Artificial Sequence; identical to SEQ ID NO: 193982
  derived and/or modified CDS sequence (opt5) from hemagglutinin__InfluenzaA__ABW40422

SEQ ID NO: 194138 - RNA, 1698 nt, Artificial Sequence; identical to SEQ ID NO: 194028
  derived and/or modified CDS sequence (opt5) from hemagglutinin__InfluenzaA__ABW40433

SEQ ID NO: 194139 - RNA, 1698 nt, Artificial Sequence; identical to SEQ ID NO: 194002
  derived and/or modified CDS sequence (opt5) from hemagglutinin__InfluenzaA__ABW40444

SEQ ID NO: 194140 - RNA, 1698 nt, Artificial Sequence; identical to SEQ ID NO: 194019
  derived and/or modified CDS sequence (opt5) from hemagglutinin__InfluenzaA__ABW40455

SEQ ID NO: 194141 - RNA, 1698 nt, Artificial Sequence; identical to SEQ ID NO: 193986
  derived and/or modified CDS sequence (opt5) from hemagglutinin__InfluenzaA__ABW40466

SEQ ID NO: 194142 - RNA, 1698 nt, Artificial Sequence; identical to SEQ ID NO: 193986
  derived and/or modified CDS sequence (opt5) from hemagglutinin__InfluenzaA__ABW40477

SEQ ID NO: 194143 - RNA, 1698 nt, Artificial Sequence; identical to SEQ ID NO: 193982
  derived and/or modified CDS sequence (opt5) from hemagglutinin__InfluenzaA__ABW40488

SEQ ID NO: 194144 - RNA, 1698 nt, Artificial Sequence; identical to SEQ ID NO: 193986
  derived and/or modified CDS sequence (opt5) from hemagglutinin__InfluenzaA__ABW40499

SEQ ID NO: 194145 - RNA, 1698 nt, Artificial Sequence; identical to SEQ ID NO: 194028
  derived and/or modified CDS sequence (opt5) from hemagglutinin__InfluenzaA__ABW40510

SEQ ID NO: 194146 - RNA, 1698 nt, Artificial Sequence; identical to SEQ ID NO: 193982
  derived and/or modified CDS sequence (opt5) from hemagglutinin__InfluenzaA__ABW40521

SEQ ID NO: 194147 - RNA, 1698 nt, Artificial Sequence; identical to SEQ ID NO: 193986
  derived and/or modified CDS sequence (opt5) from hemagglutinin__InfluenzaA__ABW40532

SEQ ID NO: 194148 - RNA, 1698 nt, Artificial Sequence
  derived and/or modified CDS sequence (opt5) from hemagglutinin__InfluenzaA__ABW40543
augaaggugaaacugcucguccugcuuugcaccuucacagccacguacgcugacaccaucuguauuggcuaucacgccaacaauagcacagauaccguugacacagugcuggagaagaacgugaccgucacacauuccgugaaucuccuggaagauagacacaacgggaaacuuugccugcucaagggaaucgcgccccugcagcugggcaauuguucuguugcuggguggauucucggaaacccugagugcgaacugcuuaccagcaaagaguccuggucuuacaucguggaaacgccgaaucccgagaacggcaccuguuauccuggguacuuugccgacuaugaggaacugcgggagcaacucagcuccgucucuagcuucgaacgcuuugagauuuuccccaaggaguccagcuggccuaaucauacagugaccggaguuucugccuccugcagccacaacggcaagucuuccuuuuacagaaaucugcuuuggcugacaggcaaaaacgggcucuaucccaaucugagcaagucuuacgcuaacaauaaagaaaaggaggugcugguccucuggggagugcaucacccuccgaacaucggcgaucagcgggcccuguaccacaccgaaaacgcuuauguguccgucguuagcucccauuacucucgcagauucacgcccgagaucgccaaacggccuaaggugcgcgaccaggaagggagaauuaauuauuacuggacacuucuggagcccggagauaccaucauuuuugaggcgaacggcaaucucaucgccccucgguucgcuuuugcccugagccgcggguucggauccggcauuaucacaagcaacgcucccauggacgaaugugaugccaagugccagaccccgcaaggcgcgauuaauucuucccuuccuuuucagaacgugcaccccgucaccaucggggaguguccuaaauaugugagaagcgccaagcugcggaugguuacaggacuccgcaauauccccucuauucagagcagaggccuguucggggcuaucgccggauuuauugaaggcggguggacgggaaugguggacggcugguacggcuaucaucaccagaacgagcaaggguccggauacgcugccgaucagaaaucuacccagaaugccaucaacggcauuacaaauaaggucaacagcgugaucgaaaagaugaauacccaguucacagcuguugggaaagaguucaacaaacuggagcggcgcauggaaaaucucaacaagaagguggacgauggauuucuggacaucuggaccuacaacgcggagcuucugguccuccuggaaaaugagagaacgcuugacuuccacgauuccaacgugaaaaaucuguaugaaaaggucaaaagccaacucaagaacaaugccaaagagauuggcaacgggugcuuugaguucuaccauaaguguaaugacgaaugcauggagucugugaagaacggcacauaugauuaccccaaauauuccgaagagagcaagcugaaucgggagaaaaucgacggaguuaagcuggaaucuaugggcguguaccagauucucgcuaucuauuccaccgucgccagcucccuggugcuucugguuucucucggggccauuagcuuuuggaugugcuccaacggaucucugcaguguagaaucugcaucuga

SEQ ID NO: 194149 - RNA, 1698 nt, Artificial Sequence; identical to SEQ ID NO: 194127
  derived and/or modified CDS sequence (opt5) from hemagglutinin__InfluenzaA__ABW40554

SEQ ID NO: 194150 - RNA, 1698 nt, Artificial Sequence; identical to SEQ ID NO: 193986
  derived and/or modified CDS sequence (opt5) from hemagglutinin__InfluenzaA__ABW40565

SEQ ID NO: 194151 - RNA, 1698 nt, Artificial Sequence
  derived and/or modified CDS sequence (opt5) from hemagglutinin__InfluenzaA__ABW40576
augaaggugaaacugcucauccugcuuugcaccuucacagccacguacgcugacaccauuuguaucggcuaucacgccaacaauagcacagauaccgucgacacaguucuggagaagaacgugaccgugacacauuccgucaaucuccuggaagauucucacaacgggaaacuuugccugcucaagggaauugcgccccugcagcugggcaauuguagcguggcuggguggauccucggaaacccugagugcgaacugcuuauuuccaaagagucuuggagcuacaucguugaaaccccgaaucccgagaacggcacguguuauccuggguacuuugccgacuaugaggaacugagagagcaacucuccucugugagcuccuucgaacgguuugagaucuuccccaaggagagcucuuggccuaaucauaccgucacaggaguguccgccagcugcucucacaacggcaaguccagcuuuuaccgcaaucugcuuuggcugaccggcaaaaacgggcucuaucccaaucugucuaaguccuacgcuaacaauaaagaaaaggagguucuggugcucuggggaguccaucacccuccgaacauuggcgaucagagagcccuguaccacacagaaaacaccuaugugagcguggucuccucucauuacagccggcgcuucacgcccgagaucgcuaaaagaccuaagguucgggaccaggaagggcgcauuaauuauuacuggacacuucuggagcccggagauaccaucauucucgaggccaacggcaaucugaucgcgccuagauuugccuucgcucuuucccggggguuuggaagcggcauuaucacaucuaacgcccccauggacgaaugugaugcuaagugccagaccccgcaaggcgccaucaauuccagccugccuuuccagaacgugcaccccgugaccauuggggaguguccuaaauauguccgcucuacaaagcucagaauggugacgggacugcggaauauccccagcauucagucccgcggccuguuuggggcgaucgccggauucauugaaggcggguggaccggaaugguugacggcugguacggcuaucaucaccagaacgagcaagggucuggauacgcugccgaucagaaaagcacacagaaugcuaucaacggcaucaccaauaaggugaacuccgucauugaaaagaugaauacacaguuuaccgccguggggaaagaguucaacaaacucgagagacggauggaaaaucugaacaagaagguugacgauggauuccuugacaucuggacguacaacgccgagcugcucgugcugcuugaaaaugagcgcacacuggacuuucacgauagcaacgucaaaaaucucuaugaaaaggugaaaucucaacugaagaacaaugcuaaagagauuggcaacgggugcuucgaguuuuaccauaaguguaaugacgaaugcauggaguccgucaagaacggcaccuaugauuaccccaaauauagcgaagagucuaagcugaauagagagaaaaucgacggagugaagcucgaauccaugggcguuuaccagauucuggcgaucuauagcaccguggccuccucucuuguccugcucgugagccugggggcuaucuccuucuggaugugcucuaacggaagccugcagugucggauuugcaucuga

SEQ ID NO: 194152 - RNA, 1701 nt, Artificial Sequence; identical to SEQ ID NO: 194059
  derived and/or modified CDS sequence (opt5) from hemagglutinin__InfluenzaA__ABW40587

SEQ ID NO: 194153 - RNA, 1698 nt, Artificial Sequence; identical to SEQ ID NO: 194028
  derived and/or modified CDS sequence (opt5) from hemagglutinin__InfluenzaA__ABW40598

SEQ ID NO: 194154 - RNA, 1698 nt, Artificial Sequence; identical to SEQ ID NO: 194002
  derived and/or modified CDS sequence (opt5) from hemagglutinin__InfluenzaA__ABW40609

SEQ ID NO: 194155 - RNA, 1698 nt, Artificial Sequence; identical to SEQ ID NO: 194017
  derived and/or modified CDS sequence (opt5) from hemagglutinin__InfluenzaA__ABW40620

SEQ ID NO: 194156 - RNA, 1701 nt, Artificial Sequence; identical to SEQ ID NO: 194059
  derived and/or modified CDS sequence (opt5) from hemagglutinin__InfluenzaA__ABW40631

SEQ ID NO: 194157 - RNA, 1698 nt, Artificial Sequence; identical to SEQ ID NO: 193982
  derived and/or modified CDS sequence (opt5) from hemagglutinin__InfluenzaA__ABW40642

SEQ ID NO: 194158 - RNA, 1701 nt, Artificial Sequence; identical to SEQ ID NO: 194059
  derived and/or modified CDS sequence (opt5) from hemagglutinin__InfluenzaA__ABW40653

SEQ ID NO: 194159 - RNA, 1698 nt, Artificial Sequence; identical to SEQ ID NO: 194028
  derived and/or modified CDS sequence (opt5) from hemagglutinin__InfluenzaA__ABW40664

SEQ ID NO: 194160 - RNA, 1698 nt, Artificial Sequence; identical to SEQ ID NO: 194002
  derived and/or modified CDS sequence (opt5) from hemagglutinin__InfluenzaA__ABW40675

SEQ ID NO: 194161 - RNA, 1698 nt, Artificial Sequence; identical to SEQ ID NO: 194131
  derived and/or modified CDS sequence (opt5) from hemagglutinin__InfluenzaA__ABW71294

SEQ ID NO: 194162 - RNA, 1698 nt, Artificial Sequence; identical to SEQ ID NO: 194028
  derived and/or modified CDS sequence (opt5) from hemagglutinin__InfluenzaA__ABW71305

SEQ ID NO: 194163 - RNA, 1698 nt, Artificial Sequence
  derived and/or modified CDS sequence (opt5) from hemagglutinin__InfluenzaA__ABW71316
augaaggugaaacugcucauccugcuuugcaccuucacagccacguacgcugacaccauuuguaucggcuaucacgccaacaauagcacagauaccgucgacacaguucuggagaagaacgugaccgugacacauuccgucaaucuccuggaagauucucacaacgggaaacuuugccugcucaagggaauugcgccccugcagcugggcaauuguagcguggcuggguggauccucggaaacccugagugcgaacugcuuauuuccaaagagucuuggagcuacaucguugaaaccccgaaucccgagaacggcacguguuauccuggguacuuugccgacuaugaggaacugagagagcaacucuccucugugagcuccuucgaacgguuugagaucuuccccaaggagagcucuuggccuaaucauaccgucacaggaguguccgccagcugcucucacaacggcaaguccagcuuuuaccgcaaucugcuuuggcugaccggcaaaaacgggcucuaucccaaucugucuaaguccuacgcuaacaauaaagaaaaggagguucuggugcucuggggaguccaucacccuccgaacauuggcgaucagagagcccuguaccacacagaaaacgcuuaugugagcguggucuccucucauuacagccggcgcuucacccccgagaucgccaaaagaccuaagguucgggaccaggaagggcgcauuaauuauuacuggacgcuucuggagcccagagauacaaucauuuuugaggcgaacggaaaucucaucgccccucgguucgcuuuugcccugucccgcggcuucgggagcggaauuaucaccucuaacgcucccauggacgaaugugaugccaagugccagacaccgcaaggcgcgaucaauuccagccuuccuuuucagaacgugcaccccgugaccauuggcgaguguccuaaauaugucagaucuaccaagcugcggauggugacagggcuccgcaauauccccagcauucaguccagaggacuguucggcgccaucgcuggguuuauugaaggaggcuggacggggaugguugacggaugguacggcuaucaucaccagaacgagcaaggcucuggguacgccgcugaucagaaaagcacccagaaugccaucaacggaaucacaaauaaggugaacuccgucauugaaaagaugaauacccaguucacagccgugggcaaagaguucaacaaacuggagcggcgcauggaaaaucucaacaagaagguugacgauggguuucuggacaucuggaccuacaacgcugagcuucuggugcuccuggaaaaugagagaacgcuugacuuccacgauagcaacgucaaaaaucuguaugaaaaggugaaaucucaacucaagaacaaugcgaaagagauuggaaacggcugcuuugaguucuaccauaaguguaaugacgaaugcauggaguccgucaagaacgggacauaugauuaccccaaauauagcgaagagucuaagcugaaucgggagaaaaucgacggcgugaagcuggaauccaugggaguuuaccagauucucgccaucuauagcaccguggcuuccucucugguccuucuggugagccucggcgccaucuccuuuuggaugugcucuaacgggagccugcaguguagaauuugcaucuga

SEQ ID NO: 194164 - RNA, 1698 nt, Artificial Sequence; identical to SEQ ID NO: 193982
  derived and/or modified CDS sequence (opt5) from hemagglutinin__InfluenzaA__ABW71327

SEQ ID NO: 194165 - RNA, 1698 nt, Artificial Sequence; identical to SEQ ID NO: 193986
  derived and/or modified CDS sequence (opt5) from hemagglutinin__InfluenzaA__ABW71338

SEQ ID NO: 194166 - RNA, 1701 nt, Artificial Sequence; identical to SEQ ID NO: 194000
  derived and/or modified CDS sequence (opt5) from hemagglutinin__InfluenzaA__ABW71349

SEQ ID NO: 194167 - RNA, 1698 nt, Artificial Sequence
  derived and/or modified CDS sequence (opt5) from hemagglutinin__InfluenzaA__ABW71360
augaaggugaaacugcucguccugcuuugcaccuucacagccacguacgcugacaccaucuguauuggcuaucacgccaacaauagcacagauaccguugacacagugcuggagaagaacgugaccgucacacauuccgugaaucuccuggaagauagacacaacgggaaacuuugccugcucaagggaaucgcgccccugcagcugggcaauuguucuguugcuggguggauucucggaaacccugagugcgaacugcuuaucagcaaagaguccuggucuuacauuguggaaaccccgaaucccgagaacggcacguguuauccuggguacuuugccgacuaugaggaacugcgggagcaacucagcuccgucucuagcuucgaacgcuuugagaucuuccccaaggaguccagcuggccuaaucauaccgugacaggaguuucugccuccugcagccacaacggcaagucuuccuuuuacagaaaucugcuuuggcugaccggcaaaaacgggcucuaucccaaucugagccggucuuacgcuaacaauaaggaaaaagaggugcugguccucuggggagugcaucacccuccgaacaucggcgaucagcgcgcccuguaccacacagaaaacgcuuauguguccgucguuagcucccauuacucuagacgguucacccccgagauugccaagcgcccuaaagugagagaccaggaagggcggaucaauuauuacuggacgcuucuggagcccggagauacaauuaucuuugaggcgaacggcaaucucauugccccucgcuucgcuuuugcccugagcagaggguucggauccggcaucauuaccagcaacgcucccauggacgaaugugaugccaagugccagacaccgcaaggcgcgaucaauucuucccuuccuuuucagaacgugcaccccgucaccaucggggaguguccuaaguaugugcggagcgccaaacugcgcaugguuaccggacucagaaauauucccucuauccagagccggggccuguucggggcuauugccggauuuaucgaaggcggguggacaggaaugguggacggcugguacggcuaucaucaccagaacgagcaaggguccggauacgcugccgaucagaagucuacgcagaaugccauuaacggcaucaccaauaaagucaacagcgugaucgaaaagaugaauacacaguucaccgcuguugggaaagaguucaacaagcuggagcgcagaauggaaaaucucaacaaaaagguggacgauggauuucuggacauuuggacauacaacgcggagcuucugguccuccuggaaaaugagcggacccuugacuuccacgauuccaacgugaagaaucuguaugaaaaagucaagagccaacucaaaaacaaugccaaggagaucggcaacgggugcuuugaguucuaccauaaaugugacgaugaaugcauggagucugugaagaauggcacguaugacuaccccaaguauuccgaagagagcaaacugaacagagagaagauugauggaguuaaacuggaaucuaugggcguguaccagauccucgcuauuuauuccacagucgccagcucccuggugcuucugguuucucucggggccaucagcuuuuggaugugcuccaauggaucucugcagugucgcaucugcauuuga

SEQ ID NO: 194168 - RNA, 1698 nt, Artificial Sequence; identical to SEQ ID NO: 194002
  derived and/or modified CDS sequence (opt5) from hemagglutinin__InfluenzaA__ABW71371

SEQ ID NO: 194169 - RNA, 1698 nt, Artificial Sequence
  derived and/or modified CDS sequence (opt5) from hemagglutinin__InfluenzaA__ABW71382
augaaggugaaacugcucauccugcuuugcaccuucacagccacguacgcugacaccauuuguaucggcuaucacgccaacaauagcacagauaccgucgacacaguucuggagaagaacgugaccgugacacauuccgucaaucuccuggaagauucucacaacgggaaacuuugccugcucaagggaauugcgccccugcagcugggcaauuguagcguggcuggguggauccucggaaacccugagugcgaacugcuuauuuccaaagagucuuggagcuacaucguugaaaccccgaaucccgagaacggcacguguuauccuggguacuuugccgacuaugaggaacugagagagcaacucuccucugugagcuccuucgaacgguuugagaucuuccccaaggagagcucuugguccaaucauaccauuacaggagucagcgccucuugcucccacaacggcaagagcucuuuuuaccgcaaucugcuuuggcugaccggcaaaaacgggcucuauccuaaucuguccaagagcuacgcuaacaauaaagaaaaggaggugcugguucucuggggagugcaucaucccccuaacaucggcgaucagagagcccuguaccacacagaaaacgcuuaugucuccguggugucuagccacuacucccggcgcuucaccccggagauugccaaaagacccaagguccgggaccaggaagggcgcaucaauuauuacuggacgcuucuggagccuggagauacaauuaucuuugaggcgaacggcaaucucauugcccccagauucgcuuuugcccugagccggggguucggaucuggcaucaucaccuccaacgcuccuauggacgaaugugaugccaagugccagacaccccaaggcgcgauuaauagcucucuuccguuucagaacguucacccugugaccaucggggagugucccaaauaugugcgcagcaccaagcugagaauggucacaggacuccggaauauuccuuccauccagucucgcggccuguucggggccauugcuggauuuaucgaaggcggguggacgggaaugguggacggcugguacggcuaucaucaccagaacgagcaagggagcggauacgccgcugaucagaaauccacccagaaugccaucaacggcauuacaaauaagguuaacagcgugaucgaaaagaugaauacccaguucacagccgucgggaaagaguucaacaaacuggagagacggauggaaaaucucaacaagaagguggacgauggauuucuggacauuuggaccuacaacgcugagcuucugguucuccuggaaaaugagcgcacgcuugacuuccacgauucuaacgugaaaaaucuguaugaaaaggucaaaucccaacucaagaacaaugcgaaagagaucggcaacgggugcuuugaguucuaccauaaguguaaugacgaaugcauggagagcgugaagaacggcacauaugauuaccccaaauauucugaagaguccaagcugaauagagagaaaauugacggagucaagcuggaaagcaugggcguguaccagauccucgccaucuauuccaccguugcuucuagccuggugcuucuggucucccucggggccauuucuuuuuggaugugcagcaacggaucccugcagugucggaucugcauuuga

SEQ ID NO: 194170 - RNA, 1698 nt, Artificial Sequence
  derived and/or modified CDS sequence (opt5) from hemagglutinin__InfluenzaA__ABW71393
augaaggugaaacugcucguccugcuuugcaccuucacagccacguacgcugacaccaucuguauuggcuaucacgccaacaauagcacagauaccguugacacagugcuggagaagaacgugaccgucacacauuccgugaaucuccuggaagauucucacaacgggaaacuuugccugcucaagggaaucgcgccccugcagcugggcaauuguagcguugcuggguggauucucggaaacccugagugcgaacugcuuaucuccaaagagucuuggagcuacauuguggaaaccccgaaucccgagaacggcacguguuauccuggguacuuuaccgacuaugaggaacugagagagcaacucuccucugucagcuccuucgaacgguuugagaucuuccccaaggagagcucuuggccuaaucauacagugaccggaguuuccgccagcugcucucacaacggcaaguccagcuuuuaccgcaaucugcuuuggcugacaggcaaaaacgggcucuaucccaaucugucuaaguccuacgccaacaauaaagaaaaggaggugcugguccucuggggagugcaucacccuccgaacaucggcgaucagagagcucuguaccacaccgaaaacgccuaugugagcgucguuuccucucauuacagccggcgcuucacgcccgagauugcuaaaagaccuaaggugcgggaccaggaagggcgcaucaauuauuacuggacacuucuggagcccggagauaccauuaucuuugaggccaacggcaaucucauugcgccuagauucgccuuugcucugucccggggguucggaagcggcaucauuacaucuaacgcccccaugggcgaaugugacgcuaagugccagaccccgcaaggggccaucaauuccagccuuccuuuucagaacgugcaccccgucaccaucggagaguguccuaaauaugugcgcucugcgaagcugagaaugguuacaggccuccggaauauucccagcauccagucccgcgggcuguucggagccauugcuggcuuuaucgaagggggauggacgggcaugguggauggcugguacggguaucaucaccagaacgagcaaggaucuggcuacgccgcugaccagaaaagcacccagaaugccauuaacgggaucacaaauaaggucaacuccgugaucgaaaagaugaauacccaguucacagccguuggaaaagaguucaacaaacuggagagacggauggaaaaucucaacaagaagguggaugacggcuuucuggauauuuggaccuacaacgcugagcuucugguccuccuggaaaaugagcgcacgcuugacuuccacgacagcaacgugaaaaaucuguaugaaaaggucaaaucucaacucaagaacaaugcgaaagagaucgggaacggcugcuuugaguucuaccauaaguguaaugaugaaugcauggaguccgugaagaacggaacauaugacuaccccaaauauagcgaagagucuaagcugaauagagagaaaauugauggcguuaagcuggaauccauggggguguaccagauccucgccauuuauagcaccgucgcuuccucucuggugcuucugguuagccucggagccaucuccuuuuggaugugcucuaacggcagccugcagugucggaucugcauuuga

SEQ ID NO: 194171 - RNA, 1698 nt, Artificial Sequence; identical to SEQ ID NO: 194131
  derived and/or modified CDS sequence (opt5) from hemagglutinin__InfluenzaA__ABW71404

SEQ ID NO: 194172 - RNA, 1698 nt, Artificial Sequence; identical to SEQ ID NO: 194019
  derived and/or modified CDS sequence (opt5) from hemagglutinin__InfluenzaA__ABW71415

SEQ ID NO: 194173 - RNA, 1698 nt, Artificial Sequence
  derived and/or modified CDS sequence (opt5) from hemagglutinin__InfluenzaA__ABW71426
augaaggccaaacugcucauccugcuuugcaccuucacagcuacguacgccgacaccauuuguaucggcuaucacgcgaacaauagcacagauaccguggacacaguccuggagaagaacguuaccgugacacauuccgugaaucuccuggaagauucucacaacgggaaacuuugccugcucaagggaauugcuccccugcagcugggcaauuguagcgucgccggguggauccucggaaacccugagugcgaacugcuuauuuccaaagagucuuggagcuacaucguggaaaccccgaaucccgagaacggcacguguuauccuggguacuuugccgacuaugaggaacugagagagcaacucuccucuguuagcuccuucgaacgguuugagaucuuccccaaggagagcucuuggccuaaucauaccgugacaggagucuccgcuagcugcucucacaacggcaaguccagcuuuuaccgcaaucugcuuuggcugaccggcaaaaacgggcucuaucccaaucugucuaaguccuacgccaacaauaaagaaaaggaggugcugguucucuggggagugcaucacccuccgaacauuggcgaucagagagcucuguaccacacagaaaacgccuaugucagcgugguguccucucauuacagccggcgcuucacccccgagaucgcgaaaagaccuaagguccgggaccaggaagggcgcauuaauuauuacuggacgcuucuggagcccggagauacaaucauuuuugaggccaacggcaaucucaucgcuccuagauucgccuuugcucugucccggggguucggaagcggcauuaucaccucuaacgcccccauggacgaaugugaugcgaagugccagacaccgcaaggcgccaucaauuccagccuuccuuuucagaacguucaccccgugaccauuggggaguguccuaaauaugugcgcucuaccaagcugagaauggucacaggacuccggaauauccccagcauucagucccgcggccuguucggggcuaucgccggauuuauugaaggcggguggacgggaaugguggacggcugguacggcuaucaucaccagaacgagcaagggucuggauacgcugccgaucagaaaagcacccagaaugccaucaacggcaucacaaauaagguuaacuccgugauugaaaagaugaauacccaguucacagcugucgggaaagaguucaacaaacuggagagacggauggaaaaucucaacaagaagguggacgauggauuucuggacaucuggaccuacaacgcggagcuucugguucuccuggaaaaugagcgcacgcuugacuuccacgauagcaacgugaaaaaucuguaugaaaaggucaaaucucaacucaagaacaaugccaaagagauuggcaacgggugcuuugaguucuaccauaaguguaaugacgaaugcauggaguccgugaagaacggcacauaugauuaccccaaauauagcgaagagucuaagcugaauagagagaaaaucgacggagucaagcuggaauccaugggcguguaccagauucucgcuaucuauagcaccguugccuccucucuggugcuucuggucagccucggggccaucuccuuuuggaugugcucuaacggaagccugcagugucggauuugcaucuga

SEQ ID NO: 194174 - RNA, 1698 nt, Artificial Sequence
  derived and/or modified CDS sequence (opt5) from hemagglutinin__InfluenzaA__ABW71448
augaaggugaaacugcucguccugcuuugcaccuucacagccacguacgcugacaccaucuguauuggcuaucacgccaacaauagcacagauaccguugacacagugcuggagaagaacgugaccgucacacauuccgugaaucuccuggaagauucucacaacgggaaacuuugccugcucaagggaaucgcgccccugcagcugggcaauuguagcguugcuggguggauucucggaaacccugagugcgaacugcuuaucuccaaagagucuuggagcuacauuguggaaaccccgaaucccgagaacggcacguguuauccuggguacuuugccgacuaugaggaacugagagagcaacucuccucugucagcuccuucgaacgguuugagaucuuccccaaggagagcucuuggccuaaucauaccgugacaggaguuuccgccagcugcucucacaacggcaaguccagcuuuuaccgcaaucugcuuuggcugaccggcaaaaacgggcucuaucccaaucugucuaaguccuacgcuaacaauaaagaaaaggaggugcugguccucuggggagugcaucacccuccgaacaucggcgaucagagagcccuguaccacacagaaaacgcuuaugugagcgucguuuccucucauuacagccggcgcuucacccccgagauugccaaaagaccuaaggugcgggaccaggaagggcgcaucaauuauuacuggacgcuucuggagcccggagauacaauuaucuuugaggcgaacggcaaucucauugccccuagauucgcuuuugcccugucccggggguucggaagcggcaucauuaccucuaacgcucccauggacgaaugugaugccaagugccagacaccgcaaggcgcgaucaauuccagccuuccuuuucagaacgugcaccccgucaccaucggggaguguccuaaauaugugcgcucuaccaagcugagaaugguuacaggacuccggaauauucccagcauccagucccgcggccuguucggggccauugcuggauuuaucgaaggcggguggacgggaaugguggacggcugguacggcuaucaucaccagaacgagcaagggucuggauacgccgcugaucagaaaagcacccagaaugccauuaacggcaucacaaauaaggucaacuccgugaucgaaaagaugaauacccaguucacagccguugggaaagaguucaacaaacuggagagacggauggaaaaucucaacaagaagguggacgauggauuucuggacauuuggaccuacaacgcugagcuucugguccuccuggaaaaugagcgcacgcuugacuuccacgauagcaacgugaaaaaucuguaugaaaaggucaaaucucaacucaagaacaaugcgaaagagaucggcaacgggugcuuugaguucuaccauaaguguaaugacgaaugcauggaguccgugaagaacggcacauaugauuaccccaaauauagcgaagagucuaagcugaauagagagaaaauugacggaguuaagcuggaauccaugggcguguaccagauccucgccauuuauagcaccaucgcuuccucucugguccuucuggugagccucggggccaucuccuuuuggaugugcucuaacggaagccugcagugucggauuugcaucuga

SEQ ID NO: 194175 - RNA, 1698 nt, Artificial Sequence; identical to SEQ ID NO: 194002
  derived and/or modified CDS sequence (opt5) from hemagglutinin__InfluenzaA__ABW71459

SEQ ID NO: 194176 - RNA, 1698 nt, Artificial Sequence; identical to SEQ ID NO: 193986
  derived and/or modified CDS sequence (opt5) from hemagglutinin__InfluenzaA__ABW71470

SEQ ID NO: 194177 - RNA, 1707 nt, Artificial Sequence
  derived and/or modified CDS sequence (opt5) from hemagglutinin__InfluenzaA__ABW74702
auggagaagaucgugcugcuccuggccauugucagccuuguuaaauccgaccagaucugcauuggcuaccacgcuaacaauucuaccgaacaaguggauacaaucauggagaagaacgugacggucacccaugcccaggacauucuggaaaagacacacaaugggaagcucugugaucuggacggagugaaaccccuuauccugagagauugcagcguugcgggcuggcuccuggggaacccuaugugugacgaguucaucaaugugccggaaugguccuauauugucgagaaggcuaaccccaccaaugaucugugcuacccuggaucuuuuaacgacuaugaggaacucaagcaucugcuuagccggaucaaucacuucgagaaaauucagaucauucccaaguccucuuggagcgaucaugaagccuccagcggcgugucuuccgccuguccuuaccuggggucuagcuccuuuuuccgcaacguuguguggcucaucaaaaagaauagcacauaucccaccauuaaaaagucuuacaacaauacaaaccaggaggaccugcuuguccuguggggaauccaccacccuaaugaugcugccgagcaaaccagacucuaucagaacccgacgaccuacaucuccauuggcacaagcacccugaaccagcggcuggugcccaagaucgcuacacgcuccaaagugaauggccagucugggagaauggaauuuuucuggaccauucucaagccuaacgacgccaucaauuuugagagcaacggaaauuucauugcgcccgaauacgccuauaaaaucgucaagaaaggcgauuccgcuaucaugaaaagcgagcuggaauacgggaacugcaauacgaaaugucaaacaccuaugggagccauuaacucuuccaugcccuuucauaauauccacccgcuuaccauuggcgagugcccuaaguauguuaagagcaaccggcuggugcucgcuacagggcugcgcaauucuccccagagagagagccggcgcaaaaagagaggacuuuucggcgccaucgcgggcuuuauugaagggggauggcagggcaugguggacgggugguacggauaucaucacuccaacgagcagggcucuggguacgccgcugacaaagaaagcacccaaaaggccaucgauggagucaccaauaaagugaacuccaucauugacaagaugaauacacaguucgaggcuguuggccgggaauuuaacaaccuggagcgcagaaucgagaaucucaacaagaaaauggaagauggcuuccuggacguguggacguauaaugccgagcugcucguccugauggaaaacgagcggacccuugauuuccacgacagcaaugugaagaaccuguacgauaaaguucgccuccagcugagagacaaugccaaggaacuugggaacggauguuuugaguucuaccauaaaugcgauaaugaguguauugaaucuauccggaacggcacauauaauuacccucaauauuccgaggaagcuagacugaagcgcgaggagauuagcggggugaagcucgaaucuaucggaaccuaccagauucuguccaucuauagcacagucgcguccucucuggcccucgcuaucaugauggccggccugagccuuuggaugugcuccaacgggucucugcagugccggauuuguaucuga

SEQ ID NO: 194178 - RNA, 1707 nt, Artificial Sequence
  derived and/or modified CDS sequence (opt5) from hemagglutinin__InfluenzaA__ABW74703
auggagaagaucgugcugcuccuggccauugucagccuuguuaaauccgaccagaucugcauuggcuaccacgcuaacaauucuaccgaacaaguggauacaaucauggagaagaacgugacggucacccaugcccaggacauucuggaaaagacacacaaugggaagcucugugaucuggacggagugaaaccccuuauccugaaggauugcagcguugcgggcuggcuccuggggaacccuaugugugacgaguucaucaaugugccggaaugguccuauauugucgagaaggcuaaccccaccaaugaucugugcuacccuggaucuuuuaacgacuaugaggaacucaaacaucugcuuagcagaaucaaucacuucgagaagauucagaucauucccaaauccucuuggagcgaucaugaagccuccagcggcgugucuuccgccuguccuuaccuggggagccccuccuuuuuccggaacguuguguggcucaucaagaaaaauucuacauauccuaccauuaaaaagagcuacaacaauacaaaccaggaggaccugcuuguccuguggggaauccaccacccgaaugaugcugccgagcaaacccgccucuaucagaaccccacgaccuacaucucuauuggcacauccacccugaaccagagacuggugccuaaaaucgcuacacggagcaaggugaauggccaguccgggcgcauggaauuuuucuggaccauucucaaacccaacgacgccgucaauuuugagucuaacggaaauuucaucgcgccugaauacgccuauaagauuguuaaaaagggcgauagcgcuaucaugaaauccgagcuggaauacgggaacugcaauacgaagugucaaacacccaugggagccaucaacagcucuaugccguuucauaauauucacccucuuaccaucggcgagugccccaaguaugugaaauccaacagacuggugcucgcuacagggcugcggaauagcccucagcgcgagucuagacggaagaaacgcggacuuuucggcgccauugcgggcuuuaucgaagggggauggcagggcauggucgacgggugguacggauaucaucacagcaacgagcagggcuccggguacgccgcugacaaggaaucuacccaaaaagccauugauggagugaccaauaagguuaacagcaucaucgacaagaugaauacacaguucgaggcugugggcagagaauuuaacucccuggagcggcgcauugagaaccucaauaaaaagauggaagauggcuuccuggacgucuggacguauaacgccgagcugcucgugcugauggaaaaugagagaacccuugauuuccacgacagcaacguuaaaaaucuguacgauaaggugcggcuccagcugcgcgacaacgccaaagaacuugggaauggauguuuugaguucuaccauaagugcgauaacgaguguauggaaucuaucagaaauggcacauauaacuacccccaauauuccgaggaagcucggcugaagagagaggagauuagcggggucaaacucgaaucuaucggaaccuaccagauucuguccaucuauagcacaguggcguccucucuggcccucgcuauuaugaucgccggccugagccuuuggaugugcuccaaugggucucugcagugccgcaucuguauuuga

SEQ ID NO: 194179 - RNA, 1707 nt, Artificial Sequence
  derived and/or modified CDS sequence (opt5) from hemagglutinin__InfluenzaA__ABW74705
auggagaagaucgugcugcuccuggccauugucagccuuguuaaauccgaccagaucugcauuggcuaccacgcuaacaauucuaccgaacaaguggauacaaucauggagaagaacgugacggucacccaugcccaggacauucuggaaaagacacacaaugggaaacucugugaucuggacggagugaaaccccuuauccugagagauugcagcguugcgggcuggcuccuggggaacccuaugugugacgaguucaucaaugugccggaaugguccuauauugucgagaaggcuaaccccaccaaugaucugugcuacccuggaucuuuuaacgacuaugaggaacucaagcaucugcuuagccggaucaaucacuucgagaaaauucagaucauucccaaguccucuuggagcgaucaugaagccuccagcggcgugucuuccgccuguccuuaccuggggagccccuccuuuuuccgcaacguuguguggcucaucaaaaagaacucuacauauccuaccauuaaaaagagcuacaauaauacaaaccaggaggaccugcuuguccuguggggaauccaccacccgaaugaugcugccgagcaaaccagacucuaucagaaccccacgaccuacaucucuauuggcacauccacccugaaccagcggcuggugccuaagaucgcuacacgcagcaaagugaauggccaguccgggagaauggaauuuuucuggaccauucucaagcccaacgacgccaucaauuuugagucuaacggaaauuucauugcgccugaauacgccuauaaaaucgucaagaaaggcgauagcgcuaucaugaaguccgagcuggaauacgggaacugcaauacgaaaugucaaacacccaugggagccauuaacagcucuaugccguuucauaauauccacccucuuaccauuggcgagugccccaaguauguuaaguccaaccggcuggugcucgcuacagggcugcgcaauagcccucagagagagucucggcgcaaaaagagaggacuuuucggcgccaucgcgggcuuuauugaagggggauggcagggcaugguggacgggugguacggauaucaucacagcaacgagcagggcuccggguacgccgcugacaaagaaucuacccaaaaggccaucgauggagucaccaauaaagugaacagcaucauugacaagaugaauacacaguucgaggcuguuggccgggaauuuaacaaccuggagcgcagaaucgagaaucucaacaagaaaauggaagauggcuuccuggacguguggacguauaaugccgagcugcucguccugauggaaaacgagcggacccuugauuuccacgacuccaaugugaagaaccuguacgauaaaguucgccuccagcugagagacaaugccaaggaacuugggaacggauguuuugaguucuaccauaaaugcgauaaugaguguauggaaagcauucggaacggcacauauaauuacccccaauauucugaggaagcuagacugaagcgcgaggagaucuccggggugaagcucgaaagcauuggaaccuaccagauccugucuauuuauuccacagucgcgagcucccuggcccucgcuaucaugaucgccggccugucucuuuggaugugcagcaacgggucccugcagugccggauuuguaucuga

SEQ ID NO: 194180 - RNA, 1707 nt, Artificial Sequence
  derived and/or modified CDS sequence (opt5) from hemagglutinin__InfluenzaA__ABW74707
auggagaagaucgugcugcuccuggccauugucagccuuguuaaauccgaccagaucugcauuggcuaccacgcuaacaauucuaccgaacaaguggauacaaucauggagaagaacgugacggucacccaugcccaggacauucuggaaaagacacacaaugggaaacucugugaucuggacggagugaaaccccuuauccugagagauugcagcguugcgggcuggcuccuggggaacccuaugugugacgaguucaucaaugugccggaaugguccuauauugucgagaaggcuaaccccaccaaugaucugugcuacccuggaucuuuuaacgacuaugaggaacucaagcaucugcuuagccggaucaaucacuucgagaaaauucagaucauucccaaguccucuuggagcgaucaugaagccuccagcggcgugucuuccgccuguccuuaccuggggagccccuccuuuuuccgcaacguuguguggcucaucaaaaagaacucuacauauccuaccauuaaaaagagcuacaauaauacaaaccaggaggaccugcuuguccuguggggaauccaccacccgaaugaugcugccgagcaaaccagacucuaucagaaccccacgaccuacaucucuauuggcacauccacccugaaccagcggcuggugccuaagauggcuacacgcagcaaagugaauggccaguccgggagaauggaauuuuucuggaccauccucaagcccaacgacgccauuaauuuugagucuaacggaaauuucaucgcgccugaauacgccuauaaaauugucaagaaaggcgauagcgcuaucaugaaguccgagcuggaauacgggaacugcaauacgaaaugucaaacacccaugggagccaucaacagcucuaugccguuucauaauauucacccucuuaccaucggcgagugccccaaguauguuaaguccaaccggcuggugcucgcuacagggcugcgcaauagcccucagagagagucucggcgcaaaaagagaggacuuuucggcgccauugcgggcuuuaucgaagggggauggcagggcaugguggacgggugguacggauaucaucacagcaacgagcagggcuccggguacgccgcugacaaagaaucuacccaaaaggccauugauggagucaccaauaaagugaacagcaucaucgacaagaugaauacacaguucgaggcuguuggccgggaauuuaacaaccuggagcgcagaauugagaaucucaacaagaaaauggaagauggcuuccuggacguguggacguauaaugccgagcugcucguccugauggaaaacgagcggacccuugauuuccacgacuccaaugugaagaaccuguacgauaaaguucgccuccagcugagagacaaugccaaggaacuugggaacggauguuuugaguucuaccauaaaugcgauaaugaguguauggaaagcauccggaacggcacauauaauuacccccaauauucugaggaagcuagacugaagcgcgaggagauuuccggggugaagcucgaaagcaucggaaccuaccagauucugucuaucuauuccacagucgcgagcucccuggcccucgcuauuaugaucgccggccugucucuuuggaugugcagcaacgggucccugcagugccggaucuguauuuga

SEQ ID NO: 194181 - RNA, 1707 nt, Artificial Sequence
  derived and/or modified CDS sequence (opt5) from hemagglutinin__InfluenzaA__ABW74708
auggagaagaucgugcugcuccuggccauugucagccuuguuaaauccgaccagaucugcauuggcuaccacgcuaacaauucuaccgaacaaguggauacaaucauggagaagaacgugacggucacccaugcccaggacauucuggaaaagacacacaaugggaaacucugugaucuggacggagugaaaccccuuauccugagagauugcagcguugcgggcuggcuccuggggaacccuaugugugacgaguucaucaaugugccggaaugguccuauauugucgagaaggcuaaccccaccaaugaucugugcuacccuggaucuuuuaacgacuaugaggaacucaagcaucugcuuagccggaucaaucacuucgagaaaauucagaucauucccaaguccucuuggagcgaucaugaagccuccagcggcgugucuuccgccuguccuuaccuggggagccccuccuuuuuccgcaacguuguguggcucaucaaaaagaacucuacauauccuaccauuaaaaagagcuacaauaauacaaaccaggaggaccugcuuguccuguggggaauccaccacccgaaugaugcugccgagcaaaccagacucuaucagaaccccacgaccuacaucucuauuggcacauccacccugaaccagcggcuggugccuaagaucgcuacacgcagcaaagugaauggccaguccgggagaauggaauuuuucuggaccauucucaagcccaacgacgccaucaauuuugagucuaacggaaauuucauugcgccugaauacgccuauaaaaucgucaagaaaggcgauagcgcuaucaugaaguccgagcuggaauacgggaacugcaauacgaaaugucaaacacccaugggagccauuaacagcucuaugccguuucauaauauccacccucuuaccauuggcgagugccccaaguauguuaaguccaaccggagcgugcuggcuacagggcuccgcaauucuccucagagagagagccggcgcaaaaagagaggacuguucggcgccaucgcgggcuuuauugaagggggauggcagggcaugguggacgggugguacggauaucaucacuccaacgagcagggcucuggguacgccgcugacaaagaaagcacccaaaaggccaucgauggagucaccaauaaagugaacuccaucauugacaagaugaauacacaguucgaggcuguuggccgggaauuuaacaaccuugagcgcagaaucgagaaucugaacaagaaaauggaagauggcuuccucgacguguggacguauaaugccgagcugcugguccucauggaaaacgagcggacccuggauuuccacgacagcaaugugaagaaccuuuacgauaaaguucgccugcagcucagagacaaugccaaggaacuggggaacggauguuuugaguucuaccauaaaugcgauaaugaguguauggaaucuauucggaacggcacauauaauuacccccaauauuccgaggaagcuagacuuaagcgcgaggagaucagcggggugaagcuggaaucuauuggaaccuaccagauccucuccauuuauagcacagucgcguccucucuggcccuggcuaucaugauggccggccucagccuguggaugugcuccaacgggucucuucagugccggaucuguauuuga

SEQ ID NO: 194182 - RNA, 1707 nt, Artificial Sequence; identical to SEQ ID NO: 194179
  derived and/or modified CDS sequence (opt5) from hemagglutinin__InfluenzaA__ABW74710

SEQ ID NO: 194183 - RNA, 1707 nt, Artificial Sequence; identical to SEQ ID NO: 194179
  derived and/or modified CDS sequence (opt5) from hemagglutinin__InfluenzaA__ABW74711

SEQ ID NO: 194184 - RNA, 1707 nt, Artificial Sequence
  derived and/or modified CDS sequence (opt5) from hemagglutinin__InfluenzaA__ABW74712
auggagaagaucgugcugcuccugagcauugucucccuuguuaaaucugaccagaucugcauuggcuaccacgccaacaauagcaccgaacaaguggauacaaucauggagaagaacgugacggucacccaugcucaggacauucuggaaaagacacacaaugggaagcucugugaucuggacggagugaaaccccuuauccugagagauugcuccguugccggcuggcuccuggggaacccuaugugugacgaguucaucaaugugccggaauggucuuauauugucgagaaggcgaaccccaccaaugaucugugcuacccuggcagcuuuaacgacuaugaggaacucaagcaucugcuuucccggaucaaucacuucgagaaaauucagaucauucccaagucuagcugguccgaucaugaagcuagcucuggaguguccagcgccuguccuuaccuggggucucccuccuuuuuccgcaacguuguguggcucaucaaaaagaauagcacauauccuaccauuaaaaagucuuacaacaauacaaaccaggaggaccugcuuguccuguggggaauccaccacccgaauaacgaggaagaacaaaccagacucuaucagaaccccacgaccuacaucuccauuggcacaagcacccugaaucagcggcuggugccuaagaucgccacacgcuccaaagugaacggccagucugggagaauggaauuuuucuggaccauucucaagcccaaugaugcuaucaacuuugagagcaauggaaacuucauugccccugaauacgcuuauaaaaucgucaagaaaggcgacuccgccaucaugaaaagcgagcuggaguacucuaauugcaacacgaaaugucaaacacccaugggggcgauuaauuccagcaugccguuucauaacauccacccucuuaccauuggagaaugccccaaguauguuaagucuagccggcuggugcucgccacaggccugcgcaauuccccucagagagagucucggcgcaaaaagagagggcuuuucggagcuaucgccggcuuuauugaaggcggguggcagggaaugguggauggcugguacggguaucaucacagcaacgagcagggauccggcuacgcugccgacaaagaaagcacccaaaaggcgaucgacggggucaccaauaaagugaacucuaucauugauaagaugaauacacaguucgaggccguuggacgggaguuuaacaaccuggaacgcagaaucgagaaucucaacaagaaaauggaagacggcuuccuggauguguggacguauaaugcugagcugcucguccugauggaaaacgagcggacccuugacuuccacgauuccaaugugaagaaccuguacgacaaaguucgccuccagcugagagauaaugccaaggagcuuggcaacggguguuuugaguucuaccauaaaugcgacaaugaguguauggaaagcauucggaacggaacauauaauuacccccaauauucugaggaggcuagacugaagcgcgaagagaucuccggcgugaagcucgaaagcauugggaccuaccagauccuguccauuuauucuacagucgccagcucccuggcccucgcuaucaugaucgcgggacugucucuuuggaugugcagcaacggcucccugcagugccggauuuguaucuga

SEQ ID NO: 194185 - RNA, 1701 nt, Artificial Sequence
  derived and/or modified CDS sequence (opt5) from hemagglutinin__InfluenzaA__ABW80976
augaagaccaucauugcccugagcuacauccucugccugguguucgcucagaaacuucccggcaacgacaauuccacagccacgcugugucucgggcaccaugcggucccuaacggaacccugguuaagacaauuaccaaugaucaaaucgaggugacaaacgcuaccgaacuugugcagucuagcuccacaucuagaauuugcgacagcccgcaccagauccuggauggcgagaauuguacccucaucgacgcccugcugggggauccccauugcgacggauuucagaacaaagaaugggaucucuucgucgagcgguccaaggccuauucuaauuguuacccuuaugacgugcccgauuacguuagccugcgcucccuuguggcuagcucuggcacgcuggaauuuaacaaugaguccuucaacuggaccggggucgcccaaaauggaacaagcucugcuugcaaaagacgguccgacaagagcuuuuucucucgccucaacuggcugcaccagcuuaaguauaaauacccugcccugaaugugaccaugcccaacaaugagaaguuugauaaacucuauauuuggggcguucaucacccuggcacagacuccgaucagaucagcauuuacgcgcaggccuccgggagagugaccgucucuacgaagcggagccaacagacagugaucccgaacauuggaucccgccccugggugagaggcgucagcucugggaucuccauuuacuggaccaucguuaaaccuggagacauccugcugauuaacagcacaggcaaucucaucgcuccccggggguauuucaagauucgcucuggaaagagcuccaucaugagaucugacgccccuauuggcaaauguaacagcgaaugcaucacccccaauggcuccaucccgaacgauaagccuuuucagaaugugaaccggauuaccuacggggcuuguccccgcuaugugaaacagaauacacugaaacuugccacgggaaugagaaacgucccugagaagcaaacccggggcaucuucggggcgauugccggauuuaucgaaaauggcugggaggggaugauggacggaugguacggcuuccgccaccagaacagcgagggcacagggcaggcugccgaucugaagucuacccaagcugccauuaaucagaucaacggaaaacucaauagacugaucgaaaagacaaacgagaaguuucaucagauugaaaaagaguucuccgaaguggagggccggauccaggaccuugagaaguauguugaagauaccaaaauugaccuguggagcuacaaugccgagcuccugguggcucuggaaaaccaacacacgaucgaucucacagacucugagaugaacaagcuguucgaaagaaccaaaaagcagcuucgcgagaaugcggaggauauggggaacggaugcuuuaagauuuaucauaaaugugacaaugccugcaucggcuccauucggaacgggaccuacgaucacgacgucuacagagacgaagcucugaauaaccgcuuccagaucaagggcguggagcucaaaagcggauauaaggauuggauccuguggauuuccuuugccaucucuugcuuccuucuguguauuguucuccugggcuuuaucaugugggccugccagaaagggaauauucgguguaacaucugcaucuga

SEQ ID NO: 194186 - RNA, 1701 nt, Artificial Sequence
  derived and/or modified CDS sequence (opt5) from hemagglutinin__InfluenzaA__ABW80977
augaagaccaucauugcccugagcuacauccucugccugguguucgcucagaaacuucccggcaacgacaauuccacagccacgcugugucucgggcaccaugcggucccuaacggaaccauuguuaagacaaucaccaaugaucaaauugaggugacaaacgcuaccgaacuggugcagucuagcuccacaggcgggaucugcgacucuccgcaccagauccuugauggagagaauuguacccugauugacgcccuccugggcgauccccagugcgacggguuucaaaacaaaaagugggaucuguucgucgaaagaagcaaagccuauuccaauuguuacccuuaugacgugcccgauuacgcuucucuccggagccugguugccuccagcggaacgcuugaguuuaacaaugaaucuuucaacuggaccggcgugacacagaauggcaccuccagcgcuugcaagcgcagaucuaacaaguccuuuuucagccggcugaauuggcucacacaucugaaauuuaaguauccugcccuuaacgucaccaugcccaauaacgagaaauucgacaagcuguacaucuggggagugcaccauccugggacggauaacgaccagauuaaucucuaugcgcaggccucuggccgcaucacaguuuccaccaaaagaagccaacagacagugauuccgaacaucgggucccggccccgcgucagagaugugccuucucggauuagcaucuacuggaccaucgugaagcccggagacauucugcugaucuccagcaccggcaaucucauugcuccucgcggguacuuuaagaucagaucuggaaaauccagcauuaugcggucugacgcccccaucggcaaguguaacagcgagugcaucacaccgaauggcuccauuccuaacgauaaacccuuccagaaugucaaccgcaucacguauggggcuuguccuagauacguuaagcagaauacccugaaacuugccacaggaaugcggaacgugcccgaaaagcaaacccgcggcauuuuuggggcgaucgccggauucauugagaauggcugggaagggaugguggacggaugguauggcuuuagacaccagaacucugagggcacagggcaggcugccgaucugaaaagcacccaagcugccaucaaucagaucaacggaaagcucaaucggcugauuggcaagacgaacgagaaauuccaccagaucgaaaaggaguucuccgaagucgaggggcgcauucaggaccuugaaaaauacguggaggauacaaagaucgaccuguggagcuauaacgccgagcuccugguugcucuggaaaaucaacauaccauugaucucaccgacucugagaugaacaaacuguuugaaagaacaaagaagcagcuucgggagaaugcggaagauaugggaaacggcugcuucaaaaucuaccacaagugugacaaugccugcauuggguccaucagaaacggcaccuaugaucaugacguguaccgcgacgaggcucugaauaaccgguuucagaucaaaggagucgagcucaagagcggcuacaaagauuggauucuguggaucucuuucgccauuuccugcuuucuucuguguguggcccuccugggguucaucaugugggcuugccagaagggaaauauuagauguaacaucugcaucuga

SEQ ID NO: 194187 - RNA, 1698 nt, Artificial Sequence
  derived and/or modified CDS sequence (opt5) from hemagglutinin__InfluenzaA__ABW80979
augaaggccaaacugcucgugcugcuuugcaccuucacagcuacguacgccgacaccaucuguauuggcuaucacgcgaacaauagcacagauaccgucgacacaguucuggagaagaacgugaccgugacacauuccgucaaucuccuggaagauucucacaacgggaaacuuugccugcucaagggaaucgcuccccugcagcugggcaauuguagcguggccggguggauucucggaaacccugagugcgaacugcuuaucuccaaagagucuuggagcuacauuguugaaaccccgaaucccgagaacggcacguguuauccuggguacuuugccgacuaugaggaacugagagagcaacucuccucugugagcuccuucgaacgguuugagaucuuccccaaggagagcucuuggccuaaucauaccgucacaggaguguccgcuagcugcucucacaacggcaaguccagcuuuuaccgcaaucugcuuuggcugaccggcaaaaacgggcucuaucccaaucugucuaaguccuacguuaacaauaaagaaaaggaggugcugguccucuggggagugcaucacccuccgaacaucggcaaccagagagcccuguaccacacagaaaaugcuuaugugagcgucguuuccucucauuacagccggcgcuucacccccgagauugccaaaagaccuaaggugcgggaucaggaagggcgcaucaacuauuacuggacgcuucuggagcccggagacacaauuaucuuugaggcgaauggcaaccucauugccccuugguaugcuuucgcccuguccagaggguuuggaagcggcaucauuaccucuaaugcucccauggaugaaugugacgccaagugccagacaccgcaaggcgcgaucaacuccagccuuccuuuccagaaugugcaccccgucaccaucggggaguguccuaaauacgugcggucugccaagcugcgcaugguuaccggacucagaaacauucccagcauccagucccggggccuguuuggggcuauugccggauucaucgaaggcggguggacaggaaugguggauggcugguauggcuaccaucaccagaaugagcaagggucuggauacgcugccgaccagaaaagcacgcagaacgccauuaauggcaucaccaacaaggucaauuccgugaucgaaaagaugaacacacaguuuaccgcuguugggaaagaguucaauaaacuggagcgcagaauggaaaaccucaacaagaagguggaugacggauuccuggauauuuggacauauaaugcggagcuucugguccuccuggaaaacgagcggacccuugacuuucacgacagcaaugugaaaaaccuguacgaaaaggucaaaucucaacucaagaauaacgccaaagagaucggcaaugggugcuucgaguuuuaucauaaguguaacaaugaaugcauggaguccgugaagaacggcacguacgauuaucccaaauacagcgaagagucuaagcugaaucgcgagaaaauugacggaguuaagcuggaauccaugggcguguaucagauccucgcuauuuacagcacagucgccuccucucuggugcuucugguuagccucggggccaucuccuucuggaugugcucuaacggaagccugcaguguagaaucugcauuuga

SEQ ID NO: 194188 - RNA, 1701 nt, Artificial Sequence
  derived and/or modified CDS sequence (opt5) from hemagglutinin__InfluenzaA__ABW81505
augaaggccaaacugcucgugcugcuuugcaccuucacagcuacguacgccgacaccaucuguauuggcuaucacgcgaacaauagcacagauaccgucgacacaguucuggagaagaacgugaccgugacacauuccgucaaucuccuggaagauucucacaacgggaaacuuugcagacugaagggaaccgcuccccuccagcugggcaauuguagcaucgccggguggauucugggaaacccugagugcgaaucccucuuuucuaaagagagcugguccuacaucgccgaaacgccgaaucccaagaacggcaccuguuauccuggguacuucgcugacuaugaggagcugcgggaacaacuuucuagcguguccagcuuugagcgcuucgaaauuuuucccaaggauucuuccuggccuaaucauacaguuaccaaaggagugacagccagcugcucucacaacggcaaguccagcuucuacaaaaaucugcucuggcugaccgagaagaacggccuuuaucccaaucugucuaaauccuacgucaacaagaaggggaaagaggugcucguucuguggggagugcaucacccuagcaauaugggcgaccagagagcuaucuaccacaaggaaaacgccuaugucuccgugcugucuagccauuacucccggcgcuuuacgccggagaucgcgaaaagacccaaggugcgggaucaggaagggcgcauuaacuauuacuggacacuccuggagccuggagacaccaucauuuucgaagccaauggcaaccuuaucgcucccugguaugccuuugcucugagcagaggguucggaucuggcauuaucauuuccaaugccagcaugggcgagugugaugcgaaaugccagacaccucaaggggccaucaacucuagccuccccuuucagaauguccacccgguuaccaucggagaguguccuaaguacgugcgguccaccaaacugcgcauggugacaggccuuagaaacguccccucuauucagagccgggggcuguucggagcuaucgccggcuuuauugaagggggauggacgggcaugaucgacggcugguauggguaccaucaccagaaugagcaaggauccggcuacgcugccgaucagaaaagcacccagaacgccauuaaugggaucacaaacaagguuaauucuaucauugaaaagaugaacacccaguucacagcugugggaaaggaguucaauaaacucgaacgcagaauggagaaccugaauaagaaaguggacgauggcuuucuggacaucuggaccuauaacgcggagcuccugguccuucuggaaaacgagcggacgcucgacuuccacgauuccaaugugaagaaccuguacgaaaagguuaaaacacaacuuaagaauaacgccaaagagauugggaauggcugcuuugaguucuaucauaaguguaacaaugaaugcauggagagcgugaaaaacggaaccuacgacuauccuaaguacucuaaggaauccaaacugaaucgcgagaagaucgauggcgucaaacucgaaagcauggggguguaucagauucuggcuaucuacuccaccgucgccucuagccuggugcuccugguuucccuuggagccaucucuuuuuggaugugcagcaacggcucccugcaguguagaauuugcaucuga

SEQ ID NO: 194189 - RNA, 1698 nt, Artificial Sequence
  derived and/or modified CDS sequence (opt5) from hemagglutinin__InfluenzaA__ABW81506
augaaggugaaacugcucguccugcuuugcaccuucacagccacguacgcugacaccaucuguauuggcuaucacgccaacaauagcacagauaccguugacacagugcuggagaagaacgugaccgucacacauuccgugaaucuccuggaagauucucacaacgggaaacuuugccugcucaagggaaucgcgccccugcagcugggcaauuguagcguugcuggguggauucucggaaacccugagugcgaacugcuuaucuccaaagagucuuggagcuacauuguggaaaccccgaaucccgagaacggcacguguuauccuggguacuuugccgacuaugaggaacugagagagcaacucuccucugucagcuccuucgaacgguuugagaucuuccccaaggagagcucuuggccuaaucauaccgugacaggaguuuccgccagcugcucucacaacggcaaguccagcuuuuaccgcaaucugcuuuggcugaccggcaaaaacgggcucuaucccaaucugucuaaguccuacgcuaacaauaaagaaaaggaggugcugguccucuggggagugcaucacccuccgaacaucggcaaccagagagcccuguaccacacagaaaaugcuuaugugagcgucguuuccucucauuacagccggcgcuucacccccgagauugccaaaagaccuaaggugcgggaucaggaagggcgcaucaacuauuacuggacgcuucuggagcccggagacacaauuaucuuugaggcgaauggcaaccucauugccccuugguaugcuuucgcccuguccagaggguuuggaagcggcaucauuaccucuaaugcucccauggaugaaugugacgccaagugccagacaccgcaaggcgcgaucaacuccagccuuccuuuccagaaugugcaccccgucaccaucggggaguguccuaaauacgugcggucugccaagcugcgcaugguuaccggacucagaaacauucccagcauccagucccggggccuguuuggggcuauugccggauucaucgaaggcggguggacaggaaugguggauggcugguauggcuaccaucaccagaaugagcaagggucuggauacgcugccgaccagaaaagcacgcagaacgccauuaauggcaucaccaacaaggucaauuccgugaucgaaaagaugaacacacaguuuaccgcuguugggaaagaguucaauaaacuggagcgcagaauggaaaaccucaacaagaagguggaugacggauuccuggauauuuggacauauaaugcggagcuucugguccuccuggaaaacgagcggacccuugacuuucacgacagcaaugugaaaaaccuguacgaaaaggucaaaucucaacucaagaauaacgccaaagagaucggcaaugggugcuucgaguuuuaucauaaguguaacaaugaaugcauggaguccgugaagaacggcacguacgauuaucccaaauacagcgaagagucuaagcugaaucgcgagaaaauugacggaguuaagcuggaauccaugggcaucuaucagauucucgcuaucuacagcacaguggccuccucucugguccuucuggugagccucggggccaucuccuucuggaugugcucuaacggaagccugcaguguagaauuugcaucuga

SEQ ID NO: 194190 - RNA, 1701 nt, Artificial Sequence
  derived and/or modified CDS sequence (opt5) from hemagglutinin__InfluenzaA__ABW81507
augaaggccaaacugcucgugcugcuuugcaccuucacagcuacguacgccgacaccaucuguauuggcuaucacgcgaacaauagcacagauaccgucgacacaguucuggagaagaacgugaccgugacacauuccgucaaucuccuggaagauucucacaacgggaaacuuugcagacugaagggaaccgugccccuccagcugggcaauuguagcaucgcuggguggauucugggaaacccugagugcgaaucccucuuuucuaaagagagcugguccuacaucgccgaaacgccgaaucccaagaacggcaccuguuauccuggguacuucgccgacuaugaggagcugcgggaacaacuuucuagcguuuccagcuuugagcgcuucgaaauuuuucccaaggauucuuccuggccuaaucauacagugaccaaaggagucacagcuagcugcucucacaacggcaaguccagcuucuacaaaaaucugcucuggcugaccgagaagaacggccuuuaucccaaucugucuaaauccuacgugaacaagaaggggaaagagguucucgugcuguggggaguccaucacccuagcaauaugggcgaccagagagccaucuaccacaaggaaaacgcuuauguguccgugcugucuagccauuacucccggcgcuuuacgccggagaucgccaaaagacccaagguccgggaucaggaagggcgcauuaacuauuacuggacacuccuggagccuggagacaccaucauuuucgaagcgaauggcaaccuuaucgcccccugguaugcuuuugcccugagcagaggguucggaucuggcauuaucauuuccaaugcuagcaugggcgagugugaugccaaaugccagacaccucaaggggcgaucaacucuagccuccccuuucagaauguucacccggugaccaucggagaguguccuaaguacgugcgguccaccaaacugcgcauggucacaggccuuagaaacgugcccucuauucagagccgggggcuguucggagccaucgcuggcuuuauugaagggggauggacgggcaugaucgacggcugguauggguaccaucaccagaaugagcaaggauccggcuacgccgcugaucagaaaagcacccagaacgccauuaaugggaucacaaacaagguuaauucuaucauugaaaagaugaacacccaguucacagccgugggaaaggaguucaauaaacucgaacgcagaauggagaaccugaauaagaaagucgacgauggcuuucuggacaucuggaccuauaacgcugagcuccuggugcuucuggaaaacgagcggacgcucgacuuccacgauuccaauguuaagaaccuguacgaaaaggugaaaacacaacuuaagaauaacgcgaaagagauugggaauggcugcuuugaguucuaucauaaguguaacaaugaaugcauggagagcgucaaaaacggaaccuacgacuauccuaaguacucuaaggaauccaaacugaaucgcgagaagaucgauggcgugaaacucgaaagcaugggggucuaucagauucuggccaucuacuccaccguggcuucuagccugguucuccuggugucccuuggagccaucucuuuuuggaugugcagcaacggcucccugcaguguagaauuugcaucuga

SEQ ID NO: 194191 - RNA, 1698 nt, Artificial Sequence
  derived and/or modified CDS sequence (opt5) from hemagglutinin__InfluenzaA__ABW81508
augaaggugaaacugcucguccugcuuugcaccuucacagccacguacgcugacaccaucuguauuggcuaucacgccaacaauagcacagauaccguugacacagugcuggagaagaacgugaccgucacacauuccgugaaucuccuggaagauucucacaacgggaaacuuugccugcucaagggaaucgcgccccugcagcugggcaauuguagcguugcuggguggauucucggaaacccugagugcgaacugcuuaucuccaaagagucuuggagcuacauuguggaaaccccgaaucccgagaacggcacguguuauccuggguacuuugccgacuaugaggaacugagagagcaacucuccucugucagcuccuucgaacgguuugagaucuuccccaaggagagcucuuggccuaaucauaccgugacaggaguuuccgccagcugcucucacaacggcaaguccagcuuuuaccgcaaucugcuuuggcugacccggaaaaacggccucuaucccaaucugucuaaguccuacgcuaacaauaaagaaaaggaggugcugguccucuggggagugcaucacccuccgaacaucggggaucagagagcccuguaccacacagaaaacgcuuaugugagcgucguuuccucucauuacagccgcagauucacccccgagauugccaaacggccuaaggugcgcgaccaggaaggcagaaucaauuauuacuggacgcuucuggagcccggggauacaauuaucuuugaggcgaacggaaaucucauugccccucgguaugcuuucgcccugucccgcggcuuugggagcggaaucauuaccucuaacgcucccauggacgaaugugaugccaagugccagacaccgcaaggcgcgaucaauuccagccuuccuuuccagaacgugcaccccgucaccaucggcgaguguccuaaauacgugagaucugccaagcugcggaugguuaccgggcuccgcaauauucccagcauccaguccagaggacuguuuggcgcuauugccggguucaucgaaggaggcuggacagggaugguggacggaugguauggcuaccaucaccagaacgagcaaggcucuggguacgcugccgaucagaaaagcacgcagaaugccauuaacggaaucaccaauaaggucaacuccgugaucgaaaagaugaauacacaguuuaccgcuguuggcaaagaguucaacaaacuggagcggcgcauggaaaaucucaacaagaagguggacgauggguuccuggacauuuggacauauaacgcggagcuucugguccuccuggaaaaugagagaacccuugacuuucacgauagcaacgugaaaaaucuguacgaaaaggucaaaucucaacucaagaacaaugccaaagagaucggaaacggcugcuucgaguuuuaucauaaguguaaugacgaaugcauggaguccgugaagaacgggacguacgauuaucccaaauacagcgaagagucuaagcugaaucgggagaaaauugacggcguuaagcuggaauccaugggaguguaucagauccucgcuauuuacagcacagucgccuccucucuggugcuucugguuagccucggcgccaucuccuucuggaugugcucuaacgggagccugcaguguagaaucugcauuuga

SEQ ID NO: 194192 - RNA, 1701 nt, Artificial Sequence; identical to SEQ ID NO: 194188
  derived and/or modified CDS sequence (opt5) from hemagglutinin__InfluenzaA__ABW81509

SEQ ID NO: 194193 - RNA, 1698 nt, Artificial Sequence
  derived and/or modified CDS sequence (opt5) from hemagglutinin__InfluenzaA__ABW81511
augaaggccaaacugcucgugcugcuuugcaccuucacagcuacguacgccgacaccaucuguauuggcuaucacgcgaacaauagcacagauaccgucgacacaguucuggagaagaacgugaccgugacacauuccgucaaucuccuggaagauucucacaacgggaaacuuugccugcucaagggaaucgcuccccugcagcugggcaauuguagcguggccggguggauucucggaaacccugagugcgaacugcuuaucuccaaagagucuuggagcuacauuguugaaaccccgaaucccgagaacggcacguguuauccuggguacuuugccgacuaugaggaacugagagagcaacucuccucugugagcuccuucgaacgguuugagaucuuccccaagggaagcucuuggccuaaucauaccgucacaggcguguccgcuagcugcucucacaacggcaaguccagcuuuuaccgcaaucugcuuuggcugaccgggaaaaacggacucuaucccaaucugucuauguccuacguuaacaauaaggagaaagaagugcugguccucuggggcgugcaucacccuccgaacaucgggaaccagagagcccuguaccacacagagaaugcuuaugugagcgucguuuccucucauuacagccggcgcuucacccccgaaauugccaagagaccuaaagugcgggaucaggagggacgcaucaacuauuacuggacgcuucuggaacccggcgacuccauuaucuuugaggcgaaugggaaccucauugccccuugguaugcuuucgcccugagcagaggauuuggcucuggcaucauuacauccaaugcucccauggaugagugugacgccaagugccagaccccgcaaggggcgaucaacagcucucuuccuuuccagaaugugcaccccgucacaaucggagaauguccuaaguacgugcggagcgccaaacugcgcaugguuaccggccucagaaacauucccuccauccagucucgggggcuguuuggagcuauugccggcuucaucgaagggggauggaccggcaugguggauggcugguauggguaccaucaccagaaugaacaaggaagcggcuacgcugccgaccagaaguccacacagaacgccauuaaugggaucacgaacaaagucaauagcgugaucgagaagaugaacacccaguuuacagcuguuggaaaagaguucaauaagcuggagcgcagaauggagaaccucaacaaaaagguggaugacggcuuccuggauauuuggaccuauaaugcggaacuucugguccuccuggagaacgaacggacacuugacuuucacgacucuaaugugaagaaccuguacgagaaagucaagucccaacucaaaaauaacgccaaggaaaucgggaauggcugcuucgaguuuuaucauaaauguaacaaugagugcauggaaagcgugaagaacggaaccuacgauuaucccaaguacucugaggaauccaaacugaaucgcgagaagauugacggcguuaaacuggagagcauggggguguaucagauccucgcuauuuacuccacggucgccucuagccuggugcuucugguuucccucggagccaucucuuucuggaugugcagcaacggcucccugcaguguagaaucugcauuuga

SEQ ID NO: 194194 - RNA, 1698 nt, Artificial Sequence; identical to SEQ ID NO: 192368
  derived and/or modified CDS sequence (opt5) from hemagglutinin__InfluenzaA__ABW81512

SEQ ID NO: 194195 - RNA, 1698 nt, Artificial Sequence; identical to SEQ ID NO: 193457
  derived and/or modified CDS sequence (opt5) from hemagglutinin__InfluenzaA__ABW81513

SEQ ID NO: 194196 - RNA, 1698 nt, Artificial Sequence
  derived and/or modified CDS sequence (opt5) from hemagglutinin__InfluenzaA__ABW81514
augaaggugaaacugcucguccugcuuugcaccuucacagccacguacgcugacaccaucuguauuagcuaucacgccaacaauuccacagauaccguugacacagugcuggagaagaacgugaccgucacacauucugugaaucuccuggaagauagccacaacggcaaacuuugccugcucaaggggaucgcgccccugcagcugggaaauuguuccguugcuggcuggauucucgggaacccugagugcgaacugcuuaucucuaaagagagcugguccuacauuguggaaaccccgaaucccgagaacggaacguguuauccuggcuacuuugccgacuaugaggaacugagagagcaacucucuagcgucuccagcuucgaacgguuugagaucuuccccaaggagucuuccuggccuaaucauaccgugacagggguuagcgccucuugcucccacaacggaaagagcucuuuuuaccgcaaucugcuuuggcugaccggcaaaaacggccucuaucccaaucuguccaagagcuacgcuaacaauaaagaaaaggaggugcugguccucuggggagugcaucacccuccgaacaucggggaucagagagcccuguaccacacagaaaacgcuuauguguccgucguuucuagccauuacucccggcgcuucacccccgagauugccaaaagaccuaaggugcgggaccaggaaggccgcaucaauuauuacuggacgcuucuggagcccggggauacaauuaucuuugaggcgaacggaaaucucauugccccuagauucgcuuuugcccugagccggggcuucgggucuggaaucauuaccuccaacgcucccauggacgaaugugaugccaagugccagacaccgcaaggcgcgaucaauagcucucuuccuuuucagaacgugcaccccgucaccaucggcgaguguccuaaauaugugcgcagcgccaagcugagaauggcuaccgggcuccggaauauucccuccauccagucucgcggacuguucggcgccauugcuggguuuaucgaaggaggcuggacagggaugguugacggaugguacggcuaucaucaccagaacgagcaaggcagcggguacgccgccgaucagaaauccacgcagaaugcuauuaacggaaucaccaauaaggugaacagcgucaucgaaaagaugaauacacaguucaccgcggugggcaaagaguucucuaaacuggagagacggauggaaaaccucaauaagaagguugacgauggguuucuggacauuuggacauacaacgccgagcuucuggugcuccuggaaaacgagcgcacccuugacuuccacgauuccaaugucaaaaaccuguaugaaaaggugaaaagccaacucaagaauaacgcuaaagagaucggaaauggcugcuuugaguucuaccauaaguguaacgacgaaugcauggagucugucaagaaugggacguaugauuaccccaaauauuccgaagagagcaagcugaacagagagaaaauugacggcgugaagcuggaauccaugggaguuuaccagauccucgccauuuauucuacaguggccagcucccugguccuucuggugucucucggcgcuaucagcuuuuggaugugcuccaaugggagccugcagugucggaucugcauuuga

SEQ ID NO: 194197 - RNA, 1698 nt, Artificial Sequence; identical to SEQ ID NO: 193457
  derived and/or modified CDS sequence (opt5) from hemagglutinin__InfluenzaA__ABW81515

SEQ ID NO: 194198 - RNA, 1698 nt, Artificial Sequence; identical to SEQ ID NO: 193457
  derived and/or modified CDS sequence (opt5) from hemagglutinin__InfluenzaA__ABW81516

SEQ ID NO: 194199 - RNA, 1698 nt, Artificial Sequence
  derived and/or modified CDS sequence (opt5) from hemagglutinin__InfluenzaA__ABW81517
augaaggugaaacugcucguccugcuuugcaccuucacagccacguacgcugacaccaucuguauuggcuaucacgccaacaauagcacagauaccguugacacagugcuggagaagaacgugaccgucacacauuccgugaaucuccuggaagauucucacaacgggaaacuuugccugcucaagggaaucgcgccccugcagcugggcaauuguagcguugcuggguggauucucggaaacccugagugcgaacugcuuaucuccaaagagucuuggagcuacauuguggaaaccccgaaucccgagaacggcacguguuauccuggguacuuugccgacuaugaggaacugagagagcaacucuccucuaucagcuccuucgaacgguuugagaucuuccccaaggagagcucuuggccuaaucauaccgucacaggaguguccgccagcugcucucacaacggcaaguccagcuuuuaccgcaaucugcuuuggcugaccggcaaaaacgggcucuaucccaaucugucuaaguccuacgcuaacaauaaagaaaaggagguucuggugcucuggggaguccaucacccuccgaacauuggcgaucagagagcccuguaccacacagaaaacgcuuaugugagcguggucuccucucauuacagccggcgcuucacccccgagaucgccaaaagaccuaagguucgggaccaggaagggcgcauuaauuauuacuggacgcuucuggagcccggagauacaaucauuuuugaggcgaacggcaaucucaucgccccuagauucgcuuuugcccugucccggggguucggaagcggcauuaucaccucuaacgcucccauggacgaaugugaugccaagugccagacaccgcaaggcgcgaucaauuccagccuuccuuuucagaacgugcaccccgugaccauuggggaguguccuaaauauguccgcucugccaagcugagaauggcuaccggacuccggaauauccccagcauucagucccgcggccuguucggggccaucgcuggauuuauugaaggcggguggacaggaaugguggacggcugguacggcuaucaucaccagaacgagcaagggucuggauacgccgccgaucagaaaagcacgcagaaugcuaucaacggcaucaccaauaagguuaacuccgugauugaaaagaugaauacacaguucaccgcggucgggaaagaguucagcaaacuggagagacggauggaaaaccucaauaagaagguggacgauggauuucuggacaucuggacauacaacgccgagcuucugguucuccuggaaaacgagcgcacccuugacuuccacgauucuaaugugaaaaaccuguaugaaaaggucaaaucccaacucaagaauaacgcuaaagagauuggcaaugggugcuuugaguucuaccauaaguguaacgacgaaugcauggagagcgugaagaauggcacguaugauuaccccaaauauucugaagaguccaagcugaacagagagaaaaucgacggagucaagcuggaaagcaugggcguguaccagauucucgccaucuauuccacaguugccucuagccuggugcuucuggucucccucggggcuaucucuuuuuggaugugcagcaauggaucccugcagugucggauuugcaucuga

SEQ ID NO: 194200 - RNA, 1698 nt, Artificial Sequence
  derived and/or modified CDS sequence (opt5) from hemagglutinin__InfluenzaA__ABW81518
augaaggugaaacugcucguccugcuuugcaccuacacagccacguaugcugacaccaucuguauuggcuaccacgccaacaauagcacagauaccguugacacagugcuggagaagaacgugaccgucacacauuccgugaaucuccuggaagauucucacaacgggaaacuuugccugcucaagggaaucgcgccccugcagcugggcaauuguagcguugcuggguggauucucggaaacccugagugcgaacugcuuaucuccaaagagucuuggagcuauauuguggaaaccccgaaucccgagaacggcacguguuacccuggguauuucgccgacuacgaggaacugagagagcaacucuccucugucagcuccuuugaacgguucgagaucuuucccaaggagagcucuuggccuaaucauaccgugacaggaguuuccgccagcugcucucacaacggcaaguccagcuucuaucgcaaucugcuuuggcugaccggcaaaaacgggcucuaccccaaucugucuaaguccuacgcuaacaauaaagaaaaggaggugcugguccucuggggagugcaucacccuccgaacaucggcgaucagagagcccuguaucacacagaaaacgcuuacgugagcgucguuuccucucauuauagccggcgcuuuacccccgagauugccaaaagaccuaaggugcgggaccaggaagggcgcaucaauuacuauuggacgcuucuggagcccggagauacaauuaucuucgaggcgaacggcaaucucauugccccuagauuugcuuucgcccugucccggggguuuggaagcggcaucauuaccucuaacgcucccauggacgaaugugaugccaagugccagacaccgcaaggcgcgaucaauuccagccuuccuuuccagaacgugcaccccgucaccaucggggaguguccuaaauacgugcgcucugccaagcugagaauggcuaccggacuccggaauauucccagcauccagucccgcggccuguuuggggccauugcuggauucaucgaaggcggguggacaggaaugguugacggcugguauggcuaccaucaccagaacgagcaagggucuggauacgccgccgaucagaaaagcacgcagaaugcuauuaacggcaucaccaauaaggugaacuccgucaucgaaaagaugaauacacaguuuaccgcgguggggaaagaguucagcaaacuggagagacggauggaaaaccucaauaagaagguugacgauggauuccuggacauuuggacauauaacgccgagcuucuggugcuccuggaaaacgagcgcacccuugacuuucacgauucuaaugucaaaaaccuguacgaaaaggugaaaucccaacucaagaauaacgcuaaagagaucggcaaugggugcuucgaguuuuaucauaaguguaacgacgaaugcauggagagcgucaagaauggcacguacgauuaucccaaauacucugaagaguccaagcugaacagagagaaaauugacggagugaagcuggaaagcaugggcguuuaucagauccucgccauuuacuccacaguggccucuagccugguccuucuggugucccucggggcuaucucuuucuggaugugcagcaauggaucccugcagugucggaucugcauuuga

SEQ ID NO: 194201 - RNA, 1698 nt, Artificial Sequence
  derived and/or modified CDS sequence (opt5) from hemagglutinin__InfluenzaA__ABW81519
augaaggugaaacugcucguccugcuuugcaccuucacagccacguacgcugacaccaucuguauuggcuaucacgccaacaauagcacagauaccguugacacagugcuggagaagaacgugaccgucacacauuccgugaaucuccuggaagauucucacaacgggaaacuuugccugcucaagggaaucgcgccccugcagcugggcaauuguagcguugcuggguggauucucggaaacccugagugcgaacugcuuaucuccaaagagucuuggagcuacauuguggaaaccccgaaucccgagaacggcacguguuauccuggguacuuugccgacuaugaggaacugagagagcaacucuccucugucagcuccuucgaacgguuugagaucuuccccaaggagagcucuuggccuaaucauaccgugacaggaguuuccgccagcugcucucacaacggcaaguccagcuuuuaccgcaaucugcuuuggcugaccggcaaaaacgggcucuaucccaaucugucuaaguccuacgcuaacaauaaagaaaaggaggugcugguccucuggggagugcaucacccuccgaacaucggcgaucagagagcccuguaccacacagaaaacgcucaugugagcgucguuuccucucacuauagccggcgcuucacccccgagauugccaaaagaccuaaggugcgggaccaggaagggcgcaucaauuacuauuggacgcuucuggagcccggagauacaauuaucuuugaggcgaacggcaaucucauugccccuagauucgcuuuugcccugucccggggguucggaagcggcaucauuaccucuaacgcucccauggacgaaugugaugccaagugccagacaccgcaaggcgcgaucaauuccagccuuccuuuucagaacgugcaucccgucaccaucggggaguguccuaaauacgugcgcucugccaagcugagaauggcuaccggacuccggaauauucccagcauccagucccgcggccuguucggggccauugcuggauuuaucgaaggcggguggacaggaaugguugacggcugguauggcuaccaccaccagaacgagcaagggucuggauaugccgccgaucagaaaagcacgcagaaugcuauuaacggcaucaccaauaaggugaacuccgucaucgaaaagaugaauacacaguucaccgcgguggggaaagaguucagcaaacuggagagacggauggaaaaccucaauaagaagguugacgauggauuucuggacauuuggacauacaacgccgagcuucuggugcuccuggaaaacgagcgcacccuugacuuccaugauucuaaugucaaaaaccuguacgaaaaggugaaaucccaacucaagaauaacgcuaaagagaucggcaaugggugcuuugaguucuaucacaaguguaacgacgaaugcauggagagcgucaagaauggcacguacgauuaucccaaauacucugaagaguccaagcugaacagagagaaaauugacggagugaagcuggaaagcaugggcguuuaucagauccucgccauuuacuccacaguggccucuagccugguccuucuggugucccucggggcuaucucuuuuuggaugugcagcaauggaucccugcagugucggaucugcauuuga

SEQ ID NO: 194202 - RNA, 1698 nt, Artificial Sequence
  derived and/or modified CDS sequence (opt5) from hemagglutinin__InfluenzaA__ABW81520
augaaggugaaacugcucguccugcuuugcaccuucacagccacguacgcugacaccaucuguauuggcuaucacgccaacaauagcacagauaccguugacacagugcuggagaagaacgugaccgucacacauuccgugaaucuccuggaagauucucacaacgggaaacuuugccugcucaagggaaucgcgccccugcagcugggcagcuguuccguugcuggguggauucucggaaauccugagugcgaacugcuuaucucuaaagagagcugguccuacauuguggaaaccccgaaccccgagaauggcacguguuauccuggguacuuugccgacuaugaggaacugagagagcaacucucuagcgucuccagcuucgaacgguuugagaucuuccccaaggagucuuccuggccuaaccauaccgugacaggaguuagcgccucuugcucccacaauggcaagagcucuuuuuaccgcaaccugcuuuggcugaccggcaaaaaugggcucuaucccaaccuguccaagagcuacgcuaauaacaaagaaaaggaggugcugguccucuggggagugcaucacccuccgaauaucggcgaucagagagcccuguaccacacagaaaacgcuuauguguccgucguuucuagccauuacucccggcgcuucacccccgagauugccaaaagaccuaaggugcgggaccaggaagggcgcaucaacuauuacuggacgcuucuggagcccggagauacaauuaucuuugaggcgaauggcaaccucauugccccuagauucgcuuuugcccugagccggggguucggaucuggcaucauuaccuccaaugcucccauggacgaaugugaugccaagugccagacaccgcaaggcgcgaucaacagcucucuuccuuuucagaaugugcaccccgucaccaucggggaguguccuaaauaugugcgcagcgccaagcugagaauggcuaccggacuccggaacauucccuccauccagucucgcggccuguucggggccauugcuggauuuaucgaaggcggguggacaggaaugguugacggcugguacggcuaucaucaccagaaugagcaagggagcggauacgccgccgaucagaaauccacgcagaacgcuauuaauggcaucaccaacaaggugaauagcgucaucgaaaagaugaacacacaguucaccgcgguggggaaagaguucucuaaacuggagagacggauggaaaaucucaacaagaagguugacgauggauuucuggacauuuggacauacaaugccgagcuucuggugcuccuggaaaacgagcgcacccuugacuuccacgauuccaacgucaaaaaucuguaugaaaaggugaaaagccaacucaagaacaaugcuaaagagaucggcaacgggugcuuugaguucuaccauaaguguaaugacgaaugcauggagucugucaagaacggcacguaugauuaccccaaauauuccgaagagagcaagcugaauagagagaaaauugacggagugaagcuggaauccaugggcguuuaccagauccucgccauuuauucuacaguggccagcucccugguccuucuggugucucucggggcuaucagcuuuuggaugugcuccaacggaagccugcagugucggaucugcauuuga

SEQ ID NO: 194203 - RNA, 1698 nt, Artificial Sequence
  derived and/or modified CDS sequence (opt5) from hemagglutinin__InfluenzaA__ABW81521
augaaggugaaacugcucguccugcuuugcaccuucacagccacguacgcugacaccaucuguauuggcuaucacgccaacaauagcacagauaccguugacacagugcuggagaagaacgugaccgucacacauuccgugaaucuccuggaagauucucacaacgggaaacuuugccugcucaagggaaucgcgccccugcagcugggcaauuguagcguugcuggguggauucucggaaacccugagugcgaacugcuuaucuccaaagagucuuggagcuacauuguggaaaccccgaaucccgagaacggcacguguuauccuggguacuuugccgacuaugaggaacugagagagcaacucuccucugucagcuccuucgaacgguuugagaucuuccccaaggagagcucuuggccuaaucauaccgugacaggaguuuccgccagcugcucucacaacggcaaguccagcuuuuaccgcaaucugcuuuggcugaccggcaaaaacgggcucuaucccaaucugucuaaguccuacgcuaacaauaaagaaaaggaggugcugguccucuggggagugcaucacccuccgaacaucggcgaucagagagcccuguaccacacagaaaacgcuuaugugagcgucguuuccucucauuacagccggcgcuucacccccgagauugccaaaagaccuaaggugcgggaccaggaagggcgcaucaauuauuacuggacgcuucuggagcccggagauacaauuaucuuugaggcgaacggcaaucucauugccccuagauucgcuuuugcccugucccggggguucggaagcggcaucauuucuuccaacgcucccauggacgaaugugaugccaagugccagaccccgcaaggcgcgaucaauagcucucuuccuuuucagaacgugcaccccgucacaaucggggaguguccuaaauaugugcgcagcgccaagcugagaauggcuaccggacuccggaauauucccuccauccagucucgcggccuguucggggccauugcuggauuuaucgaaggcggguggaccggaaugguugacggcugguacggcuaucaucaccagaacgagcaagggagcggauacgccgccgaucagaaauccacacagaaugcuauuaacggcaucacgaauaaggugaacagcgucaucgaaaagaugaauacccaguucacagcgguggggaaagaguucucuaaacuggagagacggauggaaaaccucaauaagaagguugacgauggauuucuggacauuuggaccuacaacgccgagcuucuggugcuccuggaaaacgagcgcacacuugacuuccacgauuccaaugucaaaaaccuguaugaaaaggugaaaagccaacucaagaauaacgcuaaagagaucggcaaugggugcuuugaguucuaccauaaguguaacgacgaaugcauggagucugucaagaauggcaccuaugauuaccccaaauauuccgaagagagcaagcugaacagagagaaaauugacggagugaagcuggaauccaugggcguuuaccagauccucgccauuuauucuacgguggccagcucccugguccuucuggugucucucggggcuaucagcuuuuggaugugcuccaauggaagccugcagugucggaucugcauuuga

SEQ ID NO: 194204 - RNA, 1698 nt, Artificial Sequence; identical to SEQ ID NO: 193457
  derived and/or modified CDS sequence (opt5) from hemagglutinin__InfluenzaA__ABW81522

SEQ ID NO: 194205 - RNA, 1698 nt, Artificial Sequence; identical to SEQ ID NO: 193457
  derived and/or modified CDS sequence (opt5) from hemagglutinin__InfluenzaA__ABW81523

SEQ ID NO: 194206 - RNA, 1698 nt, Artificial Sequence
  derived and/or modified CDS sequence (opt5) from hemagglutinin__InfluenzaA__ABW81524
augaaggugaaacugcucguccugcuuugcaccuucacagccacguacgcugacaccaucuguauuggcuaucacgccaacaauagcacagauaccaucgacacaguucuggagaagaacgugaccgugacacauuccgucaaucuccuggaagauucucacaacgggaaacuuugccugcucaagggaauugcgccccugcagcugggcaauuguagcguggcuggguggauccucggaaacccugagugcgaacugcuuauuuccaaagagucuuggagcuacaucguugaaaccccgaaucccgagaacggcacguguuauccuggguacuuugccgacuaugaggaacugagagagcaacucuccucugugagcuccuucgaacgguuugagaucuuccccaaggagagcucuuggccuaaucauaccgucacaggaguguccgccagcugcucucacaacggcaaguccagcuuuuaccgcaaucugcuuuggcugaccggcaaaaacgggcucuaucccaaucugucuaaguccuacgcuaacaauaaagaaaaggagguucuggugcucuggggaguccaucacccuccgaacauuggcgaucagagagcccuguaccacacagaaaacgcuuaugugagcguggucuccucucauuacagccggcgcuucacccccgagaucgccaaaagaccuaagguucgggaccaggaagggcgcauuaauuauuacuggacgcuucuggagcccggagauacaaucauuuuugaggcgaacggcaaucucaucgccccuagauucgcuuuugcccugucccggggguucggaagcggcauuaucaccucuaacgcucccauggacgaaugugaugccaagugccagacaccgcaaggcgcgaucaauuccagccuuccuuuucagaacgugcaccccgugaccauuggggaguguccuaaauauguccgcucugccaagcugagaauggcuaccggacuccggaauauccccagcauucagucccgcggccuguucggggccaucgcuggauuuauugaaggcggguggacaggaaugguggacggcugguacggcuaucaucaccagaacgagcaagggucuggauacgccgccgaucagaaaagcacgcagaaugcuaucaacggcaucaccaauaagguuaacuccgugauugaaaagaugaauacacaguucaccgcggucgggaaagaguucagcaaacuggagagacggauggaaaaccucaauaagaagguggacgauggauuucuggacaucuggacauacaacgccgagcuucugguucuccuggaaaacgagcgcacccuugacuuccacgauucuaaugugaaaaaccuguaugaaaaggucaaaucccaacucaagaauaacgcuaaagagauuggcaaugggugcuuugaguucuaccauaaguguaacgacgaaugcauggagagcgugaagaauggcacguaugauuaccccaaauauucugaagaguccaagcugaacagagagaaaaucgacggagucaagcuggaaagcaugggcguguaccagauucucgccaucuauuccacaguugccucuagccuggugcuucuggucucccucggggcuaucucuuuuuggaugugcagcaauggaucccugcagugucggauuugcaucuga

SEQ ID NO: 194207 - RNA, 1698 nt, Artificial Sequence
  derived and/or modified CDS sequence (opt5) from hemagglutinin__InfluenzaA__ABW81526
augaaggugaaacugcucguccugcuuugcaccuucacagccacguacgcugacaccaucuguauuggcuaucacgccaacaauagcacagauaccguugacacagugcuggagaagaacgugaccgucacacauuccgugaaucuccuggaagauucucacaacgggaaacuuugccugcucaagggaaucgcgccccugcagcugggcaauuguagcguugcuggguggauucucggaaacccugagugcgaacugcuuaucuccaaagagucuuggagcuacauuguggaaaagccgaaucccgagaacggcaccuguuauccugggcauuuugccgacuacgaggaacugagagagcaacucuccucugucagcuccuucgaacgguuugagaucuuccccaaggagagcucuuggccuaaucacacggugaccggaguuuccgccagcugcucucauaacggcaaauccagcuuuuauaagaaucugcuuuggcugacaggcaaaaacgggcucuaccccaaucugucuaaguccuaugcuaacaauaaagaaaaggaggugcugguccucuggggagugcaccacccuccgaacaucggcgaucagaaggcccuguaccauaccgaaaacgcuuacgugagcgucguuuccucucacuauagccgcaaauucacacccgagauugccaagagaccuaaagugcgggaccaggaagggcgcaucaauuacuauuggacccuucuggagcccggagauacgauuaucuuugaggcgaacggcaaucucauugccccuagauacgcuuucgcccugucccggggguuuggaagcggcaucauuaacucuaaugcucccaugggcaagugugacgccaaaugccagacaccgcaaggggcgaucaacuccagccuuccuuuccagaaugugcaucccgucaccaucggagaauguccuaaguaugugcgcucugccaaacugagaaugguuacaggccuccggaacauucccagcauccagucccgcgggcuguuuggagcuauugccggcuucaucgaagggggauggaccggcaugguggauggcugguacggguaucaccaccagaaugaacaaggaucuggcuacgcugccgaccaaaagagcacccagaacgccauuaaugggaucacaaacaaggucaauuccgugaucgagaaaaugaacacgcaguuuaccgcuguuggaaaggaguucaauaaacuggagagacggauggagaaccucaacaagaaaguggaugacggcuucauugauaucuggacauacaaugcggaacugcuuguccugcucgagaacgaacgcacccuggaccuucaugacagcaaugugaagaaccuguaugagaaggucaaaucucagcucaagaauaacgccaaagaaauugggaauggcugcuuugaguucuaccacaaguguaacgaugagugcauggaauccgugaaaaauggaacauaugacuaccccaaguauagcgaggaaucuaagcugaacagagagaaaaucgauggcguuaagcuggaguccauggggguguaccagauucucgcuaucuauagcaccgucgccuccucucuggugcuucugguuagccucggagccaucuccuuuuggaugugcucuaauggcagccugcagugucggauuugcaucuga

SEQ ID NO: 194208 - RNA, 1698 nt, Artificial Sequence
  derived and/or modified CDS sequence (opt5) from hemagglutinin__InfluenzaA__ABW81527
augaaggugaaacugcucguccugcuuugcaccuucacagccacguacgcugacaccaucuguauuggcuaucacgccaacaauagcacagauaccguugacacagugcuggagaagaacgugaccgucacacauuccgugaaucuccuggaagauucucacaacgggaaacuuugccugcucaagggaaucgcgccccugcagcugggcaauuguagcguugcuggguggauucucggaaacccugagugcgaacugcuuaucuccaaagagucuuggagcuacauuguggaaaccccgaaucccgagaacggcacguguuauccuggguacuuugccgacuaugaggaacugagagagcaacucuccucugucagcuccuucgaacgguuugagaucuuccccaaggagagcucuuggccuaaucauaccgugacaggaguuuccgccagcugcucucacaacggcaaguccagcuuuuaccgcaaucugcuuuggcugaccggcaaaaacgggcucuaucccaaucugucuaaguccuacgcuaacaauaaagaaaaggaggugcugguccucuggggagugcaucacccuccgaacaucggcgaucagagagcccuguaccacacagaaaacgcuuaugugagcgucguuuccucucauuacagccggcgcuucacccccgagauugccaaaagaccuaaggugcggaaucaggaagggcgcaucaacuauuacuggacgcuucuggagcccggagacacaauuaucuuugaggcgaauggcaaccucauugccccuagauucgcuuuugcccugucccggggguucggaagcggcaucauuaccucuaaugcucccauggaugaaugugacgccaagugccagacaccgcaaggcgcgaucaacuccagccuuccuuuucagaaugugcaccccgucaccaucggggaguguccuaaauaugugcgcucugccaagcugagaauggcuaccggacuccggaacauucccagcauccagucccgcggccuguucggggccauugcuggauuuaucgaaggcggguggacaggaaugguugauggcugguacggcuaucaucaccagaaugagcaagggucuggauacgccgccgaccagaaaagcacgcagaacgcuauuaauggcaucaccaacaaggucaauuccgugaucgaaaagaugaacacacaguucaccgcgguggggaaagaguucagcaaacuggagagacggauggaaaaucucaacaagaagguugaugacggauuucuggauauuuggacauacaacgccgagcuucuggugcuccuggaaaaugagcgcacccuugacuuccacgacucuaacgucaaaaaucuguaugaaaaggugaaaucccaacucaagaacaaugcuaaagagaucggcaacgggugcuuugaguucuaccauaaguguaaugaugaaugcauggagagcgucaagaacggcacguaugacuaccccaaauauucugaagaguccaagcugaauagagagaaaauugauggagugaagcuggaaagcaugggcguuuaccagauccucgccauuuauuccacaguggccucuagccugguccuucuggugucccucggggcuaucucuuuuuggaugugcagcaacggaucccugcagugucggaucugcauuuga

SEQ ID NO: 194209 - RNA, 1698 nt, Artificial Sequence
  derived and/or modified CDS sequence (opt5) from hemagglutinin__InfluenzaA__ABW81528
augaaggugaaacugcucguccugcuuugcaccuucacagccacguacgcugacaccaucuguauuggcuaucacgccaacaauagcacagauaccguugacacagugcuggagaagaacgugaccgucacacauuccgugaaucuccuggaagauucucacaacgggaaacuuugccugcucaagggaaucgcgccccugcagcugggcaauuguagcguugcuggguggauucucggaaacccugagugcgaacugcuuaucuccaaagagucuuggagcuacauuguggaaaccccgaaucccgagaacggcacguguuauccugggcauuuugccgacuacgaggaacugagagagcaacucuccucugucagcuccuucgaacgguuugagaucuuccccaaggagagcucuuggccuaaucacaccgugacaggaguuuccgccagcugcucucauaacggcaaguccagcuuuuaucgcaaucugcuuuggcugaccggcaaaaacgggcucuaccccaaucugucuaaguccuaugcuaacaauaaagaaaaggaggugcugguccucuggggaauccaccacccuccgaacauuggcgaucagagagcccuguaccauacagaaaacgcuuacgugagcguggucuccucucacuauagccggcgcuucacccccgagaucgccaaaagaccuaagguucgggaccaggaagggcgcauuaauuacuauuggacgcuucuggagcccagagauacaaucauuuuugaggcgaacggaaaucucaucgccccucgguucgcuuuugcccugucccgcggcuucgggagcggaauuaucaccucuaacgcucccauggacgaaugugaugccaagugccagacaccgcaaggcgcgaucaauuccagccuuccuuuucagaacgugcaucccgugaccauuggcgaguguccuaaauacgucagaucugccaagcugcggauggugaccgggcuccgcaauauccccagcauucaguccagaggacuguucggcgcuaucgccggguuuauugaaggaggcuggacagggaugguugacggaugguauggcuaccaccaccagaacgagcaaggcucuggguaugcugccgaucagaaaagcacgcagaaugccaucaacggaaucaccaauaaggugaacuccgucauugaaaagaugaauacacaguucaccgcugugggcaaagaguucaacaaacuggagcggcgcauggaaaaucucaacaagaagguugacgauggguuucuggacaucuggacauacaacgcggagcuucuggugcuccuggaaaaugagagaacccuugacuuccaugauagcaacgucaaaaaucuguacgaaaaggugaaaucucaacucaagaacaaugccaaagagauuggaaacggcugcuuugaguucuaucacaaguguaaugacgaaugcauggaguccgucaagaacgggacguacgauuaucccaaauacagcgaagagucuaagcugaaucgggagaaaaucgacggcgugaagcuggaauccaugggaguuuaucagauucucgcuaucuacagcacaguggccuccucucugguccuucuggugagccucggcgccaucuccuuuuggaugugcucuaacgggagccugcaguguagaauuugcaucuga

SEQ ID NO: 194210 - RNA, 1698 nt, Artificial Sequence
  derived and/or modified CDS sequence (opt5) from hemagglutinin__InfluenzaA__ABW81529
augaaggugaaacugcucauccugcuuugcaccuucacagccacguacgcugacaccauuuguaucggcuaucacgccaacaauagcacagauaccgucgacacaguucuggagaagaacgugaccgugacacauuccgucaaucuccuggaagauucucacaacgggaaacuuugccugcucaagggaauugcgccccugcagcugggcaauuguagcguggcuggguggauccucggaaacccugagugcgaacugcuuauuuccagagagucuuggagcuacaucguugaaaccccgaaucccgagaacggcacguguuauccuggguacuuugccgacuaugaggaacugcgggagcaacucuccucugugagcuccuucgaacgcuuugagaucuuccccaaagagagcucuuggccuaaucauaccgucacaggaguguccgccagcugcucucacaacggcaaguccagcuuuuacagaaaucugcuuuggcugaccggcaagaacgggcucuaucccaaucugucuaaauccuacgcuaacaauaaggaaaaagagguucugauucucuggggagugcaucacccuccgaacauccgggaucagaugacacuguaccacaccgaaaacgccuaugucagcgugguguccucucauuacagccgcagauucacgcccgagauuacaaagcggccuaaaguccgcgaccaggaaggcagaaucaauuauuacuggacccuucuggagcccggggauacaauuaucuuugaggcuaacggaaaucucauugccccuugguaugcguucgcccugucccggggcuuugggagcggaaucaucaccucuaacgcucccauggacgaaugugaugccaagugccagaccccgaagggcgcuauuaauuccagccuuccuuuccaaaacguucaccccgugacaaucggcgaguguccuaaauacgugcgcucugccaagcugagaauggucacggggcuccggaauauucccagcauccagucccgcggacuguuuggcgcgauugccggguucaucgaaggaggcuggaccgggaugguggacggaugguauggcuaccaucaccagaacgagcagggcucuggguacgcugccgaucagaaaagcacacaaaaugcuaucaacggaauuaccaauaagguuaacuccgugaucgaaaagaugaauacacaguuuaccgccgucggcaaagaguucaacaaacuggagagacggauggaaaaucucaacaagaagguggacgauggguuccuggacauuuggacguauaacgccgagcuucugguucuccuggaaaaugagcgcacacuugacuuucacgauagcaacgugaaaaaucuguacgaaaaggucaaaucucagcucaagaacaaugcuaaagagaucggaaacggcugcuucgaguuuuaucauaaguguaauaacgaaugcauggaguccgugaagaaugggaccuacgacuaucccaaauacagcgaagagucuaagcugaacagagagaaaauugauggcgucaagcuggaauccaugggaguguaucaaauccucgcgaucuacagcaccguugccuccucucuggugcuucuggucagccucggcgcuauuuccuucuggaugugcucuaaugggagccugcagugucggaucugcauuuga

SEQ ID NO: 194211 - RNA, 1698 nt, Artificial Sequence
  derived and/or modified CDS sequence (opt5) from hemagglutinin__InfluenzaA__ABW81530
augaaggugaaacugcucauccugcuuugcaccuucacagccacguacgcugacaccauuuguaucggcuaucacgccaacaauagcacagauaccgucgacacaguucuggagaagaacgugaccgugacacauuccgucaaucuccuggaagauucucacaacgggaaacuuugccugcucaagggaauugcgccccugcagcugggcaauuguagcguggcuggguggauccucggaaacccugagugcgaacugcuuauuuccaaagagucuuggagcuacaucguugaaaccccgaaucccgagaacggcgccuguuauccuggguacuuugccgacuaugaggaacugagagagcaacucuccucugugagcuccuucgaacgguuugagaucuuccccaaggagagcucuuggccuaaucauacggucaccggaguguccgcuagcugcucucacaacggcaaguccagcuuuuaccgcaaucugcuuuggcugacaggcaaaaacgggcucuaucccaaucugucuaaguccuacgccaacaauaaagaaaaggagguucugauucucuggggagugcaucacccuccgaacaucggcgaucagagaacccuguaccacacagaaaacgcuuaugucagcgugguguccucucauuacagccggcgcuucacccccgagauuacgaaaagaccuaagguccgggaccaggaagggcgcaucaauuauuacuggacacuucuggagcccggagauaccauuaucuuugaggccaacggcaaucucauugcgccuugguaugccuucgcucuguccagaggguuuggaagcggcaucaucacaucuaacgcccccauggacgaaugugaugcuaagugccagaccccgcaaggcgccauuaauuccagccuuccuuuccagaacguucaccccgugaccaucggggaguguccuaaauacgugcggucugcgaagcugcgcauggucacaggacucagaaauauucccagcauccagucccggggccuguuuggggccauugcuggauucaucgaaggcggguggacgggaaugguggacggcugguauggcuaccaucaccagaacgagcaagggucuggauacgccgcugaucagaaaagcacccagaaugccaucaaccgcauuacaaauaagguuaacuccgugaucgaaaagaugaauacccaguuuacagccgucggcaaagaguucaacaaacuggagagacggauggaaaaucucaacaagaagguggacgauggguuccuggacauuuggaccuauaacgcugagcuucugguucuccuggaaaaugagcgcacgcuugacuuucacgauagcaacgugaaaaaucuguacgaaaaggucaaaucucaacucaagaacaaugcgaaagagaucggaaacggcugcuucgaguuuuaucauaaguguaauaacgaaugcauggaguccgugaagaaugggacauacgacuaucccaaauacagcgaagagucuaagcugaacagagagaaaauugauggcgucaagcuggacuccaugggaguguaucagauccucgccaucuacagcaccguugcuuccucucuggugcuucuggucagccucggcgccauuuccuucuggaugugcucuaaugggagccugcagugucggaucugcauuuga

SEQ ID NO: 194212 - RNA, 1698 nt, Artificial Sequence; identical to SEQ ID NO: 192398
  derived and/or modified CDS sequence (opt5) from hemagglutinin__InfluenzaA__ABW81531

SEQ ID NO: 194213 - RNA, 1698 nt, Artificial Sequence
  derived and/or modified CDS sequence (opt5) from hemagglutinin__InfluenzaA__ABW81532
augaaggugaaacugcucauccugcuuugcaccuucacagccacguacgcugacaccauuuguaucggcuaucacgccaacaauagcacagauaccgucgacacaguucuggagaagaacgugaccgugacacauuccgucaaucuccuggaagauucucacaacgggaaacuuugccugcucaagggaauugcgccccugcagcugggcaauuguagcguggcuggguggauccucggaaacccugagugcgaacugcuuauuuccaaagagucuuggagcuacaucguugaaaccccgaaucccgagaacggcgccuguuauccuugguacuuugccgacuaugaggaacugagagagcaacucuccucugugagcuccuucgaacgguuugagaucuuccccaaggagagcucuuggccuaaucauacggucaccgggguguccgcuagcugcucucacaacggaaaguccagcuuuuaccgcaaucugcuuuggcugacaggcaaaaacggccucuaucccaaucugucuaaguccuacgccaacaauaaagaaaaggagguucugauucucuggggagugcaucacccuccgaacaucgggaaccagagaacccuguaccacacagaaaaugcuuaugucagcgugguguccucucauuacagccggcgcuucacccccgagauuacgaaaagaccuaagguccgggaucaggaaggccgcaucaacuauuacuggacacuucuggagcccggggacaccauuaucuuugaggccaauggaaaccucauugcgccuugguaugccuucgcucuguccagaggcuuugggagcggaaucaucacaucuaaugcccccauggaugaaugugacgcuaagugccagaccccgcaaggcgccauuaacuccagccuuccuuuccagaauguucaccccgugaccaucggcgaguguccuaaauacgugcggucugcgaagcugcgcauggucacagggcucagaaacauucccagcauccagucccggggacuguuuggcgccauugcuggguucaucgaaggaggcuggacggggaugguggauggaugguauggcuaccaucaccagaaugagcaaggcucuggguacgccgcugaccagaaaagcacccagaacgccaucaauggaauuacaaacaagguuaauuccgugaucgaaaagaugaacacccaguuuacagccgucggcaaagaguucaauaaacuggagcgcagaauggaaaaccucaacaagaagguggaugacggguuccuggauauuuggaccuauaaugcugagcuucugguucuccuggaaaacgagcggacgcuugacuuucacgacagcaaugugaaaaaccuguacgaaaaggucaaaucucaacucaagaauaacgcgaaagagaucggaaauggcugcuucgaguuuuaucauaaguguaacaaugaaugcauggaguccgugaagaacgggacauacgauuaucccaaauacagcgaagagucuaagcugaaucgcgagaaaauugacggcgucaagcuggauuccaugggaguguaucagauccucgccaucuacagcaccguugcuuccucucuggugcuucuggucagccucggcgccauuuccuucuggaugugcucuaacgggagccugcaguguagaaucugcauuuga

SEQ ID NO: 194214 - RNA, 1698 nt, Artificial Sequence; identical to SEQ ID NO: 194028
  derived and/or modified CDS sequence (opt5) from hemagglutinin__InfluenzaA__ABW86321

SEQ ID NO: 194215 - RNA, 1698 nt, Artificial Sequence; identical to SEQ ID NO: 193993
  derived and/or modified CDS sequence (opt5) from hemagglutinin__InfluenzaA__ABW86332

SEQ ID NO: 194216 - RNA, 1698 nt, Artificial Sequence; identical to SEQ ID NO: 193982
  derived and/or modified CDS sequence (opt5) from hemagglutinin__InfluenzaA__ABW86343

SEQ ID NO: 194217 - RNA, 1698 nt, Artificial Sequence; identical to SEQ ID NO: 193986
  derived and/or modified CDS sequence (opt5) from hemagglutinin__InfluenzaA__ABW86354

SEQ ID NO: 194218 - RNA, 1698 nt, Artificial Sequence; identical to SEQ ID NO: 193986
  derived and/or modified CDS sequence (opt5) from hemagglutinin__InfluenzaA__ABW86365

SEQ ID NO: 194219 - RNA, 1698 nt, Artificial Sequence; identical to SEQ ID NO: 194002
  derived and/or modified CDS sequence (opt5) from hemagglutinin__InfluenzaA__ABW86376

SEQ ID NO: 194220 - RNA, 1698 nt, Artificial Sequence; identical to SEQ ID NO: 193986
  derived and/or modified CDS sequence (opt5) from hemagglutinin__InfluenzaA__ABW86387

SEQ ID NO: 194221 - RNA, 1698 nt, Artificial Sequence; identical to SEQ ID NO: 193982
  derived and/or modified CDS sequence (opt5) from hemagglutinin__InfluenzaA__ABW86409

SEQ ID NO: 194222 - RNA, 1698 nt, Artificial Sequence; identical to SEQ ID NO: 193982
  derived and/or modified CDS sequence (opt5) from hemagglutinin__InfluenzaA__ABW86431

SEQ ID NO: 194223 - RNA, 1698 nt, Artificial Sequence; identical to SEQ ID NO: 193986
  derived and/or modified CDS sequence (opt5) from hemagglutinin__InfluenzaA__ABW86442

SEQ ID NO: 194224 - RNA, 1698 nt, Artificial Sequence; identical to SEQ ID NO: 194002
  derived and/or modified CDS sequence (opt5) from hemagglutinin__InfluenzaA__ABW86453

SEQ ID NO: 194225 - RNA, 1698 nt, Artificial Sequence; identical to SEQ ID NO: 193986
  derived and/or modified CDS sequence (opt5) from hemagglutinin__InfluenzaA__ABW86464

SEQ ID NO: 194226 - RNA, 1698 nt, Artificial Sequence; identical to SEQ ID NO: 194002
  derived and/or modified CDS sequence (opt5) from hemagglutinin__InfluenzaA__ABW86475

SEQ ID NO: 194227 - RNA, 1698 nt, Artificial Sequence; identical to SEQ ID NO: 193982
  derived and/or modified CDS sequence (opt5) from hemagglutinin__InfluenzaA__ABW86486

SEQ ID NO: 194228 - RNA, 1698 nt, Artificial Sequence; identical to SEQ ID NO: 194028
  derived and/or modified CDS sequence (opt5) from hemagglutinin__InfluenzaA__ABW86497

SEQ ID NO: 194229 - RNA, 1698 nt, Artificial Sequence; identical to SEQ ID NO: 193986
  derived and/or modified CDS sequence (opt5) from hemagglutinin__InfluenzaA__ABW86508

SEQ ID NO: 194230 - RNA, 1698 nt, Artificial Sequence
  derived and/or modified CDS sequence (opt5) from hemagglutinin__InfluenzaA__ABW86519
augaaggugaaacugcucguccugcuuugcaccuucacagccacguacgcugacaccaucuguauuggcuaucacgccaacaauagcacagauaccguugacacagugcuggagaagaacgugaccgucacacauuccgugaaucuccuggaagauucucacaacgggaaacuuugccugcucaagggaaucgcgccccugcagcugggcaauuguagcguugcuggguggauucucggaaacccugagugcgaacugcuuaucuccaaagagucuuggagcuacauuguggaaaccccgaaucccgagaacggcacguguuauccuggguacuuugccgacuaugaggaacugagagagcaacucuccucugucagcuccuucgaacgguuugagaucuuccccaaggagagcucuuggccuaaucauaccgugacaggaguuuccgccagcugcucucacaacggcaaguccagcuuuuaccgcaaucugcuuuggcugaccggcaaaaacgggcucuaucccaaucugucuaaguccuacgcuaacaauaaagaaaaggaggugcugguccucuggggagugcaucacccuccgaacaucggcgaucagagagcccuguaccacacagaaaacgcuuaugugagcgucguuuccucucauuacagccggcgcuucacccccgagauugccaaaagaccuaaggugcggaaucaggaagggcgcaucaacuauuacuggacgcuucuggagcccggagacacaauuaucuuugaggcgaauggcaaccucauugccccuagauucgcuuuugcccugucccggggguucggaagcggcaucauuaccucuaaugcucccaugggcgaaugugaugccaagugccagacaccgcaaggggcgaucaacuccagccuuccuuuucagaaugugcaccccgucaccaucggagaguguccuaaauaugugcgcucugccaagcugagaaugguuaccggccuccggaacauucccagcauccagucccgcgggcuguucggagcuauugccggcuuuaucgaagggggauggacaggcaugguggacggcugguacggguaucaucaccagaaugagcaaggaucuggcuacgcugccgaucagaaaagcacgcagaacgccauuaaugggaucaccaacaaggucaauuccgugaucgaaaagaugaacacacaguucaccgcuguuggaaaagaguucaauaaacuggagagacggauggaaaaccucaacaagaagguggacgauggcuuucuggacauuuggacauacaaugcggagcuucugguccuccuggaaaacgagcgcacccuugauuuccacgacagcaaugugaaaaaccuguaugaaaaggucaaaucucaacucaagaauaacgccaaagagaucgggaauggcugcuuugaguucuaccauaaguguaacgacgaaugcauggaguccgugaagaauggaacguaugauuaccccaaauauagcgaagagucuaagcugaacagagagaaaauugacggcguuaagcuggaauccauggggguguaccagauccucgcuauuuauagcacagucgccuccucucuggugcuucugguuagccucggagccaucuccuuuuggaugugcucuaauggcagccugcagugucggaucugcauuuga

SEQ ID NO: 194231 - RNA, 1698 nt, Artificial Sequence; identical to SEQ ID NO: 193982
  derived and/or modified CDS sequence (opt5) from hemagglutinin__InfluenzaA__ABW86530

SEQ ID NO: 194232 - RNA, 1698 nt, Artificial Sequence
  derived and/or modified CDS sequence (opt5) from hemagglutinin__InfluenzaA__ABW86541
augaaggugaaacugcucguccugcuuugcaccuucacagccacguacgcugacaccaucuguauuggcuaucacgccaacaauagcacagauaccguugacacagugcuggagaagaacgugaccgucacacauuccgugaaucuccuggaagauucucacaacgggaaacuuugccugcucaagggaaucgcgccccugcagcugggcaauuguagcguugcuggguggauucucggaaacccugagugcgaacugcuuaucuccaaagagucuuggagcuacauuguggaaaccccgaaucccgagaacggcacguguuauccuggguacuuugccgacuaugaggaacugagagagcaacucuccucugucagcuccuucgaacgguuugagaucuuccccaaggagagcucuuggcugaaucauaccgugacaggaguuuccgccagcugcucucacaacggcaaguccagcuuuuaccgcaaucuucuguggcucaccggcaaaaacgggcuguauccuaaucugucuaaguccuacgcuaacaauaaagaaaaggaggugcucguccuguggggagugcaucaucccccuaacaucggcgaucagagagcccuuuaccacacagaaaacgcuuaugugagcgucguuuccucucacuacagccggcgcuucaccccggagauugccaaaagacccaaggugcgggaccaggaagggcgcaucaauuauuacuggacgcugcucgagccuggagauacaauuaucuuugaggcgaacggcaaucugauugcccccagauucgcuuuugcccuuucccggggguucggaagcggcaucauuaccucuaacgcuccuaugggcgaaugugacgccaagugccagacaccccaaggggcgaucaauuccagccugccguuucagaacgugcacccugucaccaucggagagugucccaaauaugugcgcucugccaagcucagaaugguuaccggccugcggaauauuccuagcauccagucccgcgggcuguucggagcuauugccggcuuuaucgaagggggauggacaggcaugguggauggcugguacggguaucaucaccagaacgagcaaggaucuggcuacgcugccgaccagaaaagcacgcagaaugccauuaacgggaucaccaauaaggucaacuccgugaucgaaaagaugaauacacaguucaccgcuguuggaaaagaguucaacaaacucgagagacggauggaaaaucugaacaagaagguggaugacggcuuucuugauauuuggacauacaacgcggagcugcucguccugcuugaaaaugagcgcacccuggacuuccacgacagcaacgugaaaaaucucuaugaaaaggucaaaucucaacugaagaacaaugccaaagagaucgggaacggcugcuuugaguucuaccauaaguguaaugaugaaugcauggaguccgugaagaacggaacguaugacuaccccaaauauagcgaagagucuaagcugaauagagagaaaauugauggcguuaagcucgaauccauggggguguaccagauccuggcuauuuauagcacagucgccuccucucuugugcugcucguuagccugggagccaucuccuuuuggaugugcucuaacggcagccugcagugucggaucugcauuuga

SEQ ID NO: 194233 - RNA, 1698 nt, Artificial Sequence; identical to SEQ ID NO: 193982
  derived and/or modified CDS sequence (opt5) from hemagglutinin__InfluenzaA__ABW86552

SEQ ID NO: 194234 - RNA, 1701 nt, Artificial Sequence
  derived and/or modified CDS sequence (opt5) from hemagglutinin__InfluenzaA__ABW86563
augaagaccaucauugcccugagcuacauccucugccugguguucgcucagaaacuucccggcaacgacaauuccacagccacgcugugucucgggcaccaugcggucccuaacggaaccauuguuaagacaaucaccaaugaucaaauugaggugacaaacgcuaccgaacuggugcagucuagcuccacaggcgagaucugcgacucuccgcaccagauccuugauggggaaaauuguacccugauugacgcccuccugggagauccccagugcgacggcuuucaaaacaaaaagugggaucuguucgucgagagaagcaaagccuauuccaauuguuacccuuaugacgugcccgauuacgcuucucuccggagccugguugccuccagcgggacgcuugaauuuaacaaugagucuuucaacuggaccggagugacacagaauggcaccuccagcgcuugcauccgcagaucuaacaauuccuuuuucagccggcugaacuggcucacacaucugaaguuuaaguauccugcccuuaaugucaccaugcccaacaacgagaaauucgacaagcuguacauuuggggcgugcaccauccugggacggauaaugaccagaucuuucucuaugcgcaggccucuggacgcauuacaguuuccaccaaaagaagccaacagacagugaucccgaacauuggcucccggccccgcgucagaaauaucccuucucggaucagcauuuacuggaccaucgugaagcccggggauauucugcugaucaacuccaccggaaaucucauugcuccucgcggcuacuucaaaaucagaagcgggaagucuuccaucaugcggagcgacgcccccauuggaaaguguaacucugaaugcaucacaccgaauggcagcauuccuaacgacaaacccuuucagaaugugaaccgcaucacguauggcgcuuguccuagauacgucaagcagaauacccugaaacuugccacagggaugcggaacguucccgagaagcaaacccgcggaauuuucggcgcgaucgccggguuuaucgaaaauggaugggagggcaugguggaugggugguauggauucagacaccagaacuccgagggcauuggccaggcugccgaccugaaaucuacacaagcugccaucgaucagauuaaugggaagcucaaccggcugaucggaaaaaccaacgaaaaguuccaccagauugagaaggaauuuagcgagguggaaggcagaauccaggaccuugagaaauacgucgaggauacgaagauugaccugugguccuauaaugccgaacuccugguggcucuggagaaccaacauacaaucgaucucaccgacagcgaaaugaauaaacuguucgagaagaccaaaaagcagcuucgcgaaaacgcggaggauauggggaauggaugcuuuaagaucuaccacaaaugugacaacgccugcauuggcucuauccggaaugggacauaugaucaugacguuuacagagacgaggcucugaacaaucgcuuccagauuaagggcguggaacucaaauccggacacaaggauuggauccuguggauuagcuuugccaucucuugcuuccuucugugugucgcccuccugggcuuuaucaugugggcuugccagaaagggaacauucgguguaauaucugcauuuga

SEQ ID NO: 194235 - RNA, 1698 nt, Artificial Sequence; identical to SEQ ID NO: 194019
  derived and/or modified CDS sequence (opt5) from hemagglutinin__InfluenzaA__ABW86606

SEQ ID NO: 194236 - RNA, 1701 nt, Artificial Sequence; identical to SEQ ID NO: 192993
  derived and/or modified CDS sequence (opt5) from hemagglutinin__InfluenzaA__ABW91185

SEQ ID NO: 194237 - RNA, 1701 nt, Artificial Sequence
  derived and/or modified CDS sequence (opt5) from hemagglutinin__InfluenzaA__ABW91196
augaagaccaucauugcccugagcuacauccucugccugguguucgcucagaaacuucccggcaacgacaauuccacagccacgcugugucucgggcaccaugcggucccuaacggaaccauuguuaagacaaucaccaaugaucaaauugaggugacaaacgcuaccgaacuggugcagucuagcuccacaggcgagaucugcaauucuccgcaccagauccuugacggggaaaacuguacccugauugaugcccuccugggagacccccagugcgauggcuuucaaaauaaaaagugggaccuguucgucgagagaagcaaagccuauuccaacuguuacccuuaugaugugcccgacuacgcuucucuccggagccugguugccuccagcgggacgcuugaauuuaauaacgagucuuucaauuggaccggagugacacagaacggcaccuccagcgcuugcauccgcagaucuaauaacuccuuuuucagccggcugaauuggcucacacaucugaaguuuaaguauccugcccuuaacgucaccaugcccaacaaugagaaauucgauaagcuguacauuuggggcgugcaccauccugggacggacaacgaucagaucuuucucuaugcgcaggccucuggacgcauuacaguuuccaccaaaagaagccaacagacagugaucccgaauauuggcucccggccccgcgucagaaacaucccuucucggaucagcauuuacuggaccaucgugaagcccggggacauucugcugaucaauuccaccggaaaccucauugcuccucgcggcuacuucaaaaucagaagcgggaagucuuccaucaugcggagcgaugcccccauuggaaaguguaauucugaaugcaucacaccgaacggcagcauuccuaaugacaaacccuuucagaacgugaaucgcaucacguauggcgcuuguccuagauacgucaagcagaacacccugaaacuugccacagggaugcggaauguucccgagaagcaaacccgcggaauuuucggcgcgaucgccggguuuaucgaaaacggaugggagggcaugguggacgggugguauggauucagacaccaaaauuccgagggcauuggccaggcugccgaucugaaaucuacacaggcugccaucgaccagauuaacgggaagcucaaccggcugaucggaaaaaccaaugaaaaguuccaccagauugagaaggaauuuagcgagguggaaggcagaauccaggaucuugagaaauacgucgaggacacgaagauugaucugugguccuauaacgccgaacuccugguggcucuggagaaucaacauacaaucgaccucaccgauagcgaaaugaacaaacuguucgagaagaccaaaaagcagcuucgcgaaaaugcggaggacauggggaacggaugcuuuaagaucuaccacaaaugugauaaugccugcauuggcucuauccggaacgggacauaugaccaugauguuuacagagacgaggcucugaauaaccgcuuccagauuaagggcguggaacucaaauccggauacaaggacuggauccuguggauuagcuuugccaucucuugcuuccuucugugugucgcccuccugggcuuuaucaugugggcuugccagaaagggaauauucgguguaacaucugcauuuga

SEQ ID NO: 194238 - RNA, 1701 nt, Artificial Sequence; identical to SEQ ID NO: 194237
  derived and/or modified CDS sequence (opt5) from hemagglutinin__InfluenzaA__ABW91207

SEQ ID NO: 194239 - RNA, 1698 nt, Artificial Sequence; identical to SEQ ID NO: 193982
  derived and/or modified CDS sequence (opt5) from hemagglutinin__InfluenzaA__ABW91218

SEQ ID NO: 194240 - RNA, 1701 nt, Artificial Sequence; identical to SEQ ID NO: 194000
  derived and/or modified CDS sequence (opt5) from hemagglutinin__InfluenzaA__ABW91240

SEQ ID NO: 194241 - RNA, 1701 nt, Artificial Sequence
  derived and/or modified CDS sequence (opt5) from hemagglutinin__InfluenzaA__ABW91251
augaagaccaucauugcccugagcuacauccucugccugguguucgcucagaaacuucccggcaacgacaauuccacagccacgcugugucucgggcaccaugcggucccuaacggaaccauuguuaagacaaucaccaaugaucaaauugaggugacaaacgcuaccgaacuggugcagucuagcuccacaggcgagaucugcgacucuccgcaccagauccuugauggggaaaauuguacccugauugacgcccuccugggagauccccagugcgacggcuuucaaaacaaaaagugggaucuguucgucgagagaagcaaagccuauuccaauuguuacccuuaugacgugcccgauuacgcuucucuccggagccugguugccuccagcgggacgcuugaauuuaacaaugagucuuucaacuggaccggagugacacagaauggcaccuccagcgcuugcauccgcagaucuaacaauuccuuuuucagccggcugaacuggcucacacaucugaaguuuaaguauccugcccuuaaugucaccaugcccaacaacgagaaauucgacaagcuguacauuuggggcgugcaccauccugggacggauaaugaccagaucuuucucuaugcgcaggccucuggacgcauuacaguuuccaccaaaagaagccaacagacagugaucccgaacauuggcucccggccccgcgucagaaauaucccuucucggaucagcauuuacuggaccaucgugaaguccggggauauucugcugaucaacagcaccggaaaucucauugcuccccgcggcuacuucaaaaucagaucugggaaguccagcaucaugcggucugacgccccuauuggaaaguguaacagcgaaugcaucacacccaauggcuccauuccgaacgacaaaccuuuucagaaugugaaccgcaucacguauggcgcuugucccagauacgucaagcagaauacccugaaacuugccacagggaugcggaacguuccugagaagcaaacccgcggaauuuucggcgcgaucgccggguuuaucgaaaauggaugggagggcaugguggaugggugguauggauucagacaccagaacucugagggcauuggccaggcugccgaccugaaaagcacacaagcugccaucgaucagauuaaugggaagcucaaccggcugaucggaaaaaccaacgaaaaguuccaccagauugagaaggaauuuuccgagguggaaggcagaauccaggaccuugagaaauacgucgaggauacgaagauugaccuguggagcuauaaugccgaacuccugguggcucuggagaaccaacauacaaucgaucucaccgacucugaaaugaauaaacuguucgagaagaccaaaaagcagcuucgcgaaaacgcggaggauauggggaauggaugcuuuaagaucuaccacaaaugugacaacgccugcauuggcuccauccggaaugggacauaugaucaugacguuuacagagacgaggcucugaacaaucgcuuccagauuaagggcguggaacucaaaagcggauacaaggauuggauccuguggauuucuuuugccaucuccugcuuccuucugugugucgcccuccugggcuuuaucaugugggcuugccagaaagggaacauucgguguaauaucugcauuuga

SEQ ID NO: 194242 - RNA, 1701 nt, Artificial Sequence; identical to SEQ ID NO: 194000
  derived and/or modified CDS sequence (opt5) from hemagglutinin__InfluenzaA__ABW91262

SEQ ID NO: 194243 - RNA, 1698 nt, Artificial Sequence; identical to SEQ ID NO: 194017
  derived and/or modified CDS sequence (opt5) from hemagglutinin__InfluenzaA__ABW91273

SEQ ID NO: 194244 - RNA, 1698 nt, Artificial Sequence
  derived and/or modified CDS sequence (opt5) from hemagglutinin__InfluenzaA__ABW91284
augaaggugaaacugcucguccugcuuugcaccuucacagccacguacgcugacaccaucuguauuggcuaucacgccaacaauagcacagauaccguugacacagugcuggagaagaacgugaccgucacacauuccgugaaucuccuggaagauucucacaacgggaaacuuugccugcucaagggaaucgcgccccugcagcugggcaauuguagcguugcuggguggauucucggaaacccugagugcgaacugcuuaucuccagagagucuuggagcuacauuguggaaaaaccgaaucccgagaacggcaccuguuauccugggcauuuugccgacuacgaggaacugcgggagcaacucuccucugucagcuccuucgaacgcuuugagaucuuccccaaggagagcucuuggccuaaucacacgaccacaggaguguccgccagcugcucucauaacggcgaauccagcuuuuauaagaaucugcuuuggcugaccggcaaaaacgggcucuaccccaaucugucuaaguccuaugcuaacaauaaagagaaggaaguucuggugcucuggggaguccaccacccuccgaacaucggcgaucagagagcccuguaccauacagagaacgcuuacgugagcguggucuccucucacuauagccggaaauucacccccgaaauugccaagcgcccuaagguuagagaccaggaggggcggaucaauuacuauuggacgcuucuggagcccggagauacaauuaucuuugaagcgaacggcaaucucauugccccucgcuacgcuuucgcccuguccagaggguuuggaagcggcaucauuaacucuaaugcuuccaugggcgagugugacgccaaaugccagacaccccaaggggcgaucaacagcucucuuccguuccagaaugugcauccugugaccaucggagaaugucccaaguauguccggagcgccaaacugcgcauggugaccggccucagaaacauuccuuccauccagucucgggggcuguuuggagcuauugccggcuucaucgaagggggauggaccggcaugguugauggcugguacggguaucaccaccagaaugagcaaggaagcggcuacgcugccgaccagaaguccacacagaacgccauuaaugggaucacgaacaaagugaauagcgucaucgagaagaugaacacccaguuuacagcugugggaaaagaguucaauaagcuggaacgcagaauggagaaccucaacaagaaaguugaugacggcuucauugauaucuggaccuacaaugcggaacugcuugugcugcucgagaacgaacggacacuggacuuucaugacucuaaugucaagaaccuuuaugagaaagugaagucccaacugaaaaauaacgccaaggagauugggaauggcugcuucgaauuuuaccacaaguguaacgaugagugcauggaaagcgucaaaaauggaaccuaugacuaccccaaguauucugaggaguccaaacucaaccgcgaaaagaucgauggcgugaaacuggagagcauggggguuuaccagauucuggcuaucuauuccacgguggccucuagccucguccugcuugugucccugggagccaucucuuucuggaugugcagcaauggcucccuccaguguagaauuugcaucuga

SEQ ID NO: 194245 - RNA, 1698 nt, Artificial Sequence; identical to SEQ ID NO: 194017
  derived and/or modified CDS sequence (opt5) from hemagglutinin__InfluenzaA__ABW91295

SEQ ID NO: 194246 - RNA, 1698 nt, Artificial Sequence; identical to SEQ ID NO: 193986
  derived and/or modified CDS sequence (opt5) from hemagglutinin__InfluenzaA__ABW91306

SEQ ID NO: 194247 - RNA, 1698 nt, Artificial Sequence; identical to SEQ ID NO: 193986
  derived and/or modified CDS sequence (opt5) from hemagglutinin__InfluenzaA__ABW91317

SEQ ID NO: 194248 - RNA, 1698 nt, Artificial Sequence
  derived and/or modified CDS sequence (opt5) from hemagglutinin__InfluenzaA__ABW91328
augaaggugaaacugcucauccugcuuugcaccuucacagccacguacgcugacaccauuuguaucggcuaucacgccaacaauagcacagauaccgucgacacaguucuggagaagaacgugaccgugacacauuccgucaaucuccuggaagauucucacaacgggaaacuuugccugcucaagggaauugcgccccugcagcugggcaauuguagcguggcuggguggauccucggaaacccugagugcgaacugcuuauuuccaaagagucuuggagcuacaucguugaaaccccgaaucccgagaacggcacguguuauccuggguacuuugccgacuaugaggaacugagagagcaacucuccucugugagcuccuucgaacgguuugagaucuuccccaaggagagcucuuggccuaaucauaccgucacaggaguguccgccagcugcucucacaacggcaaguccagcuuuuaccgcaaucugcuuuggcugaccggcaaaaacgggcucuaucccaaucugucuaaguccuacgcuaacaauaaagaaaaggagguucuggugcucuggggaguccaucacccuccgaacauuggcgaucagagagcccuguaccacacagaaaacgcuuaugugagcguggucuccucucauuacagccggcgcuucacccccgagaucgccaaaagaccuaagguucgggaccaggaagggcgcauuaauuauuacuggacgcuucuggagcccggagauacaaucauuuuugaggcgaacggcaaucucaucgccccuagauucgcuuuugcccugucccggggguucggaagcggcauuaucaccucuaacgcucccauggacgaaugugaugccaagugccagacaccgcaaggcgcgaucaauuccagccuuccuuuucagaacgugcaccccgugaccauuggggaguguccuaaauauguccgcucuaccaagcugagaauggugacaggacuccggaauauccccagcauucagucccgcggccuguucggggccaucgcuggauuuauugaaggcggguggacgggaaugguugacggcugguacggcuaucaucaccagaacgagcaagggucuggauacgccgcugaucagaaaagcacccagaaugccaucaacggcaucacaaauaaggugaacuccgucauugaaaagaugaauacccaguucacagccguggggaaagaguucaacaaacuggagagacggauggaaaaucucaacaagaagguugacgauggauuucuggacaucuggaccuacaacgcugagcuucuggugcuccuggaaaaugagcgcacgcuugacuuccacgauagcaacgucaaaaaucuguaugaaaaggugagaucucaacucaaaaacaaugcgaaggagauuggcaacgggugcuuugaguucuaccauaaauguaaugacgaaugcauggaguccgucaagaacggcacauaugauuaccccaaguauagcgaagagucuaaacugaaucgggagaagaucgacggagugaaacuggaauccaugggcguuuaccagauucucgccaucuauagcaccguggcuuccucucugguccuucuggugagccucggggccaucuccuuuuggaugugcucuaacggaagccugcaguguagaauuugcaucuga

SEQ ID NO: 194249 - RNA, 1698 nt, Artificial Sequence; identical to SEQ ID NO: 193986
  derived and/or modified CDS sequence (opt5) from hemagglutinin__InfluenzaA__ABW91339

SEQ ID NO: 194250 - RNA, 1698 nt, Artificial Sequence; identical to SEQ ID NO: 193986
  derived and/or modified CDS sequence (opt5) from hemagglutinin__InfluenzaA__ABW91350

SEQ ID NO: 194251 - RNA, 1698 nt, Artificial Sequence
  derived and/or modified CDS sequence (opt5) from hemagglutinin__InfluenzaA__ABW91361
augaaggugaaacugcucguccugcuuugcaccuucacagccacguacgcugacaccaucuguauuggcuaucacgccaacaauagcacagauaccguugacacagugcuggagaagaacgugaccgucacacauuccgugaaucuccuggaagauucucacaacgggaaacuuugccugcucaagggaaucgcgccccugcagcugggcaauuguagcguugcuggguggauucucggaaacccugagugcgaacugcuuaucuccaaagagucuuggagcuacauuguggaaaccccgaaucccgagaacggcacguguuauccuggguacuuugccgacuaugaggaacugagagagcaacucuccucugucagcuccuucgaacgguuugagaucuuccccaaggagagcucuuggccuaaucauaccgugacaggaguuuccgccagcugcucucacaacggcgaauccagcuuuuaccgcaaucugcuuuggcugaccggcaagaacgggcucuaucccaaucugucuaaauccuacgcuaacaauaaggagaaagaagugcugguccucuggggagugcaucacccuccgaacaucggcgaucagagagcccuguaccacacagagaacgcuuaugugagcgucguuuccucucauuacagccggcgcuucacccccgaaauugccaagagaccuaaagugcgggaccaggaggggcgcaucaauuauuacuggacgcuucuggagcccggagauacaauuaucuuugaagcgaacggcaaucucauugccccuagauucgcuuuugcccugucccggggguucggaagcggcaucauuaccucuaacgcucccauggacaagugugaugccaagugccagacaccgcaaggcgcgaucaauuccagccuuccuuuucagaacgugcaccccgucaccaucggggaguguccuaaauaugugcgcucuaccaagcugagaaugguuacaggacuccggaauauucccagcauccagacgcgcggccuguucggggccauugcuggauuuaucgaaggcggguggaccggaaugguggacggcugguacggcuaucaucaccagaacgagcaaggguccggauacgccgcugaucagaaaucuacacagaaugccauuaacggcaucaccaauaaggucaacagcgugaucgaaaagaugaauacacaguucaccgccguugggaaagaguucaacaaacuggagagacggauggaaaaucucaacaagaagguggacgauggauuucuggacauuuggacguacaacgcugagcuucugguccuccuggaaaaugagcgcacacuugacuuccacgauuccaacgugaaaaaucuguaugaaaaggucaaaagccaacucaagaacaaugcgaaagagaucggcaacgggugcuuugaguucuaccauaaguguaaugacgaaugcauggagucugugaagaacggcaccuaugauuaccccaaauauuccgaagagagcaagcugaauagagagaaaauugacggaguuaagcuggaaucuaugggcguguaccagauccucgccauuuauuccaccgucgcuagcucccuggugcuucugguuucucucggggccaucagcuuuuggaugugcuccaacggaucucugcagugucggaucugcauuuga

SEQ ID NO: 194252 - RNA, 1698 nt, Artificial Sequence; identical to SEQ ID NO: 193986
  derived and/or modified CDS sequence (opt5) from hemagglutinin__InfluenzaA__ABW91372

SEQ ID NO: 194253 - RNA, 1698 nt, Artificial Sequence; identical to SEQ ID NO: 194019
  derived and/or modified CDS sequence (opt5) from hemagglutinin__InfluenzaA__ABW91383

SEQ ID NO: 194254 - RNA, 1701 nt, Artificial Sequence; identical to SEQ ID NO: 194059
  derived and/or modified CDS sequence (opt5) from hemagglutinin__InfluenzaA__ABW91394

SEQ ID NO: 194255 - RNA, 1698 nt, Artificial Sequence; identical to SEQ ID NO: 194028
  derived and/or modified CDS sequence (opt5) from hemagglutinin__InfluenzaA__ABW91405

SEQ ID NO: 194256 - RNA, 1698 nt, Artificial Sequence
  derived and/or modified CDS sequence (opt5) from hemagglutinin__InfluenzaA__ABW91416
augaaggugaaacugcucguccugcuuugcaccuucacagccacguacgcugacaccaucuguauuggcuaucacgccaacaauagcacagauaccguugacacagugcuggagaagaacgugaccgucacacauuccgugaaucuccuggaagauucucacaacgggaaacuuugccugcucaagggaaucgcgccccugcagcugggcaauuguagcguugcuggguggauucucggaaacccugagugcgaacugcuuaucuccaaagagucuuggagcuacauuguggaaaccccgaaucccgagaacggcacguguuauccuggguacuuugccgacuaugaggaacugagagagcaacucuccucugucagcuccuucgaacgguuugagaucuuccccaaggagagcucuuggccuaaucauaccgugacaggaguuuccgccagcugcucucacaacggcaaguccagcuuuuaccgcaaucugcuuuggcugaccggcaaaaacgggcucuaucccaaucugucuaaguccuacgcuaacaauaaagaaaaggaggugcugguccucuggggagugcaucacccuccgaacaucggcgaucagaaagcccuguaccacacagaaaacgcuuaugugagcgucguuuccucucauuacagcagacgguucacccccgagauugccaagcgcccuaaggugagagaccaggaagggcggaucaauuauuacuggacgcuucuggagcccggagauacaauuaucuuugaggcgaacggcaaucucauugccccucgcuucgcuuuugcccuguccagaggguucggaagcggcaucauuaccucuaacgcucccaugggcgaaugugacgccaaaugccagacaccgcaaggggcgaucaauuccagccuuccuuuucagaacgugcaccccgucaccaucggagaguguccuaaguaugugcggucugccaaacugcgcaugguuaccggccucagaaauauucccagcauccagucccgggggcuguucggagcuauugccggcuuuaucgaagggggauggacaggcaugguggauggcugguacggguaucaucaccagaacgagcaaggaucuggcuacgcugccgaccaaaagagcacgcagaaugccauuaacgggaucaccaauaaagucaacuccgugaucgaaaagaugaauacacaguucaccgcuguuggaaaagaguucaacaagcuggagcgcagaauggaaaaucucaacaagaaaguggaugacggcuuucuggauauuuggacauacaacgcggagcuucugguccuccuggaaaaugagcggacccuugacuuccacgacagcaacgugaagaaucuguaugaaaaagucaagucucagcucaaaaacaaugccaaggagaucgggaacggcugcuuugaguucuaccauaaguguaaugaugaaugcauggaguccgugaaaaacggaacguaugacuaccccaaguauagcgaagagucuaaacugaaucgcgagaagauugauggcguuaaacuggaauccauggggguguaccagauccucgcuauuuauagcacagucgccuccucucuggugcuucugguuagccucggagccaucuccuuuuggaugugcucuaacggcagccugcaguguagaaucugcauuuga

SEQ ID NO: 194257 - RNA, 1698 nt, Artificial Sequence; identical to SEQ ID NO: 194131
  derived and/or modified CDS sequence (opt5) from hemagglutinin__InfluenzaA__ABW91427

SEQ ID NO: 194258 - RNA, 1701 nt, Artificial Sequence; identical to SEQ ID NO: 194000
  derived and/or modified CDS sequence (opt5) from hemagglutinin__InfluenzaA__ABW91438

SEQ ID NO: 194259 - RNA, 1698 nt, Artificial Sequence; identical to SEQ ID NO: 194028
  derived and/or modified CDS sequence (opt5) from hemagglutinin__InfluenzaA__ABW91449

SEQ ID NO: 194260 - RNA, 1698 nt, Artificial Sequence; identical to SEQ ID NO: 194028
  derived and/or modified CDS sequence (opt5) from hemagglutinin__InfluenzaA__ABW91460

SEQ ID NO: 194261 - RNA, 1698 nt, Artificial Sequence
  derived and/or modified CDS sequence (opt5) from hemagglutinin__InfluenzaA__ABW91471
augaaggugaaacugcucguccugcuuugcaccuucacagccacguacgcugacaccaucuguauuggcuaucacgccaacaauagcacagauaccguugacacagugcuggagaagaacgugaccgucacacauuccgugaaucuccuggaagauucucacaacgggaaacuuugccugcucaagggaguugcgccccugcagcugggcaauuguagcguggcuggguggauccucggaaacccugagugcgaacugcuuauuuccaaagagucuuggagcuacaucgucgaaaccccgaaucccgagaacggcacguguuauccuggguacuuugccgacuaugaggaacugagagagcaacucuccucugugagcuccuucgaacgguuugagauuuuccccaaggagagcucuuggccuaaucauaccguuacaggaguguccgccagcugcucucacaacggcaaguccagcuuuuaccgcaaucugcuuuggcugaccggcaaaaacgggcucuaucccaaucugucuaaguccuacgcuaacaauaaagaaaaggagguccuggugcucuggggagugcaucacccuccgaacaucggcgaucagagagcccuguaccacacagaaaacgcuuaugucagcguuguguccucucauuacagccggcgcuucacccccgagaucgccaaaagaccuaaggugcgggaccaggaagggcgcauuaauuauuacuggacgcuucuggagcccggagauacaaucauuuuugaggcgaacggcaaucucaucgccccuagauucgcuuuugcccugucccggggguucggaagcggcauuaucaccucuaacgcucccauggacgaaugugaugccaagugccagacaccgcaaggcgcgauuaauuccagccuuccuuuucagaacguccaccccgugaccaucggggaguguccuaaauauguucgcucuaccaagcugagaauggugacaggacuccggaauauccccagcauucagucccgcggccuguucggggccaucgcuggauuuauugaaggcggguggacgggaauggucgacggcugguacggcuaucaucaccagaacgagcaagggucuggauacgccgcugaucagaaaagcacccagaaugccaucaacggcauuacaaauaaggugaacuccguuaucgaaaagaugaauacccaguucacagccguggggaaagaguucaacaaacuggagagacggauggaaaaucucaacaagaaggucgacgauggauuucuggacaucuggaccuacaacgcugagcuucuggugcuccuggaaaaugagcgcacgcuugacuuccacgauagcaacgucaaaaaucuguaugaaaaggugaaaucucaacucaagaacaaugcgaaagagauuggcaacgggugcuuugaguucuaccauaaguguaaugacgaaugcauggaguccguuaagaacggcacauaugauuaccccaaauauagcgaagagucuaagcugaauagagagaaaaucgacggagugaagcuggaauccaugggcgucuaccagauucucgccaucuauagcaccguggcuuccucucugguucuucuggugagccucggggccauuuccuuuuggaugugcucuaacggaagccugcagugucggaucugcaucuga

SEQ ID NO: 194262 - RNA, 1698 nt, Artificial Sequence
  derived and/or modified CDS sequence (opt5) from hemagglutinin__InfluenzaA__ABW91482
augaaggugaaacugcucguccugcuuugcaccuucacagccacguacgcugacaccaucuguauuggcuaucacgccaacaauagcacagauaccguugacacagugcuggagaagaacgugaccgucacacauuccgugaaucuccuggaagauagacacaacgggaaacuuugccugcucaagggaaucgcgccccugcagcugggcaauuguucuguugcuggguggauucucggaaacccugagugcgaacugcuuaucagcaaagaguccuggucuuacauuguggaaaccccgaaucccgagaacggcacguguuauccuggguacuuugccgacuaugaggaacugcgggagcaacucagcuccgucucuagcuucgaacgcuuugagaucuuccccaaggaguccagcuggccuaaucauaccgugacaggaguuucugccuccugcagccacaacggcagaucuuccuuuuaccggaaucugcuuuggcugaccggcaagaacgggcucuaucccaaucugagccgcucuuacgcuaacaauaaagaaaaggaggugcugguccucuggggagugcaucacccuccgaacaucggcgaucagagagcccuguaccacacagaaaacgcuuauguguccgucguuagcucccauuacucucggcgcuucacccccgagauugccaaaagaccuaaggugcgggaccaggaagggcgcaucaauuauuacuggacgcuucuggagcccggagauacaauuaucuuugaggcgaacggcaaucucauugccccuagauucgcuuuugcccugagccggggguucggauccggcaucauuaccagcaacgcucccauggacgaaugugaugccaaaugccagacaccgcaaggcgcgaucaauucuucccuuccuuuucagaacgugcaccccgucaccaucggggaguguccuaaguaugugcgcagcgccaagcugagaaugguuaccggacuccggaauauucccucuauccagagccgcggccuguucggggcuauugccggauuuaucgaaggcggguggacaggaaugguggacggcugguacggcuaucaucaccagaacgagcaaggguccggauacgcugccgaucagaaaucuacgcagaaugccauuaacggcaucaccaauaaggucaacagcgugaucgaaaagaugaauacacaguucaccgcuguugggaaagaguucaacaaacuggagagacggauggaaaaucucaacaagaaaguggacgauggauuucuggacauuuggacauacaacgcggagcuucugguccuccuggaaaaugagagaacccuugacuuccacgauuccaacgugaagaaucuguaugaaaaggucaaaagccaacucaagaacaaugccaaagagaucggcaacgggugcuuugaguucuaccauaaguguaaugacgaaugcauggagucugugaaaaacggcacguaugauuaccccaaguauuccgaagagagcaagcugaaucgcgagaaaauugacggaguuaagcuggaaucuaugggcguguaccagauccucgcuauuuauuccacagucgccagcucccuggugcuucugguuucucucggggccaucagcuuuuggaugugcuccaacggaucucugcagugucggaucugcauuuga

SEQ ID NO: 194263 - RNA, 1698 nt, Artificial Sequence
  derived and/or modified CDS sequence (opt5) from hemagglutinin__InfluenzaA__ABW91493
augaaggugaaacugcucauccugcuuugcaccuucacagccacguacgcugacaccauuuguaucggcuaucacgccaacaauagcacagauaccgucgacacaguucuggagaagaacgugaccgugacacauuccgucaaucuccuggaagauucucacaacgggaaacuuugccugcucaagggaauugcgccccugcagcugggcaauuguagcguggcuggguggauccucggaaacccugagugcgaacugcuuauuuccaaagagucuuggagcuacaucguugaaaccccgaaucccgagaacggcacguguuauccuggguacuuugccgacuaugaggaacugagagagcaacucuccucugugagcuccuucgaacgguuugagaucuuccccaaggagagcucuuggccuaaucauaccgucacaggaguguccgccagcugcucucacaacggcaaguccagcuuuuaccgcaaucugcuuuggcugaccggcaaaaacgggcucuaucccaaucugucuaaguccuacgcuaacaauaaagaaaaggagguucuggugcucuggggaguccaucacccuccgaacauuggcgaucagagagcccuguaccacacagaaaacgcuuaugugagcguggucuccucucauuacagccggcgcuucacccccgagaucgccaaaagaccuaagguucgggaccaggaagggcgcauuaauuauuacuggacgcuucuggagcccggagauacaaucauuuuugaggcgaacggcaaucucaucgccccuagauucgcuuuugcccugucccggggguucggaagcggcauuaucaccucuaacgcucccauggacgaaugugaugccaagugccagacaccgcaaggcgcgaucaauuccagccuuccuuuucagaacgugcaccccgugaccauuggggaguguccuaaauauguccgcucuaccaagcugagaauggugacaggacuccggaauauccccagcauucagucccgcggccuguucggggccaucgcuggauuuauugaaggcggguggacgggaaugguugacggcugguacggcuaucaucaccagaacgagcaagggucuggauacgccgcugaucagaaaagcacccagaaugccaucaacggcaucacaaauaaggugaacuccgucauugaaaagaugaauacccaguucacagccguggggaaagaguucaacaaacuggagaagagaauggaaaaucucaacaagaaaguugacgauggauuucuggacaucuggaccuacaacgcugagcuucuggugcuccuggaaaaugagcggacgcuugacuuccacgauagcaacgucaagaaucuguaugaaaaagugaagucucaacucaaaaacaaugcgaaggagauuggcaacgggugcuuugaguucuaccauaaguguaaugacgaaugcauggaguccgucaaaaacggcacauaugauuaccccaaguauagcgaagagucuaaacugaaucgcgagaagaucgacggagugaaacuggaauccaugggcguuuaccagauucucgccaucuauagcaccguggcuuccucucugguccuucuggugagccucggggccaucuccuuuuggaugugcucuaacggaagccugcaguguagaauuugcaucuga

SEQ ID NO: 194264 - RNA, 1698 nt, Artificial Sequence; identical to SEQ ID NO: 194002
  derived and/or modified CDS sequence (opt5) from hemagglutinin__InfluenzaA__ABW91504

SEQ ID NO: 194265 - RNA, 1698 nt, Artificial Sequence
  derived and/or modified CDS sequence (opt5) from hemagglutinin__InfluenzaA__ABW91515
augaaggugaaacugcucguccugcuuugcaccuucacagccacguacgcugacaccaucuguauuggcuaucacgccaacaauagcacagauaccguugacacagugcuggagaagaacgugaccgucacacauuccgugaaucuccuggaagauagacacaacgggaaacuuugccugcucaagggaaucgcgccccugcagcugggcaauuguucuguugcuggguggauucucggaaacccugagugcgaacugcuuaucagcaaagaguccuggucuuacguggucgaaaccccgaaucccgagaacggcacguguuauccuggguacuuugccgacuaugaggaacugcgggagcaacucagcuccgugucuagcuucgaacgcuuugagauuuuccccaaggaguccagcuggccuaaucauaccguuacaggagugucugccuccugcagccacaacggcaagucuuccuuuuacagaaaucugcuuuggcugaccggcaaaaacgggcucuaucccaaucugagcaagucuuacgcuaacaauaaagaaaaggagguccuggugcucuggggagugcaucacccuccgaacaucggcgaucagcgggcccuguaccacacagaaaacgcuuaugucuccguugugagcucccauuacucucgcagauucacccccgagaucgccaaacggccuaaggugcgcgaccaggaagggagaauuaauuauuacuggacgcuucuggagcccggagauacaaucauuuuugaggcgaacggcaaucucaucgccccucgguucgcuuuugcccugagccgcggguucggauccggcauuaucaccagcaacgcucccauggacgaaugugaugccaagugccagacaccgcaaggcgcgauuaauucuucccuuccuuuucagaacguccaccccgugaccaucggggaguguccuaaauauguuagaagcgccaagcugcggauggugaccggacuccgcaauauccccucuauucagagcagaggccuguucggggcuaucgccggauuuauugaaggcggguggacaggaauggucgacggcugguacggcuaucaucaccagaacgagcaaggguccggauacgcugccgaucagaaaucuacgcagaaugccaucaacggcauuaccaauaaggugaacagcguuaucgaaaagaugaauacacaguucaccgcuguggggaaagaguucaacaaacuggagcggcgcauggaaaaucucaacaagaaggucgacgauggauuucuggacaucuggacauacaacgcggagcuucuggugcuccuggaaaaugagagaacccuugacuuccacgauuccaacgucaaaaaucuguaugaaaaggugaaaagccaacucaagaacaaugccaaagagauuggcaacgggugcuuugaguucuaccauaaguguaaugacgaaugcauggagucuguuaagaacggcacguaugauuaccccaaauauuccgaagagagcaagcugaaucgggagaaaaucgacggagugaagcuggaaucuaugggcgucuaccagauucucgcuaucuauuccacaguggccagcucccugguucuucuggugucucucggggccauuagcuuuuggaugugcuccaacggaucucugcaguguagaaucugcaucuga

SEQ ID NO: 194266 - RNA, 1698 nt, Artificial Sequence
  derived and/or modified CDS sequence (opt5) from hemagglutinin__InfluenzaA__ABW91526
augaaggugaaacugcucguccugcuuugcaccuucacagccacguacgcugacaccaucuguauuggcuaucacgccaacaauagcacagauaccguugacacagugcuggagaagaacgugaccgucacacauuccgugaaucuccuggaagauucucacaacgggaaacuuugccugcucaagggaaucgcgccccugcagcugggcaauuguagcguugcuggguggauucucggaaacccugagugcgaacugcuuaucuccaaagagucuuggagcuacauuguggaaaccccgaaucccgagaacggcacguguuauccuggguacuuugccgacuaugaggaacugagagagcaacucuccucugucagcuccuucgaacgguuugagaucuuccccaaggagagcucuuggccuaaucauaccgugacaggaguuuccgccagcugcucucacaacggcaaguccagcuuuuaccgcaaucugcuuuggcugaccggcaaaaacgggcucuaucccaaucugucuaaguccuacgcuaacaauaaagaaaaggaggugcugguccucuggggagugcaucacccuccgaacaucggcgaucagagagcccuguaccacacagaaaacgcuuaugugagcgucguuuccucucauuacagccggcgcuucacccccgagauugccaaaagaccuaaggugcgggaacaggaggggcgcaucaauuauuacuggacgcuucuggagcccggagacacaauuaucuuugaagcgaacggcaaucucauugccccuagauucgcuuuugcccugucccggggguucggaagcggcaucauuaccucuaacgcucccauggaugagugugacgccaagugccagacaccgcaaggcgcgaucaauuccagccuuccuuuucagaacgugcaccccgucaccaucggggaauguccuaaauaugugcgcucuaccagacugcggaugguuacaggacuccgcaauauucccagcauccaguccagaggccuguucggggccauugcuggauuuaucgagggcggguggacgggaaugguggauggcugguacggcuaucaucaccagaacgaacaagggucuggauacgccgcugaccaaaagagcacccagaaugccauuaacggcaucacaaauaaagucaacuccgugaucgagaagaugaauacccaguucacagccguugggaaagaguucaacaagcuggaacggcgcauggagaaucucaacaaaaagguggaugacggauuucuggauauuuggaccuacaacgcugaacuucugguccuccuggagaaugaaagaacgcuugacuuccacgacagcaacgugaagaaucuguaugagaaagucaagucucagcucaaaaacaaugcgaaggagaucggcaacgggugcuuugaguucuaccauaaauguaaugaugaaugcauggaauccgugaagaacggcacauaugacuaccccaaguauagcgaggagucuaaacugaaucgggaaaagauugauggaguuaaacuggaguccaugggcguguaccagauccucgccauuuauagcaccgucgcuuccucucuggugcuucugguuagccucggggccaucuccuuuuggaugugcucuaacggaagccugcaguguagaaucugcauuuga

SEQ ID NO: 194267 - RNA, 1698 nt, Artificial Sequence; identical to SEQ ID NO: 193986
  derived and/or modified CDS sequence (opt5) from hemagglutinin__InfluenzaA__ABW91537

SEQ ID NO: 194268 - RNA, 1701 nt, Artificial Sequence; identical to SEQ ID NO: 194059
  derived and/or modified CDS sequence (opt5) from hemagglutinin__InfluenzaA__ABW91548

SEQ ID NO: 194269 - RNA, 1698 nt, Artificial Sequence
  derived and/or modified CDS sequence (opt5) from hemagglutinin__InfluenzaA__ABW91559
augaaggugaaacugcucauccugcuuugcaccuucacagccacguacgcugacaccauuuguaucggcuaucacgccaacaauagcacagauaccgucgacacaguucuggagaagaacgugaccgugacacauuccgucaaucuccuggaagauucucacaacgggaaacuuugccugcucaagggaauugcgccccugcagcugggcaauuguagcguggcuggguggauccucggaaacccugagugcgaacugcuuauuuccaaagagucuuggagcuacaucguugaaaccccgaaucccgagaacggcacguguuauccuggguacuuugccgacuaugaggaacugagagagcaacucuccucugugagcuccuucgaacgguuugagaucuuccccaaggagagcucuuggccuaaucauaccgucacaggaguguccgccagcugcucucacaacggcaaguccagcuuuuaccgcaaucugcuuuggcugaccggcaaaaacgggcucuaucccaaucugucuaaguccuacgcuaacaauaaagaaaaggagguucuggugcucuggggaguccaucacccuccgaacauuggcgaucagagagcccuguaccacacagaaaacgcuuaugugagcguggucuccucucauuacagccggcgcuucacccccgagaucgccaaaagaccuaagguucgggaccaggaagggcgcauuaauuauuacuggacgcuucuggagcccggagauacaaucauuuuugaggcgaacggcaaucucaucgccccuagauucgcuuuugcccugucccggggguucggaagcggcauuaucaccucuaacgcucccauggacgaaugugaugccaagugccagacaccgcaaggcgcgaucaauuccagccuuccuuuucagaacgugcaccccgugaccauuggggaguguccuaaauauguccgcucuaccaagcugagaauggugacaggacuccggaauauccccagcauucagucccgcggccuguucggggccaucgcuggauuuauugaaggcggguggacgggaaugguugacggcugguacggcuaucaucaccagaacgagcaagggucuggauacgccgcugaucagaaaagcacccagaaugccaucaacggcaucacaaauaaggugaacuccgucauugaaaagaugaauacccaguucacagccguggggaaagaguucaacaaacuggagagacggauggaaaaucucaacaagaagguugacgauggauuucuggacaucuggaccuacaacgcugagcuucuggugcuccuggaaaaugagcgcacgcuugacuuccacgauagcaacgucaaaaaucuguaugaaaaggugaaaucucaacucaagaacaaugcgaaagagauuggcaacgggugcuuugaguucuaccauaaguguaaugacgaaugcauggaguccgucaagaacggcacauaugauuaccccaaauauagcgaagagucuaagcuguacagagagaaaaucgacggagugaagcuggaauccaugggcguuuaucagauucucgccaucuacagcaccguggcuuccucucugguccuucuggugagccucggggccaucuccuuuuggaugugcucuaauggaagccugcagugucggauuugcaucuga

SEQ ID NO: 194270 - RNA, 1698 nt, Artificial Sequence; identical to SEQ ID NO: 194127
  derived and/or modified CDS sequence (opt5) from hemagglutinin__InfluenzaA__ABW91570

SEQ ID NO: 194271 - RNA, 1698 nt, Artificial Sequence; identical to SEQ ID NO: 194002
  derived and/or modified CDS sequence (opt5) from hemagglutinin__InfluenzaA__ABW91581

SEQ ID NO: 194272 - RNA, 1698 nt, Artificial Sequence; identical to SEQ ID NO: 193982
  derived and/or modified CDS sequence (opt5) from hemagglutinin__InfluenzaA__ABW91592

SEQ ID NO: 194273 - RNA, 1698 nt, Artificial Sequence; identical to SEQ ID NO: 194028
  derived and/or modified CDS sequence (opt5) from hemagglutinin__InfluenzaA__ABW91603

SEQ ID NO: 194274 - RNA, 1698 nt, Artificial Sequence
  derived and/or modified CDS sequence (opt5) from hemagglutinin__InfluenzaA__ABW91614
augaaggugaaacugcucguccugcuuugcaccuucacagccacguacgcugacaccaucuguauuggcuaucacgccaacaauagcacagauaccguugacacagugcuggagaagaacgugaccgucacacauuccgugaaucuccuggaagauucucacaacgggaaacuuugccugcucaagggaaucgcgccccugcagcugggcaauuguagcguugcuggguggauucucggaaacccugagugcgaacugcuuaucuccaaagagucuuggagcuacauuguggaaaccccgucccccgagaauggcacguguuauccuggguacuuugccgacuaugaggaacugagagagcaacucucuagcgucuccagcuucgaacgguuugagaucuuccccaaggagucuuccuggccuaaccauaccgugacaggaguuagcgccucuugcucccacaauggcaagagcucuuuuuaccgcaaccugcuuuggcugaccggcaaaaaugggcucuaucccaaccuguccaagagcuacgcuaauaacaaagaaaaggaggugcugguccucuggggagugcaucacccuccgaauaucggcgaucagagagcccuguaccacacagaaaacgcuuauguguccgucguuucuagccauuacucccggcgcuucacccccgagauugccaaaagaccuaaggugcgggaccaggaagggcgcaucaacuauuacuggacgcuucuggagcccggagauacaauuaucuuugaggcgaauggcaaccucauugccccuagauucgcuuuugcccugagccggggguucggaucuggcaucauuuccagcaaugcucccaugggcgaaugugacgccaagugccagaccccgcaaggggcgaucaacucuagccuuccuuuucagaaugugcaccccgucacaaucggagaguguccuaaauaugugcgcuccgccaagcugagaaugguuaccggccuccggaacauucccucuauccagagccgcgggcuguucggagcuauugccggcuuuaucgaagggggauggaccggcaugguggauggcugguacggguaucaucaccagaaugagcaaggauccggcuacgcugccgaccagaaaagcacacagaacgccauuaaugggaucacgaacaaggucaauucugugaucgaaaagaugaacacccaguucacagcuguuggaaaagaguucaauaaacuggagagacggauggaaaaccucaauaagaagguggaugacggcuuucuggauauuuggaccuacaacgcggagcuucugguccuccuggaaaacgagcgcacacuugacuuccacgacuccaaugugaaaaaccuguaugaaaaggucaaaagccaacucaagaauaacgccaaagagaucgggaauggcugcuuugaguucuaccauaaguguaacgaugaaugcauggagucugugaagaauggaaccuaugacuaccccaaauauuccgaagagagcaagcugaacagagagaaaauugauggcguuaagcuggaauccauggggguguaccagauccucgcuauuuauucuacggucgccagcucccuggugcuucugguuucucucggagccaucagcuuuuggaugugcuccaauggcagccugcagugucggaucugcauuuga

SEQ ID NO: 194275 - RNA, 1698 nt, Artificial Sequence; identical to SEQ ID NO: 194017
  derived and/or modified CDS sequence (opt5) from hemagglutinin__InfluenzaA__ABW91625

SEQ ID NO: 194276 - RNA, 1698 nt, Artificial Sequence; identical to SEQ ID NO: 193986
  derived and/or modified CDS sequence (opt5) from hemagglutinin__InfluenzaA__ABW91636

SEQ ID NO: 194277 - RNA, 1701 nt, Artificial Sequence; identical to SEQ ID NO: 194059
  derived and/or modified CDS sequence (opt5) from hemagglutinin__InfluenzaA__ABW91647

SEQ ID NO: 194278 - RNA, 1707 nt, Artificial Sequence
  derived and/or modified CDS sequence (opt5) from hemagglutinin__InfluenzaA__ABX10515
auggagaagaucgugcuccuguucgccauugucagccugguuaaauccgaccagaucugcauuggcuaccacgcuaacaauucuaccgaacaaguggauacaaucauggagaagaacgugacggucacccaugcccaggacauucuugaaaagacacacaaugggaagcugugugaucucgacggagugaaaccccugauccuuagagauugcagcguugcgggcuggcugcucgggaacccuaugugugacgaguuuaucaaugugccggaaugguccuauauugucgagaaggcuaaccccgugaaugaucugugcuacccuggagacuucaacgauuaugaggaacugaagcaucuccugucucggaucaaucacuuugagaaaauucagaucauucccaagagcuccuggucuagccaugaaguuucccuuggcgugagcucugccuguccuuaccaggggaaauccagcuucuuucgcaacgucguguggcugaucaagaaaaauucuaccuaucccacaauuaagagauccuacaacaauaccaaccaagaggaccuccuggugcuuuggggaauccaccacccuaaugaugccgcugagcagacaaagcuguaucagaacccgaccacguacaucagcgucggcaccucuacacucaaccagcggcugguuccccgcauugccaccagauccaaagugaauggccaaagcgggcggauggaguucuuuuggacaauccugaagccuaacgacgcuauuaauuucgaauccaacggaaauuuuaucgcccccgaauacgcguauaaaauugugaagaaaggcgauucuaccaucaugaaaagcgagcucgaauacgggaacugcaauacgaaaugucagacaccuaugggagccaucaacuccagcaugcccuuccauaauauucacccgcugaccaucggcgagugcccuaaguaugucaagucuaaccgccuugugcuggcuacagggcucagaaauagcccccagcgggagcgcagacggaaaaagcgcggacuguuuggcgccauugcuggcuucaucgaagggggauggcagggcaugguugacgggugguacggauaucaucacuccaacgagcaaggcucuggguacgccgcggacaaagaaagcacccagaaggccauugauggagugaccaauaaagucaacuccaucaucgacaagaugaauacacaguuugaggcugugggcagagaguucaacaaccuugaacggcgcauugagaaucugaacaagaaaauggaagauggcuuccucgacguuuggacguauaaugccgagcugcuggugcucauggaaaacgagagaacccuggauuuucacgacucuaaugucaagaaccuuuacgauaaagugcggcugcaacucaaggacaaugcuaaagaacuggggaacggauguuucgaguuuuaccauaagugcgauaaugaguguauggaaagcgucagaaacggcacauaugacuacccucaguauuccgaggaagcccgccuuaagcgggaggagaucagcggggugaaacuggaaucuauuggaaucuaccagauucucuccaucuauagcaccguugccucuucccuggcucuggcgauuaugguggccggccucagccuguggaugugcuccaaugggucucuucagugcagaaucuguaucuga

SEQ ID NO: 194279 - RNA, 1701 nt, Artificial Sequence; identical to SEQ ID NO: 193928
  derived and/or modified CDS sequence (opt5) from hemagglutinin__InfluenzaA__ABX10525

SEQ ID NO: 194280 - RNA, 1698 nt, Artificial Sequence; identical to SEQ ID NO: 193986
  derived and/or modified CDS sequence (opt5) from hemagglutinin__InfluenzaA__ABX58239

SEQ ID NO: 194281 - RNA, 1698 nt, Artificial Sequence; identical to SEQ ID NO: 194086
  derived and/or modified CDS sequence (opt5) from hemagglutinin__InfluenzaA__ABX58250

SEQ ID NO: 194282 - RNA, 1698 nt, Artificial Sequence
  derived and/or modified CDS sequence (opt5) from hemagglutinin__InfluenzaA__ABX58261
augaaggugaaacugcucauccugcuuugcaccuucacagccacguacgcugacaccauuuguaucggcuaucacgccaacaauagcacagauaccgucgacacaguucuggagaagaacgugaccgugacacauuccgucaaucuccuggaagauucucacaacgggaaacuuugccugcucaagggaauugcgccccugcagcugggcaauuguagcguggcuggguggauccucggaaacccugagugcgaacugcuuauuuccaaagagucuuggagcuacaucguugaaaccccgaaucccgagaacggcacguguuauccuggguacuuugccgacuaugaggaacugagagagcaacucuccucugugagcuccuucgaacgguuugagaucuuccccaaggagagcucuuggccuaaucauaccgucacaggaguguccgccagcugcucucacaacggcaaguccagcuuuuaccgcaaucugcuuuggcugaccggcaaaaacgggcucuaucccaaucugucuaaguccuacgcuaacaauaaagaaaaggagguucuggugcucuggggaguccaucacccuccgaacauuggcgaucagagagcccuguaccacacagaaaacgcuuaugugagcguggucuccucucauuacagccggcgcuucacccccgagaucgccaaaagaccuaagguucgggaccaggaagggcgcauuaauuauuacuggucccuucuggagcccggagauacgaucauuuuugaggcgaacggcaaucucaucgccccuagauucgcuuuugcccugagccggggguucggaucuggcauuaucacauccaacgcucccauggacgaaugugaugccaagugccagaccccgcaaggcgcgaucaauagcucucuuccuuuucagaacgugcaccccgugacaauuggggaguguccuaaauauguccgcagcaccaagcugagaauggugaccggacuccggaauauccccuccauucagucucgcggccuguucggggccaucgcuggauuuauugaaggcggguggacaggaaugguugacggcugguacggcuaucaucaccagaacgagcaagggagcggauacgccgcugaucagaaauccacgcagaaugccaucaacggcaucaccaauaaggugaacagcgucauugaaaagaugaauacacaguucaccgccguggggaaagaguucaacaaacuggagagacggauggaaaaucucaacaagaagguugacgauggauuucuggacaucuggacauacaacgcugagcuucuggugcuccuggaaaaugagcgcacccuugacuuccacgauucuaacgucaaaaaucuguaugaaaaggugaaaucccaacucaagaacaaugcgaaagagauuggcaacgggugcuuugaguucuaccauaaguguaaugacgaaugcauggagagcgucaagaacggcacguaugauuaccccaaauauucugaagaguccaagcugaauagagagaaaaucgacggagugaagcuggaaagcaugggcguuuaccagauucucgccaucuauuccacaguggcuucuagccugguccuucuggugucccucggggccaucucuuuuuggaugugcagcaacggaucccugcagugucggauuugcaucuga

SEQ ID NO: 194283 - RNA, 1698 nt, Artificial Sequence
  derived and/or modified CDS sequence (opt5) from hemagglutinin__InfluenzaA__ABX58272
augaaggugaaacugcucauccugcuuugcaccuucacagccacguacgcugacaccauuuguaucggcuaucacgccaacaauagcacagauaccgucgacacaguucuggagaagaacgugaccgugacacauuccgucaaucuccuggaagauucucacaacgggaaacuuugccugcucaagggaauugcgccccugcagcugggcaauuguagcguggcuggguggauccucggaaacccugagugcgaacugcuuauuuccaaagagucuuggagcuacaucguugaaaccccgaaucccgagaacggcacguguuauccuggguacuuugccgacuaugaggaacugagagagcaacucuccucugugagcuccuucgaacgguuugagaucuuccccaaaaagagcucuuggccuaaucauaccgucacaggaguguccgccagcugcucucacaacggcaaguccagcuuuuaccgcaaucugcuuuggcugaccggcaagaacgggcucuaucccaaucugucuaaauccuacgcuaacaauaaggagaaagaaguucuggugcucuggggaguccaucacccuccgaacauuggcgaucagagagcccuguaccacacagagaacgcuuaugugagcguggucuccucucauuacagccggcgcuucacccccgaaaucgccaagagaccuaagguucgggaccaggaggggcgcauuaauuauuacuggacgcuucuggaacccggagauacaaucauuuuugaggcgaacggcaaucucaucgccccuagauucgcuuuugcccugucccggggguucggaagcggcauuaucaccucuaacgcucccauggacgagugugaugccaaaugccagacaccgcaaggcgcgaucaauuccagccuuccuuuucagaacgugcaccccgugaccauuggggaauguccuaaguauguccgcucuaccaaacugagaauggugacaggacuccggaauauccccagcauucagucccgcggccuguucggggccaucgcuggauuuauugagggcggguggacgggaaugguugacggcugguacggcuaucaucaccagaacgaacaagggucuggauacgccgcugaucaaaagagcacccagaaugccaucaacggcaucacaaauaaagugaacuccgucauugagaagaugaauacccaguucacagccguggggaaagaguucaacaagcuggaaagacggauggagaaucucaacaagaaaguugacgauggauuucuggacaucuggaccuacaacgcugaacuucuggugcuccuggagaaugaacgcacgcuugacuuccacgauagcaacgucaagaaucuguaugagaaagugaagucucagcucaaaaacaaugcgaaggaaauuggcaacgggugcuuugaguucuaccauaaguguaaugacgagugcauggaauccgucaaaaacggcacauaugauuaccccaaguauagcgaggaaucuaaacugaauagagagaagaucgacggagugaaacuggaguccaugggcguuuaccagauucucgccaucuauagcaccguggcuuccucucugguccuucuggugagccucggggccaucuccuuuuggaugugcucuaacggaagccugcagugucggauuugcaucuga

SEQ ID NO: 194284 - RNA, 1698 nt, Artificial Sequence; identical to SEQ ID NO: 193986
  derived and/or modified CDS sequence (opt5) from hemagglutinin__InfluenzaA__ABX58283

SEQ ID NO: 194285 - RNA, 1698 nt, Artificial Sequence; identical to SEQ ID NO: 194127
  derived and/or modified CDS sequence (opt5) from hemagglutinin__InfluenzaA__ABX58294

SEQ ID NO: 194286 - RNA, 1698 nt, Artificial Sequence; identical to SEQ ID NO: 193982
  derived and/or modified CDS sequence (opt5) from hemagglutinin__InfluenzaA__ABX58316

SEQ ID NO: 194287 - RNA, 1698 nt, Artificial Sequence; identical to SEQ ID NO: 194131
  derived and/or modified CDS sequence (opt5) from hemagglutinin__InfluenzaA__ABX58327

SEQ ID NO: 194288 - RNA, 1698 nt, Artificial Sequence; identical to SEQ ID NO: 193982
  derived and/or modified CDS sequence (opt5) from hemagglutinin__InfluenzaA__ABX58338

SEQ ID NO: 194289 - RNA, 1698 nt, Artificial Sequence
  derived and/or modified CDS sequence (opt5) from hemagglutinin__InfluenzaA__ABX58360
augaaggugaaacugcucguccugcuuugcaccuucacagccacguacgcugacaccaucuguauuggcuaucacgccaacaauagcacagauaccguugacacagugcuggagaagaacgugaccgucacacauuccgugaaucuccuggaagauucucacaacgggaaacuuugccugcucaagggaaucgcgcccauucagcugggcaauuguagcguugcuggguggauccugggaaacccugagugcgaacuccugauuuccaaagagucuuggagcuacaucguggaaaccccgaaucccgagaacggcacguguuauccuggguacuuugccgacuaugaggaacuuagagagcaacuguccucugucagcuccuucgaacgguuugagaucuuccccaaggagagcucuuggccuaaucauaccgugacaggaguuuccgccagcugcucucacaacggcaaguccagcuuuuaccgcaaucuccuguggcuuaccggcaaaaacgggcuguaucccaaucucucuaaguccuacgcuaacaauaaagaaaaggaggugcugguccuguggggagugcaucacccuccgaacauuggcgaucagagagcccucuaccacacagaaaacgcuuaugugagcgucguuuccucucauuacagccggcgcuucacccccgagaucgccaaaagaccuaaggugcgggaccaggaagggcgcauuaauuauuacuggacgcugcuugagcccggagauacaaucauuuuugaggcgaacggcaaucugaucgccccuagauucgcuuuugcccucucccggggguucggaagcggcauuaucaccucuaacgcucccauggacgaaugugaugccaagugccagacaccgcaaggcgcgaucaauuccagccugccuuuucagaacgugcaccccgucaccauuggggaguguccuaaauaugugcgcucuaccaaacuuagaaugguuacaggacugcggaauauccccagcauucagucccgcggccucuucggggccaucgcuggauuuauugaaggcggguggacgggaaugguggacggcugguacggcuaucaucaccagaacgagcaagggucuggauacgccgcugaucagaaaagcacccagaaugccaucaacggcaucacaaauaaggucaacuccgugauugaaaagaugaauacccaguucacagccguugggaaggaguucaacaaacuggagagacggauggaaaaucugaacaagaagguggacgauggauuucucgacaucuggaccuacaacgcugagcugcuuguccugcucgaaaaugagcgcacgcuggacuuccacgauagcaacgugaaaaaucuuuaugaaaaggucaaaucucaacugaagaacaaugcgaaagagauuggcaacgggugcuuugaguucuaccauaaguguaaugacggcugcauggaauccgugaagaacggaacauaugauuaccccaaauauagcgaggaaucuaagcucaauagagagaaaaucgacggcguuaagcuggaguccauggggguguaccagauucuggccaucuauagcaccgucgcuuccucucucgugcugcuuguuagccugggagccaucuccuuuuggaugugcucuaacggcagccuccagugucggauuugcaucuga

SEQ ID NO: 194290 - RNA, 1698 nt, Artificial Sequence; identical to SEQ ID NO: 193986
  derived and/or modified CDS sequence (opt5) from hemagglutinin__InfluenzaA__ABX58371

SEQ ID NO: 194291 - RNA, 1698 nt, Artificial Sequence; identical to SEQ ID NO: 193986
  derived and/or modified CDS sequence (opt5) from hemagglutinin__InfluenzaA__ABX58382

SEQ ID NO: 194292 - RNA, 1698 nt, Artificial Sequence; identical to SEQ ID NO: 194127
  derived and/or modified CDS sequence (opt5) from hemagglutinin__InfluenzaA__ABX58393

SEQ ID NO: 194293 - RNA, 1698 nt, Artificial Sequence; identical to SEQ ID NO: 193986
  derived and/or modified CDS sequence (opt5) from hemagglutinin__InfluenzaA__ABX58404

SEQ ID NO: 194294 - RNA, 1698 nt, Artificial Sequence
  derived and/or modified CDS sequence (opt5) from hemagglutinin__InfluenzaA__ABX58415
augaaggugaaacugcucguccugcuuugcaccuucacagccacguacgcugacaccaucuguauuggcuaucacgccaacaauagcacagauaccguugacacagugcuggagaagaacgugaccgucacacauuccgugaaucuccuggaagauagacacaacgggaaacuuugccugcucaagggaaucgcgccccugcagcugggcaauuguucuguugcuggguggauucucggaaacccugagugcgaacugcuuaucagcaaaaaguccuggucuuacauuguggagaccccgaaucccgaaaacggcacguguuauccuggguacuuugccgacuaugaggagcugcgggaacaacucagcuccgucucuagcuucgagcgcuuugaaaucuuccccaaggaguccagcuggccuaaucauaccgugacaggaguuucugccuccugcagccacaacggcaaaucuuccuuuuacagaaaucugcuuuggcugaccggcaagaacgggcucuaucccaaucugagccggucuuacgcuaacaauaaagagaaggaagugcugguccucuggggagugcaucacccuccgaacaucggcgaucagcgcgcccuguaccacacagagaacgcuuauguguccgucguuagcucccauuacucuagacgguucacccccgaaauugccaaacgcccuaaggugagagaccaggaggggcggaucaauuauuacuggacgcuucuggaacccggagauacaauuaucuuugaggcgaacggcaaucucauugccccucgcuucgcuuuugcccugagcagaggguucggauccggcaucauuaccagcaacgcucccauggacgagugugaugccaagugccagacaccgcaaggcgcgaucaauucuucccuuccuuuucagaacgugcaccccgucaccaucggggaauguccuaaauaugugcggagcgccaagcugcgcaugguuaccggacucagaaauauucccucuauccagagccggggccuguucggggcuauugccggauuuaucgagggcggguggacaggaaugguggacggcugguacggcuaucaucaccagaacgaacaaggguccggauacgcugccgaucagaaaucuacgcagaaugccauuaacggcaucaccaauaaggucaacagcgugaucgagaaaaugaauacacaguucaccgcuguugggaaggaguucaacaaacuggaacgcagaauggagaaucucaacaagaagguggacgauggauuucuggacauuuggacauacaacgcggaacuucugguccuccuggagaaugaacggacccuugacuuccacgauuccaacgugaaaaaucuguaugagaaggucaaaagccaacucaagaacaaugccaaagaaaucggcaacgggugcuuugaguucuaccauaaguguaaugacgagugcauggaaucugugaagaacggcacguaugauuaccccaaauauuccgaggaaagcaagcugaauagagagaaaauugacggaguuaagcuggagucuaugggcguguaccagauccucgcuauuuauuccacagucgccagcucccuggugcuucugguuucucucggggccaucagcuuuuggaugugcuccaacggaucucugcagugucgcaucugcauuuga

SEQ ID NO: 194295 - RNA, 1698 nt, Artificial Sequence; identical to SEQ ID NO: 193986
  derived and/or modified CDS sequence (opt5) from hemagglutinin__InfluenzaA__ABX58426

SEQ ID NO: 194296 - RNA, 1698 nt, Artificial Sequence; identical to SEQ ID NO: 193986
  derived and/or modified CDS sequence (opt5) from hemagglutinin__InfluenzaA__ABX58437

SEQ ID NO: 194297 - RNA, 1698 nt, Artificial Sequence; identical to SEQ ID NO: 193982
  derived and/or modified CDS sequence (opt5) from hemagglutinin__InfluenzaA__ABX58448

SEQ ID NO: 194298 - RNA, 1698 nt, Artificial Sequence; identical to SEQ ID NO: 194028
  derived and/or modified CDS sequence (opt5) from hemagglutinin__InfluenzaA__ABX58459

SEQ ID NO: 194299 - RNA, 1698 nt, Artificial Sequence; identical to SEQ ID NO: 194127
  derived and/or modified CDS sequence (opt5) from hemagglutinin__InfluenzaA__ABX58470

SEQ ID NO: 194300 - RNA, 1698 nt, Artificial Sequence; identical to SEQ ID NO: 194028
  derived and/or modified CDS sequence (opt5) from hemagglutinin__InfluenzaA__ABX58481

SEQ ID NO: 194301 - RNA, 1698 nt, Artificial Sequence; identical to SEQ ID NO: 193986
  derived and/or modified CDS sequence (opt5) from hemagglutinin__InfluenzaA__ABX58492

SEQ ID NO: 194302 - RNA, 1698 nt, Artificial Sequence; identical to SEQ ID NO: 194002
  derived and/or modified CDS sequence (opt5) from hemagglutinin__InfluenzaA__ABX58503

SEQ ID NO: 194303 - RNA, 1698 nt, Artificial Sequence; identical to SEQ ID NO: 194028
  derived and/or modified CDS sequence (opt5) from hemagglutinin__InfluenzaA__ABX58525

SEQ ID NO: 194304 - RNA, 1698 nt, Artificial Sequence
  derived and/or modified CDS sequence (opt5) from hemagglutinin__InfluenzaA__ABX58536
augaaggugaaacugcucguccugcuuugcaccuucacagccacguacgcugacaccaucuguauuggcuaucacgccaacaauagcacagauaccguugacacagugcuggagaagaacgugaccgucacacauuccgugaaucuccuggaagauagacacaacgggaaacuuugccugcucaagggaaucgcgccccugcagcugggcaauuguucuguugcuggguggauucucggaaacccugagugcgaacugcuuaucagcaaagagccgugguccuacauuguggaaacccccaauccugagaacggcacguguuaucccggguacuuugccgacuaugaggaacugcgggagcaacucucuagcgucuccucuuucgaacgcuuugagaucuucccuaaggagagcuccuggcccaaucauaccgugacaggaguuagcgccucuugcucccacaacggcaagagcucuuuuuacagaaaucugcuuuggcugaccggcaaaaacgggcucuauccuaaucugucccggagcuacgcuaacaauaaggaaaaagaggugcugguccucuggggagugcaucacccgcccaacaucggcgaucagcgcgcccuguaccacacagaaaacgcuuaugugucugucguuuccagccauuacuccagacgguucaccccugagauugccaagcgccccaaagugagagaccaggaagggcggaucaauuauuacuggacgcuucuggagccuggagauacaauuaucuuugaggcgaacggcaaucucauugcuccccgcuucgccuuugcccugucuagaggguucggaagcggcaucauuaccuccaacgcuccgauggacgaaugugaugccaagugccagacaccucaaggcgcgaucaauagcucucuucccuuucagaacgugcacccugucaccaucggggagugucccaaguaugugcgguccgccaaacugcgcaugguuaccggacucagaaauauucccagcauccagucucggggccuguucggggcuauugccggauuuaucgaaggcggguggacaggaaugguggacggcugguacggcuaucaucaccagaacgagcaagggagcggauacgcugccgaucagaaguccacgcagaaugccauuaacggcaucaccaauaaagucaacucugugaucgaaaagaugaauacacaguucaccgcuguugggaaagaguucaacaagcuggagcgcagaauggaaaaucucaacaaaaagguggacgauggauuucuggacauuuggacauacaacgcggagcuucugguccuccuggaaaaugagcggacccuugacuuccacgauagcaacgugaagaaucuguaugaaaaagucaagucccaacucaaaaacaaugccaaggagaucggcaacgggugcuuugaguucuaccauaaauguaaugacgaaugcauggagagcgugaagaacggcacguaugauuacccuaaguauucugaagaguccaaacugaauagagagaagauugacggaguuaaacuggaaagcaugggcguguaccagauccucgcuauuuauucuacagucgccuccagccuggugcuucugguuucccucggggccaucucuuuuuggaugugcagcaacggaucccugcagugucgcaucugcauuuga

SEQ ID NO: 194305 - RNA, 1698 nt, Artificial Sequence
  derived and/or modified CDS sequence (opt5) from hemagglutinin__InfluenzaA__ABX58547
augaaggugaaacugcucauccugcuuugcaccuucacagccacguacgcugacaccauuuguaucggcuaucacgccaacaauagcacagauaccgucgacacaguucuggagaagaacgugaccgugacacauuccgucaaucuccuggaagauucucacaacgggaaacuuugccugcucaagggaauugcgccccugcagcugggcaauuguagcguggcuggguggauccucggaaacccugagugcgaacugcuuauuuccaaagagucuuggagcuacaucguugaaaccccgaaucccgagaacggcacguguuauccuggguacuuugccgacuaugaggaacugagagagcaacucuccucugugagcuccuucgaacgguuugagaucuuccccaaggagagcucuuggccuaaucauaccgucacaggaguguccgccagcugcucucacaacggcaaguccagcuuuuaccgcaaucugcuuuggcugaccggcaaaaacgggcucuaucccaaucugucuaaguccuacgcuaacaauaaagaaaaggagguucuggugcucuggggaguccaucacccuccgaacauuggcgaucagagagcccuguaccacacagaaaacgcuuaugugagcguggucuccucucauuacagccggcgcuucacccccgagaucgccaaaagaccuaagguucgggaccaggaagggcgcauuaauuauuacuggacgcuucuggagcccggagauacaaucauuuuugaggcgaacggcaaucucaucgccccuagauucgcuuuugcccugucccggggguucggaagcggcauuaucaccucuaacgcucccauggacgaaugugaugccaagugccagacaccgcaaggcgcgaucaauuccagccuuccuuuucagaacgugcaccccgugaccauuggggaguguccuaaauauguccgcucuaccaagcugagaauggugacaggacuccggaauauccccagcauucagacgcgcggccuguucggggccaucgcuggauuuauugaaggcggguggaccggaaugguugacggcugguacggcuaucaucaccagaacgagcaaggguccggauacgccgcugaucagaaaucuacacagaaugccaucaacggcaucaccaauaaggugaacagcgucauugaaaagaugaauacacaguucaccgccguggggaaagaguucaacaaacuggagagacggauggaaaaucucaacaagaagguugacgauggauuucuggacaucuggacguacaacgcugagcuucuggugcuccuggaaaaugagcgcacacuugacuuccacgauuccaacgucaaaaaucuguaugaaaaggugaaaagccaacucaagaacaaugcgaaagagauuggcaacgggugcuuugaguucuaccauaaguguaaugacgaaugcauggagucugucaagaacggcaccuaugauuaccccaaauauuccgaagagagcaagcugaauagagagaaaaucgacggagugaagcuggaaucuaugggcguuuaccagauucucgccaucuauuccaccguggcuagcucccugguccuucuggugucucucggggccaucagcuuuuggaugugcuccaacggaucucugcagugucggauuugcaucuga

SEQ ID NO: 194306 - RNA, 1698 nt, Artificial Sequence
  derived and/or modified CDS sequence (opt5) from hemagglutinin__InfluenzaA__ABX58558
augaaggugaaacugcucguccugcuuugcaccuucacagccacguacgcugacaccaucuguauuggcuaucacgccaacaauagcacagauaccguugacacagugcuggagaagaacgugaccgucacacauuccgugaaucuccuggaagauucucacaacgggaaacuuugccugcucaagggaaucgcgccccugcagcugggcaauuguagcguugcuggguggauucucggaaacccugagugcgaacugcuuaucuccaaagagucuuggagcuacauuguggaaaccccgaaucccgagaacggcacguguuauccuggguacuuugccgacuaugaggaacugagagagcaacucuccucugucagcuccuucgaacgguuugagaucuuccccaaggagagcucuuggccuaaucauaccgugacaggaguuuccgccagcugcucucacaacggccgcuccagcuuuuacagaaaucugcuuuggcugaccggcaagaacgggcucuaucccaaucugucuaaauccuacgcuaacaauaaggaaaaagaggugcugguccucuggggagugcaucacccuccgaacaucggcgaucagcgggcccuguaccacacagaaaacgcuuaugugagcgucguuuccucucauuacagccgcagauucacccccgagauugccaagcggccuaaagugcgcgaccaggaagggagaaucaauuauuacuggacgcuucuggagcccggagauacaauuaucuuugaggcgaacggcaaucucauugccccucgguucgcuuuugcccugucccgcggguucggaagcggcaucauuaccucuaacgcucccauggacaagugugaugccaagugccagacaccgcaaggcgcgaucaauuccagccuuccuuuucagaacgugcaccccgucaccaucggggaauguccuaaauaugugagaucuaccaagcugcggaugguuacaggacuccgcaauauucccagcauccaguccagaggccuguucggggccauugcuggauuuaucgagggcggguggacgggaaugguggacggcugguacggcuaucaucaccagaacgaacaagggucuggauacgccgcugaucagaaaagcacccagaaugccauuaacggcaucacaaauaaggucaacuccgugaucgagaaaaugaauacccaguucacagccguugggaaggaguucaacaaacuggaacggcgcauggagaaucucaacaagaagguggacgauggauuucuggacauuuggaccuacaacgcugaacuucugguccuccuggagaaugaaagaacgcuugacuuccacgauagcaacgugaaaaaucuguaugagaaggucaaaucucaacucaagaacaaugcgaaagaaaucggcaacgggugcuuugaguucuaccauaaguguaaugacgagugcauggaauccgugaagaacggcacauaugauuaccccaaauauagcgaggaaucuaagcugaaucgggagaaaauugacggaguuaagcuggaguccaugggcguguaccagauccucgccauuuauagcaccgucgcuuccucucuggugcuucugguuagccucggggccaucuccuuuuggaugugcucuaacggaagccugcaguguagaaucugcauuuga

SEQ ID NO: 194307 - RNA, 1698 nt, Artificial Sequence
  derived and/or modified CDS sequence (opt5) from hemagglutinin__InfluenzaA__ABX58569
augaaggugaaacugcucauccugcuuugcaccuucacagccacguacgcugacaccauuuguaucggcuaucacgccaacaauagcacagauaccgucgacacaguucuggagaagaacgugaccgugacacauuccgucaaucuccuggaagauucucacaacgggaaacuuugccugcucaagggaauugcgccccugcagcugggcaauuguagcguggcuggguggauccucggaaacccugagugcgaacugcuuauuuccaaagagucuuggagcuacaucguugaaaccccgaaucccgagaacggcacguguuauccuggguacuuugccgacuaugaggaacugagagagcaacucuccucugugagcuccuucgaacgguuugagaucuuccccaaggagagcucuuggccuaaucauaccgccacaggagucuccgcuagcugcucucacaacggcaaguccagcuuuuaccgcaaucugcuuuggcugaccggcaaaaacgggcucuaucccaaucugucuaaguccuacgccaacaauaaagaaaaggaggugcugguucucuggggagugcaucacccuccgaacauuggcgaucagagagcucuguaccacacagaaaacgccuaugucagcgugguguccucucauuacagccggcgcuucacccccgagaucgcgaaaagaccuaagguccgggaccaggaagggcgcauuaauuauuacuggacgcuucuggagcccggagauacaaucauuuuugaggccaacggcaaucucaucgcuccuagauucgccuuugcucugucccggggguucggaagcggcauuaucaccucuaacgcccccauggacgaaugugaugcgaagugccagacaccgcaaggcgccaucaauuccagccuuccuuuucagaacguucaccccgugaccauuggggaguguccuaaauaugugcgcucuaccaagcugagaauggucacaggacuccggaauauccccagcauucagucccgcggccuguucggggcuaucgccggauuuauugaaggcggguggacgggaaugguggacggcugguacggcuaucaucaccagaacgagcaagggucuggauacgcugccgaucagaaaagcacccagaaugccaucaacggcaucacaaauaagguuaacuccgugauugaaaagaugaauacccaguucacagcugucgggaaagaguucaacaaacuggagagacggauggaaaaucucaacaagaagguggacgauggauuucuggacaucuggaccuacaacgcggagcuucugguucuccuggaaaaugagcgcacgcuugacuuccacgauagcaacgugaaaaaucuguaugaaaaggucaaaucucaacucaagaacaaugccaaagagauuggcaacgggugcuuugaguucuaccauaaguguaaugacgaaugcauggaguccgugaagaacggcacauaugauuaccccaaauauagcgaagagucuaagcugaauagagagaaaaucgacggagucaagcuggaauccaugggcguguaccagauucucgcuaucuauagcaccguugccuccucucuggugcuucuggucagccucggggccaucuccuuuuggaugugcucuaacggaagccugcagugucggauuugcaucuga

SEQ ID NO: 194308 - RNA, 1698 nt, Artificial Sequence; identical to SEQ ID NO: 193982
  derived and/or modified CDS sequence (opt5) from hemagglutinin__InfluenzaA__ABX58580

SEQ ID NO: 194309 - RNA, 1698 nt, Artificial Sequence; identical to SEQ ID NO: 193986
  derived and/or modified CDS sequence (opt5) from hemagglutinin__InfluenzaA__ABX58591

SEQ ID NO: 194310 - RNA, 1698 nt, Artificial Sequence
  derived and/or modified CDS sequence (opt5) from hemagglutinin__InfluenzaA__ABX58602
augaaggugaaacugcucguccugcuuugcaccuucacagccacguacgcugacaccaucuguauuggcuaucacgccaacaauagcacagauaccguugacacagugcuggagaagaacgugaccgucacacauuccgugaaucuccuggaagauucucacaacgggaaacuuugccugcucgagggaaucgcgccccugcagcugggcaauuguagcguugcuggguggauucucggaaacccugaaugcgagcugcuuaucuccaaggaaucuuggagcuacauuguggagaccccgaaucccgagaacggcacguguuauccuggguacuuugccgacuaugaagaacugagagaacaacucuccucugucagcuccuucgagcgguuugagaucuuccccaaagaaagcucuuggccuaaucauaccgugacaggaguuuccgccagcugcucucacaacggcaaguccagcuuuuaccgcaaucugcuuuggcugaccggcaagaacgggcucuaucccaaucugucuaaauccuacgcuaacaauaaggagaaagaagugcugguccucuggggagugcaucacccuccgaacaucggcgaucagagagcccuguaccacacagagaacgcuuaugugagcgucguuuccucucauuacagccggcgcuucacccccgaaauugccaagagaccuaaagugcgggaccaggaggggcgcaucaauuauuacuggacgcuucuggagcccagagauacaauuaucuuugaagcgaacggaaaucucauugccccucgguucgcuuuugcccugucccgcggcuucgggagcggaaucauuaccucuaacgcucccaugggcgagugugacgccaagugccagacaccgcaaggcgcgaucaauuccagccuuccuuuucagaacgugcaccccgucaccaucggggaauguccuaaguaugugagaucugccaaacugcggaugguuaccggacuccgcaauauucccagcauccaguccagaggccuguucggggcuauugccggauuuaucgagggcggguggacaggaaugguggauggcugguacggcuaucaucaccagaacgaacaagggucuggauacgcugccgaccaaaagagcacgcagaaugccauuaacggcaucaccaauaaagucaacuccgugaucgagaagaugaauacacaguucaccgcuguugggaaagaguucaacaagcuggaacggcgcauggagaaucucaacaaaaagguggaugacggauuucuggauauuuggacauacaacgcggaacuucugguccuccuggagaaugaaagaacccuugacuuccacgacagcaacgugaagaaucuguaugagaaagucaagucucagcucaaaaacaaugccaaggagaucggcaacgggugcuuugaguucuaccauaaauguaaugaugagugcauggaauccgugaagaacggcacguaugacuaccccaaguauagcgaggagucuaaacugaaucgggaaaagauugauggaguuaaacuggaguccaugggcguguaccagauccucgcuauuuauagcacagucgccuccucucuggugcuucugguuagccucggggccaucuccuuuuggaugugcucuaacggaagccugcaguguagaaucugcauuuga

SEQ ID NO: 194311 - RNA, 1698 nt, Artificial Sequence; identical to SEQ ID NO: 194019
  derived and/or modified CDS sequence (opt5) from hemagglutinin__InfluenzaA__ABX58613

SEQ ID NO: 194312 - RNA, 1698 nt, Artificial Sequence; identical to SEQ ID NO: 193986
  derived and/or modified CDS sequence (opt5) from hemagglutinin__InfluenzaA__ABX58624

SEQ ID NO: 194313 - RNA, 1698 nt, Artificial Sequence
  derived and/or modified CDS sequence (opt5) from hemagglutinin__InfluenzaA__ABX58635
augaaggugaaacugcucguccugcuuugcaccuucacagccacguacgcugacaccaucuguauuggcuaucacgccaacaauagcacagauaccguugacacagugcuggagaagaacgugaccgucacacauuccgugaaucuccuggaagauucucacaacgggaaacuuugccugcucaagggaaucgcgccccugcagcugggcaauuguagcguugcuggguggauucucggaaacccugagugcgaacugcuuaucuccaaagagucuuggagcuacauuguggaaaccccgaaucccgagaacggcacguguuauccuggguacuuugccgacuaugaggaacugagagagcaacucuccucugucagcuccuucgaacgguuugagaucuuccccaaggagagcucuuggccuaaucauaccgugacaggaguuuccgccagcugcucucacaacggccgcuccagcuuuuacagaaaucugcuuuggcugaccggcaagaacgggcucuaucccucucuguccaaaagcuacgcuaauaacaaggaaaaagaggugcugguccucuggggagugcaucacccuccgaauaucggcgaucagcgggcccuguaccacacagaaaacgcuuauguguccgucguuucuagccauuacucccgcagauucacccccgagauugccaagcggccuaaagugcgcgaccaggaagggagaaucaacuauuacuggacgcuucuggagcccggagauacaauuaucuuugaggcgaauggcaaccucauugccccucgguucgcuuuugcccugagccgcggguucggaucuggcaucauuaccuccaaugcucccauggacgaaugugaugccaagugccagacaccgcaaggcgcgaucaacagcucucuuccuuuucagaaugugcaccccgucaccaucggggaguguccuaaguaugugagaagcaccaaacugcggaugguuacaggacuccgcaacauucccuccauccagucuagaggccuguucggggccauugcuggauuuaucgaaggcggguggacgggaaugguggacggcugguacggcuaucaucaccagaaugagcaagggagcggauacgccgcugaucagaaguccacccagaacgccauuaauggcaucacaaacaaagucaauagcgugaucgaaaagaugaacacccaguucacagccguugggaaagaguucaauaagcuggagcggcgcauggaaaaccucaauaaaaagguggacgauggauuucuggacauuuggaccuacaacgcugagcuucugguccuccuggaaaacgagagaacgcuugacuuccacgauucuaaugugaagaaccuguaugaaaaagucaagucccaacucaaaaauaacgcgaaggagaucggcaaugggugcuuugaguucuaccauaaauguaacgacgaaugcauggagagcgugaagaauggcacauaugauuaccccaaguauucugaagaguccaaacugaaccgggagaagauugacggaguuaaacuggaaagcaugggcguguaccagauccucgccauuuauuccaccgucgcuucuagccuggugcuucugguuucccucggggccaucucuuuuuggaugugcagcaauggaucccugcaguguagaaucugcauuuga

SEQ ID NO: 194314 - RNA, 1698 nt, Artificial Sequence; identical to SEQ ID NO: 193982
  derived and/or modified CDS sequence (opt5) from hemagglutinin__InfluenzaA__ABX58679

SEQ ID NO: 194315 - RNA, 1698 nt, Artificial Sequence; identical to SEQ ID NO: 194028
  derived and/or modified CDS sequence (opt5) from hemagglutinin__InfluenzaA__ABX58701

SEQ ID NO: 194316 - RNA, 1698 nt, Artificial Sequence; identical to SEQ ID NO: 194086
  derived and/or modified CDS sequence (opt5) from hemagglutinin__InfluenzaA__ABX58712

SEQ ID NO: 194317 - RNA, 1704 nt, Artificial Sequence
  derived and/or modified CDS sequence (opt5) from hemagglutinin__InfluenzaA__ABY19417
auggagaagaucgugcugcuccuggccauuaucagccuugucaaauccgaccagauuugcaucggcuaccacgcuaacaauucuaccgaacaaguugauacaauuauggagaagaacgugacggugacccaugcccaggacauccuggaaaagacacacaaugggaagcucugugaucuggacggagucaaaccccuuauccugagagauugcagcguggcgggcuggcuccuggggaacccuaugugugacgaguucauuaauguuccggaaugguccuauaucguggagaaggcuaaccccgccaaugaucugugcuacccuggaaacuuuaaugacuaugaggaacucaagcaucugcuuucucggauuaaccacuucgagaaaauccagauuauccccaagagcuccuggucugaucaugaagccagcuccggcgucagcucugcuuguccuuaccagggggugcccuccuuuuuccgcaauguuguguggcugauuaaaaagaacaauaccuauccuacaaucaaaagaagcuacaacaauaccaaccaagaggaccuccugauccuuugggggauucaccacucuaacgaugccgcugagcagacaaagcuguaucagaauccgaccacguacaucuccgucggcaccagcacacucaaccagcggcuggugcccaagauugccacccgcucuaaagugaauggccaauccgggagaauggacuuuuucuggacaauccugaagccuaacgaugcgauuaauuuugaaagcaacggaaauuucaucgcccccgaguacgcuuauaaaaucgucaagaaaggcgacuccgccauuaugaagucugaaguugaguacgggaacugcaauaccaaaugucagacgccuaucggagcuauuaacagcuccaugcccuuucauaauauccacccgcucacaauuggcgaaugcccuaaguaugugaaaagcaacaaacuggugcuugccaccgggcugcgcaauucuccccuccgggagagacggcgcaagagaggacuguucggcgcgaucgccggcuuuaucgagggaggauggcagggcauggucgacgggugguacggauaucaucacuccaacgaacagggcagcggguacgcugccgauaaagagucuacacaaaaggcuauugacggagugaccaauaaaguuaacagcaucauugauaagaugaacacccaguucgaagccgugggccgggaguuuaauaaccuugaacgcagaaucgagaaucugaacaagaaaauggaggacggcuuccucgaugucuggacauauaaugccgaacugcuggugcucauggagaacgaacggacgcuggacuuccacgauuccaauguuaagaaccuuuacgacaaagugcgccugcagcucagagauaaugcuaaggagcuggggaacggauguuuuaaauucuaccauaagugcgacaaugaauguauggagucuguccggaacggcaccuaugauuacccucaauauagcgaggaagcgagacuuaagcgcgaggaaauuuccggggugaaacuggagagcaucggaacauaccagauucucucuaucuauuccaccgucgccagcucucuggcucuggccaucaugguggccggccucucccuguggaugugcagcaaugggucccuucagugccggauuagaaucuga

SEQ ID NO: 194318 - RNA, 1704 nt, Artificial Sequence
  derived and/or modified CDS sequence (opt5) from hemagglutinin__InfluenzaA__ABY19418
auggagaagaucgugcugcuccuggccauuaucagccuugucaaauccgaccagauuugcaucggcuaccacgcuaacaauucuaccgaacaaguugauacaauuauggagaagaacgugacggugacccaugcccaggacauccuggaaaagacacacaaugggaagcucugugaucuggacggagucaaaccccuuauccugagagauugcagcguggcgggcuggcuccuggggaacccuaugugugacgaguucauuaauguuccggaaugguccuauaucguggagaaggcuaaccccgccaaugaucugugcuacccuggagacuuuaacgauuaugaggaacucaagcaucugcuuucucggauuaaucacuucgagaaaauccagauuauccccaagagcuccuggucugaccaugaagccagcuccggcgucagcucugcuuguccuuaccagggggugcccuccuuuuuccgcaacguuguguggcugauuaaaaagaauaacaccuauccuacaaucaaaagaagcuacaauaacaccaaucaagaggaucuccugauccuuugggggauucaccacucuaacgacgccgcugagcagacaaagcuguaucagaacccgaccacguacaucuccgucggcaccagcacacucaaucagcggcuggugcccaagauugccacccgcucuaaagugaacggccaauccgggagaauggacuuuuucuggacaauccugaagccuaaugaugcgauuaacuuugaaagcaauggaaacuucaucgcccccgaguacgcuuauaaaaucgucaagaaaggcgacuccgccauuaugaagucugaaguugaguacgggaauugcaacaccaaaugucagacgccuaucggagcuauuaauagcuccaugcccuuucauaacauccacccgcucacaauuggcgaaugcccuaaguaugugaaaagcaauaaacuggugcuugccaccgggcugcggaacucuccccuccgcgagagacggcgcaagagaggacuguucggcgcgaucgccggcuuuaucgagggaggauggcagggcauggucgaugggugguacggauuccaucacuccaaugaacagggcagcggguaugcugccgacaaagagucuacacaaaaggcuauugauggagugaccaacaaaguuaauagcaucauugacaagaugaacacccaguuugaagccgugggccgggaguucaacaaucuugaacgcagaaucgagaaccugaauaagaaaauggaggauggcuuccucgacgucuggacauacaacgccgaacugcuggugcucauggagaaugaacggacgcuggauuuucacgacuccaacguuaagaaucuuuaugauaaagugcgccugcagcucagagacaacgcuaaggagcuggggaauggauguuucgaauuuuaccauaaaugcgauaacgaguguauggagucuguccggaauggcaccuacgacuauccucaauacagcgaagaggcgagacuuaagcgcgaagagauuuccggggugaagcuggagagcaucggaacauaucagauucucucuaucuacuccaccgucgccagcucucuggcucuggccaucaugguggccggccucucccuguggaugugcagcaacgggucccuucagugccggauuuguaucuga

SEQ ID NO: 194319 - RNA, 1704 nt, Artificial Sequence
  derived and/or modified CDS sequence (opt5) from hemagglutinin__InfluenzaA__ABY19419
auggagaagaucgugcugcuccuggccauuaucagccuugucaaauccgaccagauuugcaucggcuaccacgcuaacaauucuaccgaacaaguugauacaauuauggagaagaacgugacggugacccaugcccaggacauccuggaaaagacacacaaugggaagcucugugaucuggacggagucaaaccccuuauccugagagauugcagcguggcgggcuggcuccuggggaacccuaugugugacgaguucauuaauguuccggaaugguccuauaucguggagaaggcuaaccccgccaaugaucugugcuacccuggaaacuuuaaugacuaugaggaacucaagcaucugcuuucucggauuaaccacuucgagaaaauccagauuauccccaagagcuccuggucugaucaugaagccagcuccggcgucagcucugcuuguccuuaccagggggugcccuccuuuuuccgcaauguuguguggcugauuaaaaagaacaauaccuauccuacaaucaaaagaagcuacaacaauaccaaccaagaggaccuccugauccuuuggggcauucaccacucuaacgaugccgcugagcagacaaagcuguaucagaauccgaccacguacaucuccgucggaaccagcacacucaaccagcggcuggugcccaagauugccacccgcucuaaagugaauggccaauccgggagaauggacuuuuucuggacaauccugaagccuaacgaugcgauuaauuuugaaagcaacggaaauuucaucgcccccgaguacgcuuauaaaaucgucaagaaaggcgacuccgccauuaugaagucugaaguugaguacgggaacugcaauaccaaaugucagacgccuaucggagcuauuaacagcuccaugcccuuucauaauauccacccgcucacaauuggcgaaugcccuaaguaugugaaaagcaacaaacuggugcuugccaccgggcugcgcaauucuccccuccgggagagacggcgcaagagaggacuguucggcgcgaucgccggcuuuaucgaagggggauggcagggcauggucgacgggugguacggauaucaucacuccaacgaacagggcagcggguacgcugccgauaaagagucuacacaaaaggcuauugacggagugaccaauaaaguuaacagcaucauugauaagaugaacacccaguucgaagccgugggccgggaguuuaauaaccuugaacgcagaaucgagaaucugaacaagaaaauggaggacggcuuccucgaugucuggacauauaaugccgaacugcuggugcucauggagaacgaacggacgcuggacuuccacgauuccaauguuaagaaccuuuacgacaaagugcgccugcagcucagagauaaugcuaaggagcuggggaacggauguuuugaguucuaccauaaaugcgacaaugaguguauggagucuguccggaacggcaccuaugauuacccucaauauagcgaagaggcgagacuuaagcgcgaagagauuuccggggugaagcuggagagcaucggaacauaccagauucucucuaucuauuccaccgucgccagcucucuggcucuggccaucaugguggccggccucucccuguggaugugcagcaaugggucccuucagugccggauuuguaucuga

SEQ ID NO: 194320 - RNA, 1698 nt, Artificial Sequence; identical to SEQ ID NO: 194127
  derived and/or modified CDS sequence (opt5) from hemagglutinin__InfluenzaA__ABY51017

SEQ ID NO: 194321 - RNA, 1701 nt, Artificial Sequence; identical to SEQ ID NO: 194000
  derived and/or modified CDS sequence (opt5) from hemagglutinin__InfluenzaA__ABY51028

SEQ ID NO: 194322 - RNA, 1698 nt, Artificial Sequence
  derived and/or modified CDS sequence (opt5) from hemagglutinin__InfluenzaA__ABY51039
augaaggugaaacugcucguccugcuuugcaccuucacagccacgaacgcugacaccaucuguauuggcuaccacgccaauaacagcacagauaccguugacacagugcuggagaagaaugugaccgucacacauuccgugaaccuccuggaaaauucucacaacgggaaacuuugccugcucaagggaaucgcgccccugcagcugggcaauuguagcguugcuggguggauucucggaaacccugagugcgaacugcuuaucuccaaagagucuuggagcuauauuguggaaaccccgaaucccgagaacggcacguguuacccugggcauuuugccgauuaugaggaacugagagagcaacucuccucugucagcuccuucgaacgguuugagaucuuccccaaggagagcucuuggccuaaucacaccgugacaggaguuuccgccagcugcucucauaacggcgaauccagcuuuuaccgcaaucugcuuuggcugaccggcaagaacgggcucuaucccaaucugucuaaauccuacgcuaacaacaaggagaaagaagugcugguccucuggggagugcaccacccuccgaauaucggcgaccagaaggcccuguaucauacagagaacgcuuacgugagcgucguuuccucucacuacagcagaaaauucacccccgaaauugccaagcggccuaaggugcgcgaucaggaggggagaaucaauuauuacuggacgcuucuggagcccggagacacaauuaucuuugaagcgaacggcaaucucauugccccucgguaugcuuucgcccugucccgcggguuuggaagcggcaucauuaacucuaaugcucccauggauaaaugugacgccaagugccagaccccgcaaggcgcgaucaacuccagccuuccuuuccagaaugugcaucccgucacaaucggggaguguccuaaauacgugagaucugccaagcugcggaugguuaccggacuccgcaacauucccagcauccaguccagaggccuguuuggggcuauugccggauucaucgaaggcggguggaccggaaugguggauggcugguauggcuaccaccaccagaaugagcaagggucuggauaugcugccgaccagaaaagcacacagaacgccauuaauggcaucacgaacaaggucaauuccgugaucgaaaagaugaacacccaguuuacagcuguugggaaagaguucaacaagcuggagcggcgcauggaaaaucucaacaaaaagguggaugacggauucauugauaucuggaccuacaaugcggagcugcuuguccugcucgaaaacgagagaacacuggacuuucaugacagcaaugugaaaaaccuuuacgaaaaggucaaaggccaacugaagaauaacgccaaggagauugggaauggcugcuucgaguuuuaucacaaauguaacgaugaaugcauggagucugugaagaauggaaccuacgacuaucccaaauacuccgaagagagcaagcucaaccgggagaaaaucgauggcguuaagcuggaaucuauggggguguaucagauucuggcuaucuacuccacggucgccagcucccucgugcugcuuguuucucugggagccaucagcuucuggaugugcuccaauggcucucuccagugucgcauuugcaucuga

SEQ ID NO: 194323 - RNA, 1698 nt, Artificial Sequence
  derived and/or modified CDS sequence (opt5) from hemagglutinin__InfluenzaA__ABY51050
augaaggugaaacugcucguccugcuuugcaccuucacagccacguacgcugacaccaucuguauuggcuaucacgccaacaauagcacagauaccguugacacagugcuggagaagaacgugaccgucacacauuccgugaaucuccuggaaaacucucacaaugggaaacuuugccugcucaagggaaucgcgccccugcagcugggcaacuguagcguugcuggguggauucucggaaauccugagugcgaacugcuuaucuccaaagagucuuggagcuacauuguggaaaagccgaaccccgagaauggcaccuguuauccugggcauuuugccgauuacgaggaacugagagagcaacucuccucugucagcuccuucgaacgguuugagaucuuccccaaggagagcucuuggccuaaccacacggugaccggaguuuccgccagcugcucucauaauggcgaauccagcuuuuaucgcaaccugcuuuggcugacaggcaaaaaugggcucuaccccaaccugucuaaguccuaugcuaauaacaaagagaaggaagugcugguccucuggggagugcaccacccuccgaacaucggcgaccagaaagcccuguaccauaccgagaaugcuuacgugagcgucguuuccucucacuauagcagaaaguucacacccgaaauugccaagcggccuaaagugcgcgaucaggaggggagaaucaacuacuauuggacccuucuggagcccggagacacgauuaucuuugaagcgaauggcaaccucauugccccucgguacgcuuucgcccugucccgcggguuuggaagcggcaucauuaauucuaacgcucccauggauaagugugacuccaaaugccagacaccgcaaggcgccaucaauagcucucuuccuuuccagaacgugcaucccgucaccaucggggaguguccuaaguaugugagaagcgcgaaacugcggaugguuacaggacuccgcaauauucccuccauccagucuagaggccuguuuggggccauugcuggauucaucgaaggcggguggaccggaaugguggauggcugguacggcuaucaccaccagaacgagcaagggagcggauacgccgcugaccagaaguccacccagaaugccauuaacggcaucacaaauaaagucaacagcgugaucgaaaagaugaauacgcaguuuaccgccguugggaaggaguucaacaaacuggagcggcgcauggaaaaccucaauaagaaaguggaugacggauucauugauaucuggacauacaacgcugagcugcuuguccugcucgaaaaugagagaacccuggacuuucaugacucuaacgugaagaaucuuuaugaaaaagucaagucccaacugaagaacaaugcgaaagagauuggcaacgggugcuucgaguuuuaccacaaguguaaugaugaaugcauggagagcgugaaaaacggcacauaugacuaccccaaguauucugaagaguccaaacucaaucgggagaagaucgauggaguuaagcuggaaagcaugggcguguaccagauucuggccaucuauuccaccgucgcuucuagccucgugcugcuuguuucccugggggccaucucuuucuggaugugcagcaacggaucccuccagugucgcauuugcaucuga

SEQ ID NO: 194324 - RNA, 1698 nt, Artificial Sequence; identical to SEQ ID NO: 194086
  derived and/or modified CDS sequence (opt5) from hemagglutinin__InfluenzaA__ABY51061

SEQ ID NO: 194325 - RNA, 1698 nt, Artificial Sequence
  derived and/or modified CDS sequence (opt5) from hemagglutinin__InfluenzaA__ABY51072
augaaggugaaacugcucauccugcuuugcaccuucacagccacguacgcugacaccauuuguaucggcuaucacgccaacaauagcacagauaccgucgacacaguucuggagaagaacgugaccgugacacauuccgucaaucuccuggaagauucucacaacgggaaacuuugccugcucaagggaauugcgccccugcagcugggcaauuguagcguggcuggguggauccucggaaacccugagugcgaacugcuuauuuccaaagagucuuggagcuacaucguugaaaccccgaaucccgagaacggcacguguuauccuggguacuuugccgacuaugaggaacugagagagcaacucuccucugugagcuccuucgaacgguuugagaucuuccccaaggagagcucuuggccuaaucauaccgucacaggaguguccgccagcugcucucacaacggcaaguccagcuuuuaccgcaaucugcuuuggcugaccggcaaaaacgggcucuaucccaaucugucuaaguccuacgcuaacaauaaagaaaaggagguucuggugcucuggggaguccaucacccuccgaacauuggcgaucagagagcccuguaccacacagaaaacgcuuaugugagcguggucuccucucauuacagccggcgcuucacccccgagaucgccaaaagaccuaagguucgggaccaggaagggcgcauuaauuauuacuggacgcuucuggagcccggagauacaaucauuuuugaggcgaacggcaaucucaucgccccuagauucgcuuuugcccugucccggggguucggaagcggcauuaucaccucuaacgcucccauggacgaaugugaugccaagugccagacaccgcaaggcgcgaucaauuccagccuuccuuuucagaacgugcaccccgugaccauuggggaguguccuaaauauguccgcucuaccaagcugagaauggugacaggacuccggaauauccccagcauucagucccgcggccuguucggggccaucgcuggauuuauugaaggcggguggacgggaaugguugacggcugguacggcuaucaucaccagaacgagcaagggucuggauacgccgcugaucagaaaagcacccagaaugccaucaacggcaucacaaauaaggugaacuccgucauugagaaaaugaauacccaguucacagccguggggaaggcuuucaacaaacuggaaagacggauggagaaucucaacaagaagguugacgauggauuucuggacaucuggaccuacaacgcggaacuucuggugcuccuggagaaugaacgcacgcuugacuuccacgauagcaacgucaaaaaucuguaugagaaggugaaaucucaacucaagaacaaugccaaagaaauuggcaacgggugcuuugaguucuaccauaaguguaaugacgagugcauggaauccgucaagaacggcacauaugauuaccccaaauauagcgaggaaucuaagcugaauagagagaaaaucgacggagugaagcuggaguccaugggcguuuaccagauucucgcuaucuauagcaccguggccuccucucugguccuucuggugagccucggggccaucuccuuuuggaugugcucuaacggaagccugcagugucggauuugcaucuga

SEQ ID NO: 194326 - RNA, 1698 nt, Artificial Sequence; identical to SEQ ID NO: 194028
  derived and/or modified CDS sequence (opt5) from hemagglutinin__InfluenzaA__ABY51083

SEQ ID NO: 194327 - RNA, 1698 nt, Artificial Sequence; identical to SEQ ID NO: 193986
  derived and/or modified CDS sequence (opt5) from hemagglutinin__InfluenzaA__ABY51094

SEQ ID NO: 194328 - RNA, 1698 nt, Artificial Sequence; identical to SEQ ID NO: 194127
  derived and/or modified CDS sequence (opt5) from hemagglutinin__InfluenzaA__ABY51105

SEQ ID NO: 194329 - RNA, 1698 nt, Artificial Sequence; identical to SEQ ID NO: 193986
  derived and/or modified CDS sequence (opt5) from hemagglutinin__InfluenzaA__ABY51116

SEQ ID NO: 194330 - RNA, 1701 nt, Artificial Sequence
  derived and/or modified CDS sequence (opt5) from hemagglutinin__InfluenzaA__ABY51127
augaagaccaucauugcccugagcuacauccucugcaugguguucgcucagaaacugcccggcaacgacaauuccacagccacgcuuugucuggggcaccaugcggucccuaacggaaccauuguuaagacaaucaccaaugaucaaauugaggugacaaacgcuaccgaacucgugcagucuagcuccacaggcgagaucugcgacucuccgcaccagauccuggauggggaaaauuguacccuuauugacgcccugcucggagauccccagugcgacggcuuucaaaacaaaaagugggaucuguucgucgagagaagcaaagccuauuccaauuguuacccuuaugacgugcccgauuacgcuucucugcggagccucguugccuccagcgggacgcuggaauuuaacaaugagucuuucaacuggaccggagugacacagaauggcaccuccagcgcuugcauccgcagaucuaacaauuccuuuuucagccggcuuaacuggcugacacaucucaaguuuaaguauccugcccugaaugucaccaugcccaacaacgagaaauucgacaaacuuuacauuuggggcgugcaccauccugggacggauaaugaccagguuuuucuguaugcgcaggccucuggacgcaucacaguguccaccaagagaagccaacagacagucauuccgaacaucggcucccggccccgcgugagaaauauuccuucucggaucagcaucuacuggaccauugugaagcccggggauauccuccugauuaacuccaccggaaaucugaucgcuccucgcggcuacuucaaaauuagaagcgggaagucuuccaucaugcggagcgacgcccccaucggaaaguguaacucugaaugcauuacaccgaauggcagcaucccuaacgacaaacccuuucagaaugucaaccgcauuacguauggcgcuuguccuagauacguuaagcagaauacccucaaacuggccacagggaugcggaacgugcccgagaagcaaacccgcggaaucuucggcgcgauugccggguuuaucgaaaauggaugggagggcaugguggaugggugguauggauucagacaccagaacuccgagggcaucggccaggcugccgaccuuaaaucuacacaagcugccauugaucagaucaaugggaagcugaaccggcucauuggaaaaaccaacgaaaaguuccaccagaucgagaaggaauuuagcgaggucgaaggccgcauucaggaccuggagaaauacguggaggauacgaagaucgaccuuugguccuauaaugccgaacugcucguugcucuggagaaccaacauacaauugaucugaccgacagcgaaaugaauaaacucuucgagaagaccaaaaagcagcugagagaaaacgcggaggauauggggaauggaugcuuuaagaucuaccacaaaugugacaacgccugcaucggcucuauucggaaugggacauaugaucaugacguguacagagacgaggcucuuaacaaucgcuuccagaucaagggcgucgaacugaaauccggauacaaggauuggauucucuggaucagcuuugccauuucuugcuuccugcuuuguguggcccugcucggcuuuaucaugugggcuugccagaaagggaacauccgguguaauauuugcaucuga

SEQ ID NO: 194331 - RNA, 1698 nt, Artificial Sequence
  derived and/or modified CDS sequence (opt5) from hemagglutinin__InfluenzaA__ABY51138
augaaggugaaacugcucguccugcuuugcaccuucacagccacguacgcugacaccaucuguauuggcuaucacgccaacaauagcacagauaccguugacacagugcuggagaagaacgugaccgucacacauuccgugaaucuccuggaagauagacacaacgggaaacuuugccugcucaagggaaucgcgccccugcagcugggcaauuguucuguugcuggguggauucucggaaacccugagugcgaacugcuuaucagcaaagaguccuggucuuacauuguggaaaccccgaaucccgagaacggcacguguuauccuggguacuuugccgacuaugaggaacugcgggagcaacucagcuccgucucuagcuucgaacgcuuugagaucuuccccaaggaguccagcuggccuaaucauaccgugacaggaguuucugccuccugcagccacaacggcaagucuuccuuuuacagaaaucugcuuuggcugaccggcaaaaacgggcucuaucccaaucugagccggucuuacgcuaacaauaaggaaaaagaggugcugguccucuggggagugcaucacccuccgaacaucggcgaucagcgcgcccuguaccacacagaaaacgcuuauguguccgucguuagcucccauuacucuagacgguucacccccgagauugccaagcgcccuaaagugagagaccaggaagggcggaucaauuauuacuggacgcuucuggagcccggagauacaauuaucuuugaggcgaacggcaaucucauugccccucgcuucgcuuuugcccugagcagaggguucggauccggcaucauuaccagcaacgcucccauggacgaaugugaugccaagugccagacaccgcaaggcgcgaucaauucuucccuuccuuuucagaacgugcaccccgucaccaucggggaguguccuaaguaugugcggagcgccaaacugcgcaugguuaccggacucagaaauauucccucuauccagagccggggccuguucggggcuauugccggauuuaucgaaggcggguggacaggaaugguggacggcugguacggcuaucaucaccagaacgagcaaggguccggauacgcugccgaucagaagucuacgcagaaugccauuaacggcaucaccaauaaagucaacagcgugaucgaaaagaugaauacacaguucaccgcuguugggaaagaguucaacaagcuggagcgcagaauggaaaaucucaacaaaaagguggacgauggauuucuggacauuuggacauacaacgcggagcuucugguccuccuggaaaaugagcggacccuugacuuccacgauuccaacgugaagaaucuguaugaaaaagucaagauccaacucaaaaacaaugccaaggagauuggcaacgggugcuuugaguucuaccauaaauguaaugacgaaugcauggagagcgugaagaacggcacguaugauuaccccaaguauucugaagaguccaaacugaauagagagaagaucgacggaguuaaacuggaaagcaugggcguguaccagauucucgcuaucuauucuacagucgccuccagccuggugcuucugguuucccucggggccaucucuuuuuggaugugcagcaacggaucccugcagugucgcauuugcaucuga

SEQ ID NO: 194332 - RNA, 1698 nt, Artificial Sequence; identical to SEQ ID NO: 193986
  derived and/or modified CDS sequence (opt5) from hemagglutinin__InfluenzaA__ABY51149

SEQ ID NO: 194333 - RNA, 1698 nt, Artificial Sequence
  derived and/or modified CDS sequence (opt5) from hemagglutinin__InfluenzaA__ABY51160
augaaggugaaacugcucguccugcuuugcaccuucacagccacguacgcugacaccaucuguauuggcuaucacgccaacaauagcacagauaccguugacacagugcuggagaagaacgugaccgucacacauuccgugaaucuccuggaagauagacacaacgggaaacuuugccugcucaagggaaucgcgccccugcagcugggcaauuguucuguugcuggguggauucucggaaacccugagugcgaacugcuuaucagcaaagaguccuggucuuacauuguggaaaccccgaaucccgagaacggcacguguuauccuggguacuuugccgacuaugaggaacugcgggagcaacucagcuccgucucuagcuucgaacgcuuugagaucuuccccaaggaguccagcuggccuaaucauaccgugacaggaguuucugccuccugcagccacaacggcaagucuuccuuuuacagaaaucugcuuuggcugaccggcaaaaacgggcucuaucccaaucugagcaagucuuacgcuaacaauaaagaaaaggaggugcugguccucuggggagugcaucacccuccgaacaucggcgaucagcgggcccuguaccacacagaaaacgcuuauguguccgucguuagcucccauuacucucgcagauucacccccgagauugccaaacggccuaaggugcgcgaccaggaagggagaaucaauuauuacuggacgcuucuggagcccggagauacaauuaucuuugaggcgaacggcaaucucauugccccucgguucgcuuuugcccugagccgcggguucggauccggcaucauuaccagcaacgcucccauggacaagugugaugccaaaugccagacaccgcaaggcgcgaucaauucuucccuuccuuuucagaacgugcaccccgucaccaucggggaauguccuaaguaugugagaagcgccaaacugcggaugguuaccggacuccgcaauauucccucuauccagagcagaggccuguucggggcuauugccggauuuaucgagggcggguggacaggaaugauugacggcugguacggcuaucaucaccagaacgaacaaggguccggauacgcugccgaucagaagucuacgcagaaugccaucaacggcaucaccaauaaagugaacagcgucauugagaagaugaauacacaguucaccgcuguggggaaagaguucaacaagcuggaacggcgcauggagaaucucaacaagaaaguugacgauggauuucuggacaucuggacauacaacgcggaacuucuggugcuccuggagaaugaaagaacccuugacuuccacgauuccaacgucaagaaucuguaugagaaagucaagagccaacucaaaaacaaugccaaggaaauuggcaacgggugcuuugaguucuaccauaaguguaaugacgagugcauggaaucugugaaaaacggcacguaugauuaccccaaguauuccgaggaaagcaaacugaaucgggagaagaucgacggagugaaacuggagucuaugggcguuuaccagauucucgcuaucuauuccacaguggccagcucccugguccuucuggugucucucggggccaucagcuuuuggaugugcuccaacggaucucugcaguguagaauuugcaucuga

SEQ ID NO: 194334 - RNA, 1698 nt, Artificial Sequence
  derived and/or modified CDS sequence (opt5) from hemagglutinin__InfluenzaA__ABY51171
augaaggugaaacugcucguccugcuuugcaccuucacagccacguacgcugacaccaucuguauuggcuaucacgccaacaauagcacagauaccguugacacagugcuggagaagaacgugaccgucacacauuccgugaaucuccuggaagauucucacaacgggaaacuuugccugcucaagggaaucgcgccccugcagcugggcaauuguagcguugcuggguggauucucggaaacccugagugcgaacugcuuaucuccaaagagucuuggagcuacauuguggaaaccccgaaucccgagaacggcacguguuauccuggguacuuugccgacuaugaggaacugagagagcaacucuccucugucagcuccuucgaacgguuugagaucuuccccaaggagagcucuuggccuaaucauaccgugacaggaguuuccgccagcugcucucacaacggcaaguccagcuuuuaccgcaaucugcuuuggcugaccggcaaaaacgggcucuaucccaaucugucuaaguccuacgcuaacaauaaagaaaaggaggugcugguccucuggggagugcaucacccuccgaacaucggcgaucagagagcccuguaccacacagaaaacgcuuaugugagcgucguuuccucucauuacagccggcgcuucacccccgagauugccaaaagaccuaaggugcgggaccaggaagggcgcaucaauuauuacuggacgcuucuggagcccggagauacaauuaucuuugaggcgaacggcaaucucauugccccuagauucgcuuuugcccugucccggggguucggaagcggcaucauuaccucuaacgcucccaugggcgaaugugacgccaagugccagacaccgcaaggggcgaucaauuccagccuuccuuuucagaacgugcaccccgucaccaucggagaguguccuaaauaugugcgcucugccaagcugagaaugguuaccggccuccggaauauucccagcauccagucccgcgggcuguucggagcuauugccggcuuuaucgaagggggauggacaggcaugguggauggcugguacggguaucaucaccagaacgagcaaggaucuggcuacgcugccgaccagaaaagcacgcagaaugccauuaacgggaucaccaauaaggucaacuccgugaucgaaaagaugaauacacaguucaccgcuguuggaaaagaguucaacaaacuggagagacggauggaaaaucucaacaagaagguggaugacggcuuucuggauauuuggacauacaacgcggagcuucugguccuccuggaaaaugagcgcacccuugacuuccacgacagcaacgugaaaaaucuguaugaaaaggucaaaucucaacucaagaacaaugccaaagagaucgggaacggcugcuuugaguucuaccauaaguguaaugaugaaugcauggaguccgugaagaacggaacguaugacuaccagaaauauagcgaagagucuaagcugaauagagagaaaauugauggcguuaagcuggaauccauggggguguaccagauccucgcuauuuauagcacagucgccuccucucuggugcuucugguuagccucggagccaucuccuuuuggaugugcucuaacggcagccugcaaugucggaucugcauuuga

SEQ ID NO: 194335 - RNA, 1698 nt, Artificial Sequence; identical to SEQ ID NO: 193982
  derived and/or modified CDS sequence (opt5) from hemagglutinin__InfluenzaA__ABY51182

SEQ ID NO: 194336 - RNA, 1698 nt, Artificial Sequence; identical to SEQ ID NO: 194002
  derived and/or modified CDS sequence (opt5) from hemagglutinin__InfluenzaA__ABY51193

SEQ ID NO: 194337 - RNA, 1698 nt, Artificial Sequence; identical to SEQ ID NO: 193986
  derived and/or modified CDS sequence (opt5) from hemagglutinin__InfluenzaA__ABY51237

SEQ ID NO: 194338 - RNA, 1698 nt, Artificial Sequence; identical to SEQ ID NO: 194002
  derived and/or modified CDS sequence (opt5) from hemagglutinin__InfluenzaA__ABY51248

SEQ ID NO: 194339 - RNA, 1698 nt, Artificial Sequence; identical to SEQ ID NO: 193982
  derived and/or modified CDS sequence (opt5) from hemagglutinin__InfluenzaA__ABY51259

SEQ ID NO: 194340 - RNA, 1701 nt, Artificial Sequence; identical to SEQ ID NO: 194059
  derived and/or modified CDS sequence (opt5) from hemagglutinin__InfluenzaA__ABY51270

SEQ ID NO: 194341 - RNA, 1707 nt, Artificial Sequence
  derived and/or modified CDS sequence (opt5) from hemagglutinin__InfluenzaA__ABY76282
auggagaagaucgugcugcuccuggccauugucagccuuguuaaauccgaccagaucugcauuggcuaccacgcuaacaauucuaccgaacauguggauacaaucauggagaagaacgugacggucacccacgcccaagacauucuggaaaaagcgcauaaugggagacucugugaucuggacggagugaagccccuuauccugcgggauugcagcguugcuggcuggcuccuggggaacccuaugugugacgaguuccugaaugugccggaaugguccuauaucgucgagaaaaacaaucccgccaacgaucucugcuacccuggaaauuuuaacgacuaugaggaacugaagcaccuucugucucgcauuaaucauuucgagaagauccagauuauccccaaaagcuccuggucugaucacgaagccagcuccggcgugagcucugcuuguccuuaccaggggagauccagcuuuuuccggaacguuguguggcucauuaagaaaaaugacgccuaucccacaaucaagcgcucuuacaacaauaccaaccaggaggaucugcuuguccuguggggcauucaccauccuaacgacgcugccgagcaaacaagacucuaucagaauccgaccacauacaucuccgugggaaccagcacgcugaaccagcggcuggugcccaaaaucgcgacccgcucuaaggucaauggccaguccgggagaauggaauuuuucuggacaauucucaagccuaacgaugccaucaauuuugagagcaacggaaauuucauugcucccgaaaacgccuacaaaaucguuaagaaaggcgacuccaccauuaugaagucugagcuggaauaugggaauugcaacacaaaaugucaaaccccuaucggagcuaucaauagcuccaugcccuuucacaacauucauccgcuuacgaucggcgagugcccuaaguacgugaaaagcaaucggcuggugcucgccacagggcugcgcaacucuccccagggagagagacggcgcaagaagagaggccuuuucggcgcgauugccggguuuaucgaaggaggcuggcaggggauggucgacggaugguauggcuaccaccacuccaaugagcaggggagcggauaugcugccgauaaagaaucuacccaaaaggcuauugacggcgugacaaacaaaguuaacagcaucaucgauaagaugaauacccaguucgaggccgugggccgggaauuuaacaaucuggagcgcagaauugagaaccucaauaaaaagauggaagacggguuccuggaugucuggaccuacaacgccgagcugcucgugcugauggaaaaugagcggacacuugacuuccaugauuccaacguuaagaaucuguaugacaaagugagacuccagcugcgcgauaacgcuaaggaacuuggaaauggcuguuuugaguucuaccaccggugcgacaacgaguguauggaaucugucagaaaugggacguacgauuauccucaauacagcgaggaagcgcgccugaaacgggaggagaucuccggagugaagcucgaaagcauuggcaccuaucagauccugucuauuuacuccacagucgccagcucucuggcucucgccaucaugguggccgggcugucccuuuggaugugcagcaacggcucccugcagugcagaauuuguaucuga

SEQ ID NO: 194342 - RNA, 1701 nt, Artificial Sequence
  derived and/or modified CDS sequence (opt5) from hemagglutinin__InfluenzaA__ABY81349
augaaggccaaacugcucgugcugcuuugcgcucugagcgccaccgacgcggauacaaucuguauuggcuaccacgcuaacaauuccacggacaccgucgauacaguucucgagaagaacgugaccgugacacauucugucaaucugcuugaagacagccacaacgggaaacugugcagacucaagggaaucgcuccccugcagcugggcaaauguuccauugccggguggauccucggaaauccugagugcgaaucucuguucagcaagaaguccuggucuuauauugccgagaccccgaacagcgaaaauggcacauguuaccccggguauuuugccgauuacgaggagcuucgggaacaacuguccagcgugucuuccuucgagcgcuuugaaaucuucccuaaagagagaagcuggcccaagcauaacguuacccggggagugacggcugccugcucucacaaaggcaaguccagcuuuuaucgcaaucuccuguggcuuaccgagaaaaacggcucuuacccuaaucuguccaagagcuaugucaacaauaaggaaaaagaggugcucguucuguggggagugcaucaccccuccaacaucaaggaccagaaaacaauuuaccagaaggaaaaugcguacgucucuguggugagcuccaacuauaacagacgguucaccccugagaucgccaaacgcccgaaggucagagaucaggaagggcggauuaauuacuauuggacacugcucgagcccggcgacaccaucauuuuugaggcuaacgggaaucugaucgccccuugguacgcuuucgcccuuagccgcggauuuggcucugggauuaucacguccaacgcgagcauggaugaaugugacacaaaaugccaaacaccccagggagccaucaauucuagccugccuuuccagaacguucaccccgugaccauuggcgaguguccgaaguaugugagauccaccaagcuccggauggucaccggccugcgcaauaucccuucuauucagagcagagggcuuuuuggagcuaucgccggcuucauugaagggggauggacaggcaugaucgaugggugguacggauaucaucaccaaaacgagcagggcuccggcuacgcugccgaccagaaaagcacgcagaaugccaucaacgggauuaccaauaaggugaacucuguuaucgaaaagaugaauacacaauuuaccgcugugggaaaggaguucaacaaacuggagaagcggauggaaaaucucaacaagaaagucgaugacggcuuccuggacauuuggacauacaacgcggagcugcucgugcugcuugaaaaugagcgcacccuggauuuucaugacuccaacguuaagaaucucuaugaaaaagugaaaagccagcugaaaaacaaugccaaggaggucgggaacggaugcuucgaguuuuaccacaaguguaauaacgaaugcauggagucugugaaaaauggcacguaugauuaccccaaguauuccgaagagagcaaacuuaacagagagaagaucgacggggucaaacuggaauccaugggcguguaccagauucucgcuaucuauucuacaguugccagcucccuggugcugcucgucucucugggagccaucagcuucuggaugugcuccaauggcagccuucaaugucggauuugcaucuga

SEQ ID NO: 194343 - RNA, 1701 nt, Artificial Sequence; identical to SEQ ID NO: 194000
  derived and/or modified CDS sequence (opt5) from hemagglutinin__InfluenzaA__ABY81371

SEQ ID NO: 194344 - RNA, 1698 nt, Artificial Sequence; identical to SEQ ID NO: 193986
  derived and/or modified CDS sequence (opt5) from hemagglutinin__InfluenzaA__ABY81382

SEQ ID NO: 194345 - RNA, 1698 nt, Artificial Sequence; identical to SEQ ID NO: 194028
  derived and/or modified CDS sequence (opt5) from hemagglutinin__InfluenzaA__ABY81393

SEQ ID NO: 194346 - RNA, 1698 nt, Artificial Sequence
  derived and/or modified CDS sequence (opt5) from hemagglutinin__InfluenzaA__ABY81415
augaaggugaaacugcucguccugcuuugcaccuucacagccacguacgcugacaccaucuguauuggcuaucacgccaacaauagcacagauaccguugacacagugcuggagaagaacgugaccgucacacauuccgugaaucuccuggaagauucucacaacgggaaacuuugccugcucaagggaaucgcgccccugcagcugggcaauuguagcguugcuggguggauucucggaaacccugagugcgaacugcuuaucuccaaagagucuuggagcuacauuguggaaaccccgucccccgagaauggcacguguuauccuggguacuuugccgacuaugaggaacugagagagcaacucucuagcgucuccagcuucgaacgguuugagaucuuccccaaggagucuuccuggccuaaccauaccgugacaggaguuagcgccucuugcucccacaauggcaagagcucuuuuuaccgcaaccugcuuuggcugaccggcaaaaaugggcucuaucccaaccuguccaagagcuacgcuaauaacaaagaaaaggaggugcugguccucuggggagugcaucacccuccgaauaucggcgaucagagagcccuguaccacacagaaaacgcuuauguguccgucguuucuagccauuacucccggcgcuucacccccgagauugccaaaagaccuaaggugcgggaccaggaagggcgcaucaacuauuacuggacgcuucuggagcccggagauacaauuaucuuugaggcgaauggcaaccucauugccccuagauucgcuuuugcccugagccggggguucggaucuggcaucauuaccuccaaugcucccaugggcgaaugugacgccaagugccagacaccgcaaggggcgaucaacagcucucuuccuuuucagaaugugcaccccgucaccaucggagaguguccuaaauaugugcgcagcgccaagcugagaaugguuaccggccuccggaacauucccuccauccagucucgcgggcuguucggagcuauugccggcuuuaucgaagggggauggacaggcaugguggauggcugguacggguaucaucaccagaaugagcaaggaagcggcuacgcugccgaccagaaauccacgcagaacgccauuaaugggaucaccaacaaggucaauagcgugaucgaaaagaugaacacacaguucaccgcuguuggaaaagaguucaauaaacuggagagacggauggaaaaccucaauaagaagguggaugacggcuuucuggauauuuggacauacaacgcggagcuucugguccuccuggaaaacgagcgcacccuugacuuccacgacucuaaugugaaaaaccuguaugaaaaggucaaaucccaacucaagaauaacgccaaagagaucgggaauggcugcuuugaguucuaccauaaguguaacgaugaaugcauggagagcgugaagaauggaacguaugacuaccccaaauauucugaagaguccaagcugaacagagagaaaauugauggcguuaagcuggaaagcauggggguguaccagauccucgcuauuuauuccacagucgccucuagccuggugcuucugguuucccucggagccaucucuuuuuggaugugcagcaauggcucccugcagugucggaucugcauuuga

SEQ ID NO: 194347 - RNA, 1701 nt, Artificial Sequence; identical to SEQ ID NO: 194000
  derived and/or modified CDS sequence (opt5) from hemagglutinin__InfluenzaA__ACA24502

SEQ ID NO: 194348 - RNA, 1698 nt, Artificial Sequence
  derived and/or modified CDS sequence (opt5) from hemagglutinin__InfluenzaA__ACA24513
augaaggugaaacugcucauccugcuuugcaccuucacagccacguacgcugacaccauuuguaucggcuaucacgccaacaauagcacagauaccgucgacacaguucuggagaagaacgugaccgugacacauuccgucaaucuccuggaagauucucacaacgggaaacuuugccugcucaagggaauugcgccccugcagcugggcaauuguagcguggcuggguggauccucggaaacccugagugcgaacugcuuauuuccaaagagucuuggagcuacaucguugaaaccccgaaucccgagaacggcacguguuauccuggguacuuugccgacuaugaggaacugagagagcaacucaauuccgugucuagcuucgaacgguuugagaucuuccccaaggaguccagcuggccuaaccauaccgucacaggagugucugccuccugcagccacaauggcaagucuuccuuuuaccgcaaccugcuuuggcugaccggcaaaaaugggcucuaucccaaccugagcaagucuuacgcuaauaacaaagaaaaggagguucuggugcucuggggaguccaucacccuccgaacauuggcgaucagagagcccuguaccacacagaaaaugcuuauguguccguggucagcucccauuacucucggcgcuucacccccgagaucgccaaaagaccuaagguucgggaccaggaagggcgcauuaacuauuacuggacgcuucuggagcccagagauacaaucauuuuugaggcgaauggaaaccucaucgccccucgguucgcuuuugcccugagccgcggcuucggguccggaauuaucaccagcaaugcucccauggacgaaugugaugccaagugccagacaccgcaaggcgcgaucaacucuucccuuccuuuucagaaugugcaccccgugaccauuggcgaguguccuaaauaugucagaagcaccaagcugcggauggugacagggcuccgcaacauccccucuauucagagcagaggacuguucggcgccaucgcuggguuuauugaaggaggcuggacggggaugguugacggaugguacggcuaucaucaccagaaugagcaaggcuccggguacgccgcugaucagaaaucuacccagaacgccaucaauggaaucacaaacaaggugaauagcgucauugaaaagaugaacacccaguucacagccgugggcaaagaguucaauaaacuggagcggcgcauggaaaaccucaacaagaagguugacgauggguuucuggacaucuggaccuacaaugcugagcuucuggugcuccuggaaaacgagagaacgcuugacuuccacgauuccaaugucaaaaaccuguaugaaaaggugaaaagccaacucaagaauaacgcgaaagagauuggaaauggcugcuuugaguucuaccauaaguguaacgacgaaugcauggagucugucaagaaugggacauaugauuaccccaaauauuccgaagagagcaagcugaaccgggagaaaaucgacggcgugaagcuggaaucuaugggaguuuaccagauucucgccaucuauuccaccguggcuagcucccugguccuucuggugucucucggcgccaucagcuuuuggaugugcuccaaugggucucugcaguguagaauuugcaucuga

SEQ ID NO: 194349 - RNA, 1698 nt, Artificial Sequence; identical to SEQ ID NO: 193986
  derived and/or modified CDS sequence (opt5) from hemagglutinin__InfluenzaA__ACA24524

SEQ ID NO: 194350 - RNA, 1701 nt, Artificial Sequence
  derived and/or modified CDS sequence (opt5) from hemagglutinin__InfluenzaA__ACA24689
augaagaccaucauugcccugagcuacauccucugccugguguucgcucagaaacuucccggcauugacaacuccacagccacgcugugucucgggcaccaugcggucccuaauggaaccaucguuaagacaauuaccaacgaucaaaucgaggugacaaaugcuaccgaacuggugcagaacucuagcacaggcgggaucugcgacuccccgcaccagauuaucgauggagagaauuguacccuuauugacgcccugcucggcgauccccagugcgacggguuucaaaacaaaaagugggaucuguucgucgaaagaucuaaagccuauagcaauuguuacccuuaugacgugcccgauuacgcuucccugcggucucucguugccagcuccggaacgcuggaguuuaacaaugaaucuuucaacuggaccggcgugacacagaauggcaccucuuccgcuugcaagcgcgggagcaacaauagcuuuuucuccagacuuaacuggcugacacauagcaaguuuaaauauccugcccucaaugucaccaugcccaacaacgaggaguucgacaagcuguacaucuggggagugcaccauccuggcacggauaaugaccagauuuuucuuuaugcgcaggccucugggcggaucacaguuuccaccaaacgcagccaacagacagugauuccgaacaucggauccagaccccggguccgcaauaucccuucuagaauuagcaucuacuggaccauugugaagcccggcgauauccugcucauuaacuccaccgggaaucugaucgcuccucggggauacuucaaaauccgcagcggcaagucuuccauuaugagaagcgacgcccccaucggcaaguguaacucugaaugcauuacaccgaaugggagcaucccuaacgacaaacccuuucagaaugugaaccggauuacguauggagcuuguccucgcuacgucaagcagaauacccugaaacucgccacaggcaugagaaacguucccgagaagcaaacccgggggaucuucggagcgaucgccggcuuuauugaaaaugggugggagggaaugguggauggcugguauggcuuccgccaccagaacuccgaggggaucggacaggcugccgaccugaaaucuacacaagcugccauugaucagaucaauggcaaacuuaacagacugauugggaagaccaacgaaaaguuccaccagaucgagaaggaauuuagcgagguggaaggacggauucaggaccucgagaaauacgucgaggauacgaagaucgaccugugguccuauaaugccgaacuucugguggcucucgagaaccaacauacaaucgaucugaccgacagcgaaaugaauaaacuguucgagaagaccaaaaagcagcucagagaaaacgcggaggauaugggcaaugggugcuuuaagauuuaccacaaaugugacaacgccugcaucggcucuauucgcaauggaacauaugaucauuacguuuaccgggacgaggcucugaacaauagauuccagaucaagggcauugaacuuaaauccggguauaaggacuggauccuguggaucagcuuugccauuucuugcuuccuccuguguguggcccuucugggauuuaucaugugggcuugccagaaaggcaacauucgcuguaauaucugcauuuga

SEQ ID NO: 194351 - RNA, 1701 nt, Artificial Sequence
  derived and/or modified CDS sequence (opt5) from hemagglutinin__InfluenzaA__ACA24700
augaagaccaucauugcccugagcuacauccucugccugguguucgcucagaaacuucccggcauugacaacuccacagccacgcugugucucgggcaccaugcggucccuaauggaaccaucguuaagacaauuaccaacgaucaaaucgaggugacaaaugcuaccgaacuggugcagaacucuagcacaggcgggaucugcgacuccccgcaccagauucuugauggagagaauuguacccugaucgacgcccuccugggcgauccccagugcgacggguuucaaaacaaaaagugggaucuguucgucgaaagaucucaggccuauagcaauuguuacccuuaugacgugcccgauuacgcuucccuccggucucugguugccagcuccggaacgcuugaguuuaacaaugaaucuuucaacuggaccggcgugacacagaauggcaccucuuccgcuugcaaacgcgggagcaacaauagcuuuuucuccagacugaacuggcucacacauagcaaguuuaaguauccugcccugaaugucaccaugcccaacaacgaggaguucgacaaacuuuacauuuggggagugcaccauccuggcacggauaaugaccagaucuuucuguaugcgcaagccucugggcggauuacaguuuccaccaagcgcagccagcagacagugaucccgaacauuggauccagaccccggguccgcaauaucccuucuagaaucagcauuuacuggaccaucgugaaacccggcgauauucuccugaucaacuccaccgggaaucugauugcuccucggggauacuucaagauccgcagcggcaaaucuuccaucaugagaagcgacgcccccauuggcaaguguaacucugaaugcaucacaccgaaugggagcauuccuaacgacaagcccuuucagaaugugaaccggaucacguauggagcuuguccucgcuacgucaaacaaaauacccucaagcuggccacaggcaugagaaacguucccgagaaacagacccgggggauuuucggagcgaucgccggcuuuaucgaaaaugggugggagggaaugguggauggcugguauggcuuccgccaccagaacuccgaggggauuggacaagcugccgaccuuaagucuacacaggcugccaucgaucagauuaauggcaaacugaacagacucaucgggaagaccaacgaaaaauuccaccagauugagaaggaauuuagcgagguggaaggacggauccaagaccuggagaaguacgucgaggauacgaaaauugaccuuugguccuauaaugccgaacugcucguggcucuggagaaccagcauacaaucgaucugaccgacagcgaaaugaauaaacucuucgagaagaccaagaaacagcugagagaaaacgcggaggauaugggcaaugggugcuuuaagaucuaccacaagugugacaacgccugcauuggcucuauccgcaauggaacauaugaucaugacguuuaccgggacgaggcucuuaacaauagauuccagauuaaaggcguggaacugaaguccggguacaaagauuggauccucuggauuagcuuugccaucucuugcuuccugcuuugugucgcccugcucggauuuaucaugugggcuugccaaaagggcaacauucgcuguaauaucugcauuuga

SEQ ID NO: 194352 - RNA, 1698 nt, Artificial Sequence
  derived and/or modified CDS sequence (opt5) from hemagglutinin__InfluenzaA__ACA28846
augaaggugaaacugcucguccugcuuugcaccuucacagccacguacgcugacaccaucuguauuggcuaucacgccaacaauagcacagauaccguugacacagugcuggagaagaacgugaccgucacacauuccgugaaucuccuggaaaacucucacaaugggaaacuuugccugcucaagggaaucgcgccccugcagcugggcaacuguagcguugcuggguggauucucggaaauccugagugcgaacugcuuaucuccaaagagucuuggagcuacauuguggaaaagccgaaccccgagaauggcaccuguuauccugggcauuuugccgauuacgaggaacugagagagcaacucuccucugucagcuccuucgaacgguuugagaucuuccccaaggagagcucuuggccuaaccacacggugaccggaguuuccgccagcugcucucauaauggcgaauccagcuuuuaucgcaaccugcuuuggcugacaggcaaaaaugggcucuaccccaaccugucuaaguccuaugcuaauaacaaagagaaggaagugcugguccucuggggagugcaccacccuccgaacaucggcauucagaaagcccuguaccauaccgagaaugcuuacgugagcgucguuuccucucacuauagcagaaaguucacacccgaaaucgccaagcggccuaaagugcgcgaccaggaggggagaauuaacuacuauuggacccuucuggagcccggagauacgaucauuuuugaagcgaauggcaaccucaucgccccucgguacgcuuucgcccugucccgcggguuuggaagcggcauuaucaauucuaacgcucccauggacaagugugaugccaaaugccagacaccgcaaggcgcgaucaauuccagccuuccuuuccagaacgugcaucccgucaccauuggggaguguccuaaguaugugagaucugccaaacugcggaugguuacaggacuccgcaauauccccagcauucaguccagaggccuguuuggggcuaucgccggauucauugaaggcggguggaccggaaugguggacggcugguacggcuaucaccaccagaacgagcaagggucuggauacgcugccgaucaaaagagcacccagaaugccaucaacggcaucacaaauaaagucaacuccgugauugaaaagaugaauacgcaguuuaccgcuguugggaaggaguucaacaaacuggagcggcgcauggaaaaccucaauaagaaaguggacgauggauucaucgacauuuggacauacaacgcggagcugcuuguccugcucgaaaaugagagaacccuggauuuucaugacagcaacgugaagaaucuuuaugaaaaagucaagucucagcugaagaacaaugccaaagagaucggcaacgggugcuucgaguuuuaccacaaguguaaugacgaaugcauggaguccgugaaaaacggcacauaugauuaccccaaguauagcgaagagucuaaacucaaucgggagaagauugacggaguuaagcuggaauccaugggcguguaccagauccuggcuaucuauagcaccgucgccuccucucucgugcugcuuguuagccugggggccauuuccuucuggaugugcucuaacggaagccuccagugucgcaucugcauuuga

SEQ ID NO: 194353 - RNA, 1701 nt, Artificial Sequence
  derived and/or modified CDS sequence (opt5) from hemagglutinin__InfluenzaA__ACA33749
augaagaccaucauugcccugagcuacauccucugccugguguucgcucagaaacuucccggcaacgacaauuccacagccacgcugugucucgggcaccaugcggucccuaacggaaccauuguuaagacaaucaccaaugaucaaauugaggugacaaacgcuaccgaacuggugcagucuagcuccacaggcgagaucugcgacucuccgcaccagauccuugauggggaaaauuguacccugauugacgcccuccugggagauccccagugcgacggcuuucaaaacaaaaagugggaucuguucgucgagagaagcaaagccuauuccaauuguuacccuuaugacgugcccgauuacgcuucucuccggagccugguugccuccagcgggacgcuugaauuuaacaaugagucuuucaacuggaccggagugacacagaauggcaccuccagcucuugcauccgcagauccaacaauagcuuuuucucucggcugaacuggcucacacaucugaaguuuaaguauccugcucuuaaugucaccaugcccaacaacgagaaauucgacaagcuguacauuuggggcgugcaccauccugggacggauaaugaccagaucuuucucuaugcccaggcguccggacgcauuacaguuagcaccaaaagaucccaacagacagugaucccgaacauuggcucucggccccgcgucagaaauaucccuagccggaucuccauuuacuggaccaucgugaagcccggggauauucugcugaucaacagcaccggaaaucucauugccccucgcggcuacuucaaaaucagaucugggaaguccagcaucaugcggucugacgcucccauuggaaaguguaacagcgaaugcaucacaccgaauggcuccauuccuaacgacaaacccuuucagaaugugaaccgcaucacguauggcgccuguccuagauacgucaagcagaauacccugaaacuugcuacagggaugcggaacguucccgagaagcaaacccgcggaauuuucggcgccaucgcgggguuuaucgaaaauggaugggagggcaugguggaugggugguauggauucagacaccagaacucugagggcauuggccaggccgcugaccugaaaagcacacaagccgcuaucgaucagauuaaugggaagcucaaccggcugaucggaaaaaccaacgaaaaguuccaccagauugagaaggaauuuuccgagguggaaggcagaauccaggaccuugagaaauacgucgaggauacgaagauugaccuguggagcuauaaugccgaacuccugguggcccuggagaaccaacauacaaucgaucucaccgacucugaaaugaauaaacuguucgagaagaccaaaaagcagcuucgcgaaaacgcugaggauauggggaauggaugcuuuaagaucuaccacaaaugugacaacgcgugcauuggcuccauccggaaugggacauaugaucaugacguuuacagagacgaggcccugaacaaucgcuuccagauuaagggcguggaacucaaaagcggauacaaggauuggauccuguggauuucuuuugcuaucuccugcuuccuucugugugucgcccuccugggcuuuaucaugugggccugccagaaagggaacauucgguguaauaucugcauuuga

SEQ ID NO: 194354 - RNA, 1698 nt, Artificial Sequence; identical to SEQ ID NO: 193982
  derived and/or modified CDS sequence (opt5) from hemagglutinin__InfluenzaA__ACA96519

SEQ ID NO: 194355 - RNA, 1659 nt, Artificial Sequence
  derived and/or modified CDS sequence (opt5) from hemagglutinin__InfluenzaA__ACC55270
augaacacccagauccuggccuucauugcuugcgugcucacaggcgucaagggggacaaaaucugucugggacaccaugccguugcgaauggcacgaaggugaacacccuuacagagagagggauugaaguggucaaugcuaccgagacaguggaaaccacaaacaucaaaaagauuugcacccaaggaaaacggcccacggaucugggccagugugggcuccugggaacccuuaucggcccuccgcagugcgaccaguuucuggaguucagcuccgaucucaucauugaacgcagagagggcacagacaucuguuaccccgggcgguuuaccaaugaggaaucucugcgccaaauucugagacggagcggaggcaucgggaaggaguccaugggauucacauauucuggcauucgcaccaacggggccacgagcgccugcacaagauccggaucuagcuuuuacgcugaaaugaaguggcuccuguccaauagcgauaacgccgcuuucccucagaugaccaaagccuaucggaauccccgcaacaagccugcgcuuaucauuuggggcguucaccauucugaguccgugagcgagcagacaaaacuguacggcucugggaauaagcucaucaccgucagauccagcaaauaucagcaaucuuuuacccccaacccuggagcccggcgcaucgacuuccacuggcugcuucuggauccgaaugacacagugacguuuaccuucaacggcgcuuuuauugcccccgauagaacauccuucuuucgcggggaaagccucggaguucaguccgacgcuccucuggauucuagcugucggggcgacugcuuccauuccgggggaaccaucgugagcucucugcccuuccagaauauuaacuccagaacagucggcaaguguccucgguacgugaagcagaaaagccuccugcuugccaccggcaugagaaacgugcccgagaagccgaaaccucgcgggcuguuuggagcgaucgccggcuucauugaaaaugggugggagggacucaucaacggcugguauggguuucggcaccaaaaugcucagggcgaaggaacggccgcugauuacaagucuacacagagcgccaucgaccaaauuaccggcaaacugaacagacuuaucgggaagaccaaucagcaguucgagcugauugacaacgaguuuaaugaaaucgagcagcaaauuggaaacgucaucaauuggacacgcgaugccaugaccgaaaucugguccuacaacgcugagcuccugguugcgauggaaaaucagcacacaauugaccuggccgauucugagaugagcaaacucuaugagcgggugaagaagcagcugagagaaaacgcugaggaagacggcacggggugcuucgagaucuuucauaaaugugaugaccagugcauggaauccauucgcaauaacaccuacgaucacacacaauaucggaccgagagccuucagaauagaauccagauugaccccgugaagcugucuuccggauacaaagauaucauucucugguucagcuuuggcgccucuugcuuccugcuucuggccaucgcuauggggcucgucuuuaucuguauuaagaacggcaacaugcagugcacaaucuguauuuga

SEQ ID NO: 194356 - RNA, 1698 nt, Artificial Sequence; identical to SEQ ID NO: 193986
  derived and/or modified CDS sequence (opt5) from hemagglutinin__InfluenzaA__ACC61964

SEQ ID NO: 194357 - RNA, 1698 nt, Artificial Sequence
  derived and/or modified CDS sequence (opt5) from hemagglutinin__InfluenzaA__ACC61975
augaaggugaaacugcucguccugcuuugcaccuucacagccagcuacgcugacacgaucuguauuggcuaucacgccaacaauuccaccgauacaguugacaccgugcuggagaagaacgugacagucacccauucugugaaucuccuggaagauagccacaacgggaaacuuugccugcucaagggaaucgcgccccugcagcugggcaauuguuccguugcuggguggauucucggaaacccugagugcgaacugcuuaucucuaaagagagcugguccuacauuguggaagucccgaaucccgagaacggcacauguuauccuggguacuuugccgacuaugaggaacugagagagcaacucucuagcaucuccagcuucgaacgguuugagaucuuccccaaggagucuuccuggccuaaucauaccgugacgggaguuagcgccucuugcucccacaacggcaagagcucuuuuuaccgcaaucugcuuuggcugaccggcaaaaacgggcucuaucccaaucuguccaagagcuacgcuaacaauaaagaaaaggaggugcugguccucuggggagugcaucacccuccgaacauuggcgaucagagagcccuguaccacacagaaaacgcuuauguguccgucguuucuagccauuacucccggcgcuucacccccgagaucgccaaaagaccuaaggugcgggaccaggaagggcgcauuaauuauuacuggacacuucuggagcccggagauaccaucauuuuugaggcgaacggcaaucucaucgccccuagauucgcuuuugcccugagccgggggcuuggaucuggcauuaucacguccaacgcucccauggacgaaugugaugccaagugccagacaccgcaaggcgcgaucaauagcucucugccuuuccagaacgugcaccccgucaccauuggggaguguccuaaauaugugcgcagcgccaagcucagaaugguuacaggacugcggaauauccccuccauucagucucgcggccuguuuggggcuaucgccggauucauugaaggcggguggaccggaaugguggacggcugguacggcuaucaucaccagaacgagcaagggagcggauacgcugccgaucagaaauccacccagaaugccaucaacggcaucacaaauaaggucaacagcgugauugaaaagaugaauacgcaguuuaccgcuguugggaaagaguucaacaaacucgagagacggauggaaaaucugaacaagaagguggacgauggauuccuugacaucuggacauacaacgcggagcugcucguccugcuugaaaaugagcgcacccuggacuuucacgauucuaacgugaaaaaucucuaugaaaaggucaaaucccaacugaagaacaaugccaaagagauuggcaacgggugcuucgaguuuuaccauaaguguaauaacgaaugcauggagagcgugaagaauggcacauaugacuaccccaaauauucugaagaguccaagcugaacagagagaaaaucgauggaguuaagcucgaaagcaugggcguguaccagauucuggcuaucuauuccaccgucgccucuagccuugugcugcucguuucccugggggccaucucuuucuggaugugcagcaauggaucccugcagugucggauuugcaucuga

SEQ ID NO: 194358 - RNA, 1698 nt, Artificial Sequence; identical to SEQ ID NO: 193982
  derived and/or modified CDS sequence (opt5) from hemagglutinin__InfluenzaA__ACC61986

SEQ ID NO: 194359 - RNA, 1698 nt, Artificial Sequence
  derived and/or modified CDS sequence (opt5) from hemagglutinin__InfluenzaA__ACD37430
augaaggccaaacugcucgugcugcuuugcaccuucacagcuacguacgccgacaccaucuguauuggcuaucacgcgaacaauagcacagauaccgucgacacaguucuggagaagaacgugaccgugacacauuccgucaaucuccuggaagauucucacaacgggaaacuuugccugcucaagggaaucgcuccccugcagcugggcaauuguagcguggccggguggauucucggaaacccugagugcgaacugcuuaucuccaaagagucuuggagcuacauuguugaaaccccgaaucccgagaacggcacguguuauccuggguacuuugccgacuaugaggaacugagagagcaacucuccucugugagcuccuucgaacgguuugagaucuuccccaaggagagcucuuggccuacccauacagucaccggaguguccgcuagcugcucucacaauggcaaguccagcuuuuaccgcaaccugcuuuggcugacaggcaaaaaugggcucuaucccaaccugucuaaguccuacguuaauaacaaagaaaaggaggugcugguccucuggggagugcaucacccuccgaauaucggcgaucagagagcccuguaccacaccgaaaacgcuuaugugagcgucguuuccucucauuacagccggcgcuucacgcccgagauugccaaaagaccuaaggugcgggaccaggaagggcgcaucaacuauuacuggacacuucuggagcccggagauaccauuaucuuugaggcgaauggcaaccucauugccccuugguaugcuuucgcccuguccagaggguuuggaagcggcaucauuacaucuaaugcucccauggacgaaugugaugccaagugccagaccccgcaaggcgcgaucaacuccagccuuccuuuccagaaugugcaccccgucaccaucggggaguguccuaaauacgugcggucugccaagcugcgcaugguuacaggacucagaaacauucccagcauccagucccggggccuguuuggggcuauugccggauucaucgaaggcggguggacgggaaugguggacggcugguauggcuaccaucaccagaaugagcaagggucuggauacgcugccgaucagaaaagcacccagaacgccauuaauggcaucacaaacaaggucaauuccgugaucgaaaagaugaacacccaguuuacagcuguugggaaagaguucaauaaacuggagcgcagaauggaaaaccucaauaagaagguggacgauggauuccuggacauuuggaccuauaacgcggagcuucugguccuccuggaaaacgagcggacgcuugacuuucacgauagcaaugugaaaaaccuguacgaaaaggucaaaucucaacucaagaauaacgccaaagagaucggcaaugggugcuucgaguuuuaucauaaguguaacaaugaaugcauggaguccgugaagaacggcacauacgacuaucccaaauacagcgaagagucuaagcugaaucgcgagaaaauugauggaguuaagcuggaauccaugggcguguaucagauccucgcuauuuacagcaccgucgccuccucucuggugcuucugguuagccucggggccaucuccuucuggaugugcucuaacggaagccugcaguguagaaucugcauuuga

SEQ ID NO: 194360 - RNA, 1698 nt, Artificial Sequence
  derived and/or modified CDS sequence (opt5) from hemagglutinin__InfluenzaA__ACD37507
augaaggccaaacugcucgugcugcuuugcaccuucgcugccacauacgcggacacgaucuguauuggcuaucacgcuaacaauagcaccgauacagucgacaccguucuggagaagaacgugacagugacccauuccgucaaucuccuggaaaacucucacaaugggaaacuuugccugcucaagggaaucgcuccccugcagcugggcaacuguagcguggccggguggauucucggaaauccugagugcgaacugcuuaucuccaaagagucuuggagcuacauuguugaaaagccgaaccccgagaauggcacauguuauccugggcauuuugccgauuacgaggaacugagagagcaacucuccucugugagcuccuucgaacgguuugagaucuuccccaaggagagcucuuggccuaaccacaccgucacgggaguguccgccagcugcucucauaauggcgaauccagcuuuuaucgcaaccugcuuuggcugaccggcaaaaaugggcucuaccccaaccugucuaaguccuaugcuaauaacaaagagaaggaaguucuggugcucuggggaguccaccacccuccgaacaucggcaaucagaaagcccuguaccauacagagaacgcguacgugagcguggucuccucucacuauagcagaaaguucacccccgaaauugccaagcggccuaaaguucgcgaccaggaggggagaaucaauuacuauuggacacuucuggagcccggagauaccauuaucuuugaagcuaacggcaaucucauugccccucgguacgcuuucgcccugucccgcggguuuggaagcggcaucauuaacucuaaugcgcccauggacaagugugaugccaaaugccagacgccgcaaggcgcuaucaacuccagccuuccuuuccagaaugugcaucccgugacaaucggggaguguccuaaguaugucagaucugccaaacugcggauggugaccggacuccgcaacauucccagcauccaguccagaggccuguuuggggcuauugccggauucaucgaaggcggguggacaggaaugguugacggcugguacggcuaucaccaccagaaugagcaagggucuggauacgccgcugaucagaaguccacccagaacgcgauuaauggcaucaccaacaaagugaauagcgucaucgaaaagaugaacacacaguuuacggccguggggaaggaguucaacaaacuggagcggcgcauggaaaaucucaacaagaaaguugacgauggauucauugacaucuggaccuacaaugcugagcugcuugugcugcucgaaaacgagagaacacuggauuuucaugacagcaaugucaagaaccuuuaugaaaaagugaagucucaacugaagaauaacgccaaagagauuggcaaugggugcuucgaguuuuaccacaaguguaacgacgaaugcauggaguccgucaaaaauggcaccuaugauuaccccaaguauagcgaagagucuaaacucaaccgggagaagaucgacggagugaagcuggaauccaugggcguuuaccagauucuggccaucuauagcacaguggcuuccucucucguccugcuugugagccugggggccaucuccuucuggaugugcucuaauggaagccuccagugucgcauuugcaucuga

SEQ ID NO: 194361 - RNA, 1698 nt, Artificial Sequence; identical to SEQ ID NO: 194127
  derived and/or modified CDS sequence (opt5) from hemagglutinin__InfluenzaA__ACD56113

SEQ ID NO: 194362 - RNA, 1698 nt, Artificial Sequence; identical to SEQ ID NO: 193986
  derived and/or modified CDS sequence (opt5) from hemagglutinin__InfluenzaA__ACD56124

SEQ ID NO: 194363 - RNA, 1701 nt, Artificial Sequence; identical to SEQ ID NO: 194059
  derived and/or modified CDS sequence (opt5) from hemagglutinin__InfluenzaA__ACD56258

SEQ ID NO: 194364 - RNA, 1701 nt, Artificial Sequence; identical to SEQ ID NO: 193801
  derived and/or modified CDS sequence (opt5) from hemagglutinin__InfluenzaA__ACD56269

SEQ ID NO: 194365 - RNA, 1698 nt, Artificial Sequence
  derived and/or modified CDS sequence (opt5) from hemagglutinin__InfluenzaA__ACD56280
augaaggugaaacugcucauccugcuuugcaccuucacagccacguacgcugacaccauuuguaucggcuaucacgccaacaauagcacagauaccgucgacacaguucuggagaagaacgugaccgugacacauuccgucaaucuccuggaagauucucacaacgggaaacuuugccugcucaagggaauugcgccccugcagcugggcaauuguagcguggcuggguggauccucggaaacccugagugcgaacugcuuauuuccaaagagucuuggagcuacaucguugaaaccccgaaucccggcaacgggacguguuauccuggauacuuugccgacuaugaggagcugagagaacaacucuccucugugagcuccuucgagcgguuugaaaucuuccccaaggagagcucuuggccuaaucauaccgucacaggcguguccgccagcugcucucacaacggcaaguccagcuuuuaccgcaaucugcuuuggcugaccgggaaaaacggacucuaucccaaucugucuaaguccuacgcuaacaauaaagagaaggaaguucuggugcucuggggcguccaucacccuccgaacauuggggaucagagagcccuguaccacacagagaacgcuuaugugagcguggucuccucucauuacagccggcgcuucacccccgaaaucgccaaaagaccuaagguucgggaccaggagggacgcauuaauuauuacuggacgcuucuggaacccggcgauacaaucauuuuugaggcgaacgggaaucucaucgccccuagauucgcuuuugcccugucccggggauucggcagcggcauuaucaccucuaacgcucccauggacgagugugaagccaagugccagacaccgcaaggggcgaucaauuccagccuuccuuuucagaacgugcaccccgugaccauuggagaguguccuaaauauguccgcucuaccaagcugagaauggugacaggccuccggaauauccccagcauucagucccgcgggcuguucggagccaucgcuggcuuuauugaagggggauggacgggcaugguugauggcugguacggguaucaucaccagaacgagcaaggaucuggcuacgccgcugaccagaaaagcacccagaaugccaucaacgggaucacaaauaaggugaacuccgucauugaaaagaugaauacccaguucacagccgugggaaaagaguucaacaaacuggagagacggauggaaaaucucaacaagaagguugaugacggcuuucuggauaucuggaccuacaacgcugagcuucuggugcuccuggaaaaugagcgcacgcuugacuuccacgacagcaacgucaaaaaucuguaugaaaaggugaaaucucaacucaagaacaaugcgaaagagauugggaacggcugcuuugaguucuaccauaaguguaaugaugaaugcauggaguccgucaagaacggaacauaugacuaccccaaauauagcgaagagucuaagcugaauagagagaaaaucgauggcgugaagcuggaauccauggggguuuaccagauucucgccaucuauagcaccguggcuuccucucugguccuucuggugagccucggagccaucuccuuuuggaugugcucuaacggcagccugcagugucggauuugcaucuga

SEQ ID NO: 194366 - RNA, 1689 nt, Artificial Sequence
  derived and/or modified CDS sequence (opt5) from hemagglutinin__InfluenzaA__ACD56324
auggccaucauuuaccugauccuccuguucaccgcugugagaggcgaccagauuugcaucggguaucacgccaacaauagcacagagaaggucgauacgauucuugaacggaacguuaccgugacacaugcgaaaaauauccuggagaagacccacaacggacgccucuguaaacugaauggcauucccccucuugaacugggggacugcuccauugcuggauggcuccugggcaacccggagugugauagacugcuccgggugcccgaauggucuuacaucauggagaaggagaauccucgcaacgggcugugcuaucccggaucuuuuaaugacuacgaagaacuuaaacaucugcucuccucugucaagcacuucgaaaaggugagaauccugccuaaagaucgguggacacaacauaccacaaccggcagcucccgcgccugugccguuucuggcaaccccagcuuuuucagaaauaugguguggcuuacgaagaaagaguccaacuauccugucgcuaaggggagcuacaauaacaccucuggagagcagaugcugaucauuuggggcgugcaccacccgaucgacgaaacagagcagcggacccucuaucagaauguugggacauacguguccgucggaaccagcacgcugaacaaacgcucuacacccgauauugccaccagaccuaaggugaacggccuggggucccggauggaauuuagcuggacacuccuggacaugugggauaccaucaauuucgagucuaccggaaaccuuaucgcucccgaauacggcuuuaagauuuccaaacgcggcagcuccgggaucaugaagacagagagaacgcuggagaauugcgaaaccaaaugucaaacaccucucggagccauuaacaccacacugcccuuccauaaugugcacccgcuuaccaucggcgagugcccuaaguaugucaaaucugaaaagcugguucucgcgacggggcugcggaacgugccccagauugagccucgcggacuguuuggcgccaucgcuggguucaucgaaggaggcuggcagggcaugguggacgggugguacggauaucaucacagcaaugaucagggcuccggguacgccgcugacaaagagagcacacaaaaggccuuugauggaauuaccaacaaggucaauucugugaucgagaaaaugaacacccaguucgaagcgguuggcaaggaguuuuccaaucucgaaagacggcuggagaaccuuaauaaaaagauggaagacggguuccuggacguguggacauauaacgccgagcuccugguccuuauggagaaugaaagaacccuggauuuccacgacagcaacgugaaaaaccucuacgauaagguucgcaugcagcugcgggacaaugugaaggagcugggcaacggauguuuugaguucuaucauaaaugcgaugacgaguguaugaauagcgucaagaacggcacauacgauuaccccaaauaugaggaagagagcaagcucaauagaaacgaaauuaaaggggugaagcuguccucuaugggagucuaccagauccuugcuauuuaugccacgguggcuggcagccugucccucgccaucaugauggccgggaucagcuuuuggaugugcucuaauggaucccugcaaugccgcauuuguaucuga

SEQ ID NO: 194367 - RNA, 1689 nt, Artificial Sequence
  derived and/or modified CDS sequence (opt5) from hemagglutinin__InfluenzaA__ACD85187
auggccaucauuuaccugauccuccuguucaccgcugugagaggcgaccagauuugcaucggguaucacgccaacaauagcacagagaaggucgauacgauucuugaacggaacguuaccgugacacaugcgaaagacauccuggagaagacccacaauggaaaacucuguaagcugaacggcauucccccucuugaacugggggauugcuccaucgcuggauggcuccugggcaauccggagugugaccgccugcucagagugcccgaauggucuuacaucauggagaaagagaacccucgguauagccugugcuaccccggguccuuuaaugauuaugaagaacuuaagcaucugcucucuagcgucaagcacuucgaaaaagugaagauucugccuaaagaccgcuggacacaacauaccacaaccggaggcuccaaggccugugccguuucuggcaaacccagcuuuuucagaaacaugguguggcuuacgaagaaggggccuaauuacccggucgcuaaaggauccuauaacaauaccagcggcgagcagaugcugaucauuuggggagugcaccaccccaaggaugaggccgaacagcgggcucucuaccaggagguugggacauacgugucugccuccaccagcacacugaacaaacgcucuaccccugaaaucgcggccagacccgaggucaauggccuggggucccggauggaauuuagcuggacgcuccuggacgugugggauacaauuaacuucgagucuaccggaaaucuuguggcuccugaguauggcuuuaagaucuccaaacgcggcagcuccgggaucaugaagacagaaggaacccugggcaacugcgagaccaaaugucaaacaccccucggggccauuaacacgacccugccguuccauaauguccacccucuuacaaucggagaaugccccaaguacguuaagucugagaaacuggugcucgcuaccggccugagaaacgugccucagauugaaagccgggggcuguuuggagccaucgcgggcuucauugagggcggguggcagggaauggucgacggcugguauggguaccaucacuccaaugaucagggaagcggcuaugccgcugacaaggagucuacacaaaaagccuuugaugggaucaccaacaagguuaauuccgugaucgagaaaaugaacacgcaguucgaggcugugggcaaggaauuuaauaaccucgagaagcgccuggaaaaucuuaacaaaaagauggaggacggauuccuggacgucuggacauacaaugccgagcuccuggugcuuauggaaaacgagagaacccuggauuuccacgacagcaauguuaaaaaccucuaugauaaggugcggaugcagcugcgcgacaaugucaaagaacugggcaacggguguuuugaguucuaccauaagugcgaugacgaguguaugaacucugugaagaauggaaccuacgauuaucccaaauacgaagaggaaagcaagcucaacagaaaugagauuaaaggcgucaagcuguccucuauggggguguaucagauccuugccauuuacgcuacaguugcgggaagccugucccucgccaucaugauggcuggcauuagcuuuuggaugugcucuaacgggucccugcaaugccggaucuguaucuga

SEQ ID NO: 194368 - RNA, 1689 nt, Artificial Sequence
  derived and/or modified CDS sequence (opt5) from hemagglutinin__InfluenzaA__ACD85198
auggccaucauuuaccugauccuccuguucaccgcugugagaggcgaccagauuugcaucggguaucacgccaacaauagcacagagaaggucgauacgauucuugaacggaacguuaccgugacacaugcgaaagacauccuggagaagacccacaauggaaaacucuguaagcugaacggcauucccccucuugaacugggggauugcuccaucgcuggauggcuccugggcaauccggagugugaccgccugcucagagugcccgaauggucuuacaucauggagaaagagaacccucgguauagccugugcuaccccggguccuuuaaugauuaugaggaacuuaagcaucugcucucuagcgucaagcacuucgaaaaagugaagauucugccuaaagacggauggacacaacauaccacaaccggcggcuccaaggccugugccguuucugggaaacccagcuuuuuccgcaacaugguguggcuuacgaagaagggaccuaauuacccggucgcuaaaagauccuauaacaauaccagcggcgagcagaugcugaucauuuggggagugcaccaccccacagaugaggccgaacagcgggcucucuaccaggagguugggaccuacgugucugccuccacaagcacccugaacaagcgcucuacgccugaaaucgcggccagacccgaggucaauggccugcggucccgcauggaauuuagcuggacacuccuggacgugugggauaccauuaacuucgagucuacagggaaucuuguggcuccugaguauggauuuaaaaucuccaagagaggcagcuccggcaucaugaaaaccgaagggacccugggaaacugcgagacaaagugucaaacgccccucggcgccauuaacaccacacugccguuccauaauguccacccucuuaccaucggggaaugccccaaauacguuaagucugagaagcuggugcucgcuacaggacugcggaacgugccucagauugaaagccgcggccuguuuggggccaucgcgggauucauugagggcggcuggcaggggauggucgacggaugguauggcuaccaucacuccaaugaucaggggagcggauaugccgcugacaaagagucuacccaaaaggccuuugauagaaucacgaacaaaguuaauuccgugaucgaaaagaugaacacacaguucgaggcugugggcaaagaauuuagcaaucucgagaagcggcuggaaaaccuuaauaagaaaauggaggacggguuccuggacgucuggaccuacaacgccgagcuccuggugcuuauggaaaaugagcgcacccugggcuuccacgauucuaacguuaagaaucucuaugacaaagugagaaugcagcugcgggauaacgucaaggaacugggaaauggcuguuuugaguucuaccauaaaugcgacgaugaguguaugaacagcgugaagaacgggacauacgacuaucccaaguacgaagaggaauccaaacucaagagaaaugagauuaaaggagucaagcugucuagcaugggcguguaucagauccuugccauuuacgcuaccguugcggggucccugagccucgccaucaugauggcuggaauuucuuuuuggaugugcuccaacggcagccugcaaugccgcaucuguaucuga

SEQ ID NO: 194369 - RNA, 1689 nt, Artificial Sequence
  derived and/or modified CDS sequence (opt5) from hemagglutinin__InfluenzaA__ACD85209
auggccaucauuuaccugauccuccuguucaccgcugugagaggcgaccagauuugcaucggguaucacgccaacaauagcacagagaaggucgauacgauucuugaacggaacguuaccgugacacaugcgaaagacauccuggagaagacccacaauggaaaacucuguaagcugaacggcauucccccucuugaacugggggauugcuccaucgcuggauggcuccugggcaauccggagugugaccgccugcucucugugcccgaauggagcuacaucauggagaaagagaacccuagagaugggcugugcuaucccggauccuuuaaugacuacgaggaacuuaagcaucugcucucuagcgucaagcacuucgaaaaagugaagauucugccuaaagaucgguggacacaacauaccacaaccggcggcucccgcgccugugccguuucugggaaccccagcuuuuucagaaauaugguguggcuuacgcagaagggauccaacuauccugucgcuaaaggcagcuacaauaacaccucuggggagcagaugcugaucauuuggggagugcaccacccgaaugacgagacagaacagcggacccucuaucaaaacguuggcacauacguguccgucgggaccagcacgcugaauaagcgcucuacacccgauaucgccaccagaccuaaggugaacggacagggcggccggauggaguuuuccuggacacugcucgacaugugggauaccauuaacuucgaaagcaccgggaaucugaucgcucccgaguacggauuuaaaaucucuaagcgcggcuccagcgggauuaugaaaacagaaggaacgcuugagaacugcgagaccaagugucagacaccucugggcgccaucaauaccacacuccccuuccauaacgugcacccgcugaccauuggggaaugcccuaaauaugucaaguccgagaaacuuguucuggcgacgggacucagaaaugugccccagaucgaaucucggggccuguuuggcgccauugcuggguucaucgagggaggcuggcaagggaugguggacggaugguacggcuaucaucacagcaacgaucagggguccggcuacgccgcugacaaggaaagcacacagaaggccuuugacggaaucaccaauaaagucaacucugugauugagaagaugaauacccaguucgaggcgguuggcaaagaauuuuccaaccuggagcgcagacucgaaaaucugaacaagaaaauggaggauggguuccuugacguguggacauauaaugccgaacugcucguccugauggagaacgagcggacccuugauuuccacgacagcaaugugaagaaccuguacgauaagguucgcaugcaacucagagacaacgugaaagaacugggaaauggcuguuuugaguucuaucauaagugcgaugacgaauguaugaacucugucaaaaaugggacauacgauuacccuaaguaugaggaggaaagcaaacugaaccggaaugagaucaagggagugaagcucuccucuaugggcgucuaccagauucuggcuaucuaugccacgguggcugggagccuuucccuggccauuaugauggccggcaucagcuuuuggaugugcucuaacggaucccuccagugcagaaucuguauuuga

SEQ ID NO: 194370 - RNA, 1689 nt, Artificial Sequence
  derived and/or modified CDS sequence (opt5) from hemagglutinin__InfluenzaA__ACD85220
auggccaucauuuaccugauccuccuguucaccgcugugagaggcgaccagauuugcaucggguaucacgccaacaauagcacagagaaggucgauacgauucuugaacggaacguuaccgugacacaugcgaaagacauccuggagaagacccacaauggaaaacucuguaagcugaacggcauucccccucuugaacugggggauugcuccaucgcuggauggcuccugggcaauccggagugugaccgccugcucagagugcccgaauggucuuacaucauggagaaagagaacccuaaguauagccugugcuaccccggguccuuuaaugauuaugaagaacuuaagcaucugcucucuagcgucaaacacuucgaaaaggugaaaauucugccuaaggaccgguggacacaacauaccacaaccggaggcuccaaagccugugccguuucuggcgagcccagcuuuuuccgcaacaugguguggcuuacgaagaaggggccuaauuacccggucgcuaaaggauccuauaacaauaccagcggcgagcagaugcugaucauuuggggagugcaccaccccaaggaugaagccgagcagagagcucucuaccagaacguugggacauacgugucugccuccaccagcacacugaauaaacggucuaccccugaaaucgcggcccgccccgaggucaacggccugggguccagaauggaauuuagcuggacgcuccuggacgugugggauacaauuaauuucgagucuaccggaaaccuuguggcuccugaguauggcuuuaagaucuccaaacggggcagcuccgggaucaugaagacagaaggaacccugggcaacugcgagaccaaaugucaaacaccccucggggccauuaauacgacccugccguuccauaacguccacccucuuacaaucggagaaugccccaaguacguuaagucugagaaacuggugcucgcuaccggccugcgcaaugugccucagauugaaagcagagggcuguuuggagccaucgcgggcuucauugagggcggguggcagggaauggucgacggcugguauggguaccaucacuccaacgaucagggaagcggcuaugccgcugacaaggagucuacacaaaaagccuuugaugggaucaccaauaaggugaacuccguuaucgagaaaaugaauacgcaguucgaggcugugggcaaggaauuuaacaaucucgagaagcggcuggaaaaccuuaauaaaaagauggaggacggauuccuggacgucuggacauacaacgccgagcuccuggugcuuauggaaaaugagcgcacccuggauuuccacgacagcaacguuaaaaaucucuaugauaaggugagaaugcagcugcgggacaacgucaaagaacugggcaacggguguuuugaguucuaccauaagugcgaugacgaguguaugaacucugugaagaauggaaccuacgauuaucccaaauacgaaaaggagagcaaacucaaucgcaacgaaauuaagggcgucaaacuguccucuauggggguguaucagauccuugccauuuacgcuacaguugcgggaagccugucccucgccaucaugauggcuggcauuagcuuuuggaugugcucuaaugggucccugcaaugcagaaucuguaucuga

SEQ ID NO: 194371 - RNA, 1689 nt, Artificial Sequence
  derived and/or modified CDS sequence (opt5) from hemagglutinin__InfluenzaA__ACD85242
auggccaucauuuaccugauccuccuguucgcuaccgugagaggcgaccagauuugcaucggguaucacgccaacaauagcacagagaaggucgauacgauucuugaacggaacguuaccgugacacaugcgaaagacauccuggagaagacccacaauggaaaacucuguaagcugaacggcauucccccucuugaacugggggauugcuccaucgcuggauggcuccugggcaauccggagugugaccgccugcucagagugcccgaauggucuuacaucauggagaaagagaacccucgguauagccugugcuaccccgggucccuuaaugauuaugaggaacugaagcaucuccugucuagcgucaagcacuuugaaaaagugcgcauucuuccuaaggacagauggacacaacauaccacaaccggaggcuccaaagccugugccguuucuggcaagcccagcuucuuucggaacaugguguggcugacgaaaaaggggccuaauuacccggucgcuaagggauccuauaacaauaccagcggcgagcagaugcucaucauuuggggagugcaccaccccaaagaugaggccgaacagcgcgcucuguaccaggagguugggacauacgugucugccuccaccagcacacugaacaagagaucuaucccugaaauugcggcccggcccgaggucaauggccucgggucccgcauggaguucagcuggacccugcuugacgugugggauacgaucaacuuugaaucuacaggaaaucugguggcuccugaguauggcuucaaaaucuccaagagaggcagcuccgggauuaugaaaaccgaaggaacacucggcaacugcgagaccaagugucaaacaccccugggggccaucaacaccacgcuuccguuucauaauguccacccucugaccauuggagaaugccccaaauacguuaagucugagaagcucgugcuggcuacaggccugcggaacgugccucagaucgaaagccgcgggcuuuucggagccauugcgggcuuuaucgagggcggguggcagggaauggucgacggcugguauggguaccaucacuccaaugaucagggaagcggcuaugccgcugacaaagagucuacccaaaaggccuucgaugggaucacaaacaaaguuaauuccaugauugaaaagaugaacacccaguuugaggcugugggcaaagaguucaauaaccuggaaaagagacuugaaaaucuggacaagaaaauggaggacggauuucucgauguguggacguacaacgccgagcugcuuguccugauggaaaaugagcggacacucgacuuccacgauagcaacgugaagaaucuguaugaaaaaguucgcaugcagcugagagacaacgugaaggagcucggcaauggguguuucgaguuuuaccauaaaugcgauaacgaauguaugaacucugucaagaauggaaccuacgacuaucccaaguacgaggaagagagcaaacugaagcggaacgaaaucaaaggcgugaagcucuccucuaugggggucuaucagauucuggccaucuacgcuaccguggcgggaagccucucccuggccauuaugguugcuggcaucagcuucuggaugugcucuaaugggucccugcaaugcagaaucuguauuuga

SEQ ID NO: 194372 - RNA, 1689 nt, Artificial Sequence
  derived and/or modified CDS sequence (opt5) from hemagglutinin__InfluenzaA__ACD85253
auggccaucauuuaccugauccuccuguucgcuaccgugagaggcgaccagauuugcaucggguaucacgccaacaauagcacagagaaggucgauacgauucuugaacggaacguuaccgugacacaugcgaaggacauccuggagaagacccacaauggaaaacucuguaagcugaacggcauucccccucuugaacugggggauugcuccaucgcuggauggcuccugggcaauccggagugugaccgccugcucagagugcccgaauggucuuacaucauggagaaagagaacccucgguauaaucugugcuaccccgggagccuuaacgaauaugaggaacugaagcaucuccuguccucugucaagcacuuugagaaagugcgcauucuuccuaaggauagauggacacaacauaccacaaccggaggcagcaaagccugugccguuuccggcgagcccucuuucuuucggaauaugguguggcugacgaagaaagggccuaacuacccggucgcuaagggaagcuauaauaacaccuccggcgaacagaugcucaucauuuggggcgugcaccaccccaaugacgaggccgaacagcgcgcucuguaccagaagguuggaacauacgugagcgccucuaccuccacacugaacaaaagaagcaucccugagauugcggcccggcccaaggucaauggccucgggucucgcauggaguucuuuuggacccugcuugaugugugggacacgaucaacuucgaauccacaggaaaccugguggucccugaguauggcuuuaaaaucagcaagagagggucuuccgggauuaugaaaaccgaaggaacacucggcaauugcgagaccaagugucaaacaccccugggggcuaucaacaccacgcuuccguuccauaauguucacccucugaccauuggagaaugccccaaauacgucaagagcgagaagcucgugcuggccacaggccugcggaacgugccucagaucgaaucccgcgggcucuuuggagcuauugccggcuucaucgagggcggguggcagggaaugguggauggcugguauggguaccaucacucuaaugaccagggaagcggcuaugcggccgauaaagaguccacccaaaaggcuuuugacgggaucacaaacaaaguuaauagcgugauugaaaagaugaacacccaguucgagacggucggcaaagaauuuaauaaccuggagaagagacuugaaaaucugaacaagaaaauggaggauggauuccucgacguguggacauacaaugccgagcugcuuguucugauggaaaacgagcggacccucgacuuccacgauucuaaugugaagaaccuguaugaaaaaguccgcaugcagcugagagacaacgugaaggagcucggcaauggguguuuugaguucuaccauaaaugcgaugacgaauguaugaacuccgucaagaauggaaccuacgauuaucccaaguacgaggaagagagcaaacugaagcggaacgaaaucaaaggcgugaaacuuucuagcauggggguuuaucagauucuggcuaucuacgccacaguggccggaucccucucucuggcuauuauggucgcgggcaucagcuuuuggaugugcuccaaugggagccugcaaugcagaaucuguauuuga

SEQ ID NO: 194373 - RNA, 1701 nt, Artificial Sequence
  derived and/or modified CDS sequence (opt5) from hemagglutinin__InfluenzaA__ACD85440
augaagaccaucauugcccugagcuacauccucugccugguguucgcucagaaacuucccggcaacgacaauuccacagccacgcugugucucgggcaccaugcggucccuaacggaaccauuguuaagacaaucaccaaugaucaaauugaggugacaaacgcuaccgaacuggugcagucuagcuccacaggcgagaucugcgacucuccgcaccagauccuugauggggaaaauuguacccugauugacgcccuccugggagauccccagugcgacggcuuucaaaacaaaaagugggaucuguucgucgagagaagcaaagccuauuccaauuguuacccuuaugacgugcccgauuacgcuucucuccggagccugguugccuccagcgggacgcuugaauuuaacaaugagucuuucaacuggaccggagugacacagaauggcaccuccagcgcuugcauccgcagaucuaacaauuccuuuuucagccggcugaacuggcucacacaucugaaguuuaaguauccugcccuuaaugucaccaugcccaacaacgagaaauucgacaagcuguacauuuggggcgugcaccauccugggacggauaaugaccagaucuuucucuaugcgcaggccucuggacgcauuacaguuuccaccaaaagaagccaacagacagugaucccgaacauuggcucccggccccgcgucagaaauaucccuucucggaucagcauuuacuggaccaucgugaagcccggggauauucugcugaucaacuccaccggaaaucucauugcuccucgcggcuacuucaaaaucagaagcgggaagucuuccaucaugcggagcgacgcccccauuggaaaguguaacucugaaugcaucacaccgaauggcagcauuccuaacgacaaacccuuucagaaugugaaccgcaucacguauggcgcuuguccuagauacgucaagcagaauacccugaaacuugccacagggaugcggaacguucccgagaagcaaacccgcggaauuuucggcgcgaucgccggguuuaucgaaaauggaugggagggcaugguggaugggugguauggauucagacaccagaacuccgagggcauuggccaggcugccgaccugaaaucuacacaagcugccaucgaucagauuaaugggaagcucaaccggcugaucggaaaaaccaacgaaaaguuccaccagauugagaaggaauuuagcgagguggaaggcagaauccaggaccuugagaaauacgucgaggauacgaagauugaccugugguccuauaaugccgaacuccugguggcucuggagaaccaacauacaaucgaucucaccgacagcgaaaugaauaaacuguucgagaagaccaaaaagcagcuucgcgaaaacgcggaggaucuggggaauggaugcuuuaagaucuaccacaaaugugacaacgccugcauuggcucuauccggaaugggacauaugaucaugacguuuacagagacgaggcucucaacaaucgcuuccagauuaagggcguggaacugaaauccggauacaaggauuggauccuuuggauuagcuuugccaucucuugcuuccugcucugugucgcccugcugggcuuuaucaugugggcuugccagaaagggaacauucgguguaauaucugcauuuga

SEQ ID NO: 194374 - RNA, 1701 nt, Artificial Sequence; identical to SEQ ID NO: 194373
  derived and/or modified CDS sequence (opt5) from hemagglutinin__InfluenzaA__ACD85451

SEQ ID NO: 194375 - RNA, 1701 nt, Artificial Sequence; identical to SEQ ID NO: 194373
  derived and/or modified CDS sequence (opt5) from hemagglutinin__InfluenzaA__ACD85462

SEQ ID NO: 194376 - RNA, 1701 nt, Artificial Sequence; identical to SEQ ID NO: 194000
  derived and/or modified CDS sequence (opt5) from hemagglutinin__InfluenzaA__ACD85473

SEQ ID NO: 194377 - RNA, 1701 nt, Artificial Sequence
  derived and/or modified CDS sequence (opt5) from hemagglutinin__InfluenzaA__ACD85484
augaagaccaucauugcccugagcuacauccucugccugguguucgcucagaaacuucccggcaacgacaauuccacagccacgcugugucucgggcaccaugcggucccuaacggaaccauuguuaagacaaucaccaaugaucaaauugaggugacaaacgcuaccgaacuggugcagucuagcuccacaggcgagaucugcgacucuccgcaccagauccuugauggggaaaauuguacccugauugacgcccuccugggagauccccagugcgacggcuuucaaaacaaaaagugggaucuguucgucgagagaagcaaagccuauuccaauuguuacccuuaugacgugcccgauuacgcuucucuccggagccugguugccuccagcgggacgcuugaauuuaacaaugagucuuucaacuggaccggagugacacagaauggcaccuccagcgcuugcauccgcagaucuaacaauuccuuuuucagccggcugaacuggcucacacaucugaaguuuaaguauccugcccuuaaugucaccaugcccaacaacgaggaguucgacaaacuguacauuuggggcgugcaccauccugggacggauaaugaccagaucuuucucuaugcgcaggccucuggacgcauuacaguuuccaccaagagaagccaacagacagugaucccgaacauuggcucccggccccgcgucagaaauaucccuucucggaucagcauuuacuggaccaucgugaaacccggggauauucugcugaucaacuccaccggaaaucucauugcuccucgcggcuacuucaagaucagaagcgggaaaucuuccaucaugcggagcgacgcccccauuggaaaguguaacucugaaugcaucacaccgaauggcagcauuccuaacgacaagcccuuucagaaugugaaccgcaucacguauggcgcuuguccuagauacgucaaacagaauacccugaaacuugccacagggaugcggaacguucccgaaaaacaaacccgcggaauuuucggcgcgaucgccggguuuaucgagaauggaugggagggcaugguggaugggugguauggauucagacaccagaacuccgaaggcauuggccaggcugccgaccugaagucuacacaagcugccaucgaucagauuaaugggaaacucaaccggcugaucggaaagaccaacgagaaauuccaccagauugaaaaggaguuuagcgaaguggagggcagaauccaggaccuugagaaguacgucgaagauacgaaaauugaccugugguccuauaaugccgagcuccugguggcucuggaaaaccaacauacaaucgaucucaccgacagcgagaugaauaagcuguucgaaaagaccaagaaacagcuucgcgagaacgcggaggauauggggaauggaugcuuuaagaucuaccacaagugugacaacgccugcauuggcucuauccggaaugggacauaugaucaugacguuuacagagacgaagcucugaacaaucgcuuccagauuaaaggcguggagcucaaguccggauacaaagauuggauccuguggauuagcuuugccaucucuugcuuccuucugugugucgcccuccugggcuuuaucaugugggcuugccagaaggggaacauucgguguaauaucugcauuuga

SEQ ID NO: 194378 - RNA, 1701 nt, Artificial Sequence; identical to SEQ ID NO: 194000
  derived and/or modified CDS sequence (opt5) from hemagglutinin__InfluenzaA__ACD85495

SEQ ID NO: 194379 - RNA, 1701 nt, Artificial Sequence
  derived and/or modified CDS sequence (opt5) from hemagglutinin__InfluenzaA__ACD85528
augaagaccaucauugcccugagcuacauccucugccugguguucgcucagaaacuucccggcaacgacaauuccacagccacgcugugucucgggcaccaugcggucccuaacggaaccauuguuaagacaaucaccaaugaucaaauugaggugacaaacgcuaccgaacuggugcagucuagcuccacaggcgagaucugcgacucuccgcaccagauccuugauggggaaaauuguacccugauugacgcccuccugggagauccccagugcgacggcuuucaaaacaaaaagugggaucuguucgucgagagaagcaaagccuauuccaauuguuacccuuaugacgugcccgauuacguuucucuccggagccugguggcuuccagcgggacgcuugaauuuaacaaugagucuuucaacuggaccggagucacacagaauggcaccuccagcgccugcauccgcagaucuaacaaguccuuuuucagccggcugaauuggcucacacaucugaaguuuaaauauccugcucuuaacgugaccaugcccaauaacgagaacuucgacaagcuguacauuuggggcguucaccauccugggacggauaaugaccagaucuuucucuaugcccaggcgucuggacgcauuacaguguccaccaaaagaagccaacagacagucaucccgaacauuggcucccggccccgcgugagaaauaucccuucucggaucagcauuuacuggaccaucgugaagcccggggauauucugcugaucaacuccaccggaaaucucauugccccucgcggcuacuucaaaaucagaagcgggaagucuuccaucaugcggagcgacgcucccauuggaaaguguaacucugaaugcaucacaccgaauggcagcauuccuaacgacaaacccuuucagaaugucaaccgcaucacguauggcgccuguccuagauacguuaagcagaauacccugaaacuugcuacagggaugcggaacgugcccgagaagcaaacccgcggaauuuucggcgccaucgcgggguuuaucgaaaauggaugggagggcaugguggaugggugguauggauucagacaccagaacuccgagggcauuggccaggccgcugaccugaaaucuacacaagccgcuaucgaucagauuaaugggaagcucaaccggcugaucggaaaaaccaacgaaaaguuccaccagauugagaaggaauuuagcgaggucgaaggcagaauccaggaccuugagaaauacguggaggauacgaagauugaccugugguccuauaaugccgaacuccugguugcccuggagaaccaacauacaaucgaucucaccgacagcgaaaugaauaaacuguucgagaagaccaaaaagcagcuucgcgaaaacgcugaggaucuggggaauggaugcuuuaagaucuaccacaaaugugacaacgcgugcauuggcucuauccggaaugggacauaugaucaugacguguacagagacgaggcccucaacaaucgcuuccagauuaagggcgucgaacugaaauccggauacaaggauuggauccuuuggauuagcuuugcuaucucuugcuuccugcucuguguggcccugcugggcuuuaucaugugggccugccagaaagggaacauucgguguaauaucugcauuuga

SEQ ID NO: 194380 - RNA, 1701 nt, Artificial Sequence
  derived and/or modified CDS sequence (opt5) from hemagglutinin__InfluenzaA__ACD85539
augaagaccaucauugcccugagcuacauccucugccugguguucgcucagaaacuucccggcaacgacaauuccacagccacgcugugucucgggcaccaugcggucccuaacggaaccauuguuaagacaaucaccaaugaucaaauugaggugacaaacgcuaccgaacuggugcagucuagcuccacaggcgagaucugcgacucuccgcaccagauccuugauggggaaaauuguacccugauugacgcccuccugggagauccccagugcgacggcuuucaaaacaaaaagugggaucuguucgucgagagaagcaaagccuauuccaauuguuacccuuaugacgugcccgauuacgcuucucuccggagccugguugccuccagcgggacgcuugaauuuaacaaugagucuuucaacuggaccggagugacacagaauggcaccuccagcgcuugcauccgcagaacaaacaauuccuuuuucucucggcugaacuggcucacccaucugaaguuuaaguauccugcccuuaaugucacgaugcccaacaacgagaaauucgacaagcuguacauuuggggcgugcaccauccugggacagauaaugaccagaucuuucucuaugcgcaggccagcggacgcauuaccguuucuacaaaaagaucccaacagaccgugaucccgaacauuggcagccggccccgcgucagaaauaucccuucccggaucucuauuuacuggaccaucgugaagcccggggauauucugcugaucaacagcacaggaaaucucauugcuccucgcggcuacuucaaaaucagauccgggaaaagcucuaucaugcgguccgacgcccccauuggaaaguguaacagcgaaugcaucacgccgaauggcucuauuccuaacgacaaacccuuucagaaugugaaccgcaucaccuauggcgcuuguccuagauacgucaagcagaauacacugaaacuugccaccgggaugcggaacguucccgagaagcaaacacgcggaauuuucggcgcgaucgccggguuuaucgaaaauggaugggagggcaugguggaugggugguauggauucagacaccagaacagcgagggcauuggccaggcugccgaccugaaauccacccaagcugccaucgaucagauuaaugggaagcucaaccggcugaucggaaaaacgaacgaaaaguuccaccagauugagaaggaauuuucugagguggaaggcagaauccaggaccuugagaaauacgucgaggauacaaagauugaccuguggagcuauaaugccgaacuccugguggcucuggagaaccaacauaccaucgaucucaccgacuccgaaaugaauaaacuguucgagaagacaaagaagcagcuucgcgaaaacgcggaggauauggggaauggaugcuuuaagaucuaccacaaaugugacaacgccugcauuggcagcauccggaaugggaccuaugaucaugacguuuacagagacgaggcucugaacaaucgcuuccagauuaagggcguggaacucaaaucuggauacaaggauuggauccuguggauuuccuuugccaucagcugcuuccuucugugugucgcccuccugggcuuuaucaugugggcuugccagaaagggaacauucgguguaauaucugcauuuga

SEQ ID NO: 194381 - RNA, 1701 nt, Artificial Sequence
  derived and/or modified CDS sequence (opt5) from hemagglutinin__InfluenzaA__ACD85550
augaagaccaucauugcccugagcuacauccucugccugguguucgcucagaaacuucccggcaacgacaauuccacagccacgcugugucucgggcaccaugcggucccuaacggaaccauuguuaagacaaucaccaaugaucaaauugaggugacaaacgcuaccgaacuggugcagucuagcuccacaggcgagaucugcgacucuccgcaccagauccuugauggggaaaauuguacccugauugacgcccuccugggagauccccagugcgacggcuuucaaaacaaaaagugggaucuguucgucgagagaagcaaagccuauuccaauuguuacccuuaugacgugcccgauuacgcuucucuccggagccugguugccuccagcgggacgcuugaauuuaacaaugagucuuucaacuggaccggagugacacagaauggcaccuccagcgcuugcauccgcagaucuaacaauuccuuuuucagccggcugaacuggcucacacaucugaaguuuaaguauccugcccuuaaugucaccaugcccaacaacgagaaauucgacaagcuguacauuuggggcgugcaccauccugggacggauaaugaccagaucuuucucuaugcgcaggccucuggacgcauuacaguuuccaccaaaagaagccaacagacagugaucccgaacauuggcucccggccccgcgucagaaauaucccuucucggaucagcauuuacuggaccaucgugaagcccggggauauucugcugaucaacuccaccggaaaucucauugcuccucgcggcuacuucaaaaucagaagcgggaagucuuccaucaugcggagcgacgcccccauuggaaaguguaacucugaaugcaucacaccgaauggcagcauuccuaacgacaaacccuuucagaaugugaaccgcaucacguauggcgcuuguccuagauacgucaagcagaauacccugaaacuugccacagggaugcggaacguucccgagaagcaaacccgcggaauuuucggcgcgaucgccggguuuaucgaaaauggaugggagggcaugguggaugggugguauggauucagacaccagaacuccgagggcauuggccaggcugccgaccugaaaucuacacaagcugccaucgaucagauuaaugggaagcucaaccggcugaucggaaaaaccaacgaaaaguuccaccagauugagaaggaauuuagcgagguggaaggcagaauccaggaccuugagaaauacgucgaggauacgaagauugaccugugguccuauaaugccgaacuccugguggcucuggagaaccaacauacaaucgaucucaccgacagcgaaaugaauaaacuguucgagaagaccaaaaagcagcuucgcgaaaacgcggaggaucuggggaauggaugcuuuaagaucuaccacaaaugugacaacgccugcauuggcucuauccggaaugggacauaugaucaugacguuuacagagacgaggcucucaacaaucgcuuccagauuaagggcguggaacugaaauccggauacaaggauuggauccuuuggauuagcuuugccaugucuugcuuccugcucugugucgcccugcugggcuuuaucaugugggcuugccagaaagggaacauccgguguaauauuugcaucuga

SEQ ID NO: 194382 - RNA, 1701 nt, Artificial Sequence; identical to SEQ ID NO: 194000
  derived and/or modified CDS sequence (opt5) from hemagglutinin__InfluenzaA__ACD85561

SEQ ID NO: 194383 - RNA, 1701 nt, Artificial Sequence
  derived and/or modified CDS sequence (opt5) from hemagglutinin__InfluenzaA__ACD85572
augaagaccaucauugcccugagcuacauccucugccugguguucgcucagaaacuucccggcaacgacaauuccacagccacgcugugucucgggcaccaugcggucccuaacggaaccauuguuaagacaaucaccaaugaucaaauugaggugacaaacgcuaccgaacuggugcagucuagcuccacaggcgagaucugcgacucuccgcaccagauccuugauggggaaaauuguacccugauugacgcccuccugggagauccccagugcgacggcuuucaaaacaaaaagugggaucuguucgucgagagaagcaaagccuauuccaauuguuacccuuaugacgugcccgauuacgcuucucuccggagccugguugccuccagcgggacgcuugaauuuaacaaugagucuuucaacuggaccggagugacacagaauggcaccuccagcgcuugcauccgcagaucuaacaauuccuuuuucagccggcugaacuggcucacacaucugaaguuuaaguauccugcccuuaaugucaccaugcccaacaacgagaaauucgacaagcuguacauuuggggcgugcaccauccugggacggauaaugaccagaucuuucucuaugcgcaggccucuggacgcauuacaguuuccaccaaaagaagccaacagacagugaucccgaacaccggcucccggccccgcgucagaaauauuccuucucggaucagcaucuacuggaccauugugaagcccggggauauccugcugauuaacuccacaggaaaucucaucgcuccucgcggcuacuucaaaauuagaagcgggaagucuuccaucaugcggagcgacgcccccaucggaaaguguaacucugaaugcauuacgccgaauggcagcaucccuaacgacaaacccuuucagaaugugaaccgcauuaccuauggcgcuuguccuagauacgucaagcagaauacacugaaacuugccaccgggaugcggaacguucccgagaagcaaacacgcggaaucuucggcgcgauugccggguuuaucgaaaauggaugggagggcaugguggaugggugguauggauucagacaccagaacuccgagggcaucggccaggcugccgaccugaaaucuacccaagcugccauugaucagaucaaugggaagcucaaccggcugauuggaaaaacgaacgaaaaguuccaccagaucgagaaggaauuuagcgagguggaaggccgcauucaggaccuugagaaauacgucgaggauacaaagaucgaccugugguccuauaaugccgaacuccugguggcucuggagaaccaacauaccauugaucucaccgacagcgaaaugaauaaacuguucgagaagaccaaaaagcagcuuagagaaaacgcggaggauauggggaauggaugcuuuaagaucuaccacaaaugugacaacgccugcaucggcucuauucggaaugggacauaugaucaugacguuuacagagacgaggcucugaacaaucgcuuccagaucaagggcguggaacucaaauccggauacaaggauuggauucuguggaucagcuuugccauuucuugcuuccuucugugugucgcccuccugggcuuuaucaugugggcuugccagaaagggaacauccgguguaauauuugcaucuga

SEQ ID NO: 194384 - RNA, 1701 nt, Artificial Sequence; identical to SEQ ID NO: 194380
  derived and/or modified CDS sequence (opt5) from hemagglutinin__InfluenzaA__ACD85583

SEQ ID NO: 194385 - RNA, 1701 nt, Artificial Sequence
  derived and/or modified CDS sequence (opt5) from hemagglutinin__InfluenzaA__ACD93579
augaagaccaucauugcccugagcuacauccucugccugguguucgcucagaaacuucccggcaacgacaauuccacagccacgcugugucucgggcaccaugcggucccuaacggaaccauuguuaagacaaucaccaaugaucaaauugaggugacaaacgcuaccgaacuggugcagucuagcuccacaggcgagaucugcgacucuccgcaccagauccuugauggggaaaauuguacccugauugacgcccuccugggagauccccagugcgacggcuuucaaaacaaaaagugggaucuguucgucgagagaagcaaagccuauuccaauuguuacccuuaugacgugcccgauuacgcuucucuccggagccugguugccuccagcgggacgcuugaauuuaacaaugagucuuucaacuggaccggagugacacagaauggcaccuccagcgcuugcauccgcagaucuaacaauuccuuuuucagccggcugaacuggcucacacaucugaaguuuaaguauccugcccuuaaugucaccaugcccaacaacgagaaauucgacaagcuguacauuuggggcgugcaccauccugggacggauaaugaccagaucuuucucuaugcgcaggccucuggacgcauuacaguuuccaccaaaagaagccaacagacagugaucccgaacauuggcucccggccccgcgucagaaauaucccuucucggaucagcauuuacuggaccaucgugaagcccggggauauucugcugaucaacuccaccggaaaucucauugcuccucgcggcuacuucaaaaucagaagcgggaagucuuccaucaugcggagcgacgcccccauuggaaaguguaacucugaaugcaucacaccgaauggcagcauuccuaacgacaaacccuuucagaaugugaaccgcaucacguauggcgcuuguccuagauacgucaagcagaauacccugaaacuugccacagggaugcggaacguucccgagaagcaaacccgcggaauuuucggcgcgaucgccggguuuaucgaaaauggaugggagggcaugguggaugggugguauggauucagacaccagaacuccgagggcauuggccaggcugccgaccugaaaucuacacaagcugccaucgaucagauuaaugggaagcucaaccggcugaucggaaaaaccaacgaaaaguuccaccagauugagaaggaauuuagcgagguggaaggcagaauccaggaccuugagaaauacgucgaggauacgaagauugaccugugguccuauaaugccgaacuccugguggcucuggagaaccaacauacaaucgaucucaccgacagcgaaaugaauaaacuguucgagaagaccaaaaagcagcuucgcgaaaacgcggaggauauggggaauggaugcuuuaagaucuaccacaaaugugacaacacaugcauuggcucuauccggaaugggaccuaugaucaugacguuuacagagacgaggcccugaacaaucgcuuccagauuaagggcguggaacucaaauccggauacaaggauuggauccuguggauuagcuuugcuaucucuugcuuccuucugugugucgcccuccugggcuuuaucaugugggccugccagaaagggaacauucgguguaauaucugcauuuga

SEQ ID NO: 194386 - RNA, 1701 nt, Artificial Sequence; identical to SEQ ID NO: 192702
  derived and/or modified CDS sequence (opt5) from hemagglutinin__InfluenzaA__ACF09402

SEQ ID NO: 194387 - RNA, 1701 nt, Artificial Sequence
  derived and/or modified CDS sequence (opt5) from hemagglutinin__InfluenzaA__ACF22159
augaagaccaucauugcccugagcuacauccucugccugguguucgcucagaaacuucccggcaacgacaauuccacagccacgcugugucucgggcaccaugcggucccuaacggaaccauuguuaagacaaucaccaaugaucaaauugaggugacaaacgcuaccgaacuggugcaaaauucuagcacaggcgggaucugcgacuccccgcaccagauccuugauggagagaacuguacccugauugacgcccuccugggcgauccccagugcgacggguuucagaauaaaaagugggaucuguucgucgaaagaucuaaagccuauagcaacuguuacccuuaugacgugcccgauuacgcuucccuccggucucugguugccagcuccggaacgcuugaguuuaauaacgaaucuuucaauuggaccggcgugacacagaacggcaccucuuccgcuugcaagcgcagaagcaauaagagcuuuuucucccggcugaacuggcucacacaucugaaauauaaguacccugcccuuaaugucaccaugcccaacaacgagaaauuugacaagcuguauaucuggggagugcaccauccugggacggauagcgaccagauuucucucuacgcgcaggccuccggccgcaucacaguuagcaccaaaagaucccaacagacagugauuccgaauaucggguuccggccccgcgucagagaugugucuagccggauuuccaucuacuggaccaucgugaagccuggagacauucugcugaucaacagcaccggcaaucucauugcuccccgcggguauuuuaagaucagaucuggaaaauccagcauuaugcggucugacgccccuaucggcaaguguaacagcgagugcaucacacccaauggcuccauuccgaacgauaaaccuuuccagaaugucaaccgcaucacguacggggcuugucccagauauguuaagcagaauacccugaaacuugccacaggaaugcggaacgugccugaaaagcaaacccgcggcauuuuuggggcgaucgccggauucauugagaauggcugggaagggaugguggacggaugguacggcuuuagacaccagaacucugagggcacagggcaggcugccgaucugaaaagcacccaagcugccaucaaucagaucaacggaaagcucaaucggcugauuggcaagacgaacgagaaauuccaccagaucgaaaaggaguucuccgaagucgaggggcgcauucaggaccuugaaaaauauguggaggauacaaagaucgaccuguggagcuacaacgccgagcuccugguugcucuggaaaaucaacauaccauugaucucaccgacucugagaugaacaaacuguuugaaagaacaaagaagcagcuucgggagaaugcggaagauaugggaaacggcugcuucaaaaucuaucacaagugugacaaugccugcauugaguccaucagaaacgggaccuacgaucaugacguguaccgcgacgaggcucugaauaaccgguuucagaucaaaggcgucgaacucaagagcggauauaaagauuggauucuguggaucucuuucgccauuuccugcuuucuucuguguguggcccuccugggcuucaucaugugggcuugccagaaggggaauauuagauguaacaucugcaucuga

SEQ ID NO: 194388 - RNA, 1701 nt, Artificial Sequence
  derived and/or modified CDS sequence (opt5) from hemagglutinin__InfluenzaA__ACF22188
augaagaccaucauugcccugagcuacaucuucugccucgcucugggccaggaccuucccgggaacgauaauuccacagccacgcugugucucggacaccaugcggugccuaacggcacccuggucaaaacaauuaccgacgaucaaaucgagguuacaaaugcuaccgaacuugugcagucuagcuccacagggaagauuugcaacaauccgcacagaauccuggacggaaucgauuguacccucauugacgcccugcugggcgauccccauugcgacguguuucagaacgagacgugggaucucuucgucgaacggucuaaagccuuuagcaauuguuauccuuacgacgugcccgauuaugcuucccugcgcucucuuguugccagcuccgggacccuggaguucaucacagaaggauuuaccuggacaggcgugacccagaacggcgggagcaaugcuugcaagagaggaccuggcucuggguucuuuucccggcucaacuggcugacgaaaagcggaucuacauaccccguccuuaaugugaccaugccuaacaaugacaacuucgauaagcuguauauuuggggcguucaccauccguccacaaaucaagagcagaccagccucuacgugcaggccucugggcgcgucaccguguccacaagacggagccagcaaacgaucauucccaacaucuggucccgcccuugggugagaggacugucuagccggauuuccaucuauuggaccaucgucaagcccggcgacguucuggugauuaacagcaauggcaaccucaucgcgccucgcggguacuuuaaaaugagaacaggaaagucuuccauuaugcggagcgacgcccccaucgauaccuguauuucugagugcaucacaccgaauggcagcaucccuaacgacaaacccuuccagaaugugaacaagauuaccuacggggcuuguccuaaauaugucaagcagaauacgcugaaacuugccacaggaaugcgcaacgugcccgaaaagcagaccagaggccuguuuggggcuaucgccggauucauugagaauggcugggaaggcaugaucgaugggugguacggauuucggcaccaaaacuccgagggcaccgggcaggcggccgaccucaagucuacacaggcugccauugaucaaaucaauggaaaacugaaccgcguuaucgagaagaccaaugaaaaauuccaccagauugagaaggaguucagcgaaguggaaggcagaauccaggaccuugagaaauaugucgaggauacaaagauugaccugugguccuacaacgcugaacuccugguggcccuggagaaucagcauacgaucgaucucaccgacagcgaaaugaacaagcuguuugagaaaacacggagacaacuucgcgaaaacgccgaggauauggggaauggcugcuucaagauuuaucacaaaugugacaacgcuugcaucgagucuauucggaauggaaacuacgaccaugauguuuauagagacgaagcgcugaauaaccgcuuucagaucaagggcguggagcucaaauccggguacaaggauuggauccuguggauuagcuucgccaucucuugcuuucuucugugugucgugcuccugggauucauuaugugggcuugccagcggggcaauaucagauguaacauuugcaucuga

SEQ ID NO: 194389 - RNA, 1701 nt, Artificial Sequence; identical to SEQ ID NO: 194388
  derived and/or modified CDS sequence (opt5) from hemagglutinin__InfluenzaA__ACF22199

SEQ ID NO: 194390 - RNA, 1701 nt, Artificial Sequence
  derived and/or modified CDS sequence (opt5) from hemagglutinin__InfluenzaA__ACF22210
augaagaccaucauugcccugagcuacaucuucugccucgcucugggccaggaccuucccgggaacgauaauuccacagccacgcugugucucggacaccaugcggugccuaacggcacccuggucaaaacaauuaccgacgaucaaaucgagguuacaaaugcuaccgaacuugugcagucuagcuccacagggaagauuugcaacaauccgcacagaauccuggacggaaucgauuguacccucauugacgcccugcugggcgauccccauugcgacguguuucagaacgagacgugggaucucuucgucgaacggucuaaagccuuuagcaauuguuauccuuacgacgugcccgauuaugcuucccugcgcucucuuguugccagcuccgggacccuggaguucaucacagaaggauuuaccuggacaggcgugacccagaacggcgggagcaaugcuugcaagagaggaccuggcucuggguucuuuucccggcucaacuggcugacgaaaagcggaucuacauaccccguccuuaaugugaccaugccuaacaaugacaacuucgauaagcuguauauuuggggcguucaccauccguccacaaaucaagagcagaccagccucuacgugcaggccucugggcgcgucaccguguccacaagacggagccagcaaacgaucauucccaacaucggaucccgcccuugggugagaggccugucuagccggauuuccaucuauuggaccaucgucaagcccggcgacguucuggugauuaacagcaaugggaaccucaucgcgccucgcggauacuuuaaaaugagaacaggcaagucuuccauuaugcggagcgacgcccccaucgauaccuguauuucugagugcaucacaccgaaugggagcaucccuaacgacaaacccuuccagaaugugaacaagauuaccuacggagcuuguccuaaauaugucaagcagaauacgcugaaacuugccacaggcaugcgcaacgugcccgaaaagcagaccagagggcuguuuggagcuaucgccggcuucauugagaauggcugggaagggaugaucgauggaugguacggcuuucggcaccaaaacuccgaggggaccggacaggcggccgaccucaagucuacacaggcugccauugaucaaaucaauggcaaacugaaccgcguuaucgagaagaccaaugaaaaauuccaccagauugagaaggaguucagcgaaguggaagggagaauccaggaccuugagaaauaugucgaggauacaaagauugaccugugguccuacaacgcugaacuccugguggcccuggagaaucagcauacgaucgaucucaccgacagcgaaaugaacaagcuguuugagaaaacacggagacaacuucgcgaaaacgccgaggauaugggcaauggaugcuucaagauuuaucacaaaugugacaacgcuugcaucgagucuauucggaauggcaccuacgaccaugauguuuauagagacgaagcgcugaacaaucgcuuucagaucaaggggguggagcucaaauccggauacaaggauuggauccuguggauuagcuucgccaucucuugcuuucuucugugugucgugcuccugggcuucauuaugugggcuugccagcgggggaacaucagauguaauauuugcaucuga

SEQ ID NO: 194391 - RNA, 1701 nt, Artificial Sequence; identical to SEQ ID NO: 194390
  derived and/or modified CDS sequence (opt5) from hemagglutinin__InfluenzaA__ACF22221

SEQ ID NO: 194392 - RNA, 1701 nt, Artificial Sequence; identical to SEQ ID NO: 194390
  derived and/or modified CDS sequence (opt5) from hemagglutinin__InfluenzaA__ACF22232

SEQ ID NO: 194393 - RNA, 1701 nt, Artificial Sequence; identical to SEQ ID NO: 194390
  derived and/or modified CDS sequence (opt5) from hemagglutinin__InfluenzaA__ACF22243

SEQ ID NO: 194394 - RNA, 1701 nt, Artificial Sequence; identical to SEQ ID NO: 194390
  derived and/or modified CDS sequence (opt5) from hemagglutinin__InfluenzaA__ACF22254

SEQ ID NO: 194395 - RNA, 1701 nt, Artificial Sequence; identical to SEQ ID NO: 194390
  derived and/or modified CDS sequence (opt5) from hemagglutinin__InfluenzaA__ACF22265

SEQ ID NO: 194396 - RNA, 1701 nt, Artificial Sequence; identical to SEQ ID NO: 194390
  derived and/or modified CDS sequence (opt5) from hemagglutinin__InfluenzaA__ACF22276

SEQ ID NO: 194397 - RNA, 1701 nt, Artificial Sequence; identical to SEQ ID NO: 194390
  derived and/or modified CDS sequence (opt5) from hemagglutinin__InfluenzaA__ACF22287

SEQ ID NO: 194398 - RNA, 1701 nt, Artificial Sequence; identical to SEQ ID NO: 194390
  derived and/or modified CDS sequence (opt5) from hemagglutinin__InfluenzaA__ACF22298

SEQ ID NO: 194399 - RNA, 1701 nt, Artificial Sequence; identical to SEQ ID NO: 194390
  derived and/or modified CDS sequence (opt5) from hemagglutinin__InfluenzaA__ACF22320

SEQ ID NO: 194400 - RNA, 1701 nt, Artificial Sequence; identical to SEQ ID NO: 194390
  derived and/or modified CDS sequence (opt5) from hemagglutinin__InfluenzaA__ACF22342

SEQ ID NO: 194401 - RNA, 1701 nt, Artificial Sequence
  derived and/or modified CDS sequence (opt5) from hemagglutinin__InfluenzaA__ACF22364
augaagaccaucauugcccugagcuacaucuucugccucgcucugggccaggaccuucccgggaacgauaauuccacagccacgcugugucucggacaccaugcggugccuaacggcacccuggucaaaacaauuaccgacgaucaaaucgagguuacaaaugcuaccgaacuugugcagucuagcuccacagggaagauuugcaacaauccgcacagaauccuggacggaaucgauuguacccucauugacgcccugcugggcgauccccauugcgacguguuucagaacgagacgugggaucucuucgucgaacggucuaaagccuuuagcaauuguuauccuuacgacgugcccgauuaugcuucccugcgcucucuuguugccagcuccgggacccuggaguucaucacagaaggauuuaccuggacaggcgugacccagaacggcgggagcaaugcuugcaagagaggaccuggcucuggguucuuuucccggcucaacuggcugacgaaaagcggaucuacauaccccguccuuaaugugaccaugccuaacaaugacaacuucgauaagcuguauauuuggggcguucaccauccguccacaaaucaagagcagaccagccucuacgugcaggccucugggcgcgucaccguguccacaagacggagccagcaaacgaucauucccaacaucgagucccgcccuugggugagaggacugucuagccggauuuccaucuauuggaccaucgucaagcccggcgacguucuggugauuaacagcaauggcaaccucaucgcgccucgcggguacuuuaaaaugagaacaggaaagucuuccauuaugcggagcgacgcccccaucgauaccuguauuucugaaugcaucacaccgaauggcagcaucccuaacgacaaacccuuccagaaugugaacaagauuaccuacggggcuuguccuaaauaugucaagcagaauacgcugaaacuugccacaggaaugcgcaacgugcccgagaaacagaccagaggccuguuuggggcuaucgccggauucauugaaaauggcugggagggcaugaucgaugggugguacggauuucggcaccaaaacuccgagggcaccgggcaggcggccgaccucaagucuacacaggcugccauugaucaaaucaauggaaaacugaaccgcguuaucgaaaagaccaaugagaaauuccaccagauugaaaaggaguucagcgaaguggagggcagaauccaggaccuugagaaauaugucgaagauacaaagauugaccugugguccuacaacgcugagcuccugguggcccuggaaaaucagcauacgaucgaucucaccgacagcgagaugaacaagcuguuugaaaagacacggagacaacuucgcgagaacgccgaggauauggggaauggcugcuucaagauuuaucacaaaugugacaacgcuugcaucgaaucuauucggaauggaaccuacgaccaugauguuuauagagacgaggcgcugaacaaucgcuuucagaucaagggcguggaacucaaauccggguacaaggauuggauccuguggauuagcuucgccaucucuugcuuucuucugugugucgugcuccugggauucauuaugugggcuugccagcggggcaacaucagauguaauauuugcaucuga

SEQ ID NO: 194402 - RNA, 1701 nt, Artificial Sequence; identical to SEQ ID NO: 194380
  derived and/or modified CDS sequence (opt5) from hemagglutinin__InfluenzaA__ACF22408

SEQ ID NO: 194403 - RNA, 1701 nt, Artificial Sequence; identical to SEQ ID NO: 194000
  derived and/or modified CDS sequence (opt5) from hemagglutinin__InfluenzaA__ACF41669

SEQ ID NO: 194404 - RNA, 1698 nt, Artificial Sequence; identical to SEQ ID NO: 193986
  derived and/or modified CDS sequence (opt5) from hemagglutinin__InfluenzaA__ACF41680

SEQ ID NO: 194405 - RNA, 1689 nt, Artificial Sequence
  derived and/or modified CDS sequence (opt5) from hemagglutinin__InfluenzaA__ACF41691
auggccaucauuuaccugauccuccuguucaccgcugugagaggcgaccagauuugcaucggguaucacgccaacaauagcacagagaaggucgauacgauucuugaacggaacguuaccgugacacaugcgaaagacauccuggagaagacccacaauggaaaacucuguaagcugaacggcauucccccucuugaacugggggauugcuccaucgcuggauggcuccugggcaauccggagugugaccgccugcucagagugcccgaauggucuuacaucauggagaaagagaacccucgguauagccugugcuaccccggguccuuuaaugauuaugaagaacuuaagcaucugcucucuagcgucaagcacuucgaaaaagugaagauucugccuaaagacggauggacacaacaugagaccgauggcggcuccaaggccugugccguuucugggaaacccagcuuuuuccgcaacaugguguggcuuacaaagaagggaccuaauuacccggucgcuaaaagauccuauaacaauaccagcggcgagcagaugcugaucauuuggggagugcaccaccccaacgacgaagccgagcagcgggcucucuaccaggaaguugggacguacgugucugccuccaccagcacacugaauaagcgcucuaccccugagaucgcggccagacccaaagucuccggccuggggagccggauggaauuuucuuggacacuccuggaugugugggacaccauuuccuucgagagcacgggaaaccuuguggcuccugaguauggcuuuaagaucuccaaacgcggcucuagcgggaucaugaagacagaaggaacccugggcaauugcgagacaaaaugucaaacaccccucggggccauuaacaccacccugccguuccauaacguccacccucuuacgaucggagaaugccccaaguacguuaaguccgagaaacuggugcucgcuaccggccugagaaaugugccucagauugaaagccgggggcuguuuggagccaucgcgggcuucauugagggcggguggcagggaauggucgauggcugguauggguaccaucacucuaacgaccagggauccggcuaugccgcugauaaggagagcacacaaaaagccuuugaccgcaucaccaauaaggugaacucuguuaucgagaaaaugaauacacaguucgaggcuguggggaaggaauuuagcaaccucgagaagagacuggaaaaucuuaacaaaaagauggaggacggcuuccuggaugucuggaccuacaaugccgagcuccuggugcuuauggaaaacgagcggacgcuggacuuccacgauuccaauguuaaaaaccucuaugacaaggugcgcaugcagcugagagauaaugucaaagaacugggaaacggcuguuuugaguucuaccauaagugcgacgaugaguguaugaacucugugaagaaugggacauacgacuaucccaaauacgaagaggaaagcaagcucaaacggaacgagauuaagggagucgaacuguccagcaugggcguguaucagauccuugccauuuacgcuaccguugcggggucucugucccucgccaucaugauugcuggaaucagcuuuuggaugugcucuaauggcucccugcaaugcagaaucuguauuuga

SEQ ID NO: 194406 - RNA, 1701 nt, Artificial Sequence; identical to SEQ ID NO: 194388
  derived and/or modified CDS sequence (opt5) from hemagglutinin__InfluenzaA__ACF41735

SEQ ID NO: 194407 - RNA, 1701 nt, Artificial Sequence
  derived and/or modified CDS sequence (opt5) from hemagglutinin__InfluenzaA__ACF41790
augaagaccaucauugcccugagcuacaucuucugccucgcucugggccaggaccuucccgggaacgauaauuccacagccacgcugugucucggacaccaugcggugccuaacggcacccuggucaaaacaauuaccgacgaucaaaucgagguuacaaaugcuaccgaacuugugcagucuagcuccacagggaagauuugcaacaauccgcacagaauccuggacggaaucgauuguacccucauugacgcccugcugggcgauccccauugcgacguguuucagaacgagacgugggaucucuucgucgaacggucuaaagccuuuagcaauuguuauccuuacgacgugcccgauuaugcuucccugcgcucucuuguugccagcuccgggacccuggaguucaucacagaagacuuuaccuggacaggagugacccagaacggcggcagcaaugcuugcaagagagggccuggaucuggcuucuuuucccggcucaacuggcugacgaaaagcgggucuacauaccccguccuugaugugaccaugccuaauaacgacaauuucgacaagcuguauauuuggggaguucaccauccguccacaaaccaagagcagaccagccucuacgugcaggccucuggccgcgucaccguguccacaagacggagccagcaaacgaucauucccaauaucgggucccgcccuugggugagaggacugucuagccggauuuccaucuauuggaccaucgucaagcccggcgauguucuggugauuaacagcaacggcaaucucaucgcgccucgcggguacuuuaaaaugagaacaggaaagucuuccauuaugcggagcgacgcccccaucgauaccuguauuucugagugcaucacaccgaacggcagcaucccuaaugacaaacccuuccagaacgugaauaagauuaccuacggggcuuguccuaaauaugucaagcagaacacgcugaaacuugccacaggaaugcgcaaugugcccgaaaagcagaccagaggccuguuuggggcuaucgccggauucauugagaacggcugggaaggcaugaucgaugggugguacggauuucggcaccaaaauuccgagggcaccgggcaggcggccgaccucaagucuacacaggcugccauugaucaaaucaacggaaaacugaaucgcguuaucgagaagaccaacgaaaaauuccaccagauugagaaggaguucagcgaaguggaaggcagaauccaggaccuugagaaauaugucgaggauacaaagauugaccugugguccuacaaugcugaacuccugguggcccuggagaaccagcauacgaucgaucucaccgacagcgaaaugaauaagcuguuugagaaaacacggagacaacuucgcgaaaacgccgaggacauggggaacggcugcuucaagauuuaucacaaaugugauaaugcuugcaucgagucuauucggaacggaaccuacgaccaugauguuuauagagacgaagcgcugaauaaccgcuuucagaucaagggcguggagcucaaauccggguacaaggauuggauccuguggauuagcuucgccaucucuugcuuucuucugugugucgugcuccugggauucauuaugugggcuugccagcggggcaauaucagauguaacauuugcaucuga

SEQ ID NO: 194408 - RNA, 1701 nt, Artificial Sequence
  derived and/or modified CDS sequence (opt5) from hemagglutinin__InfluenzaA__ACF41823
augaagaccaucauugcccugagcuacaucuucugccucgcucugggccaggaccuucccgggaacgauaauuccacagccacgcugugucucggacaccaugcggugccuaacggcacccuggucaaaacaauuaccgacgaucaaaucgagguuacaaaugcuaccgaacuugugcagucuagcuccacagggaagauuugcaacaauccgcacagaauccuggacggaaucgauuguacccucauugacgcccugcugggcgauccccauugcgacguguuucagaacgagacgugggaucucuucgucgaacggucuaaagccuuuagcaauuguuauccuuacgacgugcccgauuaugcuucccugcgcucucuuguugccagcuccgggacccuggaguucaucacagaaggauuuaccuggacaggcgugacccagaacggcgggagcaaugcuugcaagagaggaccuggcucuggguucuuuucccggcucaacuggcugacgaaaagcggaucuacauaccccguccuuaaugugaccaugccuaacaaugacaacuucgauaagcuguauauuuggggcguucaccauccguccacaaaucaagagcagaccagccucuacgugcaggccucugggcgcgucaccguguccacaagacggagccgccagacgaucauucccaacaucggauccagaccuugggugcggggccugucuagccgcauuuccaucuauuggaccaucgucaagcccggcgacguucuggugauuaacagcaaugggaaccucaucgcgccuagaggauacuuuaaaaugcggacaggcaagucuuccauuaugcgcagcgacgcccccaucgauaccuguauuucugagugcaucacaccgaaugggagcaucccuaacgacaaacccuuccaaaaugugaacaagauuaccuacggagcuuguccuaaauaugucaagcagaauacgcugaaacuugccacaggcaugagaaacgugcccgaaaagcagacccgggggcuguuuggagcuaucgccggcuucauugagaauggcugggaagggaugaucgauggaugguacggcuuucgccaccagaacuccgaggggaccggacaagcggccgaccucaagucuacacaggcugccauugaucagaucaauggcaaacugaacagaguuaucgagaagaccaaugaaaaauuccaccaaauugagaaggaguucagcgaaguggaagggcggauccaggaccuugagaaauaugucgaggauacaaagauugaccugugguccuacaacgcugaacuccugguggcccuggagaaucagcauacgaucgaucucaccgacagcgaaaugaacaagcuguuugagaaaacaagacgccagcuucgggaaaacgccgaggauaugggcaauggaugcuucaagauuuaucacaaaugugacaacgcuugcaucgagucuauuagaaauggcaccuacgaccauaacguuuaucgcgaugaagcgcugaauaaccgguuucaaaucaaggggguggagcucaaauccggauacaaggacuggauccuguggauuagcuucgccaucucuugcuuucuucugugugucgugcuccugggcuucauuaugugggcuugccagagagggaauauccgcuguaacauuugcaucuga

SEQ ID NO: 194409 - RNA, 1698 nt, Artificial Sequence
  derived and/or modified CDS sequence (opt5) from hemagglutinin__InfluenzaA__ACF41834
augaaggccaaccugcucgugcugcuuugcgcucuggccgcggcugacgccgauaccaucuguauuggcuaccacgccaauaacagcacagacacggucgauaccguucucgagaaaaaugugacagugacccauuccgucaaccugcuugaagacucucacaaugggaagcugugcagacucaaaggaaucgcuccccugcagcugggcaaguguaacauugccggguggcuccugggaaauccugagugcgauccgcuucugcccgugcggagcugguccuauaucguugaaacaccuaacucugagaauggcauuuguuaccccggggacuucaucgauuaugaggaacuccgcgagcaacugagcuccgugucuagcuuugaaagauucgagaucuuuccuaaagaauccagcuggcccaaccauaauaccaacggagucacagcugccugcucucacgagggcaaguccagcuucuaccggaaucuucuguggcucaccgagaaggaaggcucuuauccuaaccugaaaaauuccuacgugaacaagaaagggaaggagguucuggugcucuggggcauucaucacccgagcaacucuaaagaacagcagaaucuguaucagaacgagaaugcguacgucuccguggugacgagcaacuacaaucgcagauuuacccccgaaaucgccgagcggccuaagguccgcgaccaagcuggaagaaugaacuauuacuggacacuucugaagcccggggauaccauuaucuucgaggccaauggaaaccucauugcuccuauguaugccuuugcgcugucccggggcuucgggucuggaaucauuacaagcaaugccuccaugcacgaauguaacaccaaaugccagacgccccuuggcgcuaucaauagcucucugccguaccagaacauccauccuguuacaauuggcgagugucccaaguaugugcgcuccgccaaacucagaauggugaccgggcugcggaauaucccuagcauucagucucgcggacuguuuggcgcuaucgccggguucauugaaggaggcuggacagggaugaucgacggaugguacggcuaucaccaucaaaacgagcagggcagcggguacgccgcugaucagaaguccacccagaaugcgaucaacggaauuaccaacaaagucaauacagugaucgaaaagaugaacauucaauuuacggccguuggcaaagaguucaauaagcucgagaagagaauggaaaaccugaauaaaaagguggacgauggguuucuugacaucuggaccuacaacgcugagcugcucguccugcuugaaaaugagcggacacuggacuuccacgauucuaacgugaaaaaucucuaugaaaagguuaaaagccagcugaagaacaaugccaaggagauuggaaacggcugcuucgaguuuuaccacaaaugugacaaugaaugcauggaguccgugcgcaacgggaccuaugauuaccccaaguauagcgaagagucuaaacugaauagagagaaggucgacggcgugaaacucgaauccaugggaaucuaccagauccuggccauuuauagcacagucgcuucuucccuugugcugcucguuagccugggcgccaucuccuucuggaugugcucuaacgggagccugcaaugucggauuugcaucuga

SEQ ID NO: 194410 - RNA, 1701 nt, Artificial Sequence
  derived and/or modified CDS sequence (opt5) from hemagglutinin__InfluenzaA__ACF41856
augaagaccaucauugcccugagcuacauccucugccugguguucgcucagaaacuucccggcaacgacaauuccacagccacgcugugucucgggcaccaugcggucccuaacggaacccugguuaagacaauuaccaaugaucaaaucgaggugacaaacgcuaccgaacuugugcagucuagcuccacaggcagaauuugcgacucuccgcaccggauccuggaugggaaaaauuguacccucaucgacgcccugcugggagauccccauugcgacggcuuucagaacaaggagugggaucucuucgucgaacgcagcaaagccuauuccaauuguuacccuuaugacgugcccgauuacgcuucucugagaagccuuguugccuccagcgggacgcuggaguuuauuaacgaagacuucaauuggaccggaguggcucaggauggcggcucuuaugccugcaagcggggguccgucaacagcuuuuucucucgccucaauuggcugcacaaguccgaguacaaauauccugcgcuuaacgugacaaugcccaauaacggaaaguuugacaaacuguacaucuggggcguucaucacccuagcaccgauagagaccaaacaucucucuacgugcgggccuccgggcgcgucaccgugagcacgaagagaucccagcagacagugaccccgaauauuggaucucggcccuggguccgcggccagagcuccagaaucagcauuuauuggacaaucguuaaaccuggggacauucugcugaucaacucuaccggaaaccucaucgcuccccggggcuacuucaagauucgcaauggcaaguccagcaucaugagaucugaugccccuauugggaccuguagcuccgagugcaucacacccaacggaucuauuccgaaugacaaaccuuuucaaaacgugaaucggaucacguauggcgcuuguccccgcuacgugaagcagaacacccugaaacuugccacagggaugagaaaugucccugaaaagcagacccggggaaucuucggcgcgauugccggguuuaucgagaacggaugggaaggcaugguggauggcugguauggguucagacaccagaauagcgagggaacaggccaagcugccgaccugaaauccacccaggcugccauugaucagaucaacgggaagcucaaucgccugauugagaaaacgaacgaaaaguuucaucaaaucgagaaggaguucagcgaaguugaaggacggauccaggaccuugagaaauacguggaggauacaaagauugaccuguggucuuauaaugccgaacuccuggucgcucuggagaaccagcacaccaucgaucucaccgacuccgaaaugaauaaacuguucgagaagacaagaaaacagcuucgcgaaaacgcggaggauaugggcaacgggugcuuuaagauuuaccauaagugugacaaugccugcaucggcagcauucggaacggaaccuacgaccacgauguguauagagacgaggcucugaauaaccgcuuccaaaucaaaggcguugaacucaagucuggguacaaagauuggauucuguggaucuccuuugccaucagcugcuuccuucugugugugguccuccugggauuuauuaugugggccugccagaagggcaauauccgguguaacauuugcaucuga

SEQ ID NO: 194411 - RNA, 1698 nt, Artificial Sequence
  derived and/or modified CDS sequence (opt5) from hemagglutinin__InfluenzaA__ACF41867
augaaggccaaacugcucgugcugcuuugcaccuucacagcuacguacgccgacaccaucuguauuggcuaucacgcgaacaauagcacagauaccgucgacacaguucuggagaagaacgugaccgugacacauuccgucaaucuccuggaagauucucacaacgggaaacuuugccugcucaagggaaucgcuccccugcagcugggcaauuguagcguggccggguggauucucggaaacccugagugcgaaucccugaucucuaaagagagcugguccuacauuguugaaaccccgaaucccgagaacggcacguguuauccuggguacuuugccgacuaugaggaacuuagagagcaacugucuagcguguccagcuucgaacgguuugagaucuuccccaaggagucuuccuggccuaaucauaccgucacaggagugaccgcuagcugcucucacaacggcaaguccagcuuuuaccgcaaucuccuguggcuuacagagaaaaacggccuguaucccaaucucucuaacuccuacguuaauaacaaggaaaaagaagugcugguccuguggggagugcaucacccuagcaacaucagagaucagcgggccauuuaccacaccgagaaugcuuauguguccgucguuucuagccauuacucccgcagauucacgccggaaaucgccaagcggcccaaagugcgcgggcaggagggcagaauuaacuauuacuggacacuccuggagccuggggacaccaucauuuuugaagcgaauggaaaccuuaucgcccccugguaugcuuucgcccugagccggggcuuugggucuggaauuaucacauccaaugcuccuaugaacgagugugaugccaagugccagacaccccaaggcgcgaucaauagcucucucccguuccagaacgugcacccugucaccauuggcgaaugucccaaguacgugcgcagcaccaaacugagaaugguuacggggcuucggaauaucccuuccauucagucucgcggacuguuuggcgccaucgcuggguucauugagggaggcuggaccgggaugauggacggaugguauggcuaccaucaccagaacgaacaaggcagcggguacgccgcugaucagaaguccacacagaaugccaucaacggaaucaccaauaaagugaacagcgucauugagaagaugaauacacaguuuaccgccgugggcaaagaguucaacaagcucgaaagacggauggagaaccugaauaaaaagguugacgauggguuccuggacaucuggacguauaacgcugaacuccuggugcuucuggagaaugaacgcacacucgauuuucacgacucuaacgucaagaaucuguacgagaaagugaagucccaacuuaaaaacaaugcgaaggagauuggaaacggcugcuucgaauuuuaucauaaauguaauaacgagugcauggaaagcgucaagaaugggaccuacgacuaucccaaguacucugaggaguccaaacugaacagagaaaagaucgauggcgugaaacucgagagcaugggaguuuaucagauucuggccaucuacuccaccguggcuucuagccugguccuccuggugucccuuggcgccaucucuuucuggaugugcagcaaugggucccugcagugucggauuugcaucuga

SEQ ID NO: 194412 - RNA, 1698 nt, Artificial Sequence; identical to SEQ ID NO: 194187
  derived and/or modified CDS sequence (opt5) from hemagglutinin__InfluenzaA__ACF41878

SEQ ID NO: 194413 - RNA, 1701 nt, Artificial Sequence
  derived and/or modified CDS sequence (opt5) from hemagglutinin__InfluenzaA__ACF41922
augaaggccaaacugcucgugcugcuuugcgcuuucaccgccacauacgcggacacgaucuguauuggcuaucacgcuaacaauagcaccgauacagucgacaccguucuggagaagaacgugacagugacccauuccgucaaucuccuggaagauucucacaacgggaaacuuugcagacugaagggaaucgcuccccuccagcugggcaauuguagcguggccggguggauucugggaaacccuaaaugcgagucccucuuuucuaaggaaagcugguccuacaucgccgagacaccgaaucccgaaaacggcaccuguuauccuggguacuucgccgacuaugaggagcugcgggaacaacuuucuagcguuuccagcuuugagcgcuucgaaauuuuucccaaggagucuuccuggccuaaucauacggugaccaaaggagucacagcuagcugcucucacaacggcaaguccagcuucuacagaaaucugcucuggcugaccgagaaaaacggccuuuaucccaaucugucuaaguccuacgugaacaauaaagaaaaggagguucucgugcuguggggaguccaucacccuagcaacauccgggaucagcgcgccaucuaccacacagaaaacgcguauguguccguggucucuagccauuacuccagacgguuuaccccggagauugccaagcgccccaaaguuagagaccaggaagggcggaucaauuauuacuggacgcugcucgagccuggcgauacaauuaucuucgaggcuaacgggaaucugauugcccccugguaugcuuuugcccuuagccgcggauucggcucugggaucauuaccuccaacgcgagcauggacgaaugugaugccaagugccagacaccucaaggagcuaucaauucuagccugcccuuucagaacgugcacccggugaccaucggcgaguguccuaaauacgucagauccaccaagcuccggauggugacaggccugcgcaauauucccucuauccagagcagagggcuuuucggagccauugcuggcuuuaucgaagggggauggacgggcaugauugacgggugguauggauaccaucaccagaacgagcaaggcuccggcuacgccgccgaucagaaaagcacccagaaugcuaucaacgggaucacaaauaagguuaacucugugauugaaaagaugaauacccaguucacagcggucggaaaggaguucaacaagcuggagcggcgcauggaaaaucucaacaaaaagguggacgauggcuuucuggacaucuggaccuauaacgccgagcugcucguucugcuugaaaaugggagaacgcuggacuuccacgauuccaacgugaaaaaucucuacgagaaggucaaaagccaacugaagaacaaugcuaaggaaauuggaaacggcugcuuugaguucuaucauaaauguaauaacgagugcauggaaucugugaagaaugggacauacgacuauccuaaauacuccgaggaaagcaaacuuaaccggggcaaaaucgauggagucaagcuggaguccaugggcguguaucagauucucgccaucuacucuaccguugccagcucccuggugcugcucgucucucugggggcuaucagcuuuuggaugugcuccaauggaagccuucaguguagaauuugcaucuga

SEQ ID NO: 194414 - RNA, 1689 nt, Artificial Sequence
  derived and/or modified CDS sequence (opt5) from hemagglutinin__InfluenzaA__ACF54389
auggccaucauuuaccugauccuccuguucgcuaccgugagaggcgaccagauuugcaucggguaucacgccaacaauagcacagagaaggucgauacgauucuugaacggaacguuaccgugacacaugcgaaagacauccuggagaagacccacaauggaaaacucuguaagcugaacggcauucccccucuugaacugggggauugcuccaucgcuggauggcuccugggcaauccggagugugaccgccugcucagagugcccgaauggucuuacaucauggagaaagagaacccucgguauagccugugcuaccccgggucccuuaaugauuaugaagaacugaagcaucuccugucuagcgucaagcacuuugaaaaagugcgcauucuuccuaaggacagauggacacaacauaccacaaccggaggcuccaaagccugugccguuucuggcaagcccagcuucuuucggaacaugguguggcugacgaaaaaggggaccaauuacccugucgcuaagggauccuauaacaauacaagcggcgagcagaugcucaucauuuggggagugcaccacccgaucgaugaggccgaacagcgcgcucuguaccaggagguugggaccuacgugucugccuccacaagcacccugaacaaaagaucuauucccgaaaucgcggcccggccugaggucaauggccucgggucccgcauggaguucagcuggacgcugcuugacgugugggauacaaucaacuuugagucuaccggaaaucugguggcucccgaguauggcuucaagauuuccaaaagaggcagcuccgggaucaugaagacagaaggaacccucggcaacugcgagaccaaaugucaaacaccucugggggccauuaacacgacccuucccuuucauaauguccacccgcugacaaucggagaaugcccuaaguacguuaaaucugagaagcucgugcuggcuaccggccugcggaacgugccccagauugaaagccgcggacucuucggggccaucgcgggcuuuaucgagggcggguggcagggaauggucgacggcugguauggguaccaucacuccaaugagcagggaagcggcuaugccgcugauaaggaaucuacacaaaaagccuucgacgggauuaccaacaagguuaauuccgugaucgagaaaaugaacacgcaguuugaagcugugggcaaggaguucaauaaccuggagaaaagacuugaaaaucugaacaagaagauggaggauggauuucucgacgucuggacauacaaugccgaacugcuugugcugauggagaacgaacggacccucgacuuccacgauagcaauguuaaaaaccuguaugagaaggugcgcaugcagcugagagacaaugucaaagagcucggcaacggguguuucgaauuuuaccauaagugcgaugacgaguguaugaacucugugaaaaauggaaccuacgauuauccuaaguacgaagaggaaagcaagcugaaacggaacgagauuaagggcgucaaacuuuccucuauggggguguaucagauccuggccauuuacgcuacaguugcgggaagccucucccuggccaucaugguggcuggcaucagcuucuggaugugcucuaaugggucccugcaaugcagaauuuguaucuga

SEQ ID NO: 194415 - RNA, 1701 nt, Artificial Sequence; identical to SEQ ID NO: 194388
  derived and/or modified CDS sequence (opt5) from hemagglutinin__InfluenzaA__ACF54400

SEQ ID NO: 194416 - RNA, 1701 nt, Artificial Sequence; identical to SEQ ID NO: 194390
  derived and/or modified CDS sequence (opt5) from hemagglutinin__InfluenzaA__ACF54411

SEQ ID NO: 194417 - RNA, 1701 nt, Artificial Sequence; identical to SEQ ID NO: 194390
  derived and/or modified CDS sequence (opt5) from hemagglutinin__InfluenzaA__ACF54422

SEQ ID NO: 194418 - RNA, 1701 nt, Artificial Sequence; identical to SEQ ID NO: 194401
  derived and/or modified CDS sequence (opt5) from hemagglutinin__InfluenzaA__ACF54433

SEQ ID NO: 194419 - RNA, 1701 nt, Artificial Sequence; identical to SEQ ID NO: 194390
  derived and/or modified CDS sequence (opt5) from hemagglutinin__InfluenzaA__ACF54444

SEQ ID NO: 194420 - RNA, 1701 nt, Artificial Sequence; identical to SEQ ID NO: 194408
  derived and/or modified CDS sequence (opt5) from hemagglutinin__InfluenzaA__ACF54466

SEQ ID NO: 194421 - RNA, 1689 nt, Artificial Sequence
  derived and/or modified CDS sequence (opt5) from hemagglutinin__InfluenzaA__ACF54477
auggccaucauuuaccugauccuccuguucaccgcugugagaggcgaccagauuugcaucggguaucacgccaacaauagcacagagaaggucgauacgauucuugaacggaacguuaccgugacacaugcgaaagacauccuggagaagacccacaauggaaaacucuguaagcugaacggcauucccccucuugaacugggggauugcuccaucgcuggauggcuccugggcaauccggagugugaccgccugcucucugugcccgaauggagcuacaucauggagaaagagaacccuagagaugggcugugcuaucccggauccuuuaaugacuacgaggagcuuaagcaucugcucucuagcgucaagcacuucgaaaaagugaagauucugccuaaagaucgguggacacaacauaccacaaccggcggcucccgcgccugugccguuucugggaaccccagcuuuuucagaaauaugguguggcuuacgaagaaaggauccaacuauccugucgcuaagggcagcuacaauaacaccucuggggagcagaugcugaucauuuggggagugcaccacccgaaugacgagacagaacagcggacccucuaucagaacguuggcacauacguguccgucgggaccagcacgcugaauaagcgcucuacacccgauaucgccaccagaccuaaagugaacggacugggcucccggauggaguuuagcuggacacuccuggacaugugggauaccauuaacuucgaaucuaccggcaaucuuaucgcucccgaguacggguuuaagaucuccaaacgcggaagcuccggcauuaugaagacagaagggacgcuggagaacugcgagaccaaaugucaaacaccucucggagccaucaauaccacacugcccuuccauaacgugcacccgcuuaccauuggcgaaugcccuaaguaugucaaaucugagaagcugguucucgcgacggggcugagaaaugugccccagaucgaaagccggggacuguuuggcgccauugcuggcuucaucgaagggggauggcagggcaugguggacgggugguacggauaucaucacuccaacgaucagggcagcggguacgccgcugacaaggaaucuacacaaaaagccuuugacggcaucaccaauaaggucaacuccgugauugagaaaaugaauacccaguucgaggcgguuggaaaggaauuuagcaaccucgagcgcagacuggaaaaucuuaacaaaaagauggaggauggcuuccuggacguguggacauauaaugccgaacuccugguccuuauggagaacgagcggacccuggauuuccacgacucuaaugugaagaaccucuacgauaaaguucgcaugcagcugagagacaacgugaaggaacuggggaauggauguuuugaguucuaucauaaaugcgaugacgaauguaugaacagcgucaagaauggcacauacgauuacccuaaauaugaggaggaauccaagcucaaccggaaugagaucaagggggugaaacugucuagcaugggagucuaccagauucuugcuaucuaugccacgguggcuggcucccugagccucgccauuaugauggccgggaucucuuuuuggaugugcuccaacggcagccugcaaugcagaaucuguauuuga

SEQ ID NO: 194422 - RNA, 1689 nt, Artificial Sequence
  derived and/or modified CDS sequence (opt5) from hemagglutinin__InfluenzaA__ACF54499
auggccaucauuuaccugauccuccuguucaccgcugugagaggcgaccagauuugcaucggguaucacgccaacaauagcacagagacggucgauaccauucuugaacggaacguuacagugacccaugcgaaggacauccuggagaaaacacacaauggaaagcucuguaaacugaacggcauucccccucuugaacugggggauugcuccaucgcuggauggcuccugggcaauccggagugugaccgccugcucucugugcccgaauggagcuacaucauggagaaggagaacccuagagaugggcugugcuaucccggauccuuuaaugacuacgaggagcuuaaacaucugcucucuagcgucaagcacuucgaaaaggugaaaauucugccuaaggaucgguggacccaacauacaaccacgggcggcucccgcgccugugccguuucugggaaccccagcuuuuucagaaauaugguguggcuuaccaaaaagggauccaacuauccugucgcuaaaggcagcuacaauaacacaucuggggagcagaugcugaucauuuggggagugcaccacccgaaugacgagaccgaacagcggacacucuaucagaacguuggcaccuacguguccgucgggacgagcacacugaauaagcgcucuacccccgauaucgccacaagaccuaaggugaacggacugggcucccggauggaguuuagcuggacccuccuggacaugugggauaccauuaacuucgaaucuacaggcaaucuuaucgcucccgaguacggguuuaaaaucuccaagcgcggaagcuccggcauuaugaaaacggaagggacccuggagaacugcgagacaaagugucaaaccccucucggagccaucaauacaacccugcccuuccauaacgugcacccgcuuacgauuggcgaaugcccuaaauaugucaagucugagaaacugguucucgcgacagggcugagaaaugugccccagaucgaaagccggggacuguuuggcgccauugcuggcuucaucgaagggggauggcagggcaugguggacgggugguacggauaucaucacuccaacgaucagggcagcggguacgccgcugacaaggaaucuacccaaaaggccuuugacggcaucaccaauaaagucaacuccgugauugagaagaugaauacacaguucgaggcgguuggaaaagaauuuagcaaccucgagcgcagacuggaaaaucuuaacaagaaaauggaggauggcuuccuggacguguggaccuauaaugccgaacuccugguccuuauggagaacgagcggacacuggauuuccacgacucuaaugugaagaaccucuacgauaagguucgcaugcagcugagagacaacgugaaagaacuggggaauggauguuuugaguucuaucauaagugcgaugacgaauguaugaacagcgucaaaaauggcacguacgauuacccuaaguaugaggaggaauccaaacucaaccggaaugagaucaagggggugaagcugucuagcaugggagucuaccagauucuugcuaucuaugccaccguggcuggcucccugagccucgccauuaugauggccgggaucucuuuuuggaugugcuccaacggcagccugcaaugcagaaucuguauuuga

SEQ ID NO: 194423 - RNA, 1689 nt, Artificial Sequence; identical to SEQ ID NO: 194422
  derived and/or modified CDS sequence (opt5) from hemagglutinin__InfluenzaA__ACF54510

SEQ ID NO: 194424 - RNA, 1689 nt, Artificial Sequence; identical to SEQ ID NO: 194422
  derived and/or modified CDS sequence (opt5) from hemagglutinin__InfluenzaA__ACF54521

SEQ ID NO: 194425 - RNA, 1701 nt, Artificial Sequence
  derived and/or modified CDS sequence (opt5) from hemagglutinin__InfluenzaA__ACF54532
augaagaccaucauugcccugagcuacauccucugccugguguucgcucagaaacuucccggcaacgacaauuccacagccacgcugugucucgggcaccaugcggucccuaacggaaccauuguuaagacaaucaccaaugaucaaauugaggugacaaacgcuaccgaacuggugcagucuagcuccacaggcgagaucugcgacucuccgcaccagauccuugauggggaaaauuguacccugauugacgcccuccugggagauccccagugcgacggcuuucaaaacaaaaagugggaucuguucgucgagagaagcaaagccuauuccaauuguuacccuuaugacgugcccgauuacgcuucucuccggagccugguugccuccagcgggacgcuugaauuuaacaaugagucuuucaacuggaccggagugacacagaauggcaccuccagcgcuugcauccgcagaucuaacaauuccuuuuucagccggcugaacuggcucacacaucugaaguuuaaguauccugcccuuaaugucaccaugcccaacaacgagaaauucgacaagcuguacauuuggggcgugcaccauccugggacggauaaugaccagaucuuucucuaugcgcaggccucuggacgcauuacaguuuccaccaaaagaagccaacagacagugaucccgaacauuggcucccggccccgcgucagaaauaucccuucucggaucagcauuuacuggaccaucgugaagcccggggauauucugcugaucaacuccaccggaaaucucauugcuccucgcggcuacuucaaaaucagaagcgggaagucuuccaucaugcggagcgacgcccccauuggaaaguguaacucugaaugcaucacaccgaauggcagcauuccuaacgacaaacccuuucagaaugugaaccgcaucacguauggcgcuuguccuagauacgucaagcagaauacccugaaacuugccacagggaugcggaacguucccgagaagcaaacccgcggaauuuucggcgcgaucgccggguuuaucgaaaauggaugggagggcaugguggaugggugguauggauucagacaccagaacuccgagggcauuggccaggcugccgaccugaaaucuacacaagcugccaucgaucagauuaaugggaagcucaaccggcugaucggaaaaaccaacgaaaaguuccaccagauugagaaggaauuuagcgagguggaaggcagaauccaggaccuugagaaauacgucgaggauacgaagauugaccugugguccuauaaugccgaacuccugguggcucuggagaaccaacauacaaucgaucucaccgacagcgaaaugaauaaacuguucgagaagaccaaaaagcagcuucgcgaaaacgcggaggauauggggaauggaugcuuuaagaucuaccacaaaugugacaacgccugcauuggcucuauccggaaugggacauaugaucaugacguuuacagagacgaggcucugaacaaucgcuuccagauuaagggcguggaacucaccuccggauacaaagauuggauccuguggauuagcuuugccaucucuugcuuccuucugugugucgcccuccugggcuuuaucaugugggcuugccagaaggggaacauucgguguaauaucugcauuuga

SEQ ID NO: 194426 - RNA, 1701 nt, Artificial Sequence
  derived and/or modified CDS sequence (opt5) from hemagglutinin__InfluenzaA__ACF54543
augaagaccaucauugcccugagcuacauccucugccugguguucgcucagaaacuucccggcaacgacaauuccacagccacgcugugucucgggcaccaugcggucccuaacggaaccauuguuaagacaaucaccaaugaucaaauugaggugacaaacgcuaccgaacuggugcagucuagcuccacaggcgagaucugcgacucuccgcaccagauccuugauggggaaaauuguacccugauugacgcccuccugggagauccccagugcgacggcuuucaaaacaaaaagugggaucuguucgucgagagaagcaaagccuauuccaauuguuacccuuaugacgugcccgauuacguuucucuccggagccugguggcuuccagcgggacgcuugaauuuaacaaugagucuuucaacuggaccggagucacacagaauggcaccuccagcgccugcauccgcagaucuaacaauuccuuuuucagccggcugaacuggcucacacaucugaaguuuaaguauccugcucuuaaugugaccaugcccaacaacgagaauuucgacaaacuguacauuuggggcguucaccauccugggacggauaacgaccagaucuuucucuaugcccaggcgucuggacgcauuacaguguccaccaagagaagccaacagacagucaucccgaauauuggcucccggccccgcgugagaaacaucccuucucggaucagcauuuacuggaccaucgugaaacccggggauauucugcugaucaauuccaccggaaaccucauugccccucgcggcuacuucaagaucagaagcgggaaaucuuccaucaugcggagcgacgcucccauuggaaaguguaauucugaaugcaucacaccgaacggcagcauuccuaaugacaagcccuuucagaacgucaaucgcaucacguauggcgccuguccuagauacguuaaacagaacacccugaaacuugcuacagggaugcggaaugugcccgagaagcaaacccgcggaauuuucggcgccaucgcgggguuuaucgaaaacggaugggagggcaugguggaugggugguauggauucagacaccaaaauuccgagggcauuggccaggccgcugaccugaagucuacacaggccgcuaucgaucagauuaacgggaaacucaaccggcugaucggaaagaccaaugaaaaauuccaccagauugagaaggaauuuagcgaggucgaaggcagaauccaggaccuugagaaguacguggaggauacgaaaauugaccugugguccuauaacgccgaacuccugguugcccuggagaaucaacauacaaucgaucucaccgacagcgaaaugaacaagcuguucgagaaaaccaagaaacagcuucgcgaaaaugcugaggaucuggggaacggaugcuuuaagaucuaccacaagugugacaaugcgugcauuggcucuauccggaacgggacauaugaucaugacguguacagagacgaggcccucaauaaccgcuuccagauuaaaggcgucgaacugaaguccggauacaaagauuggauccuuuggauuagcuuugcuaucucuugcuuccugcucuguguggcccugcugggcuuuaucaugugggccugccagaaggggaauauucgguguaacaucugcauuuga

SEQ ID NO: 194427 - RNA, 1701 nt, Artificial Sequence
  derived and/or modified CDS sequence (opt5) from hemagglutinin__InfluenzaA__ACF54565
augaagaccaucauugcccugagcuacauccucugccugguguucucccagaaacuucccggcaacgacaauucuacagcuacgcugugucucgggcaccaugccgucccuaacggaaccauuguuaagacaaucaccaaugaucaaauugaggugacaaacgcgaccgaacuggugcagagcuccucuacaggcgggaucugcgacagcccgcaccagauccuugauggagagaauuguacccugauugacgcucuccugggcgauccccagugcgacggguuucaaaacaaaaagugggaucuguucgucgaaagauccaaagccuauucuaauuguuacccuuaugacgugcccgauuacgccagccuccggucccugguugcuagcucuggaacgcuugaguuuaacaaugaauccuucaacugggccggcgugacccagaauggcacaagcucugcuugcaagcgcagauccaacaagagcuuuuucucucggcugaauuggcucacccaucugaaauauaaguacccugcccuuaacgucacaaugcccaauaacgagaaauuugacaagcuguauaucuggggagugcaccauccuguuaccgauuccgaccagauuagccucuacgcgcaggccuccgggcgcaucacggugucuacaaaaagaagccaacagaccgucauuccgaacaucggcuaccggccccgcgugagagauauuuccagccggaucucuaucuauuggacaauugugaagccuggggacauccugcugauuaauuccaccggaaaccucaucgcuccccgcggcuacuucaagauuagaagcgggaaaucuagcaucaugcgguccgacgccccuaucggaaaguguaauucugagugcauuacccccaacggcagcaucccgaaugauaaaccuuuucagaacgucaaucgcauuacauauggcgcuugucccagauacguuaagcagaacacgcugaaacuugccaccgggaugcggaaugugccugaaaagcaaacacgcggaaucuucggcgcgauugccggguuuaucgagaacggaugggaaggcaugguggacgggugguauggauucagacaccaaaauuccgagggcaccggccaggcugccgaucugaaaagcacacaggcugccaucaaccagauuaaugggaagcucaaccggcugaucggaaagaccaaugagaaauuucaccagauugaaaaggaguucucugaagucgagggcagaauccaggaccuugaaaaauacguggaggauacgaagauugaccugugguccuauaacgccgagcuccugguugcucuggaaaaccaacauacaaucgaucucaccgacagcgagaugaauaaacuguucgaacgcaccaagaagcagcuucgggagaacgcggaagauauggggaauggaugcuuuaaaauuuaccacaagugugacaacgccugcaucgagucuaucagaaauggcacauacgaucaugacguguaucgcgacgaggcucugaacaaucgguuccagauuaaaggggucgaacucaaguccggcuacaaagauuggauccuguggauuagcuuugccaucuccugcuuccuucuguguguggcccuccugggauuuauuaugugggcuugccagaagggcaacaucagauguaauaucugcauuuga

SEQ ID NO: 194428 - RNA, 1701 nt, Artificial Sequence
  derived and/or modified CDS sequence (opt5) from hemagglutinin__InfluenzaA__ACF54576
augaagaccaucauugcccugagcuacauccucugccugguguucgcucagaaacuucccggcaacgacaauuccacagccacgcugugucucgggcaccaugcggucccuaacggaaccauuguuaagacaaucaccaaugaucaaauugaggugacaaacgcuaccgaacuggugcagucuagcuccacaggcgggaucugcgacucuccgcaccagauccuugauggagagaauuguacccugauugacgcccuccugggcgauccccagugcgacggguuucaaaacaaaaagugggaucuguucgucgaaagaagcaaagccuauuccaauuguuacccuuaugacgugcccgauuacgcuucucuccggagccugguugccuccagcggaacgcuugaguuuaacgacgaaucuuucaauuggaccggcgugacacagaacggcaccuccagcucuugcaagcgcagauccaauaacagcuuuuucucucggcugaauuggcucacacagcugaaguuuaaauauccugcucuuaacgucaccaugcccaauaacgagaaguucgauaaacuguacaucuggggagugcaucacccuguuacggacaacgaucagauuuuucucuaugcccaagcguccgggcgcaucacagugagcaccaagagaucccagcagacagucauuccgaauaucggcucucggccccgcauuagaaacaucccuagccggaucuccauuuacuggaccaucgugaaacccggggacauucugcugaucaauagcaccggaaaccucauugccccucgcggcuacuucaagaucagaucugggaaguccagcaucaugcggucugacgcucccauuggaaaauguaauagcgagugcaucacaccgaacggcuccauuccuaaugauaagcccuuucagaacgugaaucgcaucacguauggcgccuguccuagauacgucaaacaaaacacccugaagcuggcuacagggaugcggaauguucccgaaaaacagacccgcggaauuuucggcgccaucgcgggguuuaucgagaacggaugggaaggcaugguggacgggugguauggauucagacaucaaaauucugagggcauuggccaggccgcugaucuuaagagcacacaggccgcuaucaaccagauuaaugggaaacucaaccggcugaucggaaagaccaacgagaaguuccaccagauugaaaaagaguuuuccgaaguggagggcagaauccaagaccuugaaaaguacgucgaggauacgaaaauugaccuguggagcuauaaugccgagcuccugguggcccuggaaaaccagcacacaaucgaucucaccgacucugagaugaauaagcuguucgaacgcaccaaaaagcagcuucgggagaacgcugaagauauggggaauggaugcuuuaagaucuaccauaaaugugacaacgcgugcauuggcuccaucagaaaugggacauaugaucacgacguuuaccgcgacgaggcccugaacaaucgguuccagauuaagggcguggagcucaaaagcggauacaaggauuggauccuguggauuucuuuugcuaucuccugcuuccuucugugugucgcccuccugggcuuuaucaugugggccugccaaaaagggaacauuagauguaauaucugcauuuga

SEQ ID NO: 194429 - RNA, 1698 nt, Artificial Sequence
  derived and/or modified CDS sequence (opt5) from hemagglutinin__InfluenzaA__ACF54598
augaaggccaaacugcucgugcugcuuuacgcuuucgucgccaccgacgcggauacaaucugcauuggcuaucacgcuaacaauagcacggacaccguugauacaaucuuugagaagaacguggccgugacccauuccgucaaucugcucgaagacagacacaacgggaaacuguguaaacuuaagggaauugcuccccugcagcucggcaagugcaauaucauuggguggcugcugggaaacccugagugugauucucuccugccggcccggagcugguccuacaucguggaaacacccaauucugagaacggcgccugcuauccuggggacuucaucgauuacgaagaacuucgcgagcaacugagcuccguuucuagccucgaaagauuugagauuuuccccaaggaauccagcuggccuaaucauaccuuuaacggagugacagcuucuuguucccaccggggcaaaagcucuuucuaucgcaaucugcuuuggcugaccaagaaaggcgacuccuaccccaagcucacgaacagcuaugucaauaacaaagggaaggaggugcugguucuguggggagugcaucacccuucuuccagcgaugagcagcagucccucuacucuaauggcaacgccuacgucagcguggcguccagcaacuauaauagacgguuuaccccggaaaucgccgcucgccccaaggugaaagaccagcacgggagaaugaacuacuauuggacacugcuugagccuggagauaccauuaucuucgaagccacaggcaaucugauugcucccugguacgccuuugcgcucucucggggguucgaguccggaaucauuaccagcaacgccucuaugcaugaaugcaauacgaagugucaaacaccucagggcagcaucaacuccaaucugcccuuucagaacauccacccggucaccauuggcgagugcccuaaauauguucgcucuacaaagcugagaauggugaccgggcuucggaauauccccagcauucaguaccgcggacucuucggcgcuaucgccggguuuauugagggaggcuggaccgggaugaucgacggaugguauggcuaccaucaccaaaacgaacagggcuccggguacgcugccgaucagaaaagcacacagaaugccaucaacggaauuacgaauaaggugaacucuaucauugagaaaaugaauacccaauucacagcugucggcaaggaguucaacaaccuggagaagagaauggaaaaucugaacaaaaagguggacgacggguuucucgauaucuggaccuauaaugcggagcugcuuguucugcucgagaacggacggacacuggacuuccacgaucuuaaugugaaaaaccuguacgaaaaggucaaaucccagcucaagaauaacgccaaggagauuggcaauggguguuuugaguucuaucauaaaugcgacaacgaauguauggaaagcgugcgcaauggcaccuacgauuauccuaaguacucugaggaguccaaacugaacagagaaaagaucgacggaguuaaacuggagagcaugggcguguaucagauccucgcuauuuacuccacggucgccucuagccuggugcuucuggucucccucggggccaucucuuuuuggaugugcagcaauggaucccugcaaugccggauuuguaucuga

SEQ ID NO: 194430 - RNA, 1704 nt, Artificial Sequence
  derived and/or modified CDS sequence (opt5) from hemagglutinin__InfluenzaA__ACG50699
auggagaagaucgugcugcuccuggccauugucagccuuguuaaauccgaccagaucugcauuggcuaccacgcuaacaauucuaccgaacaaguggauacaaucauggagaagaacgugacggucacccaugcccaggacauucuggaaaagacacacaaugggaagcucugugaucuggacggagugaaaccccuuauccugagagauugcagcguugcgggcuggcuccuggggaacccuaugugugacgaguucaucaaugugccggaaugguccuauauggucgagaaggcuaaccccgccaaugaucugugcuacccuggaaacuuuaaugacuaugaggaacucaagcaucugcuuucucggauuaaccacuucgagaaaauccagauuauccccaagagcuccuggucugaucaugaagccagccugggcguguccagcgcuuguccuuaccaggggucuuccagcuuuuuccgcaauguuguguggcucauuaaaaagaacaaugccuaucccaccaucaaaagaucuuacaacaauacaaaccaagaggaccugcuuguccuguggggcauucaccacccuaacgaugaggcugaacagacccggcucuaucagaauccgacaaccuacaucuccgugggaacgagcacccugaaccagcgccugauccccaagauugccacaagaucuaaggugaauggccaauccgggcggauggacuuuuucuggaccauccucaaaccuaacgaugcgauuaauuuugagagcaacggaaauuucaucgcccccgaauacgcuuauaagauugucaaaaagggcgacuccgccaucaugaaaucugagguugaauacgggaacugcaauacaaagugucagaccccuaugggagcuaucaacagcuccaugcccuuucauaauauucacccgcugacgaucggcgagugcccuaaauaugucaagagcaacaaacuugugcuggccacagggcuccgcaauucuccccagagagagcggcgcagaaaacggggacuguucggcgcgauugccggcuuuaucgaagggggauggcagggcaugguggacgggugguacggauaucaucacuccaacgagcaaggcagcggguacgcugccgauaaggaaucuacccagaaagcuauugacggagugacaaauaagguuaacagcaucaucgauaaaaugaacacccaguucgaggccgugggccgcgaauuuaauaaccuugagagacggauugagaaucugaacaagaagauggaagacggcuuccucgaugucuggaccuauaaugccgagcugcuggugcucauggaaaacgagcgcacacuggacuuccacgauuccaauguuaaaaaccuuuacgacaaggugagacugcaacuccgggauaaugcuaaagaacuggggaacggauguuuugaguucuaccauaagugcgacaaugaguguauggaaucugucagaaacggcacguaugauuacccucaguauagcgaggaagcgcgccuuaaacgggaggagaucuccggggugaagcuggaaagcauuggaaccuaccagauccucucuauuuauuccacagucgccagcucucuggcucuggccaucaugguggccggccucucccuguggaugugcagcaaugggucccuucagugcagaauuuguaucuga

SEQ ID NO: 194431 - RNA, 1701 nt, Artificial Sequence; identical to SEQ ID NO: 194000
  derived and/or modified CDS sequence (opt5) from hemagglutinin__InfluenzaA__ACG70142

SEQ ID NO: 194432 - RNA, 1701 nt, Artificial Sequence; identical to SEQ ID NO: 194000
  derived and/or modified CDS sequence (opt5) from hemagglutinin__InfluenzaA__ACG70153

SEQ ID NO: 194433 - RNA, 1701 nt, Artificial Sequence
  derived and/or modified CDS sequence (opt5) from hemagglutinin__InfluenzaA__ACG80410
augaagaccaucauugcccugagcuacauccucugccugguguucgcucagaaacuucccggcaacgacaauuccacagccacgcugugucucgggcaccaugcggucccuaacggaaccauuguuagaacaaucaccaaugaucaaauugaggugacaaacgcuaccgaacuggugcagucuagcuccacaggcgagaucugcgacucuccgcaccagauccuugauggggaaaauuguacccugauugacgcccuccugggagauccccagugcgacggcuuucaaaacaagaaaugggaucuguucgucgagcggagcaaggccuauuccaauuguuacccuuaugacgugcccgauuacgcuucucuccgcagccugguugccuccagcgggacgcuugaauuuaacaaugagucuuucaacuggaccggagugacacagaauggcaccuccagcgcuugcaucagacggucuaacaauuccuuuuucagccgccugaacuggcucacacaucugagauuuaaauauccugcccuuaaugucaccaugcccaacaacgagcaguucgacaagcuguacauuuggggcgugcaccauccugggacggauaaugaccagaucuuucucuaugcgcaagccucuggacggauuacaguuuccaccaagcgcagccagcagacagugaucccgaacauuggcuccagaccccggguccgcaauaucccuucuagaaucagcauuuacuggaccaucgugaaacccggggauauucugcugaucaacuccaccggaaaucucauugcuccucggggcuacuucaagauccgcaacgggaaaagcucuaucaugagauccgacgcccccauuggaaaguguaauagcgaaugcaucacaccgaacggcucuauuccuaaugacaaacccuuucagaacgugaaucggaucacguauggcgcuuguccucgcuacgucaagcaaaacacccugaaacuugccacagggaugagaaauguucccgagaagcagacccggggaauuuucggcgcgaucgccggguuuaucgaaaacggaugggagggcaugguggaugggugguauggauucagacaccagaauagcgagggccgcggccaagcugccgaccugaaguccacacaggcugccauugaucagaucaacgggaaacucaaccggcugauuggaaagaccaaugaaaaauuccaccagaucgagaaggaauuuucugagguggaaggccgcauucaagaccuugagaaauacgucgaggauacgaagaucgaccuguggagcuauaacgccgaacuccugguggcucuggagaaucagcauacaauugaucucaccgacuccgaaaugaacaagcuguucgagaaaaccaagaaacagcuuagagaaaaugcggaggauauggggaacggaugcuuuaagaucuaccacaaaugugacaaugccugcaucggcagcauucggaacgggacauaugaucaugacguuuacagagacgaggcucugaauaaccgcuuccagaucaagggcguggaacucaagucuggauacaaagauuggauucuguggaucuccuuugccauuagcugcuuccuucugugugucgcccuccugggcuuuaucaugugggcuugccaaaaggggaauauccgguguaacauuugcaucuga

SEQ ID NO: 194434 - RNA, 1701 nt, Artificial Sequence
  derived and/or modified CDS sequence (opt5) from hemagglutinin__InfluenzaA__ACG80420
augcagaccaucauugcccugagcuacauccucugccugguguucgcucaaaaacuucccggcaacgacaauuccacagccacgcugugucucgggcaccaugcggucccuaacggaaccauuguuagaacaaucaccaaugaucagauugaggugacaaacgcuaccgaacuggugcagucuagcuccacaggcgagaucugcgacucuccgcaccagauccuugauggggaaaauuguacccugauugacgcccuccugggagauccccaaugcgacggcuuucagaacaagaagugggaucuguucgucgagcggagcaaagccuauuccaauuguuacccuuaugacgugcccgauuacgcuucucuccgcagccugguugccuccagcgggacgcuugaauuuaacaaugagucuuucaacuggaccggagugacacagaauggcaccuccagcgcuugcaucagacggucuaacaauuccuuuuucagccgccugaacuggcucacacaucugagauuuaaguauccugcccuuaaugucaccaugcccaacaacgagcaguucgacaaacuguacauuuggggcgugcaccauccugggacggauaaugaccaaaucuuucucuaugcgcaggccucuggacggauuacaguuuccaccaagcgcagccagcagacagugaucccgaacauuggcuccagaccccggguccgcaauaucccuucuagaaucagcauuuacuggaccaucgugaagcccggggauauucugcugaucaacuccaccggaaaucucauugcuccucggggcuacuucaaaauccgcaacggaaagagcucuaucaugagauccgacgcccccauugggaaauguaauagcgaaugcaucacaccgaacggcucuauuccuaaugacaagcccuuucaaaacgugaaucggaucacguauggcgcuuguccucgcuacgucaaacagaacacccugaaacuugccacagggaugagaaauguucccgagaagcagacccggggaauuuucggcgcgaucgccggguuuaucgaaaacggaugggagggcaugguggaugggugguauggauucagacaccaaaauagcgagggccgcggccaggcugccgaccugaaguccacacaggcugccauugaucagaucaacgggaagcucaaccggcugauuggaaaaaccaaugaaaaguuccaccaaaucgagaaagaauuuucugagguggaaggccgcauucaggaccuugagaaguacgucgaggauacgaaaaucgaccuguggagcuauaacgccgaacuccugguggcucuggagaaucagcauacaauugaucucaccgacuccgaaaugaacaagcuguucgagaagaccaaaaagcagcuuagagaaaaugcggaggauauggggaacggaugcuuuaaaaucuaccacaagugugacaaugccugcaucggcagcauucggaacgggacauaugaucaugacguuuacagagacgaggcucugaauaaccgcuuccaaaucaaaggcguggaacucaagucuggauacaaggauuggauucuguggaucuccuuugccauuagcugcuuccuucugugugucgcccuccugggcuuuaucaugugggcuugccagaaagggaauauccgguguaacauuugcaucuga

SEQ ID NO: 194435 - RNA, 1701 nt, Artificial Sequence; identical to SEQ ID NO: 194433
  derived and/or modified CDS sequence (opt5) from hemagglutinin__InfluenzaA__ACG80426

SEQ ID NO: 194436 - RNA, 1701 nt, Artificial Sequence; identical to SEQ ID NO: 194433
  derived and/or modified CDS sequence (opt5) from hemagglutinin__InfluenzaA__ACG80430

SEQ ID NO: 194437 - RNA, 1701 nt, Artificial Sequence
  derived and/or modified CDS sequence (opt5) from hemagglutinin__InfluenzaA__ACG80436
augaagaccaucauugcccugagcuacauccucugccugguguucgcucagaaauuucccggcaacgacaauuccacagccacgcuuugucuggggcaccaugcggucccuaacggaaccauuguuaagacaaucaccaaugaucaaauugaggugacaaacgcuaccgaacucgugcagucuagcuccacaggcgagaucugcgacucuccgcaccagauccuggauggggaaaauuguacccuuauugacgcccugcucggagauccccagugcgacggcuuccaaaacaaaaagugggaucuguuugucgagagaagcaaagccuauuccaauuguuacccuuaugacgugcccgauuacgcuucucugcggagccucguugccuccagcgggacgcuggaguucaacaaugaaucuuuuaacuggaccggagugacacagaauggcaccuccagcgcuugcauccgcagaucuaacaauuccuucuuuagccggcuuaacuggcugacacaucuccgcuucaaguauccugcccugaaugucaccaugcccaacaacgagaauuuugacaaacuuuacauuuggggcgugcaccauccugggacggauaacgaccagaucuuccuguaugcgcaggccucuggaagaauuacaguuuccaccaagcggagccaacagacagugaucccgaauauuggcucccgccccagaguccggaacaucccuucucgcaucagcauuuacuggaccaucgugaagcccggggauauucuccugaucaauuccaccggaaaccugauugcuccuagaggcuacuuuaaaauccggagcgggaagucuuccaucaugcgcagcgacgcccccauuggaaaauguaauucugaaugcaucacaccgaacggcagcauuccuaaugacaagcccuuccagaacgugaauagaaucacguauggcgcuuguccucgguacgucaagcagaacacccucaaacuggccacagggaugcgcaauguucccgagaagcaaaccagaggaauuuuuggcgcgaucgccggguucaucgaaaacggaugggagggcaugguggaugggugguauggauuccggcaccaaaauuccgagggcauuggccaggcugccgaccuuaaaucuacacaggcugcccuggaucagaucaacgggaagcucaacagacugauuggaaaaaccaaugaaaaguuucaccagaucgagaaagaguucagcgaaguggaaggccgcauucaggaccuugagaaguacgucgaggauacgaagaucgaccugugguccuauaacgccgaacuccugguggcucuggagaaucaacauacaauugaucucaccgacagcgaaaugaacaaacuguuugagaagaccaaaaagcagcuucgggaaaaugcggaggauauggggaacggaugcuucaaaaucuaccacaagugugacaaugccugcaucggcucuauuagaaacgggacauaugaucauaauguuuaccgcgacgaggcucugaacaaucgguuucagaucaagggcguggaacucaaauccggauacaaggacuggauucuguggaucagcuucgccauuucuugcuuucuucugugugucgcccuccugggcuucaucaugugggcuugccagaaagggaacaucagauguaauauuugcaucuga

SEQ ID NO: 194438 - RNA, 1701 nt, Artificial Sequence
  derived and/or modified CDS sequence (opt5) from hemagglutinin__InfluenzaA__ACG80445
augaagaccaucauugcccugagcuacauccucugccugguguucgcucagaaacuucccggcaacgacaauuccacagccacgcugugucucgggcaccaugcggucccuaacggaaccauuguuagaacaaucaccaaugaucaaauugaggugacaaacgcuaccgaacuggugcagucuagcuccacaggcgagaucugcgacucuccgcaccagauccuugauggggaaaauuguacccugauugacgcccuccugggagauccccagugcgacggcuuucaaaacaagaaaugggaucuguucgucgagcggagcaaggccuauuccaauuguuacccuuaugacgugcccgauuacgcuucucuccgcagccugguugccuccagcgggacgcuugaauuuaacaaugagucuuucaacuggaccggagugacacagaauggcaccuccagcgcuugcaucagacggucuaacaauuccuuuuucagccgccugaacuggcucacacaucugagauuuaaauauccugcccuuaaugucaccaugcccaacaacgagcaguucgacaagcuguacauuuggggcgugcaccauccugggacggauaaugaccagaucuuucucuaugcgcaagccucuggacggauuacaguuuccaccaagcgcagccagcagacagugaucccgaacauuggcuccagaccccggguccgcaauaucccuucuagaaucagcauuuacuggaccaucgugaaacccggggauauucugcugaucaacuccaccggaaaucucauugcuccucggggcuacuucaagauccgcaacgggaaaagcucuaucaugagauccgacgcccccauuggaaaguguaauagcgaaugcaucacaccgaacggcucuauuccuaaugacaaacccuuucagaacgugaaucggaucacguauggcgcuuguccucgcuacgucaagcaaaacacccugaaacuugccacagggaugagaaauguucccgagaagcagacccggggaauuuucggcgcgaucgccggguuuaucgaaaacggaugggagggcaugguggaugggugguauggauucagacaccagaauagcgagggccgcggccaagcugccgaccugaaguccacacaggcugccauugaucagaucaacgggaaacucaaccggcugauuggaaagaccaaugaaaaauuccaccagaucgagaaggaauuuucugagguggaaggccgcauucaagaccuugagaaauacgucgaggauacgaagaucgaccuguggagcuauaacgccgaacuccugguggcucuggagaaucagcauacaauugaucucaccgacuccgaaaugaacaagcuguucgagaaaaccaagaaucagcuuagagaaaacgcggaggauauggggaauggaugcuuuaaaaucuaccacaagugugacaacgccugcaucggcagcauucggaaugggacauaugaucaugacguuuacagagacgaggcucugaacaaucgcuuccagaucaaaggcguggaacucaagucuggauacaaggauuggauucuguggaucuccuuugccauuagcugcuuccuucugugugucgcccuccugggcuuuaucaugugggcuugccaaaaagggaacauccgguguaauauuugcaucuga

SEQ ID NO: 194439 - RNA, 1701 nt, Artificial Sequence; identical to SEQ ID NO: 194433
  derived and/or modified CDS sequence (opt5) from hemagglutinin__InfluenzaA__ACG80454

SEQ ID NO: 194440 - RNA, 1701 nt, Artificial Sequence; identical to SEQ ID NO: 194433
  derived and/or modified CDS sequence (opt5) from hemagglutinin__InfluenzaA__ACG80463

SEQ ID NO: 194441 - RNA, 1701 nt, Artificial Sequence
  derived and/or modified CDS sequence (opt5) from hemagglutinin__InfluenzaA__ACG80472
augaagaccaucauugcccugagcuacauccucugccugguguucgcucagaaacuucccggcaacgacaauuccacagccacgcugugucucgggcaccaugcggucccuaacggaaccauuguuagaacaaucaccaaugaucaaauugaggugacaaacgcuaccgaacuggugcagucuagcuccacaggcgagaucugcgacucuccgcaccagauccuugauggggaaaauuguacccugauugacgcccuccugggagauccccagugcgacggcuuucaaaacaagaaaugggaucuguucgucgagcggagcaaggccuauuccaauuguuacccuuaugacgugcccgauuacgcuucucuccgcagccugguugccuccagcgggacgcuugaauuuaacaaugagucuuucaacuggaccggagugacacagaauggcaccuccagcgcuugcaucagacggucuaacaauuccuuuuucagccgccugaacuggcucacacaucugagauuuaaauauccugcccuuaaugucaccaugcccaacaacgagcaguucgacaagcuguacauuuggggcgugcaccauccugggacggauaaugaccagaucuuucucuaugcgcaagccucuggacggauuacaguuuccaccaagcgcagccagcagacagugaucccgaacauuggcuccagaccccggguccgcaauaucccuucuagaaucagcauuuacuggaccaucgugaaacccggggauauucugcugaucaacuccaccggaaaucucauugcuccucggggcuacuucaagauccgcagcgggaaaucuuccaucaugagaagcgacgcccccauuggaaaguguaacucugaaugcaucacaccgaauggcagcauuccuaacgacaaacccuuucagaaugugaaccggaucacguauggcgcuuguccucgcuacgucaagcaaaauacccugaaacuugccacagggaugagaaacguucccgagaagcagacccggggaauuuucggcgcgaucgccggguuuaucgaaaauggaugggagggcaugguggaugggugguauggauucagacaccagaacuccgagggcauuggccaagcugccgaccugaagucuacacaggcugcccucgaucagaucaaugggaaacugaaccgccuuauuggaaagaccaacgaaaaauuccaccagaucgagaaggaauuuagcgagguggaaggccggauucaagaccuggagaaauacgucgaggauacgaagaucgaccucugguccuauaaugccgaacugcugguggcucucgagaaccagcauacaauugaucugaccgacagcgaaaugaauaaacuuuucgagaagaccaagaaacagcugagagaaaacgcggaggauauggggaauggaugcuuuaagaucuaccacaaaugugacaacgccugcaucggcucuauucgcaaugggacauaugaucauaacguuuaccgggacgaggcucucaauaacagauuccagaucaagggcguggaacugaaguccggauacaaagacuggauucuuuggaucagcuuugccauuucuugcuuccugcucugugucgcccugcugggcuuuaucaugugggcuugccaaaaggggaauauccgcuguaacauuugcaucuga

SEQ ID NO: 194442 - RNA, 1701 nt, Artificial Sequence
  derived and/or modified CDS sequence (opt5) from hemagglutinin__InfluenzaA__ACH69558
augaagaccaucauugcccugagcuacauccucugccugguguucgcucagaaacuucccggcaacgacaauuccacagccacgcugugucucgggcaccaugcggucccuaacggaaccauuguuaagacaaucaccaaugaucaaauugaggugacaaacgcuaccgaacuggugcagucuagcuccacaggcgggaucugcaauucuccgcaccagauccuugacggagagaacuguacccugauugaugcccuccugggcgacccccagugcgauggguuucaaaauaaaaagugggaccuguucgucgaaagaagcaaagccuauuccaacuguuacccuuaugaugugcccgacuacgcuucucuccggagccugguugccuccagcggaacgcuugaguuuaauaacgaaucuuucaauuggaccggcgugacacagaacggcaccuccagcgcuugcaagcgcagaucuaauaacuccuuuuucagccggcugaauuggcucacacaucugcgcuuuaaguauccugcccuuaacgucaccaugcccaacaaugagaaauucgauaagcuguacaucuggggagugcaccauccugggacggacaacgaucagauuuuucucuaugcgcaggccucuggcagaaucacaguuuccaccaaacggagccaacagacagugauuccgaauaucgggucccgccccagaguccggaacauuccuucucgcaucagcaucuacuggaccauugugaagcccggagacauccugcugauuaauuccaccggcaaccucaucgcuccuagaggguacuucaaaauucggagcggaaagucuuccaucaugcgcagcgaugcccccaucggcaaguguaauucugagugcauuacaccgaacggcagcaucccuaaugacaaacccuuucagaacgugaauagaauuacguauggggcuuguccucgguacgucaagcagaacacccugaaacuugccacaggaaugcgcaauguucccgaaaagcaaaccagaggcaucuucggggcgauugccggauuuaucgagaacggcugggaagggaugguggacggaugguauggcuuccggcaccaaaauuccgagggcaucgggcaggcugccgaucugaaaucuacacaggcugccauuaaccagaucaacggaaagcucaauagacugauuggcaaaaccaacgagaaguuccaccagaucgaaaaggaguuuagcgaaguggaggggcgcauucaggaccuugaaaaauacgucgaggauacgaagaucgaccugugguccuauaaugccgagcuccugguggcucuggaaaaccaacauacaauugaucucaccgacagcgagaugaauaaacuguucgaacggaccaagaaacagcuuagagagaacgcggaagauaugggaaauggcugcuuuaagaucuaccacaagugugacaacgccugcaucgggucuauucgcaauggcacauaugaucaugacguuuaccgggaugaggcucugaacaauagauuccagaucaaaggaguggagcucaaguccggcuacaaagacuggauucuguggaucagcuuugccauuucuugcuuccuucugugugucgcccuccugggguuuaucaugugggcuugccagaagggaaacauccgcuguaauauuugcaucuga

SEQ ID NO: 194443 - RNA, 1701 nt, Artificial Sequence
  derived and/or modified CDS sequence (opt5) from hemagglutinin__InfluenzaA__ACH69569
augaagaccaucauugcccugagcuacauccucugccugguguucgcucagaaacuucccggcaacgacaauuccacagccacgcugugucucgggcaccaugcggucccuaacggaaccauuguuaagacaaucaccaaugaucaaauugaggugacaaacgcuaccgaacuggugcagucuagcuccacaggcgggaucugcaauucuccgcaccagauccuugacggagagaacuguacccugauugaugcccuccugggcgacccccagugcgauggguuucaaaauaaaaagugggaccuguucgucgaaagaagcaaagccuauuccaacuguuacccuuaugaugugcccgacuacgcuucucuccggagccugguugccuccagcggaacgcuugaguuuaauaacgaaucuuucaauuggaccggcgugacacagaacggcaccuccagcgcuugcaagcgcagaucuaauaacuccuuuuucagccggcugaauuggcucacacaucugaaguuuaaauauccugcccuuaacgucaccaugcccaacaaugagaaguucgauaaacuguacaucuggggagugcaccauccugggacggacaacgaucagauuuuucucuaugcgcaggccucuggccgcaucacaguuuccaccaagagaagccaacagacagugauuccgaauaucgggucccggccccgcgucagaaacauuccuucucggaucagcaucuacuggaccauugugaaacccggagacauccugcugauuaauuccaccggcaaccucaucgcuccucgcggguacuucaagauuagaagcggaaagucuuccaucaugcggagcgaugcccccaucggcaaauguaauucugagugcauuacaccgaacggcagcaucccuaaugacaagcccuuucagaacgugaaucgcauuacguauggggcuuguccuagauacgucaaacagaacucccugaagcuggccaccggaaugcggaauguucccgaaaaacaaacacgcggcaucuucggggcgauugccggauuuaucgagaacggcugggaagggaugguggacggaugguauggcuucagacaccaaaauucugagggcaucgggcaggcugccgaucuuaagagcacccaggcugccauuaaccagaucaacggaaaacucaaucggcugauuggcaagacaaacgagaaguuccaccagaucgaaaaagaguuuuccgaaguggaggggcgcauucaggaccuugaaaaguacgucgaggauaccaaaaucgaccuguggagcuauaaugccgagcuccugguggcucuggaaaaccaacauacgauugaucucacagacucugagaugaauaagcuguucgaaagaaccaaaaagcagcuucgggagaacgcggaagauaugggaaauggcugcuuuaagaucuaccacaaaugugacaacgccugcaucggguccauuagaaauggcaccuaugaucaugacguuuaccgcgaugaggcucugaacaaucgguuccagaucaagggaguggagcucaaaagcggcuacaaggacuggauucuguggaucucuuuugccauuuccugcuuccuucugugugucgcccuccugggguuuaucaugugggcuugccagaaaggaaacaucagauguaauauuugcaucuga

SEQ ID NO: 194444 - RNA, 1701 nt, Artificial Sequence
  derived and/or modified CDS sequence (opt5) from hemagglutinin__InfluenzaA__ACH69580
augaagaccaucauugcccugagcuacauccucugccugguguucgcucagaaacuucccggcaacgacaauuccacagccacgcugugucucgggcaccaugcggucccuaacggaaccauuguuaagacaaucaccaaugaucaaauugaggugacaaacgcuaccgaacuggugcagucuagcuccacaggcgggaucugcgacucuccgcaccagauccuugauggagagaauuguacccugauugacgcccuccugggcgauccccagugcgacgauuuucaaaacaaaaagugggaccuguucgucgaaagaagcaaagccuauuccaauuguuacccuuaugaugugcccgacuacgcuucucuccggagccugguugccuccagcgggacgcuugaguuuaacaaugaaucuuucaacuggaccggagugacacagaauggcaccuccagcgcuugcaagcgcagaucuaacaauuccuuuuucagccggcugaacuggcucacacaucugaaguuuaaauauccugcccuuaaugucaccaugcccaacaacgagaaguucgauaaacuguacaucuggggcgugcaccauccugggacggacaaugaucagauuuuucucuaugcgcaggccucuggacgcaucacaguuuccaccaagagaagccaacagacagugauuccgaacaucggcucccggccccgcgucagaaauauuccuucucggaucagcaucuacuggaccauugugaaacccggggacauccugcugauuaacuccaccggaaaucucaucgcuccucgcggcuacuucaagauuagaagcgggaagucuuccaucaugcggagcgacgcccccaucggaaaauguaacucugagugcauuacaccgaauggcagcaucccuaacgauaagcccuuucagaaugugaaccgcauuacguauggcgcuuguccuagauacgucaaacagaauacccugaaacuugccacagggaugcggaacguucccgaaaagcaaacccgcggaaucuucggcgcgauugccggguuuaucgagaauggaugggaaggcaugguggacgggugguauggauucagacaccagaacuccgagggcaucggccaggcugccgaucugaagucuacacaagcugccauuaaucagaucaacgggaaacucaaccggcugauuggaaagaccaaugagaaguuccaccagaucgaaaaagaguuuagcgaaguggagggccgcauucaggaccuugaaaaguacgucgaggauacgaaaaucgaccugugguccuauaacgccgagcuccugguggcucuggaaaaucaacauacaauugaucucaccgacagcgagaugaacaagcuguucgaaagaaccaaaaagcagcuucgggagaaugcggaagauauggggaacggaugcuuuaagaucuaccacaaaugugacaaugccugcaucggcucuauuagaaacgggacauaugaucaugacguuuaccgcgacgaggcucugaauaaccgguuccagaucaagggcguggagcucaaauccggauacaaggauuggauucuguggaucagcuuugccauuucuugcuuccuucugugugucgcccuccugggcuuuaucaugugggcuugccagaaagggaauaucagauguaacauuugcaucuga

SEQ ID NO: 194445 - RNA, 1701 nt, Artificial Sequence
  derived and/or modified CDS sequence (opt5) from hemagglutinin__InfluenzaA__ACH69591
augaagaccaucauugcccugagcuacauccucugccuggcuuucgcccagaaacuucccggcaacgacaauuccacagcgacgcugugucucgggcaccaugcugugccuaacggaacccuggucaagacaauuaccaaugaucaaaucgagguuacaaacgccaccgaacuugugcagucuagcuccacaggcagaauuugcgacucuccgcaccagauccuggauggggagaauuguacccucaucgacgcccugcugggagauccccauugcgacggcuuucagaacaaagaaugggaucucuucguggagcggagcaaggcuuauuccaauuguuacccuuaugacguccccgauuacgccucucugcgcagccuuguggcuuccagcgggacgcuggaauuuaacaaugagucuuucaacuggaccggaguugcccaaaauggcacauccagcgcgugcaaaagacggucuauuaacuccuuuuucagccgccucaauuggcugcaccagcuuaaguauagauacccugcccugaacgugaccaugcccaauaacgacaaguuugauaaacucuauaucuggggcguccaucacccuucuacagacuccgaucagauuagcguguacgcucaggccuccgggcggguuaccgugucuacgaagcgcagccaacagacagucaucccgaacauuggauccagacccugggugcggggcaucagcucucgcauuuccaucuacuggaccaucgugaaaccuggggacauucugcugaucaauagcacaggaaaccucauugcucccagaggcuauuucaagauccggucugggaaaagcuccauuaugcgcucugacgccccuaucggaaaguguaauagcgagugcaucacccccaacggcuccauuccgaaugauaagccuuuucagaacgucaauagaaucaccuacggcgcguguccccgguauguuaaacagaacacacugaaacuugccacggggaugcgcaaugugccugaaaagcaaaccagaggaauuuucggcgcuaucgccggguuuauugagaacggaugggaaggcaugauggacgggugguacggauuccggcaccagaauagcgagggcacaggccaggcugccgaucugaagucuacccaagccgcuaucaaccagaucaaugggaaacucaacaagcugauugagaaaacaaaugaaaaguuucaucagaucgagaacgaguucuccgaaguggaaggacgcauucaggaccuugagaaguaugucgaggauaccaaaaucgaccuguggagcuacaacgcggaacuccugguggcccuggagaaucaacacacgauugaucucacagacucugaaaugaacaagcuguucgagagaacccggaaacagcuuagagaaaaugcugaggauaugggcaacgggugcuuuaagaucuaucauaaaugugacaaugccugcauuggauccauccgcaacggcaccuacgaucacgacguuuaccgggacgaggcccugaauaacagauuccagaucaaggggguggaacucaagagcggcuauaaagauuggauucuguggaucuccuuugcuauuucuugcuuccuucugugugucgugcuccugggauuuaucaugugggccugccagaagggcaauauucgcuguaacaucugcaucuga

SEQ ID NO: 194446 - RNA, 1701 nt, Artificial Sequence
  derived and/or modified CDS sequence (opt5) from hemagglutinin__InfluenzaA__ACH69602
augaagaccaucauugcccugagcuacauccucugccuggcuuucgcccagaaacuucccggcaacgacaauuccacagcgacgcugugucucgggcaccaugcugugccuaacggaacccuggucaagacaauuaccaaugaucaaaucgagguuacaaacgccaccgaacuugugcagucuagcuccacaggcagaauuugcgacucuccgcaccagauccuggauggggagaauuguacccucaucgacgcccugcugggagauccccauugcgacggcuuucagaacaaagaaugggaucucuucguggagcggagcaaggcuuauuccaauuguuacccuuaugacguccccgauuacgccucucugcgcagccuuguggcuuccagcgggacgcuggaauuuaacaaugagucuuucaacuggaccggaguugcccaaaauggcacauccagcgcgugcaaaagacggucuauuaacuccuuuuucagccgccucaauuggcugcaccagcuuaaguauagauacccugcccugaacgugaccaugcccaauaacgacaaguuugauaaacucuauaucuggggcguccaucacccuucuacagacuccgaucagauuagcguguacgcucaggccuccgggcggguuaccgugucuacgaagcgcagccaacagacagucaucccgaacauuggauccagacccugggugcggggcaucagcucucgcauuuccaucuacuggaccaucgugaaaccuggggacauucugcugaucaauagcacaggaaaccucauugcucccagaggcuauuucaagauccggucugggaaaagcuccauuaugcgcucugacgccccuaucggaaaguguaauagcgagugcaucacccccaacggcuccauuccgaaugauaagccuuuucagaacgucaauagaaucaccuacggcgcguguccccgguauguuaaacagaacacacugaaacuugccacggggaugcgcaaugugccugaaaagcaaaccagaggaauuuucggcgcuaucgccggguuuauugagaacggaugggaaggcaugauggacgggugguacggauuccggcaccagaauagcgagggcacaggccaggcugccgaucugaagucuacccaagccgcuaucaaccagaucaaugggaaacucaacaagcugauugagaaaacaaaugaaaaguuucaucagaucgagaaggaguucuccgaaguggaaggacgcauucaggaccuugagaaauaugucgaggauaccaagaucgaccuguggagcuacaacgcggaacuccugguggcccuggagaaccaacacacgauugaucucacagacucugaaaugaauaaacuguucgagagaacccggaagcagcuuagagaaaacgcugaggauaugggcaaugggugcuuuaaaaucuaucauaagugugacaacgccugcauuggauccauccgcaauggcaccuacgaucacgacguuuaccgggacgaggcccugaacaauagauuccagaucaaggggguggaacucaaaagcggcuauaaggauuggauucuguggaucuccuuugcuauuucuugcuuccuucugugugucgugcuccugggauuuaucaugugggccugccagaaaggcaacauucgcuguaauaucugcaucuga

SEQ ID NO: 194447 - RNA, 1701 nt, Artificial Sequence
  derived and/or modified CDS sequence (opt5) from hemagglutinin__InfluenzaA__ACH69613
augaagaccaucauugcccugagcuacauccucugccuggcuuucgcccagaaacuucccggcaacgacaauuccacaccuacgcugugucucgggcaccaugcggugccgaacggaacccuggucaagacaauuaccaaugaucaaaucgagguuacaaacgcuaccgaacuugugcagucuagcuccacaggcgggauuugcgacucuccccaccagaucaucgauggagagaauuguacccugauugacgcccuccugggcgauccucauugcgacggguuucagaacaaagaaugggaucuguucguggagagaagcaaggccuauuccaauuguuaccccuaugacgucccugauuacgcuucucuccggagccugguggccuccagcggaacgcuugaauuuaacaaugagucuuucaacuggaccggcguugcucaaaauggcacauccagcgccugcaaacgcagaucuaucaacuccuuuuucagccggcugaauuggcuccaccagcugaaguaucgcuaccccgcgcuuaacgugaccaugccuaauaacgacaaguuugauaaacuguauauuuggggaguccaucacccgucuacagacuccgaucagaucagcguguacgcccaggcuuccgggagaguuaccgugucuacgaagcggagccaacagacagucauucccaacaucggcucccgcccuugggugagagggauuagcucucggaucuccaucuacuggaccauugugaaacccggagacauccuccugauuaauagcacaggcaacccuaucgcuccccgcggguauuucaagauuagaucuggaaaaagcuccaucaugcggucugacgccccgaucggcaaguguaauagcgagugcauuaccccuaacggcuccauccccaaugauaagccuuuucagaacgucaaucgcauuaccuacggggccugucccagauauguuaaacagaacacacugaagcucgcgacgggaaugcggaaugugcccgaaaaacaaacccgcggcaucuucggggccauugcuggauuuaucgagaacggcugggaagggaugauggacggaugguacggccugagacaccagaauagcgagggcacagggcaggccgcugaucuuaagucuacccaagccgccaucaaccagauuaauggaaaacugaacaagcucaucgagaaaacaaaugaaaaguuccaucagauugagaacgaauuuuccgagguggaaggccggauccaggaccuggagaaguaugucgaggauaccaaaauugaccuuuggagcuacaacgcugaacugcucguggcgcuggagaaucaacacacgaucgaucugacagacucugaaaugaacaagcuguucgagagaacccgcaaacagcugcgggaaaaugccgaggauauggggaacggaugcuucaagauuuaucauaaaugugacaaugcuugcaucggcuccaucagaaacgggaccuacgaucacgacguuuaccgcgacgaggcccuuaauaaccgguuucagauuaagggcguggaacucaagagcggauauaaagauuggauccucuggauuuccuucgccaucucuugcuuucugcuuugugucgugcugcucggcuucauuaugugggcuugccagaaggggaauaucagauguaacaucugcauuuga

SEQ ID NO: 194448 - RNA, 1701 nt, Artificial Sequence; identical to SEQ ID NO: 192702
  derived and/or modified CDS sequence (opt5) from hemagglutinin__InfluenzaA__ACH82060

SEQ ID NO: 194449 - RNA, 1701 nt, Artificial Sequence; identical to SEQ ID NO: 194388
  derived and/or modified CDS sequence (opt5) from hemagglutinin__InfluenzaA__ACI06123

SEQ ID NO: 194450 - RNA, 1701 nt, Artificial Sequence; identical to SEQ ID NO: 194388
  derived and/or modified CDS sequence (opt5) from hemagglutinin__InfluenzaA__ACI06126

SEQ ID NO: 194451 - RNA, 1701 nt, Artificial Sequence; identical to SEQ ID NO: 194388
  derived and/or modified CDS sequence (opt5) from hemagglutinin__InfluenzaA__ACI06127

SEQ ID NO: 194452 - RNA, 1701 nt, Artificial Sequence; identical to SEQ ID NO: 194388
  derived and/or modified CDS sequence (opt5) from hemagglutinin__InfluenzaA__ACI06129

SEQ ID NO: 194453 - RNA, 1701 nt, Artificial Sequence; identical to SEQ ID NO: 194388
  derived and/or modified CDS sequence (opt5) from hemagglutinin__InfluenzaA__ACI06130

SEQ ID NO: 194454 - RNA, 1701 nt, Artificial Sequence; identical to SEQ ID NO: 194388
  derived and/or modified CDS sequence (opt5) from hemagglutinin__InfluenzaA__ACI06132

SEQ ID NO: 194455 - RNA, 1701 nt, Artificial Sequence; identical to SEQ ID NO: 194390
  derived and/or modified CDS sequence (opt5) from hemagglutinin__InfluenzaA__ACI06133

SEQ ID NO: 194456 - RNA, 1701 nt, Artificial Sequence; identical to SEQ ID NO: 194390
  derived and/or modified CDS sequence (opt5) from hemagglutinin__InfluenzaA__ACI06134

SEQ ID NO: 194457 - RNA, 1701 nt, Artificial Sequence; identical to SEQ ID NO: 194390
  derived and/or modified CDS sequence (opt5) from hemagglutinin__InfluenzaA__ACI06135

SEQ ID NO: 194458 - RNA, 1701 nt, Artificial Sequence; identical to SEQ ID NO: 194390
  derived and/or modified CDS sequence (opt5) from hemagglutinin__InfluenzaA__ACI06136

SEQ ID NO: 194459 - RNA, 1701 nt, Artificial Sequence; identical to SEQ ID NO: 194390
  derived and/or modified CDS sequence (opt5) from hemagglutinin__InfluenzaA__ACI06137

SEQ ID NO: 194460 - RNA, 1701 nt, Artificial Sequence; identical to SEQ ID NO: 194390
  derived and/or modified CDS sequence (opt5) from hemagglutinin__InfluenzaA__ACI06138

SEQ ID NO: 194461 - RNA, 1701 nt, Artificial Sequence; identical to SEQ ID NO: 194390
  derived and/or modified CDS sequence (opt5) from hemagglutinin__InfluenzaA__ACI06139

SEQ ID NO: 194462 - RNA, 1701 nt, Artificial Sequence; identical to SEQ ID NO: 194390
  derived and/or modified CDS sequence (opt5) from hemagglutinin__InfluenzaA__ACI06140

SEQ ID NO: 194463 - RNA, 1701 nt, Artificial Sequence; identical to SEQ ID NO: 194390
  derived and/or modified CDS sequence (opt5) from hemagglutinin__InfluenzaA__ACI06141

SEQ ID NO: 194464 - RNA, 1701 nt, Artificial Sequence; identical to SEQ ID NO: 194390
  derived and/or modified CDS sequence (opt5) from hemagglutinin__InfluenzaA__ACI06142

SEQ ID NO: 194465 - RNA, 1701 nt, Artificial Sequence; identical to SEQ ID NO: 194390
  derived and/or modified CDS sequence (opt5) from hemagglutinin__InfluenzaA__ACI06143

SEQ ID NO: 194466 - RNA, 1701 nt, Artificial Sequence
  derived and/or modified CDS sequence (opt5) from hemagglutinin__InfluenzaA__ACI06144
augaagaccaucauugcccugagcuacaucuucugccucgcucugggccaggaccuucccgggaacgauaauuccacagccacgcugugucucggacaccaugcggugccuaacggcacccuggucaaaacaauuaccgacgaucaaaucgagguuacaaaugcuaccgaacuugugcagucuagcuccacagggaagauuugcaacaauccgcacagaauccuggacggaaucgauuguacccucauugacgcccugcugggcgauccccauugcgacguguuucagaacgagacgugggaucucuucgucgaacggucuaaagccuuuagcaauuguuauccuuacgacgugcccgauuaugcuucccugcgcucucuuguugccagcuccgggacccuggaguucaucacagaaggauuuaccuggacaggcgugacccagaacggcgggagcaaugcuugcaagagaggaccuggcucuggguucuuuucccggcucaacuggcugacgaaaagcggaucuacauaccccguccuuaaugugaccaugccuaacaaugacaacuucgauaagcuguauauuuggggcguucaccauccguccacaaaucaagagcagaccagccucuacgugcaggccucugggcgcgucaccguguccacaagacggagccagcaaacgaucauucccaacaucggaucccgcccuugggugagaggccugucuagccggauuuccaucuauuggaccaucgucaagcccggcgacguucuggugauuaacagcaaugggaaccucaucgcgccucgcggauacuuuaaaaugagaacaggcaagucuuccauuaugcggagcgacgcccccaucgauaccuguauuucugagugcaucacaccgaaugggagcaucccuaacgacaaacccuuccagaaugugaacaagauuaccuacggagcuuguccuaaauaugucaagcagaauacgcugaaacuugccacaggcaugcgcaacgugcccgaaaagcagaccagagggcuguuuggagcuaucgccggcuucauugagaauggcugggaagggaugaucgauggaugguacggcuuucggcaccaaaacuccgaggggaccggacaggcggccgaccucaagucuacacaggcugccauugaucaaaucaauggcaaacugaaccgcguuaucgagaagaccaaugaaaaauuccaccagauugagaaggaguucagcgaaguggaagggagaauccaggaccuugagaaauaugucgaggauacaaagauugaccugugguccuacaacgcugaacuccugguggcccuggagaaucagcauacgaucgaucucaccgacagcgaaaugaaccggcuguuugagaagacaagacgccaacuucgggaaaacgccgaggauaugggcaauggaugcuucaaaauuuaucacaagugugacaacgcuugcaucgagucuauuagaaauggcaccuacgaccaugauguuuaucgcgacgaagcgcugaacaaucgguuucagaucaaagggguggagcucaaguccggauacaaagauuggauccuguggauuagcuucgccaucucuugcuuucuucugugugucgugcuccugggcuucauuaugugggcuugccagagagggaacauccgcuguaauauuugcaucuga

SEQ ID NO: 194467 - RNA, 1701 nt, Artificial Sequence; identical to SEQ ID NO: 194390
  derived and/or modified CDS sequence (opt5) from hemagglutinin__InfluenzaA__ACI06145

SEQ ID NO: 194468 - RNA, 1701 nt, Artificial Sequence
  derived and/or modified CDS sequence (opt5) from hemagglutinin__InfluenzaA__ACI06146
augaagaccaucauugcccugagcuacaucuucugccucgcucugggccaggaccuucccgggaacgauaauuccacagccacgcugugucucggacaccaugcggugccuaacggcacccuggucaaaacaauuaccgacgaucaaaucgagguuacaaaugcuaccgaacuugugcagucuagcuccacagggaagauuugcaacaauccgcacagaauccuggacggaaucgauuguacccucauugacgcccugcugggcgauccccauugcgacguguuucagaacgagacgugggaucucuucgucgaacggucuaaagccuuuagcaauuguuauccuuacgacgugcccgauuaugcuucccugcgcucucuuguugccagcuccgggacccuggaguucaucacagaaggauuuaccuggacaggcgugacccagaacggcgggagcaaugcuugcaagagaggaccuggcucuggguucuuuucccggcucaacuggcugacgaaaagcggaucuacauaccccguccuuaaugugaccaugccuaacaaugacaacuucgauaagcuguauauuuggggcguucaccauccguccacaaaucaagagcagaccagccucuacgugcaggccucugggcgcgucaccguguccacaagacggagccagcaaacgaucauucccaacaucggauccucuccuugggugcgcggccugagcuccagaauuagcaucuauuggaccaucgucaagcccggcgacguucuggugauuaacucuaaugggaaccucaucgcgccucggggauacuuuaaaaugcgcacaggcaaguccagcauuaugagaucugacgcccccaucgauaccuguauuagcgagugcaucacaccgaauggguccaucccuaacgacaaacccuuccagaaugugaacaagauuaccuacggagcuuguccuaaauaugucaagcagaauacgcugaaacuugccacaggcaugcggaacgugcccgaaaagcagacccgcgggcuguuuggagcuaucgccggcuucauugagaauggcugggaagggaugaucgauggaugguacggcuuuagacaccaaaacuaugaggggaccggacaggcggccgaccucaagucuacacaggcugccauugaucaaaucaauggcaaacugaaccggguuaucgagaagaccaaugaaaaauuccaccagauugagaaggaguucagcgaaguggaagggcgcauccaggaccuugagaaauacgucgaggauacaaagauugaccugugguccuauaacgcugaacuccugguggcccuggagaaucagcauacgaucgaucucaccgacagcgaaaugaacaagcuguuugagaaaacaagacggcaacuuagagaaaacgccgaggauaugggcaauggaugcuucaagauuuaccacaaaugugacaacgcuugcaucgagucuauucgcaauggcaccuaugaccaugauguuuaccgggacgaagcgcugaacaauagauuucagaucaaggggguggagcucaaauccggauacaaggauuggauccuguggauuagcuucgccaucucuugcuuucuucugugugucgugcuccugggcuucauuaugugggcuugccagcgcgggaacauccgguguaauauuugcaucuga

SEQ ID NO: 194469 - RNA, 1701 nt, Artificial Sequence; identical to SEQ ID NO: 194390
  derived and/or modified CDS sequence (opt5) from hemagglutinin__InfluenzaA__ACI06147

SEQ ID NO: 194470 - RNA, 1701 nt, Artificial Sequence; identical to SEQ ID NO: 194390
  derived and/or modified CDS sequence (opt5) from hemagglutinin__InfluenzaA__ACI06148

SEQ ID NO: 194471 - RNA, 1701 nt, Artificial Sequence
  derived and/or modified CDS sequence (opt5) from hemagglutinin__InfluenzaA__ACI06149
augaagaccaucauugcccugagcuacaucuucugccucgcucugggccaggaccuucccgggaacgauaauuccacagccacgcugugucucggacaccaugcggugccuaacggcacccuggucaaaacaauuaccgacgaucaaaucgagguuacaaaugcuaccgaacuugugcagucuagcuccacagggaagauuugcaacaauccgcacagaauccuggacggaaucgauuguacccucauugacgcccugcugggcgauccccauugcgacguguuucagaacgagacgugggaucucuucgucgaacggucuaaagccuuuagcaauuguuauccuuacgacgugcccgauuaugcuucccugcgcucucuuguugccagcuccgggacccuggaguucaucacagaaggauuuaccuggacaggcgugacccagaacggcgggagcaaugcuugcaagagaggaccuggcucuggguucuuuucccggcucaacuggcugacgaaaagcggaucuacauaccccguccuuaaugugaccaugccuaacaaugacaacuucgauaagcuguauauuuggggcguucaccauccguccacaaaucaagagcagaccagccucuacgugcaggccucugggcgcgucaccguguccacaagacggagccgccagacgaucauucccaacaucggauccagaccuugggugcggggccugucuagccgcauuuccaucuauuggaccaucgucaagcccggcgacguucuggugauuaacagcaaugggaaccucaucgcgccuagaggauacuuuaaaaugcggacaggcaagucuuccauuaugcgcagcgacgcccccaucgauaccuguauuucugagugcaucacaccgaaugggagcaucccuaacgacaaacccuuccaaaaugugaacaagauuaccuacggagcuuguccuaaauaugucaagcagaauacgcugaaacuugccacaggcaugagaaacgugcccgaaaagcagacccgggggcuguuuggagcuaucgccggcuucauugagaauggcugggaagggaugaucgauggaugguacggcuuucgccaccagaacuccgaggggaccggacaagcggccgaccucaagucuacacaggcugccauugaucagaucaauggcaaacugaacagaguuaucgagaagaccaaugaaaaauuccaccaaauugagaaggaguucagcgaaguggaagggcggauccaggaccuugagaaauaugucgaggauacaaagauugaccugugguccuacaacgcugaacuccugguggcccuggagaaucagcauacgaucgaucucaccgacagcgaaaugaacaagcuguuugagaaaacaagacgccagcuucgggaaaacgccgaggauaugggcaauggaugcuucaagauuuaucacaaaugugacaacgcuugcaucgagucuauuagaaauggcaccuacgaccaugauguuuaucgcgacgaagcgcugaacaaucgguuucaaaucaaggggguggagcucaaauccggauacaaggauuggauccuguggauuagcuucgccaucucuugcuuucuucugugugucgugcuccugggcuucauuaugugggcuugccagagagggaacauccgcuguaauauuugcaucuga

SEQ ID NO: 194472 - RNA, 1701 nt, Artificial Sequence; identical to SEQ ID NO: 194401
  derived and/or modified CDS sequence (opt5) from hemagglutinin__InfluenzaA__ACI06151

SEQ ID NO: 194473 - RNA, 1701 nt, Artificial Sequence; identical to SEQ ID NO: 194401
  derived and/or modified CDS sequence (opt5) from hemagglutinin__InfluenzaA__ACI06152

SEQ ID NO: 194474 - RNA, 1701 nt, Artificial Sequence
  derived and/or modified CDS sequence (opt5) from hemagglutinin__InfluenzaA__ACI06153
augaagaccaucauugcccugagcuacaucuucugccucgcucugggccaggaccuucccgggaacgauaauuccacagccacgcugugucucggacaccaugcggugccuaacggcacccuggucaaaacaauuaccgacgaucaaaucgagguuacaaaugcuaccgaacuugugcagucuagcuccacagggaagauuugcaacaauccgcacagaauccuggacggaaucgauuguacccucauugacgcccugcugggcgauccccauugcgacguguuucagaacgagacgugggaucucuucgucgaacggucuaaagccuuuagcaauuguuauccuuacgacgugcccgauuaugcuucccugcgcucucuuguugccagcuccgggacccuggaguucaucacagaaggauuuaccuggacaggcgugacccagaacggcgggagcaaugcuugcaagagaggaccuggcucuggguucuuuucccggcucaacuggcugacgaaaagcggaucuacauaccccguccuuaaugugaccaugccuaacaaugacaacuucgauaagcuguauauuuggggcguucaccauccguccacaaaucaagagcagaccagccucuacgugcaggccucugggcgcgucaccguguccacaagacggagccagcaaacgaucauucccaacaucggaucccgcccuugggugagaggccugucuagccggauuuccaucuauuggaccaucgucaagcccggcgacgagcugguuauuaacagcaaugggaaccucaucgcgccucgcggauacuuuaaaaugagaacaggcaagucuuccauuaugcggagcgacgcccccaucgauaccuguauuucugaaugcaucacaccgaaugggagcaucccuaacgacaaacccuuccagaaugugaacaagauuaccuacggagcuuguccuaaauaugugaagcagaauacgcugaaacuugccacaggcaugcgcaacguccccgagaaacagaccagagggcuguuuggagcuaucgccggcuucauugaaaauggcugggaggggaugaucgauggaugguacggcuuucggcaccaaaacuccgaggggaccggacaggcggccgaccucaagucuacacaggcugccauugaucaaaucaauggcaaacugaaccgcgugaucgaaaagaccaaugagaaauuccaccagauugaaaaggaguucagcgaaguugaggggagaauccaggaccuugagaaauauguggaagauacaaagauugaccugugguccuacaacgcugagcuccuggucgcccuggaaaaucagcauacgaucgaucucaccgacagcgagaugaacaagcuguuugaaaagacacggagacaacuucgcgagaacgccgaggauaugggcaauggaugcuucaagauuuaucacaaaugugacaacgcuugcaucgaaucuauucggaauggcaccuacgaccaugauguguauagagacgaggcgcugaacaaucgcuuucagaucaaggggguugaacucaaauccggauacaaggauuggauccuguggauuagcuucgccaucucuugcuuucuucugugugugguccuccugggcuucauuaugugggcuugccagcgggggaacaucagauguaauauuugcaucuga

SEQ ID NO: 194475 - RNA, 1701 nt, Artificial Sequence
  derived and/or modified CDS sequence (opt5) from hemagglutinin__InfluenzaA__ACI06155
augaagaccaucauugcccugagcuacaucuucugccucgcucugggccaggaccuucccgggaacgauaauuccacagccacgcugugucucggacaccaugcggugccuaacggcacccuggucaaaacaauuaccgacgaucaaaucgagguuacaaaugcuaccgaacuugugcagucuagcuccacagggaagauuugcaacaauccgcacagaauccuggacggaaucgauuguacccucauugacgcccugcugggcgauccccauugcgacguguuucagaacgagacgugggaucucuucgucgaacggucuaaagccuuuagcaauuguuauccuuacgacgugcccgauuaugcuucccugcgcucucuuguugccagcuccgggacccuggaguucaucacagaaggauuuaccuggacaggcgugacccagaacggcgggagcaaugcuugcaagagaggaccuggcucuggguucuuuucccggcucaacuggcugacgaaaagcggaucuacauaccccguccuuaaugugaccaugccuaacaaugacaacuucgauaagcuguauauuuggggcguucaccauccguccacaaaucaagagcagaccagccucuacgugcaggccucugggcgcgucaccguguccacaagacggagccagcaaacgaucauucccaacaucgagucccgcccuugggugagaggacugucuagccggauuuccaucuauuggaccaucgucaagcccggcgacguucuggugauuaacagcaauggcaaccucaucgcgccucgcggguacuuuaaaaugagaacaggaaagucuuccauugugcggagcgacgcccccaucgauaccuguauuucugaaugcaucacaccgaauggcagcaucccuaacgacaaacccuuccagaaugucaacaagauuaccuacggggcuuguccuaaauaugugaagcagaauacgcugaaacuugccacaggaaugcgcaacguucccgagaaacagaccagaggccuguuuggggcuaucgccggauucauugaaaauggcugggagggcaugaucgaugggugguacggauuucggcaccaaaacuccgagggcaccgggcaggcggccgaccucaagucuacacaggcugccauugaucaaaucaauggaaaacugaaccgcgugaucgaaaagaccaaugagaaauuccaccagauugaaaaggaguucagcgaagucgagggcagaauccaggaccuugagaaauauguggaagauacaaagauugaccugugguccuacaacgcugagcuccugguugcccuggaaaaucagcauacgaucgaucucaccgacagcgagaugaacaagcuguuugaaaagacacggagacaacuucgcgagaacgccgaggauauggggaauggcugcuucaagauuuaucacaaaugugacaacgcuugcaucgaaucuauucggaauggaaccuacgaccaugauguguauagagacgaggcgcugaacaaucgcuuucagaucaagggcgucgaacucaaauccggguacaaggauuggauccuguggauuagcuucgccaucucuugcuuucuucugugugugguccuccugggauucauuaugugggcuugccagcggggcaacaucagauguaauauuugcaucuga

SEQ ID NO: 194476 - RNA, 1701 nt, Artificial Sequence; identical to SEQ ID NO: 194401
  derived and/or modified CDS sequence (opt5) from hemagglutinin__InfluenzaA__ACI06156

SEQ ID NO: 194477 - RNA, 1701 nt, Artificial Sequence; identical to SEQ ID NO: 194401
  derived and/or modified CDS sequence (opt5) from hemagglutinin__InfluenzaA__ACI06157

SEQ ID NO: 194478 - RNA, 1701 nt, Artificial Sequence; identical to SEQ ID NO: 194401
  derived and/or modified CDS sequence (opt5) from hemagglutinin__InfluenzaA__ACI06158

SEQ ID NO: 194479 - RNA, 1701 nt, Artificial Sequence; identical to SEQ ID NO: 194401
  derived and/or modified CDS sequence (opt5) from hemagglutinin__InfluenzaA__ACI06159

SEQ ID NO: 194480 - RNA, 1701 nt, Artificial Sequence; identical to SEQ ID NO: 194390
  derived and/or modified CDS sequence (opt5) from hemagglutinin__InfluenzaA__ACI06160

SEQ ID NO: 194481 - RNA, 1701 nt, Artificial Sequence
  derived and/or modified CDS sequence (opt5) from hemagglutinin__InfluenzaA__ACI06161
augaagaccaucauugcccugagcuacaucuucugccucgcucugggccaggaccuucccgggaacgauaauuccacagccacgcugugucucggacaccaugcggugccuaacggcacccuggucaaaacaauuaccgacgaucaaaucgagguuacaaaugcuaccgaacuugugcagucuagcuccacagggaagauuugcaacaauccgcacagaauccuggacggaaucgauuguacccucauugacgcccugcugggcgauccccauugcgacguguuucagaacgagacgugggaucucuucgucgaacggucuaaagccuuuagcaauuguuauccuuacgacgugcccgauuaugcuucccugcgcucucuuguugccagcuccgggacccuggaguucaucacagaaggauuuaccuggacaggcgugacccagaacggcgggagcaaugcuugcaagagaggaccuggcucuggguucuuuucccggcucaacuggcugacgaaaagcggaucuacauaccccguccuuaaugugaccaugccuaacaaugacaacuucgauaagcuguauauuuggggcguucaccauccguccacaaaucaagagcagaccagccucuacgugcaggccucugggcgcgucaccguguccacaagacggagccagcaaacgaucauucccaacaucgagucccgcccuugggugagaggacugucuagccggauuuccaucuauuggaccaucgucaagcccggcgacguucuggugauuaacagcaauggcaaccucaucgcgccucgcggguacuuuaaaaugagaacaggaaagucuuccauuaugcggagcgacgcccccaucgauaccuguauuucugaaugcaucacaccgaauggcagcaucccuaacgacaaacccuuccagaaugugaacaagauuaccuacggggcuuguccuaaauaugucaagcagaauacgcugaaacuugccacaggaaugcgcaacgugcccgagaaacagaccagaggccuguuuggggcuaucgccggauucauugaaaauggcugggagggcaugaucgaugggugguacggauuucggcaccaaaacuccgagggcaccgggcaggcggccgaccucaagucuacacaggcugccauugaucaaaucaauggaaaacugaaccgcguuaucgaaaagaccaaugagaaauuccaccagauugaaaaggaguucagcgaaguggagggcagaauccaggaccuugagaaauaugucgaagauacaaagauugaccugugguccuacaacgcugagcuccugguggcccuggaaaaucagcauacgaucgaucucaccgacagcgagaugaacaagcuguuugaaaagacacggagacaacuucgcgagaacgccgaggauauggggaauggcugcuucaagauuuaucacaaaugugacaacgcuugcaucgaaucuauucggaagggaaccuacgaccaugauguuuauagagacgaggcgcugaauaaccgcuuucagaucaaaggcguggaacucaaguccggguacaaggauuggauccuguggauuagcuucgccaucucuugcuuucuucugugugucgugcuccugggauucauuaugugggcuugccagcggggcaauaucagauguaacauuugcaucuga

SEQ ID NO: 194482 - RNA, 1701 nt, Artificial Sequence
  derived and/or modified CDS sequence (opt5) from hemagglutinin__InfluenzaA__ACI06162
augaagaccaucauugcccugagcuacaucuucugccucgcucugggccaggaccuucccgggaacgauaauuccacagccacgcugugucucggacaccaugcggugccuaacggcacccuggucaaaacaauuaccgacgaucaaaucgagguuacaaaugcuaccgaacuugugcagucuagcuccacagggaagauuugcaacaauccgcacagaauccuggacggaaucgauuguacccucauugacgcccugcugggcgauccccauugcgacguguuucagaacgagacgugggaucucuucgucgaacggucuaaagccuuuagcaauuguuauccuuacgacgugcccgauuaugcuucccugcgcucucuuguugccagcuccgggacccuggaguucaucacagaaggauuuaccuggacaggcgugacccagaacggcgggagcaaugcuugcaagagaggaccuggcucuggguucuuuucccggcucaacuggcugacgaaaagcggaucuacauaccccguccuuaaugugaccaugccuaacaaugacaacuucgauaagcuguauauuuggggcguucaccauccguccacaaaucaagagcagaccagccucuacgugcaggccucugggcgcgucaccguguccacaagacggagccagcaaacgaucauucccaacaucgagucccgcccuugggugagaggacugucuagccggauuuccaucuauuggaccaucgucaaccccggcgacguucuggugauuaauagcaacggcaaucucaucgcgccucgcggguacuuuaagaugagaacaggaaaaucuuccauuaugcggagcgacgcccccaucgauaccuguauuucugaaugcaucacaccgaacggcagcaucccuaaugacaagcccuuccagaacgugaauaaaauuaccuacggggcuuguccuaaguaugucaaacagaacacgcugaaacuugccacaggaaugcgcaaugugcccgagaagcagaccagaggccuguuuggggcuaucgccggauucauugaaaacggcugggagggcaugaucgaugggugguacggauuucggcaccaaaauuccgagggcaccgggcaggcggccgaccucaaaucuacacaggcugccauugaucaaaucaacggaaagcugaaucgcguuaucgaaaagaccaacgagaaguuccaccagauugaaaaagaguucagcgaaguggagggcagaauccaggaccuugagaaguaugucgaagauacaaaaauugaccugugguccuacaaugcugagcuccugguggcccuggaaaaccagcauacgaucgaucucaccgacagcgagaugaacaagcuguuugaaaagacacggagacaacuucgcgagaaugccgaggauauggggaacggcugcuucaaaauuuaucacaagugugacaaugcuugcaucgaaucuauucggaacggaaccuacgaccaugauguuuauagagacgaggcgcugaauaaccgcuuucagaucaaaggcguggaacucaaguccggguacaaagauuggauccuguggauuagcuucgccaucucuugcuuucuucugugugucgugcuccugggauucauuaugugggcuugccagcggggcaauaucagauguaacauuugcaucuga

SEQ ID NO: 194483 - RNA, 1701 nt, Artificial Sequence
  derived and/or modified CDS sequence (opt5) from hemagglutinin__InfluenzaA__ACI06163
augaagaccaucauugcccugagcuacaucuucugccucgcucugggccaggaccuucccgggaacgauaauuccacagccacgcugugucucggacaccaugcggugccuaacggcacccuggucaaaacaauuaccgacgaucaaaucgagguuacaaaugcuaccgaacuugugcagucuagcuccacagggaagauuugcaacaauccgcacagaauccuggacggaaucgauuguacccucauugacgcccugcugggcgauccccauugcgacguguuucagaacgagacgugggaucucuucgucgaacggucuaaagccuuuagcaauuguuauccuuacgacgugcccgauuaugcuucccugcgcucucuuguugccagcuccgggacccuggaguucaucacagaaggauuuaccuggacaggcgugacccagaacggcgggagcaaugcuugcaagagaggaccuggcucuggguucuuuucccggcucaacuggcugacgaaaagcggaucuacauaccccguccuuaaugugaccaugccuaacaaugacaacuucgauaagcuguauauuuggggcguucaccauccguccacaaaucaagagcagaccagccucuacgugcaggccucugggcgcgucaccguguccacaagacggagccagcaaacgaucauucccaacaucggaucccgcccuugggugagaggccugucuagccggauuuccaucuauuggaccaucgucaagcccggcgacguucuggugauuaacagcaaugggaaccucaucgcgccucgcggauacuuuaaaaugagaacaggcaagucuuccauuaugcggagcgacgcccccaucgauaccuguauuucugagugcaucacaccgaaugggagcaucccuaacgacaaacccuuccagaaugugaacaagauuaccuacggagcuuguccuaaauaugucaagcagaauacgcugaaacuugccacaggcaugcgcaacgugcccgaaaagcagaccagagggcuguuuggagcuaucgccggcuucauugagaauggcugggaagggaugaucgauggaugguacggcuuucggcaccaaaacuccgaggggaccggacaggcggccgaccucaagucuacacaggcugccauugaucaaaucaauggcaaacugaaccgcguuaucgagaagaccaaugaaaaauuccaccagauugagaaggaguucagcgaaguggaagggagaauccaggaccuugagaaauaugucgaggauacaaagauugaccugugguccuacaacgcugaacuccugguggcccuggagaaucagcauacgaucgaucucaccgacagcgaaaugaacaagcuguuugagaaaacacggagacaacuucgcgaaaacgccgaggauaugggcaauggaugcuucaagauuuaucacaaaugugacaacgcuugcaucgagucuauucggaagggcaccuacgaccaugauguuuauagagacgaagcgcugaauaaccgcuuucagaucaaagggguggagcucaaguccggauacaaggauuggauccuguggauuagcuucgccaucucuugcuuucuucugugugucgugcuccugggcuucauuaugugggcuugccagcgggggaauaucagauguaacauuugcaucuga

SEQ ID NO: 194484 - RNA, 1701 nt, Artificial Sequence
  derived and/or modified CDS sequence (opt5) from hemagglutinin__InfluenzaA__ACI06164
augaagaccaucauugcccugagcuacaucuucugccucgcucugggccaggaccuucccgggaacgauaauuccacagccacgcugugucucggacaccaugcggugccuaacggcacccuggucaaaacaauuaccgacgaucaaaucgagguuacaaaugcuaccgaacuugugcagucuagcuccacagggaagauuugcaacaauccgcacagaauccuggacggaaucgauuguacccucauugacgcccugcugggcgauccccauugcgacguguuucagaacgagacgugggaucucuucgucgaacggucuaaagccuuuagcaauuguuauccuuacgacgugcccgauuaugcuucccugcgcucucuuguugccagcuccgggacccuggaguucaucacagaaggauuuaccuggacaggcgugacccagaacggcgggagcaaugcuugcaagagaggaccuggcucuggguucuuuucccggcucaacuggcugacgaaaagcggaucuacauaccccguccuuaaugugaccaugccuaacaaugacaacuucgauaagcuguauauuuggggcguucaccauccguccacaaaucaagagcagaccagccucuacgugcaggccucugggcgcgucaccguguccacaagacggagccagcaaacgaucauucccaacaucggaucccgcccuugggugagaggccugucuagccggauuaacaucuauuggaccaucgucaagcccggcgacguucuggugauuaauuccaacgggaaucucaucgcgccucgcggauacuuuaaaaugagaaacggcaagagcucuauuaugcgguccgacgcccccaucgauacauguauuagcgagugcaucaccccgaaugggucuaucccuaacgacaaacccuuccagaaugugaacaagauuacauacggagcuuguccuaaauaugucaagcagaauacccugaaacuugccacgggcaugcgcaacgugcccgaaaagcagacaagagggcuguuuggagcuaucgccggcuucauugagaauggcugggaagggaugaucgauggaugguacggcuuucggcaccaaaacagcgaggggaccggacaggcggccgaccucaaguccacccaggcugccauugaucaaaucaauggcaaacugaaccgcguuaucgagaagacaaaugaaaaauuccaccagauugagaaggaguucucugaaguggaagggagaauccaggaccuugagaaauaugucgaggauaccaagauugaccuguggagcuacaacgcugaacuccugguggcccuggagaaccagcauacaaucgaucucacggacuccgaaaugaauaagcuguuugagaaaacccggagacaacuucgcgaaaacgccgaggauaugggcaauggaugcuucaagauuuaucacaaaugugacaacgcuugcaucgagagcauucggaauggcacauacgaccaugauguuuauagagacgaagcgcugaacaaucgcuuucagaucaaggggguggagcucaaaucuggauacaaggauuggauccuguggauuuccuucgccaucagcugcuuucuucugugugucgugcuccugggcuucauuaugugggcuugccagcgggggaacaucagauguaauauuugcaucuga

SEQ ID NO: 194485 - RNA, 1701 nt, Artificial Sequence
  derived and/or modified CDS sequence (opt5) from hemagglutinin__InfluenzaA__ACI06165
augaagaccaucauugcccugagcuacaucuucugccucgcucugggccaggaccuucccgggaacgauaauuccacagccacgcugugucucggacaccaugcggugccuaacggcacccuggucaaaacaauuaccgacgaucaaaucgagguuacaaaugcuaccgaacuugugcagucuagcuccacagggaagauuugcaacaauccgcacagaauccuggacggaaucgauuguacccucauugacgcccugcugggcgauccccauugcgacguguuucagaacgagacgugggaucucuucgucgaacggucuaaagccuuuagcaauuguuauccuuacgacgugcccgauuaugcuucccugcgcucucuuguugccagcuccgggacccuggaguucaucacagaaggauuuaccuggacaggcgugacccagaacggcgggagcaaugcuugcaagagaggaccuggcucuggguucuuuucccggcucaacuggcugacgaaaagcggaucuacauaccccguccuuaaugugaccaugccuaacaaugacaacuucgauaagcuguauauuuggggcguucaccauccguccacaaaucaagagcagaccagccucuacgugcaggccucugggcgcgucaccguguccacaagacggagccagcaaacgaucauucccaacaucggaucccgcccuugggugagaggccugucuagccggauuuccaucuauuggaccaucgucaagcccggcgacguucuggugauuaacagcaaugggaaccucaucgcgccucgcggauacuuuaaaaugagaaauggcaagucuuccauuaugcggagcgacgcccccaucgauacauguauuucugagugcaucaccccgaacgggagcaucccuaaugacaaacccuuccagaacgugaauaagauuacauacggagcuuguccuaaauaugucaagcagaacacccugaaacuugccacgggcaugcgcaaugugcccgaaaagcagacaagagggcuguuuggagcuaucgccggcuucauugagaacggcugggaagggaugaucgauggaugguacggcuuucggcaccaaaauuccgaggggaccggacaggcggccgaccucaagucuacccaggcugccauugaucaaaucaacggcaaacugaaucgcguuaucgagaagacaaacgaaaaauuccaccagauugagaaggaguucagcgaaguggaagggagaauccaggaccuugagaaauaugucgaggauaccaagauugaccugugguccuacaaugcugaacuccugguggcccuggagaaccagcauacaaucgaucucacggacagcgaaaugaacaagcuguuugagaaaacccggagacaacuucgcgaaaaugccgaggauaugggcaacggaugcuucaagauuuaucacaaaugugacaaugcuugcaucgagucuauucggaacggcacauacgaccaugauguuuauagagacgaagcgcugaauaaccgcuuucagaucaaggggguggagcucaaauccggauacaaggauuggauccuguggauuagcuucgccaucucuugcuuucuucugugugucgugcuccugggcuucauuaugugggcuugccagcgggggaauaucagauguaacauuugcaucuga

SEQ ID NO: 194486 - RNA, 1701 nt, Artificial Sequence
  derived and/or modified CDS sequence (opt5) from hemagglutinin__InfluenzaA__ACI06166
augaagaccaucauugcccugagcuacaucuucugccucgcucugggccaggaccuucccgggaacgauaauuccacagccacgcugugucucggacaccaugcggugccuaacggcacccuggucaaaacaauuaccgacgaucaaaucgagguuacaaaugcuaccgaacuugugcagucuagcuccacagggaagauuugcaacaauccgcacagaauccuggacggaaucgauuguacccucauugacgcccugcugggcgauccccauugcgacguguuucagaacgagacgugggaucucuucgucgaacggucuaaagccuuuagcaauuguuauccuuacgacgugcccgauuaugcuucccugcgcucucuuguugccagcuccgggacccuggaguucaucacagaaggauuuaccuggacaggcgugacccagaacggcgggagcaaugcuugcaagagaggaccuggcucuggguucuuuucccggcucaacuggcugacgaaaagcggaucuacauaccccguccuuaaugugaccaugccuaacaaugacaacuucgauaagcuguauauuuggggcguucaccauccguccacaaaucaagagcagaccagccucuacgugcaggccucugggcgcgucaccguguccacaagacggagccagcaaacgaucauucccaacaucggaucccgcccuuggauuagaggccugucuagccggaucaacaucuauuggaccauugugaagcccggcgacguccugguuaucaauuccaacgggaaucucauugcgccucgcggauacuuuaaaaugagaaacggcaagagcucuaucaugcgguccgacgcccccauugauacauguaucagcgagugcaucaccccgaaugggucuauuccuaacgacaaacccuuccagaaugugaacaagaucacauacggagcuuguccuaaauaugugaagcagaauacccugaaacuugccacgggcaugcgcaacguccccgaaaagcagacaagagggcuguuuggagcuauugccggcuucaucgagaauggcugggaagggaugauugauggaugguacggcuuucggcaccaaaacagcgaggggaccggacaggcggccgaccucaaguccacccaggcugccaucgaucaaaucaauggcaaacugaaccgcgugauugagaagacaaaugaaaaauuccaccagaucgagaaggaguucucugaaguugaagggcggauucaggaccuugagaaauauguggaggauaccaagaucgaccuguggagcuacaacgcugaacuccuggucgcccuggagaaccagcauacaauugaucucacggacuccgaaaugaauaagcuguuugagaaaaccagaagacaacuucgcgaaaacgccgaggauaugggcaauggaugcuucaagaucuaucacaaaugugacaacgcuugcauugagagcauccggaauggcacauacgaccaugauguguauagagacgaagcgcugaacaaucgcuuucagaucaaggggguugagcucaaaucuggauacaaggauuggauucuguggaucuccuucgccauuagcugcuuucuucugugugugguccuccugggcuucaucaugugggcuugccagcgggggaacauuagauguaauaucugcaucuga

SEQ ID NO: 194487 - RNA, 1701 nt, Artificial Sequence; identical to SEQ ID NO: 194471
  derived and/or modified CDS sequence (opt5) from hemagglutinin__InfluenzaA__ACI06167

SEQ ID NO: 194488 - RNA, 1701 nt, Artificial Sequence
  derived and/or modified CDS sequence (opt5) from hemagglutinin__InfluenzaA__ACI06168
augaagaccaucauugcccugagcuacaucuucugccucgcucugggccaggaccuucccgggaacgauaauuccacagccacgcugugucucggacaccaugcggugccuaacggcacccuggucaaaacaauuaccgacgaucaaaucgagguuacaaaugcuaccgaacuugugcagucuagcuccacagggaagauuugcaacaauccgcacagaauccuggacggaaucgauuguacccucauugacgcccugcugggcgauccccauugcgacguguuucagaacgagacgugggaucucuucgucgaacggucuaaagccuuuagcaauuguuauccuuacgacgugcccgauuaugcuucccugcgcucucuuguugccagcuccgggacccuggaguucaucacagaaggauuuaccuggacaggcgugacccagaacggcgggagcaaugcuugcaagagaggaccuggcucuggguucuuuucccggcucaacuggcugacgaaaagcggaucuacauaccccguccuuaaugugaccaugccuaacaaugacaacuucgauaagcuguauauuuggggcguucaccauccguccacaaaucaagagcagaccagccucuacgugcaggccucugggcgcgucaccguguccacaagacggagccagcaaacgaucauucccaacaucggaucccgcccuugggugagaggccugucuagccggauuuccaucuauuggaccaucgucaagcccggcgacguucuggugauuaacagcaaugggaaccucaucgcgccucgcggauacuuuaaaaugagaacaggcaagucuuccauuaugcggagcgacgcccccaucgauaccuguauuucugagugcaucacaccgaaugggagcaucccuaacgacaaacccuuccagaaugugaacaagauuaccuacggagcuuguccuaaauaugucaagcagaauacgcugaaacuugccacaggcaugcgcaacgugcccgaaaagcagaccagagggcuguuuggagcuaucgccggcuucauugagaauggcugggaagggaugaucgauggaugguacggcuuucggcaccaaaacuccgaggggaccggacaggcggccgaccucaagucuacacaggcugccauugaucaaaucaauggcaaacugaaccgcguuaucgagaagaccaaugaaaaauuccaccagauugagaaggaguucagcgaaguggaagggagaauccaggaccuugagaaauaugucgaggauacaaagauugaccugugguccuacaacgcugaacuccugguggcccuggagaaucagcauacgaucgaucucaccgacagcgaaaugaacaagcuguuugagaaaacacggaagcaacuuagagaaaacgccgaggauaugggcaauggaugcuucaaaauuuaucacaagugugacaacgcuugcaucgagucuauucgcaauggcaccuacgaccaugauguuuaucgggacgaagcgcugaacaauagauuucagaucaaagggguggagcucaaguccggauacaaggauuggauccuguggauuagcuucgccaucucuugcuuucuucugugugucgugcuccugggcuucauuaugugggcuugccagcgcgggaacauccgguguaauauuugcaucuga

SEQ ID NO: 194489 - RNA, 1701 nt, Artificial Sequence; identical to SEQ ID NO: 194390
  derived and/or modified CDS sequence (opt5) from hemagglutinin__InfluenzaA__ACI06169

SEQ ID NO: 194490 - RNA, 1701 nt, Artificial Sequence; identical to SEQ ID NO: 194407
  derived and/or modified CDS sequence (opt5) from hemagglutinin__InfluenzaA__ACI06171

SEQ ID NO: 194491 - RNA, 1701 nt, Artificial Sequence; identical to SEQ ID NO: 194407
  derived and/or modified CDS sequence (opt5) from hemagglutinin__InfluenzaA__ACI06172

SEQ ID NO: 194492 - RNA, 1701 nt, Artificial Sequence
  derived and/or modified CDS sequence (opt5) from hemagglutinin__InfluenzaA__ACI06173
augaagaccaucauugcccugagcuacaucuucugccucgcucugggccaggaccuucccgggaacgauaauuccacagccacgcugugucucggacaccaugcggugccuaacggcacccuggucaaaacaauuaccgacgaucaaaucgagguuacaaaugcuaccgaacuugugcagucuagcuccacagggaagauuugcaacaauccgcacagaauccuggacggaaucgauuguacccucauugacgcccugcugggcgauccccauugcgacguguuucagaacgagacgugggaucucuucgucgaacggucuaaagccuuuagcaauuguuauccuuacgacgugcccgauuaugcuucccugcgcucucuuguugccagcuccgggacccuggaguucaucacagaaggauuuaccuggacaggcgugacccagaacggcgggagcaaugcuugcaagagaggaccuggcucuggguucuuuucccggcucaacuggcugacgaaaagcggaucuacauaccccguccuuaaugugaccaugccuaacaaugacaacuucgauaagcuguauauuuggggcguucaccauccguccacaaaucaagagcagaccagccucuacgugcaggccucugggcgcgucaccguguccacaagacggagccagcaaacgaucauucccaacaucggaucccgcccuugggugagaggccugucuagccggauuuccaucuauuggaccaucgucaagcccggcgacguucuggagauuaacagcaaugggaaccucaucgcgccucgcggauacuuuaaaaugagaacaggcaagucuuccauuaugcggagcgacgcccccaucgauaccuguauuucugaaugcaucacaccgaaugggagcaucccuaacgacaaacccuuccagaaugugaacaagauuaccuacggagcuuguccuaaauaugugaagcagaauacgcugaaacuugccacaggcaugcgcaacguccccgagaaacagaccagagggcuguuuggagcuaucgccggcuucauugaaaauggcugggaggggaugaucgauggaugguacggcuuucggcaccaaaacuccgaggggaccggacaggcggccgaccucaagucuacacaggcugccauugaucaaaucaauggcaaacugaaccgcgugaucgaaaagaccaaugagaaauuccaccagauugaaaaggaguucagcgaaguugaggggagaauccaggaccuugagaaauauguggaagauacaaagauugaccugugguccuacaacgcugagcuccuggucgcccuggaaaaucagcauacgaucgaucucaccgacagcgagaugaacaagcuguuugaaaagacacggagacaacuucgcgagaacgccgaggauaugggcaauggaugcuucaagauuuaucacaaaugugacaacgcuugcaucgaaucuauucggaauggcaccuacgaccaugauguguauagagacgaggcgcugaacaaucgcuuucagaucaaggggguugaacucaaauccggauacaaggauuggauccuguggauuagcuucgccaucucuugcuuucuucugugugugguccuccugggcuucauuaugugggcuugccagcgggggaacaucagauguaauauuugcaucuga

SEQ ID NO: 194493 - RNA, 1701 nt, Artificial Sequence; identical to SEQ ID NO: 194407
  derived and/or modified CDS sequence (opt5) from hemagglutinin__InfluenzaA__ACI06174

SEQ ID NO: 194494 - RNA, 1701 nt, Artificial Sequence; identical to SEQ ID NO: 194408
  derived and/or modified CDS sequence (opt5) from hemagglutinin__InfluenzaA__ACI06175

SEQ ID NO: 194495 - RNA, 1701 nt, Artificial Sequence; identical to SEQ ID NO: 194408
  derived and/or modified CDS sequence (opt5) from hemagglutinin__InfluenzaA__ACI06176

SEQ ID NO: 194496 - RNA, 1701 nt, Artificial Sequence; identical to SEQ ID NO: 194408
  derived and/or modified CDS sequence (opt5) from hemagglutinin__InfluenzaA__ACI06177

SEQ ID NO: 194497 - RNA, 1689 nt, Artificial Sequence
  derived and/or modified CDS sequence (opt5) from hemagglutinin__InfluenzaA__ACI25724
auggccaucauuuaccugauccuccuguucgcuaccgugagaggcgaccagauuugcaucggguaucacgccaacaauagcacagagaaggucgauacgauucuugaacggaacguuaccgugacacaugcgaaagacauccuggagaagacccacaauggaaaacucuguaagcugaacggcauucccccucuugaacugggggauugcuccauugcuggauggcuccugggcaauccggagugugaccgccugcucagagugcccgaauggucuuacaucauggagcgggagaacccucgcuauagccugugcuaccccgggucccuuaaugauuaugaggaacugaaacaucuccugucuagcgucaagcacuuugaaaaggugagaauccuuccuaaagaccgguggacacaacauaccacaaccggaggcuccaaggccugugccguuucuggcaaacccagcuucuuucgcaacaugguguggcugacgaagaaagggccuaauuacccggucgcuaagggauccuauaacaauaccagcggcgagcagaugcucaucauuuggggagugcaccaccccaaggaugaggccgaacagagagcucuguaccaggagguugggacauacgugucugccuccaccagcacacugaacaaacggucuaucccugaaauugcggcccgccccgaggucaauggccucggguccagaauggaguucagcuggacccugcuugacgugugggauacgaucaacuuugaaucuacaggaaaucugguggcuccugaguauggcuucaagaucuccaaacggggcagcuccgggauuaugaagaccgaaggaacacucggcaacugcgagaccaaaugucaaacaccccugggggccaucaacaccacgcuuccguuucauaauguccacccucugaccauuggagaaugccccaaguacguuaaaucugagaagcucgugcuggcuacaggccugcgcaacgugccucagaucgaaagcagaggacucuucggggccauugcgggcuuuaucgagggcggguggcagggaauggucgacggcugguauggguaccaucacuccaaugaucagggaagcggcuaugccgcugacaaggagucuacccaaaaagccuucgaugggaucacaaacaagguuaauuccgugauugagaaaaugaacacccaguuugaagcugugggcaaggaguucaauaaccuggaaaaacggcuugaaaaucugaacaagaagauggaggacggauuucucgacgucuggacguacaaugccgagcugcuugugcugauggaaaacgagcgcacacucgauuuccacgacagcaauguuaaaaaccuguaugaaaaggugagaaugcagcugcgggauaaugucaaagagcucggcaacggguguuucgaguuuuaccauaagugcgacgaugaauguaugaacucugugaaaaauggaaccuacgacuaucccaaguacgaggaagagagcaagcugaaaagaaacgaaaucaagggcgucaaacuuuccucuauggggguguaucagauucuggccaucuacgcuaccguugcgggaagccucucccuggccauuaugguggcuggcaucagcuucuggaugugcucuaaugggucccugcaaugccgcaucuguauuuga

SEQ ID NO: 194498 - RNA, 1701 nt, Artificial Sequence
  derived and/or modified CDS sequence (opt5) from hemagglutinin__InfluenzaA__ACI25746
augaagaccaucauugcccugagcuacaucuucugccucgcucugggccaguaucuucccgggaacgacaauuccacagccacgcugugucucggacaccaugcggugccuaacggcacccuggucaaaacaauuaccgaugaccaaaucgagguuacaaaugcuaccgaacuugugcagucuagcuccacagggaagauuugcaacaauccgcacagaauccuggauggaaucgacuguacccucauugaugcccugcugggcgacccccauugcgauguguuucagaacgagacgugggaccucuucgucgaacggucuaaagccuuuagcaauuguuacccuuaugaugugcccgacuacgcuucccugcgcucucuuguugccagcuccgggacccuggaguucaucacagaaggauuuaccuggacaggcgugacccagaacggcgggagcaaugcuugcaagagaggaccuggcucuggguucuuuucccggcucaacuggcugacgaaaagcggaucuacauaucccguccuuaaugugaccaugccuaacaaugauaacuucgacaagcuguacauuuggggcguucaccauccguccacaaaucaagagcagaccagccucuaugugcaggccucugggcgcgucaccguguccacaagacggagccagcaaacgaucauucccaacaucggaucccgcccuugggugagaggccugucuagccggauuuccaucuacuggaccaucgucaagcccggcgauguucuggugauugacagcaacgggaaucucaucgcgccucgcggauacuuuaaaaugagaacaggcaagucuuccauuaugcggagcgacgcccccaucgauaccuguauuucugagugcaucacaccgaacgggagcaucccuaaugacaaacccuuccagaacgugaauaagauuaccuauggagcuuguccuaaauacgucaagcagaacacgcugaaacuugccacaggcaugcgcaaugugcccgaaaagcagaccagagggcuguuuggagcuaucgccggcuucauugagaacggcugggaagggaugaucgauggaugguauggcuuucggcaccaaaauuccgaggggaccggacaggcggccgaccucaagucuacacaggcugccauugaucaaaucaacggcaaacugaaucgcguuaucgagaagaccaacgaaaaauuccaccagauugagaaggaguucagcgaaguggaagggagaauccaggaccuugagaaauacgucgaggauacaaagauugaccugugguccuauaaugcugaacuccugguggcccuggagaaccagcauacgaucgaucucaccgacagcgaaaugaauaagcuguuugagaaaacacggagacaacuucgcgaaaacgccgaggauaugggcaacggaugcuucaagauuuaccacaaaugugacaaugcuugcaucgagucuauucggaacggcaccuaugaccaugauguuuacagagacgaagcgcugaauaaccgcuuucagaucaaggggguggagcucaaauccggauacaaggauuggauccuguggauuagcuucgccaucucuugcuuucuucugugugucgugcuccugggcuucauuaugugggcuugccagcgggggaauaucagauguaacauuugcaucuga

SEQ ID NO: 194499 - RNA, 1701 nt, Artificial Sequence
  derived and/or modified CDS sequence (opt5) from hemagglutinin__InfluenzaA__ACI25757
augaagaccaucauugcccugagcuacaucuucugccucgcucugggccaggaccuucccgggaacgauaauuccacagccacgcugugucucggacaccaugcggugccuaacggcacccuggucaaaacaauuaccgacgaucaaaucgagguuacaaaugcuaccgaacuugugcagucuagcuccacagggaagauuugcaacaauccgcacagaauccuggacggaaucgauuguacccucauugacgcccugcugggcgauccccauugcgacguguuucagaacgagacgugggaucucuucgucgaacggucuaaagccuuuagcaauuguuauccuuacgacgugcccgauuaugcuucccugcgcucucuuguugccagcuccgggacccuggaguucaucacagaaggauuuaccuggacaggcgugacccagaacggcgggagcaaugcuugcaagagaggaccuggcucuggguucuuuucccggcucaacuggcugacgaaaagcggaucuacauaccuuguccugaaugugaccaugcccaacaaugacaacuucgauaagcucuauauuuggggcguucaccauccuuccacaaaucaagagcagaccagccuguacgugcaggccucugggcgcgucaccguguccacaagacggagccagcaaacgaucauuccgaacaucggaucccgccccugggugagaggccugucuagccggauuuccaucuauuggaccaucgucaagccuggcgacguucucgugauuaacagcaaugggaaccugaucgcgccccgcggauacuuuaaaaugagaacaggcaagucuuccauuaugcggagcgacgccccuaucgauaccuguauuucugagugcaucacacccaaugggagcaucccgaacgacaaaccuuuccagaaugugaacaagauuaccuacggagcuugucccaaauaugucaagcagaauacgcuuaagcuggccacaggcaugcgcaacgugccugaaaaacagaccagagggcucuuuggagcuaucgccggcuucauugagaauggcugggaagggaugaucgauggaugguacggcuuucggcaccaaaacuccgaggggaccggacaggcggccgaccugaagucuacacaggcugccauugaucaaaucaauggcaaacuuaaccgcguuaucgagaagaccaaugaaaaauuccaccagauugagaaggaguucagcgaaguggaagggagaauccaggaccuggagaaauaugucgaggauacaaagauugaccucugguccuacaacgcugaacugcugguggcccucgagaaucagcauacgaucgaucugaccgacagcgaaaugaacaaacuuuuugagaagacacggagacaacugcgcgaaaacgccgaggauaugggcaauggaugcuucaagauuuaucacaaaugugacaacgcuugcaucgagucuauucggaauggcaccuacaaccaugacguuuauagagaugaagcgcucaauaaccgcuuucagaucaaggggguggagcugaaauccggauacaaggacuggauccuuuggauuagcuucgccaucucuugcuuucugcucugugucgugcugcugggcuucauuaugugggcuugccagcgggggaauaucagauguaacauuugcaucuga

SEQ ID NO: 194500 - RNA, 1701 nt, Artificial Sequence; identical to SEQ ID NO: 194388
  derived and/or modified CDS sequence (opt5) from hemagglutinin__InfluenzaA__ACI25768

SEQ ID NO: 194501 - RNA, 1701 nt, Artificial Sequence
  derived and/or modified CDS sequence (opt5) from hemagglutinin__InfluenzaA__ACI25779
augaagaccaucauugcccugagcuacaucuucugccucgcucugggccaggaccuucccgggaacgauaauuccacagccacgcugugucucggacaccaugcggugccuaacggcacccuggucaaaacaauuaccgacgaucaaaucgagguuacaaaugcuaccgaacuugugcagucuagcuccacagggaagauuugcaacaauccgcacagaauccuggacggaaucgauuguacccucauugacgcccugcugggcgauccccauugcgacguguuucagaacgagacgugggaucucuucgucgaacggucuaaagccuuuagcaauuguuauccuuacgacgugcccgauuaugcuucccugcgcucucuuguugccagcuccgggacccuggaguucaucacagaaggauuuaccuggacaggcgugacccagaacggcgggagcaaugcuugcaagagaggaccuggcucuggguucuuuucccggcucaacuggcugacgaaaagcggaucuacauaccccguccuuaaugugaccaugccuaacaaugacaacuucgauaagcuguauauuuggggcguucaccauccguccacaaaucaagagcagaccagccucuacgugcaggccucugggcgcgucaccguguccacaagacggagccagcaaacgaucauucccaacaucuggucccgcccuugggugagaggacugucuagccggauuuccaucuauuggaccaucgucaagcccggcgacguucuggugauuaacagcaauggcaaccucaucgcgccucgcggguacuuuaaaaugagaacaggaaagucuuccauuaugcggagcgacgcccccaucgauaccuguauuucugagugcaucacaccgaauggcagcaucccuaacgacaaacccuuccagaaugugaacaagauuaccuacggggcuuguccuaaauaugucaagcagaauacgcugaaacuugccacaggaaugcgcaacgugcccgaaaagcagaccagaggccuguuuggggcuaucgccggauucauugagaauggcugggaaggcaugaucgaugggugguacggauuucggcaccaaaacuccgagggcaccgggcaggcggccgaccucaagucuacacaggcugccauugaucaaaucaauggaaaacugaaccgcguuaucgagaagaccaaugaaaaauuccaccagauugagaaggaguucagcgaaguggaaggcagaauccaggaccuugagaaauaugucgaggauacaaagauugaccugugguccuacaacgcugaacuccugguggcccuggagaaucagcauacgaucgaucucaccgacagcgaaaugaacaagcuguuugagaaaacacggagacaacuucgcgaaaacgccgaggauauggggaauggcugcuucaagauuuaucacaaaugugacaacgcuugcaucgagucuauucggaauggaaccuacgaccaugauguuuauagagacgaagcgcugaacaaucgcuuucagaucaagggcguggagcucaaauccggguacaaggauuggauccuguggauuagcuucgccaucucuugcuuucuucugugugucgugcuccugggauucauuaugugggcuugccagcggggcaacaucagauguaauauuugcaucuga

SEQ ID NO: 194502 - RNA, 1701 nt, Artificial Sequence
  derived and/or modified CDS sequence (opt5) from hemagglutinin__InfluenzaA__ACI25790
augaagaccaucauugcccugagcuacaucuucugccucgcucugggccaggaccuucccgggaacgauaauuccacagccacgcugugucucggacaccaugcggugccuaacggcacccuggucaaaacaauuaccgacgaucaaaucgagguuacaaaugcuaccgaacuugugcagucuagcuccacagggaagauuugcaacaauccgcacagaauccuggacggaaucgauuguacccucauugacgcccugcugggcgauccccauugcgacguguuucagaacgagacgugggaucucuucgucgaacggucuaaagccuuuagcaauuguuauccuuacgacgugcccgauuaugcuucccugcgcucucuuguugccagcuccgggacccuggaguucaucacagaaggauuuaccuggacaggcgugacccagaacggcgggagcaaugcuugcaagagaggaccuggcucuggguucuuuucccggcucaacuggcugacgaaaagcggaucuacauaccccguccuuaaugugaccaugccuaacaaugacaacuucgauaagcuguauauuuggggcguucaccauccguccacaaaucaagagcagaccagccucuacgugcaggccucugggcgcgucaccguguccacaagacggagccagcaaacgaucauucccaacaucuggucccgcccuugggugagaggacugucuagccggauuuccaucuauuggaccaucgucaagcccggcgacguucuggugauuaacagcaauggcaaccucaucgcgccucgcggguacuuuaaaaugagaacaggaaagucuuccauuaugcggagcgacgcccccaucgauaccuguauuucugagugcaucacaccgaauggcagcaucccuaacgacaaacccuuccagaaugugaacaagauuaccuacggggcuuguccuaaauaugucaagcagaauacgcugaaacuugccacaggaaugcgcaacgugcccgaaaagcagaccagaggccuguuuggggcuaucgccggauucauugagaauggcugggaaggcaugaucgaugggugguacggauuucggcaccaaaacuccgagggcaccgggcaggcggccgaccucaagucuacacaggcugccauugaucaaaucaauggaaaacugaaccgcguuaucgagaagaccaaugaaaaauuccaccagauugagaaggaguucagcgaaguggaaggcagaauccaggaccuugagaaauaugucgaggauacaaagauugaccugugguccuacaacgcugaacuccugguggcccuggagaaucagcauacgaucgaucucaccgacagcgaaaugaacaagcuguuugagaaaacacggagacaacuucgcgaaaacgccgaggauauggggaauggcugcuucaagauuuaucacaaaugugacaacgcuugcaucgagucuauucgguccggaaccuacgaccaugauguuuauagagacgaagcgcugaauaaccgcuuucagaucaagggcguggagcucaaaagcggguacaaggauuggauccuguggauuucuuucgccaucuccugcuuucuucugugugucgugcuccugggauucauuaugugggcuugccagcggggcaauaucagauguaacauuugcaucuga

SEQ ID NO: 194503 - RNA, 1701 nt, Artificial Sequence
  derived and/or modified CDS sequence (opt5) from hemagglutinin__InfluenzaA__ACI25801
augaagaccaucauugcccugagcuacaucuucugccucgcucugggccaggaccuucccgggaacgauaauuccacagccacgcugugucucggacaccaugcggugccuaacggcacccuggucaaaacaauuaccgacgaucaaaucgagguuacaaaugcuaccgaacuugugcagucuagcuccacagggaagauuugcaacaauccgcacagaauccuggacggaaucaacuguacccucauugaugcccugcugggcgacccccauugcgauguguuucagaaugagacgugggaccucuucgucgaacggucuaaagccuuuagcaacuguuauccuuacgaugugcccgacuaugcuucccugcgcucucuuguugccagcuccgggacccuggaguucaucacagaagauuuuaccuggacaggagugacccagaauggcggcagcaacgcuugcaagagagggccuggaucuggcuucuuuucccggcucaauuggcugacgaaaagcgggucuacauaccccguccuugacgugaccaugccuaacaaugauaacuucgacaagcuguauauuuggggaguucaccauccguccacaaaucaagagcagaccagccucuacgugcaggccucuggccgcgucaccguguccacaagacggagccagcaaacgaucauucccaacaucgggucccgcccuugggugagaggacugucuagccggauuuccaucuauuggaccaucgucaagcccggcgacguucuggugauuaacagcaauggcaaccucaucgcgccucgcggguacuuuaaaaugagaacaggaaagucuuccauuaugcggagcgaugcccccaucgacaccuguauuucugagugcaucacaccgaauggcagcaucccuaacgauaaacccuuccagaaugugaacaagauuaccuacggggcuuguccuaaauaugucaagcagaauacgcugaaacuugccacaggaaugcgcaacgugcccgaaaagcagaccagaggccuguuuggggcuaucgccggauucauugagaauggcugggaaggcaugaucgacgggugguacggauuucggcaccaaaacuccgagggcaccgggcaggcggccgaucucaagucuacacaggcugccauugaccaaaucaauggaaaacugaaccgcguuaucgagaagaccaaugaaaaauuccaccagauugagaaggaguucagcgaaguggaaggcagaauccaggaucuugagaaauaugucgaggacacaaagauugaucugugguccuacaacgcugaacuccugguggcccuggagaaucagcauacgaucgaccucaccgauagcgaaaugaacaagcuguuugagaaaacacggagacaacuucgcgaaaacgccgaggacauggggaauggcugcuucaagauuuaucacaaaugugacaacgcuugcaucgagucuauucggaauggaaccuacgaucaugacguuuauagagaugaagcgcugaacaaucgcuuucagaucaagggcguggagcucaaauccggguacaaggacuggauccuguggauuagcuucgccaucucuugcuuucuucugugugucgugcuccugggauucauuaugugggcuugccagcggggcaacaucagauguaauauuugcaucuga

SEQ ID NO: 194504 - RNA, 1689 nt, Artificial Sequence; identical to SEQ ID NO: 194422
  derived and/or modified CDS sequence (opt5) from hemagglutinin__InfluenzaA__ACI26274

SEQ ID NO: 194505 - RNA, 1698 nt, Artificial Sequence
  derived and/or modified CDS sequence (opt5) from hemagglutinin__InfluenzaA__ACI26307
augaagaccaucauugcccugagcuacauccucugccugguguucacacagaaacuucccggcaacgacaauuccacggcuacccugugucucgggcaccaugccgucccuaacggaacaauuguuaagaccaucacaaaugaucaaauugaggugaccaacgcgacagaacuggugcagucuagcuccaccggcgagaucugcgacucuccgcaccagauccuugauggggaaaauuguacgcugauugacgcucuccugggagauccccagugcgacggcuuucaaaacaaaaagugggaucuguucgucgagagaagcaaagccuauuccaauuguuacccuuaugacgugcccgauuacgccucucuccggagccugguugcuuccagcgggacccuugaauuuaacaaugagucuuucaacuggacaggagugacccagaauggcacauccagcgccugcauccgcagaucuaacaauuccuuuuucagccggcugaacuggcucacccaucugaaguuuaaguauccugcucuuaaugucacgaugcccaacaacgagaaauucgacaagcuguacauuuggggcgugcaccauccuguuacagauaaugaccagaucuuucucuaugcccagucugggcgcauuaccguguccacaaaaagaagccaacagaccgucaucccgaacauuggaucccggccccgcgugagaaauucuccuagccggaucuccaucuacuggaccauugugaagcccggcgauauccugcugauuaacagcacagggaaucucaucgcgccucgcggauacuucaaaauuagaucuggcaaguccagcaucaugcggucugacgcccccaucgggaaguguaacagcgaaugcauuacgccgaauggauccaucccuaacgacaaacccuuucagaaugucaaccgcauuaccuauggcgcuuguccuagauacguuaagcagaauacacugaaacuugccaccggcaugcggaacgugcccgagaagcaaacacgcgggaucuucggagcuauugccggcuuuaucgaaaaugggugggagggaaugguggauggcugguauggguucagacaccagaacucugagggaaucggccaggcggccgaccugaaaagcacccaagcugccauugaucagaucaauggcaagcucaaccggcugauugggaaaacgaacgaaaaguuccaccagaucgagaaggaauuuuccgaggucgaaggacgcauucaggaccuugagaaauacguggaggauacaaagaucgaccuguggagcuauaaugcugaacuccugguugcccuggagaaccaacauaccauugaucucaccgacucugaaaugaauaaacuguucgagaagaccaaaaagcagcuuagagaaaacgccgaggauaugggcaaugggugcuuuaagaucuaccacaaaugugacaacgcuugcaucggauccauucggaauggcacauaugaucaugacguguacagagacgaggcgcugaacaaucgcuuccagaucaagggggucgaacucaaaagcggcuacaaggauuggauucuguggaucucuuuugccauuuccugcuuccuucuguguguggcucuccugggauuuaucaugugggccugccagaaaggcaacauccgguguaauauuugcaucuga

SEQ ID NO: 194506 - RNA, 1701 nt, Artificial Sequence
  derived and/or modified CDS sequence (opt5) from hemagglutinin__InfluenzaA__ACI26362
augaagaccaucauugcccugagcuacauccucugccugguguucgcucagaaacuucccggcaacgacaauuccacagccacgcugugucucgggcaccaugcggucccuaacggaaccauuguuaagacaaucaccaaugaucaaauugaggugacaaacgcuaccgaacuggugcagucuagcuccacaggcgagaucugcgacucuccgcaccagauccuugauggggaaaauuguacccugauugacgcccuccugggagauccccagugcgacggcuuucaaaacaaaaagugggaucuguucgucgagagaagcaaagccuauuccaauuguuacccuuaugacgugcccgauuacgcuucucuccggagccugguugccuccagcgggacgcuugaauuuaacaaugagucuuucaacuggaccggagugacacagaauggcaccuccagcgcuugcauccgcagaucuaacaauuccuuuuucagccggcugaacuggcucacacaucugaaguuuaaguauccugcccuuaaugucaccaugcccaacaacgagcaguucgacaaacuguacauuuggggcgugcaccauccugggacggauaaugaccagaucuuucucuaugcgcaagccucuggacgcauuacaguuuccaccaagagaagccagcagacagugaucccgaacauuggcucccggccccgcgucagaaauaucccuucucggaucagcauuuacuggaccaucgugaaacccggggauauucugcugaucaacuccaccggaaaucucauugcuccucgcggcuacuucaagaucagaagcgggaaaucuuccaucaugcggagcgacgcccccauuggaaaguguaacucugaaugcaucacaccgaauggcagcauuccuaacgacaagcccuuucagaaugugaaccgcaucacguauggcgcuuguccuagauacgucaaacaaaauacccugaaacuugccacagggaugcggaacguucccgagaagcagacccgcggaauuuucggcgcgaucgccggguuuaucgaaaauggaugggagggcaugguggaugggugguauggauucagacaccagaacuccgagggccggggccaagcugccgaccugaagucuacacaggcugccauugaucagaucaaugggaaacucaacagacugauuggaaagaccaacgaaaaauuccaccagaucgagaaggaauuuagcgagguggaaggccgcauucaagaccuugagaaguacgucgaggauacgaaaaucgaccugugguccuauaaugccgaacuccugguggcucuggagaaccagcauacaauugaucucaccgacagcgaaaugaauaagcuguucgagaaaaccaagaaacagcuucgggaaaacgcggaggauauggggaauggaugcuuuaagaucuaccacaagugugacaacgccugcaucggcucuauuagaaaugggacauaugaucaugacguuuaccgcgacgaggcucugaacaaucgguuccagaucaaaggcguggaacucaaguccggauacaaagauuggauucuguggaucagcuuugccauuucuugcuuccuucugugugucgcccuccugggcuuuaucaugugggcuugccaaaaggggaacaucagauguaauauuugcaucuga

SEQ ID NO: 194507 - RNA, 1701 nt, Artificial Sequence
  derived and/or modified CDS sequence (opt5) from hemagglutinin__InfluenzaA__ACI26373
augaagaccaucauugcccugagcuacauccucugccugguguucgcucagaaacuucccggcaacgacaauuccacagccacgcugugucucgggcaccaugcggucccuaacggaaccauuguuaagacaaucaccaaugaucaaauugaggugacaaacgcuaccgaacuggugcagucuagcuccacaggcgagaucugcgacucuccgcaccagauccuugauggggaaaauuguacccugauugacgcccuccugggagauccccagugcgacggcuuucaaaacaaaaagugggaucuguucgucgagagaagcaaagccuauuccaauuguuacccuuaugacgugcccgauuacgcuucucuccggagccugguugccuccagcgggacgcuugaauuuaacaaugagucuuucaacugggcuggagugacccagaauggcacauccagcgccugcauccgcaagucuaacaauuccuuuuucagcagacugaacuggcucacccaucugaaguuuaaauauccugcgcuuaaugucacaaugcccaacaacgagcaguucgacaagcuguacauuuggggcgugcaccauccugggaccgauaaugaccagaucuuucucuaugcccaggcuucuggacggauuacgguuuccacaaaacgcagccaacagaccgugaucccgaacauuggcuccagaccccggguccgcaauaucccuucuagaaucagcauuuacuggacaaucgugaagcccggggauauucugcugaucaacuccaccggaaaucucauugccccucggggcuacuucaaaauccgcagcgggaagucuuccaucaugagaagcgacgcucccauuggaaaguguaacucugaaugcaucaccccgaauggcagcauuccuaacgacaaacccuuucagaaugugaaccggaucacauauggcgccuguccucgcuacgucaagcaaaauacgcugaaacuugcgaccgggaugagaaacguucccgagaagcagacacggggaauuuucggcgccaucgcuggguuuaucgaaaauggaugggagggcaugguggaugggugguauggauuccgccaccagaacuccgagggcagaggccaagccgcugaccugaaaucuacccaggccgccauugaucagaucaaugggaagcucaaccggcugauuggaaaaacaaacgaaaaguuccaccagaucgagaaggaauuuagcgagguggaaggccgcauucaagaccuugagaaauacgucgaggauaccaagaucgaccugugguccuauaaugcugaacuccugguggcgcuggagaaccagcauacgauugaucucacagacagcgaaaugaauaaacuguucgagaagaccaaaaagcagcuuagagaaaacgccgaggauauggggaauggaugcuuuaagaucuaccacaaaugugacaacgcuugcaucggcucuauucggaaugggaccuaugaucaugacguuuacagagacgaggcccugaacaaucgcuuccagaucaagggcguggaacucaaauccggauacaaggauuggauucuguggaucagcuuugccauuucuugcuuccuucugugugucgcucuccugggcuuuaucaugugggccugccaaaaagggaacauccgguguaauauuugcaucuga

SEQ ID NO: 194508 - RNA, 1701 nt, Artificial Sequence; identical to SEQ ID NO: 194373
  derived and/or modified CDS sequence (opt5) from hemagglutinin__InfluenzaA__ACI26395

SEQ ID NO: 194509 - RNA, 1701 nt, Artificial Sequence
  derived and/or modified CDS sequence (opt5) from hemagglutinin__InfluenzaA__ACI26406
augaagaccaucauugcccugagcuacauccucugccugguguucgcucagaaacuucccggcaacgacaauuccacagccacgcugugucucgggcaccaugcggucccuaacggaaccauuguuaagacaaucaccaaugaucaaauugaggugacaaacgcuaccgaacuggugcagucuagcuccacaggcgagaucugcgacucuccgcaccagauccuugauggggaaaauuguacccugauugacgcccuccugggagauccccagugcgacggcuuucaaaacaaaaagugggaucuguucgucgagagaagcaaagccuauuccaauuguuacccuuaugacgugcccgauuacgcuucucuccggagccugguugccuccagcgggacgcuugaauuuaacaaugagucuuucaacuggaccggagugacacagaauggcaccuccagcgcuugcauccgcagaucuaacaauuccuuuuucagccggcugaacuggcucacacaucugaaguuuaagcacccugcccuuaaugucaccaugcccaacaacgagaaauucgacaagcuguauauuuggggcgugcaucacccugggacggauaaugaccagaucuuucucuacgcgcaggccucuggacgcauuacaguuuccaccaaaagaagccaacagacagugaucccgaacauuggcucccggccccgcgucagaaauaucccuucucggaucagcauuuauuggaccaucgugaagcccggggauauucugcugaucaacuccaccggaaaucucauugcuccucgcggcuacuucaaaaucagaagcgggaagucuuccaucaugcggagcgacgcccccauuggaaaguguaacucugaaugcaucacaccgaauggcagcauuccuaacgacaaacccuuucagaaugugaaccgcaucacguacggcgcuuguccuagauaugucaagcagaauacccugaaacuugccacagggaugcggaacguucccgagaagcaaacccgcggaauuuucggcgcgaucgccggguuuaucgaaaauggaugggagggcaugguggaugggugguacggauucagacaccagaacuccgagggcauuggccaggcugccgaccugaaaucuacacaagcugccaucgaucagauuaaugggaagcucaaccggcugaucggaaaaaccaacgaaaaguuccaucagauugagaaggaauuuagcgagguggaaggcagaauccaggaccuugagaaauaugucgaggauacgaagauugaccugugguccuacaaugccgaacuccugguggcucuggagaaccaacacacaaucgaucucaccgacagcgaaaugaauaaacuguucgagaagaccaaaaagcagcuucgcgaaaacgcggaggauauggggaauggaugcuuuaagaucuaucauaaaugugacaacgccugcauuggcucuauccggaaugggacauacgaucacgacguuuauagagacgaggcucugaacaaucgcuuccagauuaagggcguggaacucaaauccggauacaaggauuggauccuguggauuagcuuugccaucucuugcuuccuucugugugucgcccuccugggcuuuaucaugugggcuugccagaaagggaacauucgguguaauaucugcauuuga

SEQ ID NO: 194510 - RNA, 1701 nt, Artificial Sequence; identical to SEQ ID NO: 194000
  derived and/or modified CDS sequence (opt5) from hemagglutinin__InfluenzaA__ACI26417

SEQ ID NO: 194511 - RNA, 1701 nt, Artificial Sequence
  derived and/or modified CDS sequence (opt5) from hemagglutinin__InfluenzaA__ACI26428
augaagaccaucauugcccugagcuacauccucugccugguguucgcucagaaacuucccggcaacgacaauuccacagccacgcugugucucgggcaccaugcggucccuaacggaaccauuguuaagacaaucaccaaugaucaaauugaggugacaaacgcuaccgaacuggugcagaucucuagcacaggcgggaucugcgacuccccgcaccagauucuugauggagagaauuguacccugaucgacgcccuccugggcgauccccagugcgacggguuucaaaacaaaaagugggaucuguucgucgaaagaucuaaagccuauagcaauuguuacccuuaugacgugcccgauuacgcuucccuccggucucugguugccagcuccggaacgcuugaguuuaacaaugagagcuucaacuggaccggcgugacacagaauggcaccucuuccagcugcaagcgcagaucuaacaauuccuuuuucagccggcugaacuggcucacacaucugaaguuuaaauauccugcucuuaaugucaccaugcccaacaacgaaaaguucgacaaacuguacauuuggggagugcaccauccuguuacggauaaugaccagauccgccucuaugcccaggcgucugggagaauuacaguguccaccaagcggagccaacagacagucaucccgaacauuggcuaccgccccagagugcgggauaucccuucccgcaucucuauuuacuggaccaucgugaaacccggggacauucugcugaucaauagcaccggaaaccucauugccccuagaggcuauuuuaagauccgguccggaaagagcucuaucaugcgcuccgacgcucccauugggaaauguaauagcgagugcaucacaccgaacggcucuauuccuaaugauaagcccuuccagaacgucaauagaaucacguacggcgccuguccucgguauguuaaacagaacacccugaaacuugcuacagggaugcgcaaugugcccgaaaagcaaaccagaggaauuuuuggcgccaucgcgggguucaucgagaacggaugggaaggcaugguggacgggugguacggauuucggcaccagaauagcgagggcauuggccaggccgcugaucugaaguccacacaagccgcuaucaaccagauuaaugggaaacucaacagacugaucggaaagaccaacgagaaguuccaccagauugaaaaagaguucucugaagucgagggccgcauccaggaccuugaaaaguauguggaggauacgaaaauugaccuguggagcuacaaugccgagcuccugguugcccuggaaaaccaacauacaaucgaucucaccgacuccgagaugaauaagcuguuugaacggaccaaaaagcagcuuagagagaacgcugaagauauggggaauggaugcuucaagaucuaucacaaaugugacaacgcgugcauuggcagcauccgcaaugggacauacgaucaugacguguaccgggacgaggcccugaacaauagauuucagauuaagggcgucgagcucaaaucuggauauaaggauuggauccuguggauuuccuucgcuaucagcugcuuucuucugugugugguucuccugggcuucaucaugugggccugccagaaagggaacauucgcuguaauaucugcauuuga

SEQ ID NO: 194512 - RNA, 1698 nt, Artificial Sequence
  derived and/or modified CDS sequence (opt5) from hemagglutinin__InfluenzaA__ACI26439
augaaggugaaacugcucguccugcuuugcaccuucacagccacguacgcugacaccaucuguauuggcuaucacgccaacaauagcacagauaccguugacacagugcuggagaagaacgugaccgucacacauuccgugaaucuccuggaagauucucacaacgggaaacuuugccugcucaagggaaucgcgccccugcagcugggcaauuguagcguugcuggguggauucucggaaacccugagugcgaacugcuuaucuccaaagagucuuggagcuacauuguggaaaagccgaaucccgagaacggcaccuguuauccugggcauuuugccgacuacgaggaacugagagagcaacucuccucugucagcuccuucgaacgguuugagaucuuccccaaggagagcucuuggccuaaucacacggugaccggaguuuccgccagcugcucucauaacggcaaauccagcuuuuauaagaaucugcuuuggcugacaggcaaaaacgggcucuaccccaaucugucuaaguccuaugcuaacaauaaagaaaaggaggugcugguccucuggggagugcaccacccuccgaacaucggcaaccagcgcgcccuguaccauaccgaaaaugcuuacgugagcgucguuuccucucacuauagcagaaaguucacacccgagauugccaaacggccuaaggugcgcgaucaggaagggagaaucaacuacuauuggacccuucuggagcccggagacacgauuaucuuugaggcgaauggcaaccucauugccccucgguacgcuuucgcccugucccgcggguuuggaagcggcaucauuaauucuaacgcucccauggaugaaugugacgccaaaugccagacaccgcaaggcgcgaucaauuccagccuuccuuuccagaacgugcaucccgucaccaucggggaguguccuaaguaugugagaucugccaaacugcggaugguuacaggacuccgcaauauucccagcauccaguccagaggccuguuuggggcuauugccggauucaucgaaggcggguggaccggaaugguggauggcugguacggcuaucaccaccagaacgagcaagggucuggauacgcugccgaccaaaagagcacccagaaugccauuaacggcaucacaaauaaagucaacuccgugaucgaaaagaugaauacgcaguuuaccgcuguugggaaggaguucaacaaacuggagcggcgcauggaaaaccucaauaagaaaguggaugacggauucauugaugucuggacauacaacgcggagcugcuugugcugcucgaaaaugagagaacccuggacuuucaugacagcaacgucaagaaucuuuaugaaaaagugaagucucagcugaagaacaaugccaaagagaucggcaacgggugcuucgaguuuuaccacaaguguaaugaugaaugcauggaguccguuaaaaacggcacauaugacuaccccaaguauagcgaagagucuaaacucucccgggagaagauugauggagugaagcuggaaagcaugggcgucuaccagauccuggcuauuuauuccaccguggccucuagccucguucugcuugugucccugggggccaucucuuucuggaugugcagcaauggaucccuccagugucgcaucugcauuuga

SEQ ID NO: 194513 - RNA, 1698 nt, Artificial Sequence; identical to SEQ ID NO: 194512
  derived and/or modified CDS sequence (opt5) from hemagglutinin__InfluenzaA__ACI26450

SEQ ID NO: 194514 - RNA, 1701 nt, Artificial Sequence
  derived and/or modified CDS sequence (opt5) from hemagglutinin__InfluenzaA__ACI26461
augaagaccaucauugcccugagcuacauccucugccugguguucacacagaaacuucccggcaacgacaauuccacggcuacccugugucucgggcaccaugccgucccuaacggaacaauuguuaagaccaucacaaaugaucaaauugaggugaccaacgcgacagaacuggugcagucuagcuccaccggcgagaucugcgacucuccgcaccagauccuugauggggaaaauuguacgcugauugacgcucuccugggagauccccagugcgacggcuuucaaaacaaaaagugggaucuguucgucgagagaagcaaagccuauuccaauuguuacccuuaugacgugcccgauuacgccucucuccggagccugguugcuuccagcgggacccuugaauuuaacaaugagucuuucaacuggacaggagugacccagaauggcacauccagcgccugcauccgcagaucuaacaauuccuuuuucagccggcugaacuggcucacccaucugaaguuuaaguauccugcucuuaaugucacgaugcccaacaacgagaaauucgacaagcuguacauuuggggcgugcaccauccugggacagauaaugaccagaucuuuccguaugcccaggcgucuggacgcauuaccguuuccacaaaaagaagccaacagaccgugauccccaacauuggcucccggccucgcgucagaaauauccccucucggaucagcauuuacuggaccaucgugaagccuggggauauucuccugaucaacuccacaggaaaucugauugcuccccgcggcuacuucaaaaucagaagcgggaagucuuccaucaugcggagcgacgccccgauuggaaaguguaacucugaaugcaucacgccuaauggcagcauucccaacgacaaaccuuuucagaaugugaaccgcaucaccuauggcgccugucccagauacgucaagcagaauacacucaaacuggcuaccgggaugcggaacguucccgagaagcaaacacgcggaauuuucggcgccaucgcgggguuuaucgaaaauggaugggagggcaugguggaugggugguauggauucagacaccagaacuccgagggcauuggccaggccgcugaccuuaaaucuacccaagccgcuaucgaucagauuaaugggaagcugaaccggcucaucggaaaaacgaacgaaaaguuccaccagauugagaaggaauuuagcgagguggaaggcagaauccaggaccuggagaaauacgucgaggauacaaagauugaccuuugguccuauaaugccgaacugcucguggcccuggagaaccaacauaccaucgaucugaccgacagcgaaaugaauaaacucuucgagaagaccaaaaagcagcugcgcgaaaacgcugaggauauggggaauggaugcuuuaagaucuaccacaaaugugacaacgcgugcauuggcucuauccggaaugggacauaugaucauaacguuuacagagacgaggcccuuaauaaccgcuuccagauuaagggcguggaacugaaauccggauacaaggacuggauccucuggauuagcuuugcuaucucuugcuuccugcuuugugucgcccugcucggcuuuaucaugugggccugccagaaagggaauauucgguguaacaucugcauuuga

SEQ ID NO: 194515 - RNA, 1698 nt, Artificial Sequence
  derived and/or modified CDS sequence (opt5) from hemagglutinin__InfluenzaA__ACI26472
augaagaccaucauugcccugagcuacauccucugccugguguucacacagaaacuucccggcaacgacaauuccacggcuacccugugucucgggcaccaugccgucccuaacggaacaauuguuaagaccaucacaaaugaucaaauugaggugaccaacgcgacagaacuggugcagucuagcuccaccggcgagaucugcgacucuccgcaccagauccuugauggggaaaauuguacgcugauugacgcucuccugggagauccccagugcgacggcuuucaaaacaaaaagugggaucuguucgucgagagaagcaaagccuauuccaauuguuacccuuaugacgugcccgauuacgccucucuccggagccugguugcuuccagcgggacccuugaauuuaacaaugagucuuucaacuggacaggagugacccagaauggcacauccagcgccugcauccgcagaucuaacaauuccuuuuucagccggcugaacuggcucacccaucugaaguuuaaguauccugcucuuaaugucacgaugcccaacaacgagaaauucgacaagcuguacauuuggggcgugcaccauccuguuacagauaaugaccagaucuuucucuaugcccagucugggcgcauuaccguguccacaaaaagaagccaacagaccgucaucccgaacauuggauaccggccccgcgugagaaauaucccuucccggaucucuauuuacuggaccaucgugaagcccggcgauauucugcugaucaacagcacagggaaucucauugcgccucgcggauauuucaaaaucagauccggcaagagcucuaucaugcgguccgacgcccccauugggaaguguaacagcgaaugcaucacgccgaauggaucuauuccuaacgacaaacccuuucagaaugucaaccgcaucaccuacggcgcuuguccuagauauguuaagcagaauacacugaaacuugccaccggcaugcggaacgugcccgagaagcaaacacgcgggauuuucggagcuaucgccggcuuuaucgaaaaugggugggagggaaugguggauggcugguacggguucagacaccagaacagcgagggaauuggccaggcggccgaccugaaauccacccaagcugccaucgaucagauuaauggcaagcucaaccggcugaucgggaaaacgaacgaaaaguuccaccagauugagaaggaauuuucugaggucgaaggaagaauccaggaccuugagaaauauguggaggauacaaagauugaccuguggagcuacaaugcugaacuccugguugcccuggagaaccaacauaccaucgaucucaccgacuccgaaaugaauaaacuguucgagaagaccaaaaagcagcuucgcgaaaacgccgaggauaugggcaaugggugcuuuaagaucuaucacaaaugugacaacgcuugcauuggaagcauccggaauggcacauacgaucaugacguguacagagacgaggcgcugaacaaucgcuuccagauuaagggggucgaacucaaaucuggcuauaaggauuggauccuguggauuuccuuugccaucagcugcuuccuucuguguguggcucuccugggauuuaucaugugggccugccagaaaggcaacauucgguguaauaucugcauuuga

SEQ ID NO: 194516 - RNA, 1701 nt, Artificial Sequence; identical to SEQ ID NO: 194507
  derived and/or modified CDS sequence (opt5) from hemagglutinin__InfluenzaA__ACI26483

SEQ ID NO: 194517 - RNA, 1701 nt, Artificial Sequence
  derived and/or modified CDS sequence (opt5) from hemagglutinin__InfluenzaA__ACI26505
augaagaccaucauugcccugagcuacauccucugccugguguucgcucagaaacuucccggcaacgacaauuccacagccacgcugugucucgggcaccaugcggucccuaacggaaccauuguuaagacaaucaccaaugaucaaauugaggugacaaacgcuaccgaacuggugcagucuagcuccacaggcgagaucugcgacucuccgcaccagauccuugauggggaaaauuguacccugauugacgcccuccugggagauccccagugcgacggcuuucaaaacaaaaagugggaucuguucgucgagagaagcaaagccuauuccaauuguuacccuuaugacgugcccgauuacgcuucucuccggagccugguugccuccagcgggacgcuugaauuuaacaaugagucuuucaacugggcuggagugacccagaauggcacauccagcgccugcauccgcaagucuaacaauuccuuuuucagcagacugaacuggcucacccaucugaaguuuaaauauccugcgcuuaaugucacaaugcccaacaacgagcaguucgacaagcuguacauuuggggcgugcaccauccugggaccgauaaugaccagaucuuucucuaugcccaggcuucuggacggauuacgguuuccacaaaacgcagccaacagaccgugaucccgaacauuggcuccagaccccggguccgcaauaucccuucuagaaucagcauuuacuggacaaucgugaagcccggggauauucugcugaucaacuccaccggaaaucucauugccccucggggcuacuucaaaauccgcagcgggaagucuuccaucaugagaagcgacgcucccauuggaaaguguaacucugaaugcaucaccccgaauggcagcauuccuaacgacaaacccuuucagaaugugaaccggaucacauauggcgccuguccucgcuacgucaagcaaaauacgcugaaacuugcgaccgggaugagaaacguucccgagaagcagacacggggaauuuucggcgccaucgcuggguuuaucgaaaauggaugggagggcaugguggaugggugguauggauuccgccaccagaacuccgagggcagaggccaagccgcugaccugaaaucuacccaggccgccauugaucagaucaaugggaagcucaaccggcugauuggaaaaacaaacgaaaaguuccaccagaucgagaaggaauuuagcgagguggaaggccgcauucaagaccuugagaaauacgucgaggauaccaagaucgaccugugguccuauaaugcugaacuccugguggcgcuggagaaccagcauacgauugaucucacagacagcgaaaugaauaaacuguucgagaagaccaaaaagcagcuuagagaaaacgccgaggauauggggaauggaugcuuuaagaucuaccacaaaugugacaacgcuugcauccggucuauuagaaauggcaccuaugaucaugacguuuaccgcgacgaggcccugaacaaucgguuccagaucaaggggguggaacucaaauccggcuacaaggauuggauucuguggaucagcuuugccauuucuugcuuccuucugugugucgcucuccugggauuuaucaugugggccugccaaaaaggcaacaucagauguaauauuugcaucuga

SEQ ID NO: 194518 - RNA, 1701 nt, Artificial Sequence; identical to SEQ ID NO: 194506
  derived and/or modified CDS sequence (opt5) from hemagglutinin__InfluenzaA__ACI26516

SEQ ID NO: 194519 - RNA, 1701 nt, Artificial Sequence; identical to SEQ ID NO: 194507
  derived and/or modified CDS sequence (opt5) from hemagglutinin__InfluenzaA__ACI26527

SEQ ID NO: 194520 - RNA, 1701 nt, Artificial Sequence
  derived and/or modified CDS sequence (opt5) from hemagglutinin__InfluenzaA__ACI26538
augaagaccaucauugcccugagcuacauccucugccugguguucgcucagaaacuucccggcaacgacaauuccacagccacgcugugucucgggcaccaugcggucccuaacggaaccauuguuaagacaaucaccaaugaucaaauugaggugacaaacgcuaccgaacuggugcagucuagcuccacaggcgagaucugcgacucuccgcaccagauccuugauggggaaaauuguacccugauugacgcccuccugggagauccccagugcgacggcuuucaaaacaaaaagugggaucuguucgucgagagaagcaaagccuauuccaauuguuacccuuaugacgugcccgauuacgcuucucuccggagccugguugccuccagcgggacgcuugaauuuaacaaugagucuuucaacuggaccggagugacacagaauggcaccuccagcgcuugcauccgcagaucuaacaauuccuuuuucagccggcugaacuggcucacacaucugaaguuuaaguauccugcccuuaaugucaccaugcccaacaacgagcaguucgacaaacuguacauuuggggcgugcaccauccugggacggauaaugaccagaucuuucucuaugcgcaagccucuggacgcauuacaguuuccaccaagagaagccagcagacagugaucccgaacauuggcucccggccccgcgucagaaauaucccuucucggaucagcauuuacuggaccaucgugaaacccggggauauucugcugaucaacuccaccggaaaucucauugcuccucgcggcuacuucaagaucagaagcgggaaaucuuccaucaugcggagcgacgcccccauuggaaaguguaacucugaaugcaucacaccgaauggcagcauuccuaacgacaagcccuuucagaaugugaaccgcaucacguauggcgcuuguccuagauacgucaaacaaaauacccugaaacuugccacagggaugcggaacguucccgauaaacagacccgcggaauuuucggcgcgaucgccggguuuaucgagaauggaugggaaggcaugguggacgggugguauggauucagacaccagaacuccgagggccggggccaagcugccgaucugaagucuacacaggcugccauugaccagaucaaugggaaacucaacagacugauuggaaagaccaacgagaaauuccaccagaucgaaaaggaguuuagcgaaguggagggccgcauucaagaucuugaaaaguacgucgaggacacgaaaaucgaucugugguccuauaaugccgagcuccugguggcucuggaaaaccagcauacaauugaccucaccgauagcgagaugaauaagcuguucgaaaagaccaagaaacagcuucgggagaacgcggaagacauggggaauggaugcuuuaagaucuaccacaagugugauaacgccugcaucggcucuauuagaaaugggacauaugaccaugacguuuaccgcgaugaggcucugaacaaucgguuccagaucaaaggcguggagcucaaguccggauacaaagacuggauucuguggaucagcuuugccauuucuugcuuccuucugugugucgcccuccugggcuuuaucaugugggcuugccaaaaggggaacaucagauguaauauuugcaucuga

SEQ ID NO: 194521 - RNA, 1701 nt, Artificial Sequence
  derived and/or modified CDS sequence (opt5) from hemagglutinin__InfluenzaA__ACI26549
augaagaccaucauugcccugagcuacaucuucugccucguguuugcucagaaacugcccggcaacgacaauuccacagccacgcuuugucuggggcaccaugcggucccuaacggaacccucguuaagacaauuaccaaugaucaaaucgaggugacaaacgcuaccgaacuggugcagucuagcuccacaggcagaauuugcgacucuccgcaccggauccuugaugggaaaaauuguacccugaucgacgcccuccugggagauccccauugcgacggcuuccagaacgagaagugggaucuguuugucgaacgcagcaaagccuauuccaauuguuacccuuaugacgugcccgauuacgcuucucucagaagccugguugccuccagcgggacgcuugaguucauuaacgaagacuuuaauuggaccggagugacacagucuggcggcuccuauagcugcaagcgggggucugucaacuccuucuuuagccgccugaauuggcuccacgagucugaguacaaguauccugcucugaacgugaccaugcccaauaacggaaaauucgauaagcuguacaucuggggcguucaucacccuuccacagacagagaacaaaccaaacuguacgugcgggccagcgggcgcgucacgguguccacaaagagaucucagcagaccgugauuccgaauaucggaagccggcccuggguccgcggccucuccagcagaauuucuaucuauuggacaauuguuaaaccuggggauauccugcugaucaacuccaccggaaaccucauugcgccccggggcuacuuuaagauccgcaccggcaagagcucuauuaugagaagcgacgccccuaucgggacauguuccucugagugcauuacgcccaauggaagcaucccgaacgacaaaccuuuccagaaugugaacaagaucaccuauggcgcuuguccccgguacgugaaacaaaauacacugaaacuugccaccgggaugcgcaacgucccugaaaagcagacaagaggaauuuuuggcgcuaucgccggguucauugagaauggaugggagggcaugguggauggcugguauggguuucggcaccagaacuccgaaggaaccggccaggcggccgaccuuaagagcacgcaagcugccaucgaucagauuaaugggaaacucaacagacugaucgagaagacaaaugaaaaguuccaucagaucgagaaagaguucucugaaguugagggacgcauucaagaccuugaagaguacguggaagauaccaagaucgaccugugguccuauaacgcugagcuccuggucgcccuggaaaaucagcacaccauugaucucacagacagcgagaugaacaaacuguuugagaagacccggaaacagcuuagagaaaaugccgaggauaugggcaacgggugcuucaagaucuaccauaagugugacaacgcuugcauuggcucuauccgcaauggaacauacgaucacgacguguaucgggacgaagcgcugaacaauagauuucagauuaaaggcguugagcucaaguccggguacaaagauuggauccuguggaucagcuucgccauuuccugcuuucuucugugugugguccuccugggauucaucaugugggcuugccaaaagggcaacauucgcuguaauaucugcauuuga

SEQ ID NO: 194522 - RNA, 1701 nt, Artificial Sequence
  derived and/or modified CDS sequence (opt5) from hemagglutinin__InfluenzaA__ACI26560
augaagaccaucauugcccugagcuacaucuucugccucguguuugcucagaaacugcccggcaacgacaauuccacagccacgcuuugucuggggcaccaugcggucccuaacggaacccucguuaagacaauuaccaaugaucaaaucgaggugacaaacgcuaccgaacuggugcagucuagcuccacaggcagaauuugcgacucuccgcaccggauccuugaugggaaaaauuguacccugaucgacgcccuccugggagauccccauugcgacggcuuccagaacaaggagugggaucuguuugucgaacgcagcaaagccuauuccaauuguuacccuuaugacgugcccgauuacgcuucucucagaagccugguugccuccagcgggacgcuugaguucauuaacgaagacuuuaauuggaccggaguggcucagucuggcggcuccuaugccugcaagcgggggagcgucaacucuuucuuuucccgccugaauuggcuccacgagagcgaguacaaguauccugcgcugaacgugacaaugcccaauaacggaaaauucgauaagcuguacaucuggggcguucaucacccuauuaccgacagagaacaaacaaaucuguacgugcgggccucugggcgcgucaccguguccacgaaaagaagccagcagacagugaucccgaacauuggaucccggcccuggguccgcggccucucuagcagaaucuccauuuauuggaccaucguuaagccuggggauauccugcugauuaacagcacaggaaaucucaucgcuccccggggcuacuuuaaaauucgcaccggcaagucuuccaucaugagaagcgacgccccuauugggaccuguucuagcgagugcaucacacccaacggauccaucccgaaugacaagccuuuccagaacgugaaucggauuacguauggcgcuuguccccgcuacgugaaacaaaacacccugaaacuugccacagggaugagaaaugucccugaaaagcagacccggggaaucuuuggcgcgauugccggguucaucgagaacggaugggagggcaugguggauggcugguauggguuuagacaccaaaauucugaaggaacaggccaggcugccgaccuuaagagcacccaggcugccauugaucagaucaacgggaaacucaaucgccugaucgagaagacgaacgaaaaauuccaucagauugagaaggaguucuccgaaguugagggacggauccaagaccuugaaaaguacguggaggauacaaaaauugaccuguggagcuauaaugccgaacuccuggucgcucuggagaaccagcacaccaucgaucucaccgacucugaaaugaauaagcuguuugagaaaacaagaaagcagcuucgcgagaacgcggaagauaugggcaacgggugcuucaaaauuuaccauaagugugacaaugccugcaucggcuccauucggaacggaaccuacgaucacgacguguauagagacgaggcucugaauaaccgcuuucagaucaagggcguugaacucaaaagcggguacaaggauuggauccuguggauuucuuucgccaucuccugcuuucuucugugugugguccuccugggauucauuaugugggccugccaaaaaggcaauauccgguguaacauuugcaucuga

SEQ ID NO: 194523 - RNA, 1701 nt, Artificial Sequence
  derived and/or modified CDS sequence (opt5) from hemagglutinin__InfluenzaA__ACI26571
augaagaccaucauugcccugagcuacaucuucugccucguguuugcucagaaacugcccggcaacgacaauuccacagccacgcuuugucuggggcaccaugcggucccuaacggaacccucguuaagacaauuaccaaugaucaaaucgaggugacaaacgcuaccgaacuggugcagucuagcuccacaggcagaauuugcgacucuccgcaccggauccuugaugggaaaaauuguacccugaucgacgcccuccugggagauccccauugcgacggcuuccagaacaaggagugggaucuguuugucgaacgcagcaaagccuauuccaauuguuacccuuaugacgugcccgauuacgcuucucucagaagccugguugccuccagcgggacgcuugaguucauuaacgaagacuuuaauuggaccggaguggcucagucuggcggcuccuaugccugcaagcgggggagcgucaacucuuucuuuucccgccugaauuggcuccacgagagcgaguacaaguauccugcgcugaacgugacaaugcccaauaacggaaaauucgauaaacuuuacaucuggggcguucaucacccuucuaccgacagagaacaaacaaagcuguacgugcgggccuccgggcgcgucaccgugagcacgaagagaucccagcagacagugauuccgaauaucggaucucggcccuggguccgcggccucagcuccagaauuagcaucuauuggaccauuguuaaaccuggggauauccugcugaucaacucuacaggaaaccucauugcuccccggggcuacuuuaagauccgcaccggcaaguccagcauuaugagaucugacgccccuaucgggaccuguagcuccgagugcauuacacccaauggaucuaucccgaacgacaaaccuuuccagaaugugaaccggaucacguauggcgcuuguccccgcuacgugaagcaaaauacccugaaacuugccacagggaugagaaacgucccugaaaagcagacccggggaauuuuuggcgcgaucgccggguucauugagaauggaugggagggcaugguggauggcugguauggguuuagacaccagaacagcgaaggaacaggccaggcugccgaccugaaauccacccaagcugccaucgaucagauuaaugggaagcucaaccgccugaucgagaaaacgaaugaaaaguuccaucagaucgagaaggaguucagcgaaguugagggacggauucaagaccuugaaaaauacguggaggauacaaagaucgaccuguggucuuauaacgccgaacuccuggucgcucuggagaaucagcacaccauugaucucaccgacuccgaaaugaacaaacuguuugagaagacaagaaaacagcuucgcgagaaugcggaagauaugggcaacgggugcuucaagaucuaccauaagugugacaacgccugcauuggcagcauccggaauggaaccuacaaccacgauguguauagagacgaggcucugaauaaccgcuuucagauuaaaggcguugaacucaagucuggguacaaagacuggauccuguggaucuccuucgccauuagcugcuuucuucugugugugguccuccugggauucaucaugugggccugccaaaagggcaauauucgguguaacaucugcauuuga

SEQ ID NO: 194524 - RNA, 1701 nt, Artificial Sequence
  derived and/or modified CDS sequence (opt5) from hemagglutinin__InfluenzaA__ACI26593
augaagaccaucauugcccugagcuacauccucugccugguguucgcucagaaacuucccggcaacgacaauuccacagccacgcugugucucgggcaccaugcggucccuaacggaacccugguuaagacaauuaccaaugaucaaaucgaggugacaaacgcuaccgaacuugugcagucuagcuccacaggcagaauuugcgacucuccgcaccggauccuggaugggaaaaauuguacccucaucgacgcccugcugggagauccccauugcgacggcuuucagaacaaggagugggaucucuucgucgaacgcagcaaagccuauuccaauuguuacccuuaugacgugcccgauuacgcuucucugagaagccuuguugccuccagcgggacgcuggaguuuaccaacgaagacuucaauuggacaggaguggcucagucuggcgaguccuaugccugcaagcggggcagcgucaaguccuuuuucucucgccucaacuggcugcacaaaagcgauuacaaguauccugcgcuuaaugugaccaugcccaacaaugggaaauuugacaagcuguacauuuggggaguucaucacccuucuacagauagagagcaaaccucccucuacgugcgggccagcggccgcgucacgguguccacaaaaagaucucagcagaccgugaucccgaacauugggagccggcccuggguccgcggacuguccagcagaaucucuauuuauuggacaaucguuaagccuggcgacauucugcucaucaauuccaccgggaaccugaucgcuccccggggauacuucaagauucgcaccggcaaaagcucuaucaugagaagcgacgccccuauuggcacauguuccucugaaugcaucacgcccaacgggagcauuccgaaugauaagccuuuucagaacgugaaucggaucaccuauggagcuuguccccgcuacgugaaacaaaacacacuuaagcuggccaccggcaugagaaaugucccugagaaacagacacgggggaucuucggagcgauugccggcuuuaucgaaaacgggugggagggaaugguggacggcugguauggcuucagacaccaaaauuccgaggggaccggacaggcugccgaucucaagagcacgcaggcugccauugaccagaucaacggcaaacugaaucgccuuauugaaaagacaaacgagaaguuucaucagaucgaaaaagaguucucugaaguugaggggcggauccaagaucuggagaaguacguggaagacaccaaaauugaucucugguccuauaaugccgagcugcuggucgcucucgaaaaccagcacaccaucgaccugacagauagcgagaugaauaaacuuuucgaaaagaccagaaagcagcugcgcgagaacgcggaggacaugggaaauggcugcuuuaagauuuaccauaaaugugauaacgccugcaucgggucuauucggaacggcacauacgaccacgacguguauagagaugaagcucucaauaaccgcuuccagaucaagggaguugagcugaaauccggcuacaaggacuggauucuuuggaucagcuuugccaucuccugcuuccugcucugugugguccugcugggguuuauuaugugggccugccaaaaaggaaauauccgguguaacauuugcaucuga

SEQ ID NO: 194525 - RNA, 1698 nt, Artificial Sequence
  derived and/or modified CDS sequence (opt5) from hemagglutinin__InfluenzaA__ACI32715
augaaggugaaacugcucguccugcuuugcaccuucacagccacguacgcugacaccaucuguauuggcuaucacgccaacaauagcacagauaccguugacacagugcuggagaagaacgugaccgucacacauuccgugaaucuccuggaagauucucacaacgggaaacuuugccugcucaagggaaucgcgccccugcagcugggcaauuguagcguugcuggguggauucucggaaacccugagugcgaacugcuuaucuccaaagagucuuggagcuacauuguggaaaccccgaaucccgagaacggcacguguuauccuggguacuuugccgacuaugaggaacugagagagcaacucuccucugucagcuccuucgaacgguuugagaucuuccccaaggagagcucuuggccuaaucauaccgugacaggaguuuccgccagcugcucucacaacggcaaguccagcuuuuaccgcaaucugcuuuggcugaccggcaaaaacgggcucuaucccaaucugucuaaguccuacgcuaacaauaaagaaaaggaggugcugguccucuggggagugcaucacccuccgaacaucggcgaucagagagcccuguaccacacagaaaacgcuuaugugagcgucguuuccucucauuacagccggcgcuucacccccgagauugccaaaagaccuaaggugcgggaccaggaagggcgcaucaauuauuacuggacgcuucuggagcccggagauacaauuaucuuugaggcgaacggcaaucucauugccccuagauucgcuuuugcccugucccggggguucggaagcggcaucauuaccucuaacgcucccauggacgaaugugaugccaagugccagacaccgcaaggcgcgaucaauuccagccuuccuuuucagaacgugcaccccgucaccaucggggaguguccuaaauaugugcgcucugccaagcugagaauggcuaccggacuccggaauauucccagcauccagucccgcggccuguucggggccauugcuggauuuaucgaaggcggguggacaggaaugguugacggcugguacggcuaucaucaccagaacgagcaagggucuggauacgccgccgaucagaaaagcacgcagaaugcuauuaacggcaucaccaauaaggugaacacagucaucgaaaagaugaauacccaguucacagcgguggggaaagaguucuccaaacuggagagacggauggaaaaccucaauaagaagguugacgauggauuucuggacauuuggaccuacaacgccgagcuucuggugcuccuggaaaacgagcgcacgcuugacuuccacgauagcaaugucaaaaaccuguaugaaaaggugaaaucucaacucaagaauaacgcuaaagagaucggcaaugggugcuuugaguucuaccauaaguguaacgacgaaugcauggaguccgucaagaauggcacauaugauuaccccaaauauagcgaagagucuaagcugaacagagagaaaauugacggagugaagcuggaauccaugggcguuuaccagauccucgccauuuauagcaccguggccuccucucugguccuucuggugagccucggggcuaucuccuuuuggaugugcucuaauggaagccugcagugucggaucugcauuuga

SEQ ID NO: 194526 - RNA, 1698 nt, Artificial Sequence
  derived and/or modified CDS sequence (opt5) from hemagglutinin__InfluenzaA__ACI32716
augaaggugaaacugcucguccugcuuugcaccuucacagccacguacgcugacaccaucuguauuggcuaucacgccaacaauagcacagauaccguugacacagugcuggagaagaacgugaccgucacacauuccgugaaucuccuggaagauucucacaacgggaaacuuugccugcucaagggaaucgcgccccugcagcugggcaauuguagcguugcuggguggauucucggaaacccugagugcgaacugcuuaucuccaaagagucuuggagcuacauuguggaaaccccgaaucccgagaacggcacguguuauccuggguacuuugccgacuaugaggaacugagagagcaacucuccucugucagcuccuucgaacgguuugagaucuuccccaaggagagcucuuggccuaaucauaccgugacaggaguuuccgccagcugcucucacaacggcaaguccagcuuuuaccgcaaucugcuuuggcugaccggcaaaaacgggcucuaucccaaucugucuaaguccuacgcuaacaauaaagaaaaggaggugcugguccucuggggagugcaucacccuccgaacaucggcgaucagagagcccuguaccacacagaaaacgcuuaugugagcgucguuuccucucauuacagccggcgcuucacccccgagauugccaaaagaccuaaggugcgggaccaggaagggcgcaucaauuauuacuggacgcuucuggagcccggagauacaauuaucuuugaggcgaacggcaaucucauugccccuagauucgcuuuugcccugucccggggguucggaagcggcaucauuaccucuaacgcucccauggacgaaugugaugccaagugccagacaccgcaaggcgcgaucaauuccagccuuccuuuucagaacgugcaccccgucaccaucggggaguguccuaaauaugugcgcucugccaagcugagaauggcuaccggacuccggaauauucccagcauccagucccgcggccuguucggggccauugcuggauuuaucgaaggcggguggacaggaaugguugacggcugguacggcuaucaucaccagaacgagcaagggucuggauacgccgccgaucagaaaagcacgcagaaugcuauuaacggcaucaccaauaaggugaacuccgucaucgaaaagaugaauacacaguucaccgcgguggggaaagaguucagcaaacuggagagacggauggaaaaccucaauaagaagguugacgauggauuucuggacauuuggacauacaacgccgagcuucuggugcuccuggaaaacgagcgcacccuugacuuccacgauucuaaugucaaaaaccuguaugaaaaggugaaaucccaacucaagaauaacgcuaaagagaucggcaaugggugcuuugaguucuaccauaaguguaacgacgaaugcauggagagcgucaagaauggcacguaugauuaccccaaauauucugaagaguccaagcugaacagagagaaaauugacggagugaagcuggaaagcaugggcguuuaccagauccucgccauuuauuccacaguggccucuagccugguccuucuggugucccucggggcuaucucuuuuuggaugugcagcaauggaucccugcaguguaccaucugcauuuga

SEQ ID NO: 194527 - RNA, 1698 nt, Artificial Sequence
  derived and/or modified CDS sequence (opt5) from hemagglutinin__InfluenzaA__ACI32717
augaaggugaaacugcucguccugcuuugcaccuucacagccacguacgcugacaccaucuguauuggcuaucacgccaacaauagcacagauaccguugacacagugcuggagaagaacgugaccgucacacauuccgugaaucuccuggaagauucucacaacgggaaacuuugccugcucaagggaaucgcgccccugcagcugggcaauuguagcguugcuggguggauucucggaaacccugagugcgaacugcuuaucuccaaagagucuuggagcuacauuguggaaaccccgaaucccgagaacggcacguguuauccuggguacuuugccgacuaugaggaacugagagagcaacucuccucugucagcuccuucgaacgguuugagaucuuccccaaggagagcucuuggccuaaucauaccgugacaggaguuuccgccagcugcucucacaacggcaaguccagcuuuuaccgcaaucugcuuuggcugaccggcaaaaacgggcucuaucccaaucugucuaaguccuacgcuaacaauaaagaaaaggaggugcugguccucuggggagugcaucacccuccgaacaucggcgaucagagagcccuguaccacacagaaaacgcuuaugugagcgucguuuccucucauuacagccggcgcuucacccccgagauugccaaaagaccuaaggugcgggaccaggaagggcgcaucaauuauuacuggacgcuucuggagcccggagauacaauuaucuuugaggcgaacggcaaucucauugccccuagauucgcuuuugcccugucccggggguucggaagcggcaucauuaccucuaacgcucccauggacgaaugugaugccaagugccagacaccgcaaggcgcgaugaacuccagccuuccuuuucagaaugugcaccccgucaccaucggggaguguccuaaauaugugcgcucugccaagcugagaauggcuaccggacuccggaauauccccagcauucagucccgcggccuguucggggccaucgcuggauuuauugaaggcggguggacaggaaugguugacggcugguacggcuaucaucaccagaacgagcaagggucuggauacgccgccgaucagaaaagcacgcagaaugcuaucaacggcauuaccaauaaggugaacuccgucaucgaaaagaugaauacacaguucaccgcgguggggaaagaguucagcaaacuggagagacggauggaaaaccucaauaagaagguugacgauggauuucuggacaucuggacauacaacgccgagcuucuggugcuccuggaaaacgagcgcacccuugacuuccacgauucuaaugucaaaaaccuguaugaaaaggugaaaucccaacucaagaauaacgcuaaagagauuggcaaugggugcuuugaguucuaccauaaguguaacgacgaaugcauggagagcgucaagaauggcacguaugauuaccccaaauauucugaagaguccaagcugaacagagagaaaaucgacggagugaagcuggaaagcaugggcguuuaccagauucucgccaucuauuccacaguggccucuagccugguccuucuggugucccucggggcuauuaauuuuuggaugugcucuaacggaagccugcaguguaaaaucugcaucuga

SEQ ID NO: 194528 - RNA, 1698 nt, Artificial Sequence
  derived and/or modified CDS sequence (opt5) from hemagglutinin__InfluenzaA__ACI32718
augaaggugaaacugcucguccugcuuugcaccuucacagccacguacgcugacaccaucuguauuggcuaucacgccaacaauagcacagauaccguugacacagugcuggagaagaacgugaccgucacacauuccgugaaucuccuggaagauucucacaacgggaaacuuugccugcucaagggaaucgcgccccugcagcugggcaauuguagcguugcuggguggauucucggaaacccugagugcgaacugcuuaucuccaaagagucuuggagcuacauuguggaaaccccgaaucccgagaacggcacguguuauccuggguacuuugccgacuaugaggaacugagagagcaacucuccucugucagcuccuucgaacgguuugagaucuuccccaaggagagcucuuggccuaaucauaccgccacaggaguguccgcuagcugcucucacaacggcaaguccagcuuuuaccgcaaucugcuuuggcugaccggcaaaaacgggcucuaucccaaucugucuaaguccuacgccaacaauaaagaaaaggagguucuggugcucuggggaguccaucacccuccgaacaucggcgaucagagagcucuguaccacacagaaaacgccuaugugagcguggucuccucucauuacagccggcgcuucacccccgagauugcgaaaagaccuaagguucgggaccaggaagggcgcaucaauuauuacuggacgcuucuggagcccggagauacaauuaucuuugaggccaacggcaaucucauugcuccuagauucgccuuugcucugucccggggguucggaagcggcaucauuaccucuaacgcccccauggacgaaugugaugcgaagugccagacaccgcaaggcgccaucaauuccagccuuccuuuucagaacgugcaccccgugaccaucggggaguguccuaaauauguccgcucugcuaagcugagaauggccaccggacuccggaauauucccagcauccagucccgcggccuguucggggcuauugccggauuuaucgaaggcggguggacaggaaugguggacggcugguacggcuaucaucaccagaacgagcaagggucuggauacgccgcugaucagaaaagcacgcagaaugcgauuaacggcaucaccaauaagguuaacuccgugaucgaaaagaugaauacacaguucaccgccgucgggaaagaguucagcaaacuggagagacggauggaaaaccucaauaagaagguggacgauggauuucuggacauuuggacauacaacgcugagcuucugguucuccuggaaaacgagcgcacccuugacuuccacgauucuaaugugaaaaaccuguaugaaaaggucaaaucccaacucaagaauaacgccaaagaggugggcaaugggugcuuugaguucuaccauaaguguaacgacgaaugcauggagagcgucaagaauggcacguaugauuaccccaaauauucugaagaguccaagcugaacagagagaaaaucgacggagugaagcuggaaagcaugggcguuuaccagauucucgccaucuauuccacaguggcuucuagccugguccuucuggugucccucggggccauuucuuuuuggaugugcagcaauggaucccugcaguguaccaucugcaucuga

SEQ ID NO: 194529 - RNA, 1698 nt, Artificial Sequence; identical to SEQ ID NO: 194526
  derived and/or modified CDS sequence (opt5) from hemagglutinin__InfluenzaA__ACI32719

SEQ ID NO: 194530 - RNA, 1698 nt, Artificial Sequence; identical to SEQ ID NO: 194526
  derived and/or modified CDS sequence (opt5) from hemagglutinin__InfluenzaA__ACI32720

SEQ ID NO: 194531 - RNA, 1698 nt, Artificial Sequence
  derived and/or modified CDS sequence (opt5) from hemagglutinin__InfluenzaA__ACI32721
augaaggugaaacugcucguccugcuuugcaccuucacagccacguacgcugacaccaucuguauuggcuaucacgccaacaauagcacagauaccguugacacagugcuggagaagaacgugaccgucacacauuccgugaaucuccuggaagauucucacaacgggaaacuuugccugcucaagggaaucgcgccccugcagcugggcaauuguagcguugcuggguggauucucggaaacccugagugcgaacugcuuaucuccaaagagucuuggagcuacauuguggaaaccccgaaucccgagaacggcacguguuauccuggguacuuugccgacuaugaggaacugagagagcaacucuccucugucagcuccuucgaacgguuugagaucuuccccaaggagagcucuuggccuaaucauaccgugacaggaguuuccgccagcugcucucacaacggcaaguccagcuuuuaccgcaaucugcuuuggcugaccggcaaaaacgggcucuaucccaaucugucuaaguccuacgcuaacaauaaagaaaaggaggugcugguccucuggggagugcaucacccuccgaacaucggcgaucagagagcccuguaccacacagaaaacgcuuaugugagcgucguuuccucucauuacagccggcgcuucacccccgagauugccaaaagaccuaaggugcgggaccaggaagggcgcaucuccuauuacuggacgcuucuggagcccggagauacaauuaucuuugaggcgaauggcaaccucauugccccuagauucgcuuuugcccugagccggggguucggaucuggcaucauuaccuccaaugcucccauggacgaaugugaugccaagugccagacaccgcaaggcgcgaucaacagcucucuuccuuuucagaaugugcaccccgucaccaucggggaguguccuaaauaugugcgcagcgccaagcugagaauggcuaccggacuccggaacauucccuccauccagucucgcggccuguucggggccauugcuggauuuaucgaaggcggguggacaggaaugguugacggcugguacggcuaucaucaccagaaugagcaagggagcggauacgccgccgaucagaaauccacgcagaacgcuauuaauggcaucaccaacaaggugaauagcgucaucgaaaagaugaacacacaguucaccgcgguggggaaagaguucucuaaacuggagagacggauggaaaaucucaacaagaagguugacgauggauuucuggacauuuggacauacaaugccgagcuucuggugcuccuggaaaacgagcgcacccuugacuuccacgauuccaacgucaaaaaucuguaugaaaaggugaaaagccaacucaagaacaaugcuaaagagaucggcaacgggugcuuugaguucuaccauaaguguaaugacgaaugcauggagucugucaagaacggcacguaugauuaccccaaauauuccgaagagagcaagcugaauagagagaaaauugacggagugaagcuggaauccaugggcguuuaccagauccucgccauuuauucuacaguggccagcucccugguccuucuggugucucucggggcuaucagcuuuuggaugugcuccaacggaagccugcagugucggaucugcauuuga

SEQ ID NO: 194532 - RNA, 1698 nt, Artificial Sequence; identical to SEQ ID NO: 194526
  derived and/or modified CDS sequence (opt5) from hemagglutinin__InfluenzaA__ACI32722

SEQ ID NO: 194533 - RNA, 1698 nt, Artificial Sequence
  derived and/or modified CDS sequence (opt5) from hemagglutinin__InfluenzaA__ACI32723
augaaggugaaacugcucguccugcuuugcaccuucacagccacguacgcugacaccaucuguauuggcuaucacgccaacaauagcacagauaccguugacacagugcuggagaagaacgugaccgucacacauuccgugaaucuccuggaagauucucacaacgggaaacuuugccugcucaagggaaucgcgccccugcagcugggcaauuguagcguugcuggguggauucucggaaacccugagugcgaacugcuuaucuccaaagagucuuggagcuacauuguggaaaccccgaaucccgagaacggcacguguuauccuggguacuuugccgacuaugaggaacugagagagcaacucuccucugucagcuccuucgaacgguuugagaucuuccccaaggagagcucuuggccuaaucauaccgugacaggaguuuccgccagcugcucucacaacggcaaguccagcuuuuaccgcaaucugcuuuggcugaccggcaaaaacgggcucuaucccaaucugucuaaguccuacgcuaacaauaaagaaaaggaggugcugguccucuggggagugcaucacccuccgaacaucggcgaucagagagcccuguaccacacagaaaacgcuuaugugagcgucguuuccucucauuacagccggcgcuucacccccgagauugccaaaagaccuaaggugcgggaccaggaagggcgcaucaauuauuacuggacgcuucuggagcccggagauacaauuaucuuugaggcgaacggcaaucucauugccccuagauucgcuuuugcccugucccggggguucggaagcggcaucauuaccucuaacgcucccauggacgaaugugaugccaagugccagacaccgcaaggcgcgaucaauuccagccuuccuuuucagaacgugcaccccgucaccaucggggaguguccuaaauaugugcgcucugccaagcugagaauggcuaccggacuccggaauauucccagcauccagucccgcggccuguucggggccauugcuggauuuaucgaaggcggguggacaggaaugguugacggcugguacggcuaucaucaccagaacgagcaagggucuggauacgccgccgaucagaaaagcacgcagaaugcuauuaacggcaucaccaauaaggugaacuccgucaucgaaaagaugaauacacaguucaccgcgguggggaaagaguucagcaaacuggagagacggauggaaaaccucaauaagaagguugacgauggauuucuggacauuuggacauacaacgccgagcuucuggugcuccuggaaaacgagcgcacccuugacuuccacgauucuaaugucaaaaaccuguaugaaaaggugaaaucccaacucaagaauaacgcuaaagagaucggcaaugggugcuuugaguucuaccauaaguguaacgacgaaugcauggagagcgucaagaauggcacguaugauuaccccaaauauucugaagaguccaagcugaacagagagaaaauugacggagugaagcuggaaagcaugggcguuuaccagauccucgccauuuauuccacaguggccucuagccugguccuucuggugucccucggggcuaucucuuuuuggaugugcagcaauggaucccugcagugucggaucugcuucuga

SEQ ID NO: 194534 - RNA, 1698 nt, Artificial Sequence
  derived and/or modified CDS sequence (opt5) from hemagglutinin__InfluenzaA__ACI32724
augaaggugaaacugcucguccugcuuugcaccuucacagccacguacgcugacaccaucuguauuggcuaucacgccaacaauagcacagauaccguugacacagugcuggagaagaacgugaccgucacacauuccgugaaucuccuggaagauucucacaacgggaaacuuugccugcucaagggaaucgcgccccugcagcugggcaauuguagcguugcuggguggauucucggaaacccugagugcgaacugcuuaucuccaaagagucuuggagcuacauuguggaaaccccgaaucccgagaacggcacguguuauccuggguacuuugccgacuaugaggaacugagagagcaacucuccucugucagcuccuucgaacgguuugagaucuuccccaaggagagcucuuggccuaaucauaccgugacaggaguuuccgccagcugcucucacaacggcaaguccagcuuuuaccgcaaucugcuuuggcugaccggcaaaaacgggcucuaucccaaucugucuaaguccuacgcuaacaauaaagaaaaggaggugcugguccucuggggagugcaucacccuccgaacaucggcgaucagagagcccuguaccacacagaaaacgcuuaugugagcgucguuuccucucauuacagccggcgcuucacccccgagauugccaaaagaccuaaggugcgggaccaggaagggcgcaucaauuauuacuggacgcuucugaagcccggagauacaauuaucuuugaggcgaacggcaaucucauugccccuagauucgcuuuugcccugucccggggguucggaagcggcaucauuaccucuaacgcucccauggacgagugugaugccaaaugccagacaccgcaaggcgcgaucaauuccagccuuccuuuucagaacgugcaccccgucaccaucggggaauguccuaaguaugugcgcucugccaaacugagaauggcuaccggacuccggaauauucccagcauccagucccgcggccuguucggggccauugcuggauuuaucgagggcggguggacaggaaugguugacggcugguacggcuaucaucaccagaacgaacaagggucuggauacgccgccgaucaaaagagcacgcagaaugcuauuaacggcaucaccaauaaagugaacuccgucaucgagaagaugaauacacaguucaccgcgguggggaaagaguucagcaagcuggaaagacggauggagaaccucaauaagaaaguugacgauggauuucuggacauuuggacauacaacgccgaacuucuggugcuccuggagaacgaacgcacccuugacuuccacgauucuaaugucaagaaccuguaugagaaagugaagucccagcucaaaaauaacgcuaaggaaaucggcaaugggugcuuugaguucuaccauaaguguaacgacgagugcauggaaagcgucaaaaauggcacguaugauuaccccaaguauucugaggaauccaaacugaacagagagaagauugacggagugaaacuggagagcaugggcguuuaccagauccucgccauuuauuccacaguggccucuagccugguccuucuggugucccucggggcuaucucuuuuuggaugugcagcaauggaucccugcaguguaagaucugcauuuga

SEQ ID NO: 194535 - RNA, 1698 nt, Artificial Sequence; identical to SEQ ID NO: 193457
  derived and/or modified CDS sequence (opt5) from hemagglutinin__InfluenzaA__ACI32725

SEQ ID NO: 194536 - RNA, 1698 nt, Artificial Sequence
  derived and/or modified CDS sequence (opt5) from hemagglutinin__InfluenzaA__ACI32726
augaaggugaaacugcucguccugcuuugcaccuucacagccacguacgcugacaccaucuguauuggcuaucacgccaacaauagcacagauaccguugacacagugcuggagaagaacgugaccgucacacauuccgugaaucuccuggaagauucucacaacgggaaacuuugccugcucaagggaaucgcgccccugcagcugggcaauuguagcguugcuggguggauucucggaaacccugagugcgaacugcuuaucuccaaagagucuuggagcuacauuguggaaaccccgaaucccgagaacggcacguguuauccuggguacuuugccgacuaugaggaacugagagagcaacucuccucugucagcuccuucgaacgguuugagaucuuccccaaggagagcucuuggccuaaucauaccgugacaggaguuuccgccagcugcucucacaacggcaaguccagcuuuuaccgcaaucugcuuuggcugaccggcaaaaacgggcucuaucccaaucugucuaaguccuacgcuaacaauaaagaaaaggaggugcugguccucuggggagugcaucacccuccgaacaucggcgaucagagagcccuguaccacacagaaaacgcuuaugugagcgucguuuccucucauuacagccggcgcuucacccccgagauugccaaaagaccuaaggugcgggaccaggaagggcgcaucaauuauuacuggacgcuucuggagcccggagauacaauuaucuuugaggcgaacggcaaucucauugccccuagauucgcuuuugcccugucccggggguucggaagcggcaucauuaccucuaacgcucccauggacgaaugugaugccaagugccagacaccgcaaggcgcgaucaauuccagccuuccuuuucagaacgugcaccccgucaccaucggggaguguccuaaauaugugcgcucugccaagcugagaauggcuaccggacuccggaauauucccagcauccagucccgcggccuguucggggccauugcuggauuuaucgaaggcggguggacaggaaugguugacggcugguacggcuaucaucaccagaacgagcaagggucuggauacgccgccgaucagaaaagcacgcagaaugcuauuaacggcaucaccaauaaggugaacuccgucaucgaaaagaugaauacacaguucaccgcgguggggaaagaguucagcaaacuggagaagagaauggaaaaccucaauaagaaaguugacgauggauuucuggacauuuggacauacaacgccgagcuucuggugcuccuggaaaacgagcggacccuugacuuccacgauucuaaugucaagaaccuguaugaaaaagugaagucccaacucaaaaauaacgcuaaggagaucggcaaugggugcuuugaguucuaccauaaguguaacgacgaaugcauggagagcgucaaaaauggcacguaugauuaccccaaguauucugaagaguccaaacugaaccgcgagaagauugacggagugaaacuggaaagcaugggcaucuaccagauucucgccaucuauuccacaguuaccucuagccuggugcuucuggucucccucggggccaucucuuuuuggaugugcagcaauggaucccugcaguguagaauuugcaucuga

SEQ ID NO: 194537 - RNA, 1698 nt, Artificial Sequence
  derived and/or modified CDS sequence (opt5) from hemagglutinin__InfluenzaA__ACI32727
augaaggugaaacugcucguccugcuuugcaccuucacagccacguacgcugacaccaucuguauuggcuaucacgccaacaauagcacagauaccguugacacagugcuggagaagaacgugaccgucacacauuccgugaaucuccuggaagauucucacaacgggaaacuuugccugcucaagggaaucgcgccccugcagcugggcaauuguagcguugcuggguggauucucggaaacccugagugcgaacugcuuaucuccaaagagucuuggagcuacauuguggaaaccccgaaucccgagaacggcacguguuauccuggguacuuugccgacuaugaggaacugagagagcaacucuccucuaucagcuccuucgaacgguuugagaucuuccccaaggagagcucuuggccuaaucauaccgucacaggaguguccgccagcugcucucacaacggcaaguccagcuuuuaccgcaaucugcuuuggcugaccggcaaaaacgggcucuaucccaaucugucuaaguccuacgcuaacaauaaagaaaaggagguucuggugcucuggggaguccaucacccuccgaacauuggcgaucagagagcccuguaccacacagaaaacgcuuaugugagcguggucuccucucauuacagccggcgcuucacccccgagaucgccaaaagaccuaagguucgggaccaggaagggcgcauuaauuauuacuggacgcuucuggagcccggagauacaaucauuuuugaggcgaacggcaaucucaucgccccuagauucgcuuuugcccugucccggggguucggaagcggcauuaucaccucuaacgcucccauggacgaaugugaugccaagugccagacaccgcaaggcgcgaucaauuccagccuuccuuuucagaacgugcaccccgugaccauuggggaguguccuaaauauguccgcucugccaagcugagaauggcuaccggacuccggaauauccccagcauucagucccgcggccuguucggggccaucgcuggauuuauugaaggcggguggacaggaaugguggacggcugguacggcuaucaucaccagaacgagcaagggucuggauacgccgccgaucagaaaagcacgcagaaugcuaucaacggcaucaccaauaagguuaacuccgugauugaaaagaugaauacacaguucaccgcggucgggaaagaguucagcaaacuggagagacggauggaaaaccucaauaagaagguggacgauggauuucuggacaucuggacauacaacgccgagcuucugguucuccuggaaaacgagcgcacccuugacuuccacgauucuaaugugaaaaaccuguaugaaaaggucaaaucccaacucaagaauaacgcuaaagagauuggcaaugggugcuuugaguucuaccauaaguguaacgacgaaugcauggagagcgugaagaauggcacguaugauuaccccaaauauucugaagaguccaagcugaacagagagaaaaucgacggagucaagcuggaaagcaugggcguguaccagauucucgccaucuauuccacaguugccucuagccuggugcuucuggucacccucggggcuaucuccuuuuggaugugcucuaauggaagccugcaguguaccauuugcaucuga

SEQ ID NO: 194538 - RNA, 1698 nt, Artificial Sequence
  derived and/or modified CDS sequence (opt5) from hemagglutinin__InfluenzaA__ACI32729
augaaggugaaacugcucguccugcuuugcaccuucacagccacguacgcugacaccaucuguauuggcuaucacgccaacaauagcacagauaccguugacacagugcuggagaagaacgugaccgucacacauuccgugaaucuccuggaagauucucacaacgggaaacuuugccugcucaagggaaucgcgccccugcagcugggcaauuguagcguugcuggguggauucucggaaacccugagugcgaacugcuuaucccgaaagaguccuggucuuacauuguggaaacccccaauccugagaacggcacguguuaucccggguacuuugccgacuaugaggaacugagagagcaacucagcuccgucucuagcuucgaacgguuugagaucuucccuaaggaguccagcuggcccaaucauaccgugacaggaguuucugccuccugcagccacaacggcaagucuuccuuuuaccgcaaucugcuuuggcugaccggcaaaaacgggcucuauccuaaucugagcaagucuuacgcuaacaauaaagaaaaggaggugcugguccucuggggagugcaucacccgcccaacaucggcgaucagagagcccuguaccacacagaaaacgcuuauguguccgucguuagcucccauuacucucggcgcuucaccccugagauugccaaaagacccaaggugcgggaccaggaagggcgcaucaauuauuacuggacgcuucuggagccuggagauacaauuaucuuugaggcgaacggcaaucucauugcccccagauucgcuuuugcccugagccggggguucggauccggcaucauuaccagcaacgcuccgauggacgaaugugaugccaagugccagacaccucaaggcgcgaucaauucuucccuucccuuucagaacgugcacccugucaccaucggggagugucccaaauaugugcgcagcgccaagcugagaaugguuaccggacuccggaauauucccucuauccagagccgcggccuguucggggcuauugccggauuuaucgaaggcggguggacaggaaugguggacggcugguacggcuaucaucaccagaacgagcaaggguccggauacgcugccgaucagaaaucuacgcagaaugccauuaacggcgucaccaauaaggugaacagcguuaucgaaaagaugaauacacaguucaccgcuguggggaaagaguucaacaaacuggagagacggauggaaaaucucaacaagaaggucgacgauggauuucuggacaucuggacauacaacgcggagcuucuggugcuccuggaaaaugagcgcacccuugacuuccacgauuccaacgucaaaaaucuguaugaaaaggugaaaagccaacucaagaacaaugccaaagagauuggcaacgggugcuuugaguucuaccauaaguguaaugacgaaugcauggagucuguuaagaacggcacguaugauuacccuaaauauuccgaagagagcaagcugaauagagagaaaaucgacggagugaagcuggaaucuaugggcgucuaccagauucucgcuaucuauuccacaguggccagcucccugguucuucuggugucucucggggccauuagcuuuuggaugugcuccaacggaucucugcagugucggaucugcaucuga

SEQ ID NO: 194539 - RNA, 1698 nt, Artificial Sequence; identical to SEQ ID NO: 194538
  derived and/or modified CDS sequence (opt5) from hemagglutinin__InfluenzaA__ACI32730

SEQ ID NO: 194540 - RNA, 1698 nt, Artificial Sequence
  derived and/or modified CDS sequence (opt5) from hemagglutinin__InfluenzaA__ACI32731
augaaggugaaacugcucguccugcuuugcaccuucacagccacguacgcugacaccaucuguauuggcuaucacgccaacaauagcacagauaccguugacacagugcuggagaagaacgugaccgucacacauuccgugaaucuccuggaagauucucacaacgggaaacuuugccugcucaagggaaucgcgccccugcagcugggcaauuguagcguugcuggguggauucucggaaacccugagugcgaacugcuuaucuccaaagagucuuggagcuacauuguggaaaagccgaaucccgagaacggcaccuguuauccugggcauuuugccgacuacgaggaacugagagagcaacucuccucugucagcuccuucgaacgguuugagaucuuccccaaggagagcucuuggccuaaucacacggugaccggaguuuccgccagcugcucucauaacggcaaauccagcuuuuauaagaaucugcuuuggcugacaggcaaaaacgggcucuaccccaaucugucuaaguccuaugcuaacaauaaagaaaaggaggugcugguccucuggggagugcaccacccuccgaacaucggcgaucagaaggcccuguaccauaccgaaaacgcuuacgugagcgucguuuccucucacuauagccgcaaauucaaucccgagauugccaagagaccuaaagugcgggaccaggaagggcgcaucaacuacuauuggacacuucuggagcccggagauaccauuaucuuugaggcgaauggcaaccucauugccccuagauacgcuuucgcccugucccggggguuuggaagcggcaucauuaauucuaacgcucccauggacgaaugugaugccaagugccagacgccgcaaggcgcgaucaauuccagccuuccuuuccagaacgugcaucccgucacaaucggggaguguccuaaauaugugcgcucugccaagcugagaaugguuaccggacuccggaauauucccagcauccagucccgcggccuguuuggggcuauugccggauucaucgaaggcggguggacaggaaugguggacggcugguacggcuaucaccaccagaacgagcaagggucuggauacgcugccgaucagaaaagcacccagaaugccauuaacggcaucaccaauaaggucaacuccgugaucgaaaagaugaauacacaguuuacggcuguugggaaagaguucaacaagcuggagagacggauggaaaaccucaauaaaaagguggacgauggauucauugacaucuggaccuacaacgcggagcugcuuguccugcucgaaaaugagcgcacacuggacuuucaugauagcaacgugaaaaaucuuuaugaaaaggucaagucucaacugaaaaacaaugccaaggagauuggcaacgggugcuucgaguuuuaccacaaauguaaugacgaaugcauggaguccgugaagaacggcaccuaugauuaccccaaauauagcgaagagucuaagcucaauagagagaagaucgacggaguuaaacuggaauccaugggcguguaccagauucuggcuaucuauagcacagucgccuccucucucgugcugcuuguuagccugggggccaucuccuucuggaugugcucuaacggaagccuccaguguaagauuugcaucuga

SEQ ID NO: 194541 - RNA, 1698 nt, Artificial Sequence
  derived and/or modified CDS sequence (opt5) from hemagglutinin__InfluenzaA__ACI32732
augaaggugaaacugcucguccugcuuugcaccuucacagccacguacgcugacaccaucuguauuggcuaucacgccaacaauagcacagauaccguugacacagugcuggagaagaacgugaccgucacacauuccgugaaucuccuggaagauucucacaacgggaaacuuugccugcucaagggaaucgcgccccugcagcugggcaauuguagcguugcuggguggauucucggaaacccugagugcgaacugcuuaucuccaaagagucuuggagcuacauuguggaaaccccgaaucccgagaacggcacguguuauccuggguacuuugccgacuaugaggaacugagagagcaacucuccucugucagcuccuucgaacgguuugagaucuuccccaaggagagcucuuggccuaaucauaccgugacaggaguuuccgccagcugcucucacaacggcaaguccagcuuuuaccgcaaucugcuuuggcugaccggcaaaaacgggcucuaucccaaucugucuaaguccuacgcuaacaauaaagaaaaggaggugcugguccucuggggagugcaucacccuccgaacaucggcgaucagagagcccuguaccacacagaaaacgcuuaugugagcgucguuuccucucauuacagccggcgcuucacccccgagauugccaaaagaccuaaggugcgggaccaggaagggcgcaucaauuauuacuggacgcuucuggagcccggagauacaauuaucuuugaggcgaacggcaaucucauugccccuagauucgcuuuugcccugucccggggguucggaagcggcaucauuaccucuaacgcucccauggacgaaugugaugccaagugccagacaccgcaaggcgcgaucaauuccagccuuccuuuucagaacgugcaccccgucaccaucggggaguguccuaaauaugugcgcucugccaagcugagaaugguuaccggacuccggaauauucccagcauccagucccgcggccuguucggggcuauugccggauuuaucgaaggcggguggacaggaaugguggacggcugguacggcuaucaucaccagaacgagcaagggucuggauacgcugccgaucagaaaagcacgcagaaugccauuaacggcaucaccaauaaggucaacuccgugaucgaaaagaugaauacacaguucaccgcuguugggaaagaguucaacaaacuggagagacggauggaaaaucucaacaagaagguggacgauggauuucuggacauuuggacauacaacgcggagcuucugguccuccuggaaaaugagcgcacccuugacuuccacgauagcaacgugaaaaaucuguaugaaaaggucaaaucucaacucaagaacaaugccaaagagaucggcaacgggugcuuugaguucuaccauaaguguaaugacgaaugcauggaguccgugaagaacggcacguaugauuaccccaaauauagcgaagagucuaagcugaauagagagaaaauugacggaguuaagcuggaauccaugggcguguaccagauccucgcuauuuauagcacagucgccuccucucuggugcuucugguuagccucggggccaucuccuuuuggaugugcucuaacggaagccugcaguguaccaucugcauuuga

SEQ ID NO: 194542 - RNA, 1698 nt, Artificial Sequence
  derived and/or modified CDS sequence (opt5) from hemagglutinin__InfluenzaA__ACI32733
augaaggugaaacugcucguccugcuuugcaccuucacagccacguacgcugacaccaucuguauuggcuaucacgccaacaauagcacagauaccguugacacagugcuggagaagaacgugaccgucacacauuccgugaaucuccuggaagauucucacaacgggaaacuuugccugcucaagggaaucgcgccccugcagcugggcaauuguagcguugcuggguggauucucggaaacccugagugcgaacugcuuaucuccaaagagucuuggagcuacauuguggaaaagccgaaucccgagaacggcaccuguuauccugggcauuuugccgacuacgaggaacugagagagcaacucuccucugucagcuccuucgaacgguuugagaucuuccccaaggagagcucuuggccuaaucacacggugaccggaguuuccgccagcugcucucauaacggcaaauccagcuuuuauaagaaucugcuuuggcugacaggcaaaaacgggcucuaccccaaucugucuaaguccuaugcuaacaauaaagaaaaggaggugcugguccucuggggagugcaccacccuccgaacaucggcgaucagaaggcccuguaccauaccgaaaacgcuuacgugagcgucguuuccucucacuauagccgcaaauucaauuccgagauugccaagagacccaaagugcgggaccaggaagggcgcaucaacuacuauuggacacuucuggagccuggagauaccauuaucuuugaggcgaauggcaaccucauugcccccagauacgcuuucgcccugagccggggguuuggaucuggcaucauuaauuccaacgcuccuauggacgaaugugaugccaagugccagacgccccaaggcgcgaucaauagcucucuuccguuccagaacgugcauccugucacaaucggggagugucccaaauaugugcgcagcgccaagcugagaaugguuaccggacuccggaauauuccuuccauccagucucgcggccuguuuggggcuauugccggauucaucgaaggcggguggacaggaaugguggacggcugguacggcuaucaccaccagaacgagcaagggagcggauacgcugccgaucagaaauccacccagaaugccauuaacggcaucaccaauaaggucaacagcgugaucgaaaagaugaauacacaguuuacggcuguugggaaagaguucaacaagcuggagagacggauggaaaaccucaauaaaaagguggacgauggauucauugacaucuggaccuacaacgcggagcugcuuguccugcucgaaaaugagcgcacacuggacuuucaugauucuaacgugaaaaaucuuuaugaaaaggucaagucccaacugaaaaacaaugccaaggagauuggcaacgggugcuucgaguuuuaccacaaauguaaugacgaaugcauggagagcgugaagaacggcaccuaugauuaccccaaauauucugaagaguccaagcucaauagagagaagaucgacggaguuaaacuggaaagcaugggcguguaccagauucuggcuaucuauuccacagucgccucuagccucgugcugcuuguuucccugggggccaucucuuucuggaugugcagcaacggaucccuccaguguaccauuugcaucuga

SEQ ID NO: 194543 - RNA, 1698 nt, Artificial Sequence
  derived and/or modified CDS sequence (opt5) from hemagglutinin__InfluenzaA__ACI32734
augaaggugaaacugcucguccugcuuugcaccuucacagccacguacgcugacaccaucuguauuggcuaucacgccaacaauagcacagauaccguugacacagugcuggagaagaacgugaccgucacacauuccgugaaucuccuggaagauucucacaacgggaaacuuugccugcucaagggaaucgcgccccugcagcugggcaauuguagcguugcuggguggauucucggaaacccugagugcgaacugcuuaucuccaaagagucuuggagcuacauuguggaaaccccgaaucccgagaacggcacguguuauccuggguacuuugccgacuaugaggaacugagagagcaacucuccucugucagcuccuucgaacgguuugagaucuuccccaaggagagcucuuggccuaaucauaccgugacaggaguuuccgccagcugcucucacaacggcaaguccagcuuuuaccgcaaucugcuuuggcugaccggcaaaaacgggcucuaucccaaucugucuaaguccuacgcuaacaauaaaaagaaagaagugcugguccucuggggagugcaucacccuccgaacaucggcgaucagaaggcccuguaccacacagagaacgcuuaugugagcgucguuuccucucauuacagcagacgguucacccccgaaauugccaagcgcccuaaagugagagaccaggaggggcggaucaauuauuacuggacgcuucuggaacccggagauacaauuaucuuugaggcgaacggcaaucucauugccccucgcuucgcuuuugcccuguccagaggguucggaagcggcaucauuaccucuaacgcucccauggacgagugugaugccaagugccagacaccgcaaggcgcgaucaauuccagccuuccuuuucagaacgugcaccccgucaccaucggggaauguccuaaauaugugcggucugccaagcugcgcaugguuaccggacucagaaauauucccagcauccagucccggggccuguucggggcuauugccggauuuaucgagggcggguggacaggaaugguggacggcugguacggcuaucaucaccagaacgaacaagggucuggauacgcugccgaucagaaaagcacgcagaaugccauuaacggcaucaccaauaaggucaacuccgugaucgagaaaaugaauacacaguucaccgcuguugggaaggaguucaacaagcuggaacgcagaauggagaaucucaacaaaaagguggacgauggauuucuggacauuuggacauacaacgcggaacuucugguccuccuggagaaugaacggacccuugacuuccacgauagcaacgugaaaaaucuguaugagaaggucaaaucucaacucaagaacaaugccaaggaaaucggcaacgggugcuuugaguucuaccauaaauguaaugacgagugcauggaauccgugaagaacggcacguaugauuaccccaaauauagcgaggaaucuaagcugaaucgcgagaaaauugacggaguuaagcuggaguccaugggcguguaccagauccucgcuauuuauagcacagucgccuccucucuggugcuucugguuagccucggggccaucuccuuuuggaugugcucuaacggaagccugcaguguaccaucugcauuuga

SEQ ID NO: 194544 - RNA, 1698 nt, Artificial Sequence
  derived and/or modified CDS sequence (opt5) from hemagglutinin__InfluenzaA__ACI32736
augaaggugaaacugcucguccugcuuugcaccuucacagccacguacgcugacaccaucuguauuggcuaucacgccaacaauagcacagauaccguugacacagugcuggagaagaacgugaccgucacacauuccgugaaucuccuggaagauucucacaacgggaaacuuugccugcucaagggaaucgcgccccugcagcugggcaauuguagcguugcuggguggauucucggaaacccugagugcgaacugcuuaucuccagagagucuuggagcuacauuguggaaaaaccgaaucccgagaacggcaccuguuauccugggcauuuugccgacuacgaggaacugcgggagcaacucuccucugucagcuccuucgaacgcuuugagaucuuccccaaggagagcucuuggccuaaucacacggccaccggaguguccgcuagcugcucucauaacggcaaguccagcuuuuauaaaaaucugcuuuggcugacaggcaagaacgggcucuaccccaaucugucuaaauccuaugccaacaauaaggaaaaagagguucuggugcucuggggaguccaccacccuccgaacaucggcgaucagagagcucuguaccauaccgaaaacgccuacgugagcguggucuccucucacuauagccggaaguucacacccgagauugcgaagcgcccuaaaguuagagaccaggaagggcggaucaauuacuauuggacccuucuggagcccggagauacgauuaucuuugaggccaacggcaaucucauugcuccucgcuacgccuucgcucuguccagaggguuuggaagcggcaucauuaacucuaaugcccccauggacgaaugugaugcgaagugccagacaccgcaaggcgccaucaacuccagccuuccuuuccagaaugugcaucccgugaccaucggggaguguccuaaauauguccggucugcuaagcugcgcauggugacaggacucagaaacauucccagcauccagucccggggccuguuuggggccauugcuggauucaucgaaggcggguggaccggaaugguugacggcugguacggcuaucaccaccagaaugagcaagggucuggauacgccgccgaucagaaaagcacccagaacgcuauuaauggcaucacaaacaaggucaauuccgugaucgaaaagaugaacacgcaguuuaccgcgguggggaaagaguucaauaagcuggagcgcagaauggaaaaccucaacaaaaagguugacgauggauucauugacaucuggacauacaaugccgagcugcuugugcugcucgaaaacgagcggacccuggacuuucaugauagcaauguccgcaaccuuuaugaaaaagugaagucucaacugaaaaauaacgcuaaggagauuggcaaugggugcuucgaguuuuaccacaaguguaacgacgaaugcauggaguccgucaaaaauggcacauaugauuaccccaaguauagcgaagagucuaaacucaacagagagaagaucgacggagugaaacuggaauccaugggcguuuaccagauucuggccaucuauagcaccguggccuccucucucguccugcuugugagccugggggcuaucuccuucuggaugugcucuaauggaagccuccagugucggauuugcaucuga

SEQ ID NO: 194545 - RNA, 1698 nt, Artificial Sequence
  derived and/or modified CDS sequence (opt5) from hemagglutinin__InfluenzaA__ACI32737
augaaggugaaacugcucguccugcuuugcaccuucacagccacguacgcugacaccaucuguauuggcuaucacgccaacaauagcacagauaccguugacacagugcuggagaagaacgugaccgucacacauuccgugaaucuccuggaaaacucucacaaugggaaacuuugccugcucaagggaaucgcgccccugcagcugggcaacuguagcguugcuggguggauucucggaaauccugagugcgaacugcuuaucccgaaagaguccuggucuuacauuguggaaauccccaacccugagaauggcaccuguuaucccggguacuuugccgauuaugaggaacugagagagcaacucagcuccgucucuagcuucgaacgguuugagaucuucccuaaggaguccagcuggcccaaccauacggugaccggaguuucugccuccugcagccacaauggcaagucuuccuuuuaccgcaaccugcuuuggcugacaggcaaaaaugggcucuauccuaaccugagcaagucuuacgcuaauaacaaagaaaaggaggugcugguccucuggggagugcaucacccgcccaacauuggcgaccagagagcccuguaccacaccgaaaaugcuuauguguccgucguuagcucccauuacucucggcgcuucacaccugagaucgccaaaagacccaaggugcgggaucaggaagggcgcauuaacuauuacuggacccuucuggagccuggagacacgaucauuuuugaggcgaauggcaaccucaucgcccccagauucgcuuuugcccugagccgggggcuuggauccggcauuaucacaagcaaugcuccgauggaugaaugugacgccaagugccagaccccucaaggcgcgaucaacucuucccugcccuuccagaaugugcacccugucacaauuggggagugucccaaauaugugcgcagcgccaagcucagaaugguuaccggacugcggaacauccccucuauucagagccgcggccuguuuggggcuaucgccggauucauugaaggcggguggaccggaaugguggauggcugguacggcuaucaucaccagaaugagcaaggguccggauacgcugccgaccagaaaucuacacagaacgccaucaauggcaucacgaacaaggucaauagcgugauugaaaagaugaacacccaguuuacagcuguugggaaagaguucaauaaacucgagagacggauggaaaaccugaacaagaagguggaugacggauuccuugauaucuggaccuacaaugcggagcugcucguccugcuugaaaacgagcgcacacuggacuuucacgacuccaaugugaaaaaccucuaugaaaaggucaaaagccaacugagaaauaacgccaaggagauuggcaaugggugcuucgaguuuuaccauaaauguaacgaugaaugcauggagucugugaagaauggcaccuaugacuacccuaaguauuccgaagagagcaaacugaaccgggagaagaucgauggaguuaaacucgaaucuaugggcguguaccagauucuggcuaucuauuccacggucgccagcucccuugugcugcucguuucucugggggccaucagcuucuggaugugcuccaauggaucucugcaguguagaauuugcaucuga

SEQ ID NO: 194546 - RNA, 1698 nt, Artificial Sequence
  derived and/or modified CDS sequence (opt5) from hemagglutinin__InfluenzaA__ACI32739
augaaggugaaacugcucauccugcuuugcaccuucacagccacguacgcugacaccauuuguaucggcuaucacgccaacaauagcacagauaccgucgacacaguucuggagaagaacgugaccgugacacauuccgucaaucuccuggaagauucucacaacgggaaacuuugccugcucaagggaauugcgccccugcagcugggcaauuguagcguggcuggguggauccucggaaacccugagugcgaacugcuuauuuccaaagagucuuggagcuacaucguugaaaccccgaaucccgagaacggcacguguuauccuggguacuuugccgacuaugaggaacugagagagcaacucuccucugugagcuccuucgaacgguuugagaucuuccccaaggagagcucuuggccuaaucauaccgucacaggaguguccgccagcugcucucacaacggcaaguccagcuuuuaccgcaaucugcuuuggcugaccggcaaaaacgggcucuaucccaaucugucuaaguccuacgcuaacaauaaagaaaaggagguucugauucucuggggagugcaucacccuccgaacaucggcaaccagagaacacuguaccacaccgaaaaugccuaugucagcgugguguccucucauuacagccggcgcuucacgcccgagauuacaaaaagaccuaagguccgggaucaggaagggcgcaucaacuauuacuggacccuucuggagcccggagacacaauuaucuuugaggcuaauggcaaccucauugccccuugguaugcguucgcccuguccagaggguuuggaagcggcaucaucaccucuaaugcucccauggaugaaugugacgccaagugccagaccccgcaaggcgcuauuaacuccagccuuccuuuccagaauguucaccccgugacaaucggggaguguccuaaauacgugcggucugccaagcugcgcauggucacgggacucagaaacauucccagcauccagucccggggccuguuuggggcgauugccggauucaucgaaggcggguggaccggaaugguggauggcugguauggcuaccaucaccagaaugagcaagggucuggauacgcugccgaccagaaaagcacacagaacgcuaucaauggcauuaccaacaagguuaauuccgugaucgaaaagaugaacacacaguuuaccgccgucgggaaagaguucaauaaacuggagcgcagaauggaaaaccucaacaagaagguggaugacggauuccuggauauuuggacguauaaugccgagcuucugguucuccuggaaaacgagcggacacuugacuuucacgacagcaaugugaaaaaccuguacgaaaaggucaaaucucaacucaagaauaacgcuaaagagaucggcaaugggugcuucgaguuuuaucauaaguguaacaaugaaugcauggaguccgugaagaacggcaccuacgauuaucccaaauacagcgaagagucuaagcugaaucgcgagaaaauugacggagucaagcuggaauccaugggcguguaucagauccucgcgaucuacagcaccguugccuccucucuggugcuucuggucagccucggggcuauuuccuucuggaugugcucuaacggaagccugcaguguaaaaucugcauuuga

SEQ ID NO: 194547 - RNA, 1698 nt, Artificial Sequence
  derived and/or modified CDS sequence (opt5) from hemagglutinin__InfluenzaA__ACI32740
augaaggugaaacugcucauccugcuuugcaccuucacagccacguacgcugacaccauuuguaucggcuaucacgccaacaauagcacagauaccgucgacacaguucuggagaagaacgugaccgugacacauuccgucaaucuccuggaagauucucacaacgggaaacuuugccugcucaagggaauugcgccccugcagcugggcaauuguagcguggcuggguggauccucggaaacccugagugcgaacugcuuauuuccaaagagucuuggagcuacaucguugaaaccccgaaucccgagaacggcgccuguuauccuggguacuuugccgacuaugaggaacugagagagcaacucuccucugugagcuccuucgaacgguuugagaucuuccccaaggagagcucuuggccuaagcauacggucaccggaguguccgcuagcugcucucacaauggcaaauccagcuuuuaccgcaaccugcuuuggcugacaggcaagaaugggcucuaucccaaccugucuaaauccuacgccaauaacaaggaaaaagagguucugauucucuggggagugcaucacccuccgaauaucggcgaucagagaacccuguaccacacagaaaacgcuuaugucagcgugguguccucucauuacagccggcgcuucacccccgagauuacgaagagaccuaagguccgggaccaggaagggcgcaucaacuauuacuggacacuucuggagcccggagauaccauuaucuuugaggccaauggcaaccucauugcgccuugguaugccuucgcucuguccagaggguuuggaagcggcaucaucacaucuaaugcccccauggacgaaugugaugcuaaaugccagaccccgcaaggcgccauuaacuccagccuuccuuuccagaauguucaccccgugaccaucggggaguguccuaaguacgugcggucugcgaaacugcgcauggucacaggacucagaaacauucccagcauccagucccggggccuguuuggggccauugcuggauucaucgaaggcggguggacgggaaugguggacggcugguauggcuaccaucaccagaaugagcaagggucuggauacgccgcugaucaaaagagcacccagaacgccaucaauggcauuacaaacaaaguuaauuccgugaucgaaaagaugaacacccaguuuacagccgucgggaaagaguucaauaagcuggagcgcagaauggaaaaccucaauaagaaaguggacgauggauuccuggacauuuggaccuauaacgcugagcuucugguucuccuggaaaacgagcggacgcuugacuuucacgauagcaaugugaagaaccuguacgaaaaagucaagucucagcucaaaaauaacgcgaaggagaucggcaaugggugcuucgaguuuuaucauaaguguaacaaugaaugcauggaguccgugaaaaacggcacauacgacuaucccaaguacagcgaagagucuaaacugaaucgcgagaagauugauggagucaaacuggacuccaugggcguguaucagauccucgccaucuacagcaccguugcuuccucucuggugcuucuggucagccucggggccauuuccuucuggaugugcccuaacggaucucugcaguguaccaucugcauuuga

SEQ ID NO: 194548 - RNA, 1698 nt, Artificial Sequence
  derived and/or modified CDS sequence (opt5) from hemagglutinin__InfluenzaA__ACI32741
augaaggugaaacugcucauccugcuuugcaccuucacagccacguacgcugacaccauuuguaucggcuaucacgccaacaauagcacagauaccgucgacacaguucuggagaagaacgugaccgugacacauuccgucaaucuccuggaagauucucacaacgggaaacuuugccugcucaagggaauugcgccccugcagcugggcaauuguagcguggcuggguggauccucggaaacccugagugcgaacugcuuauuuccaaagagucuuggagcuacaucguugaaaccccgaaucccgagaacggcgccuguuauccuggguacuuugccgacuaugaggaacugagagagcaacucuccucugugagcuccuucgaacgguuugagaucuuccccaaggagagcucuuggccuaagcauacggucaccggaguguccgcuagcugcucucacaauggcaaauccagcuuuuaccgcaaccugcuuuggcugacaggcaagaaugggcucuaucccaaccugucuaaauccuacgccaauaacaaggaaaaagagguucugauucucuggggagugcaucacccuccgaauaucggcgaucagagaacccuguaccacacagaaaacgcuuaugucagcgugguguccucucauuacagccggcgcuucacccccgagauuacgaagagaccuaagguccgggaccaggaagggcgcaucaacuauuacuggacacuucuggagcccggagauaccauuaucuuugaggccaauggcaaccucauugcgccuugguaugccuucgcucuguccagaggguuuggaagcggcaucaucacaucuaaugcccccauggacgaaugugaugcuaaaugccagaccccgcaaggcgccauuaacuccagccuuccuuuccagaauguucaccccgugaccaucggggaguguccuaaguacgugcggucugcgaaacugcgcauggucacaggacucagaaacauucccagcauccagucccggggccuguuuggggccauugcuggauucaucgaaggcggguggacgggaaugguggacggcugguauggcuaccaucaccagaaugagcaagggucuggauacgccgcugaucaaaagagcacccagaacgccaucaauggcauuacaaacaaaguuaauuccgugaucgaaaagaugaacacccaguuuacagccgucgggaaagaguucaauaagcuggagcgcagaauggaaaaccucaauaagaaaguggacgauggauuccuggacauuuggaccuauaacgcugagcuucugguucuccuggaaaacgagcggacgcuugacuuucacgauagcaaugugaagaaccuguacgaaaaagucaagucucagcucaaaaauaacgcgaaggagaucggcaaugggugcuucgaguuuuaucauaaguguaacaaugaaugcauggaguccgugaaaaacggcacauacgacuaucccaaguacagcgaagagucuaaacugaaucgcgagaagauugauggagucaaacuggacuccaugggcguguaucagauccucgccaucuacagcaccguugcuuccucucuggugcuucuggucagccucggggccauuuccuucuggaugugcccuaacggaucucugcaguguaagaucugcauuuga

SEQ ID NO: 194549 - RNA, 1698 nt, Artificial Sequence
  derived and/or modified CDS sequence (opt5) from hemagglutinin__InfluenzaA__ACI32742
augaaggugaaacugcucauccugcuuugcaccuucacagccacguacgcugacaccauuuguaucggcuaucacgccaacaauagcacagauaccgucgacacaguucuggagaagaacgugaccgugacacauuccgucaaucuccuggaagauucucacaacgggaaacuuugccugcucaagggaauugcgccccugcagcugggcaauuguagcguggcuggguggauccucggaaacccugagugcgaacugcuuauuuccaaagagucuuggagcuacaucguugaaaccccgaaucccgagaacggcacguguuauccuggguacuuugccgacuaugaggaacugagagagcaacucuccucugugagcuccuucgaacgguuugagaucuuccccaaggagagcucuuggccuaaucauaccgucacaggaguguccgccagcugcucucacaacggcaaguccagcuuuuaccgcaaucugcuuuggcugaccggcaaaaacgggcucuaucccaaucugucuaaguccuacgcuaacaauaaagaaaaggagguucugauucucuggggagugcaucacccuccgaacaucggcgaucagagaacacuguaccacaccgaaaacgccuaugucagcgugguguccucucauuacagccggcgcuucacgcccgagauuacaaaaagaccuaagguccgggaccaggaagggcgcaucaauuauuacuggacccuucuggagcccggagauacaauuaucuuugaggcuaacggcaaucucauugccccuugguaugcguucgcccuguccagaggguuuggaagcggcaucaucaccucuaacgcucccauggacgaaugugaugccaagugccagaccccgcaaggcgcuauuaauuccagccuuccuuuccagaacguucaccccgugacaaucggggaguguccuaaauacgugcggucugccaagcugcgcauggucacgggacucagaaauauucccagcauccagucccggggccuguuuggggcgauugccggauucaucgaaggcggguggaccggaaugguggacggcugguauggcuaccaucaccagaacgagcaagggucuggauacgcugccgaucagaaaagcacacagaaugcuaucaacggcauuaccaauaagguuaacuccgugaucgaaaagaugaauacacaguuuaccgccgucgggaaagaguucaacaaacuggagcgcagaauggaaaaucucaacaagaagguggacgauggauuccuggacauuuggacguauaacgccgagcuucugguucuccuggaaaaugagcggacacuugacuuucacgauagcaacgugaaaaaucuguacgaaaaggucaaaucucaacucaagaacaaugcuaaagagaucggcaacgggugcuucgaguuuuaucauaaguguaauaacgaaugcauggaguccgugaagaauggcaccuacgacuaucccaaauacagcgaagagucuaagcugaaccgcgagaaaauugauggagucaagcuggacuccaugggcguguaucagauccucgcgaucuacagcaccguugccuccucucuggugcuucuggucagccucggggcuauuuccuucuggaugugcucuaauggaagccugcaguguaaaaucugcauuuga

SEQ ID NO: 194550 - RNA, 1698 nt, Artificial Sequence
  derived and/or modified CDS sequence (opt5) from hemagglutinin__InfluenzaA__ACI32743
augaaggugaaacugcucauccugcuuugcaccuucacagccacguacgcugacaccauuuguaucggcuaucacgccaacaauagcacagauaccgucgacacaguucuggagaagaacgugaccgugacacauuccgucaaucuccuggaagauucucacaacgggaaacuuugccugcucaagggaauugcgccccugcagcugggcaauuguagcguggcuggguggauccucggaaacccugagugcgaacugcuuauuuccaaagagucuuggagcuacaucguugaaaccccgaaucccgagaacggcgccuguuauccuggguacuuugccgacuaugaggaacugagagagcaacucuccucugugagcuccuucgaacgguuugagaucuuccccaaaaagagcucuuggccuaaucauacggucaccggaguguccgcuagcugcucucacaacggcaaguccagcuuuuaccgcaaucugcuuuggcugacaggcaagaacgggcucuaucccaaucugucuaaauccuacgccaacaauaaggagaaagaaguucugauucucuggggagugcaucacccuccgaacaucggcaaccagagaacccuguaccacacagagaaugcuuaugucagcgugguguccucucauuacagccggcgcuucacccccgaaauuacgaagagaccuaagguccgggaucaggaggggcgcaucaacuauuacuggacacuucuggaacccggagacaccauuaucuuugaggccaauggcaaccucauugcgccuugguaugccuucgcucuguccagaggguuuggaagcggcaucaucacaucuaaugcccccauggaugagugugacgcuaaaugccagaccccgcaaggcgccauuaacuccagccuuccuuuccagaauguucaccccgugaccaucggggaauguccuaaguacgugcggucugcgaaacugcgcauggucacaggacucagaaacauucccagcauccagucccggggccuguuuggggccauugcuggauucaucgagggcggguggacgggaaugguggauggcugguauggcuaccaucaccagaaugaacaagggucuggauacgccgcugaccaaaagagcacccagaacgccaucaauggcauuacaaacaaaguuaauuccgugaucgagaagaugaacacccaguuuacagccgucgggaaagaguucaauaagcuggaacgcagaauggagaaccucaacaagaaaguggaugacggauuccuggauauuuggaccuauaaugcugaacuucugguucuccuggagaacgaacggacgcuugacuuucacgacagcaaugugaagaaccuguacgagaaagucaagucucagcucaaaaauaacgcgaaggaaaucggcaaugggugcuucgaguuuuaucauaaguguaacaaugagugcauggaauccgugaaaaacggcacauacgauuaucccaaguacagcgaggaaucuaaacugaaucgcgagaagauugacggagucaaacuggauuccaugggcguguaucagauccucgccaucuacagcaccguugcuuccucucuggugcuucuggucagccucggggccauuuccuucuggaugugcucuaacggaagccugcaguguagaaucugcauuuga

SEQ ID NO: 194551 - RNA, 1701 nt, Artificial Sequence
  derived and/or modified CDS sequence (opt5) from hemagglutinin__InfluenzaA__ACJ09818
augaagaccaucauugcccugagcuacauccucugccugguguucgcucagaaacuucccggcaacgacaauuccacagccacgcugugucucgggcaccaugcggucccuaacggaaccauuguuaagacaaucaccaaugaucaaguggaggugacaaacgcuaccgaacugguccagucuagcuccacaggcgagauuugcgacucuccgcaccagauccuugauggggaaaauuguacccugaucgacgcccuccugggagauccccagugcgacggcuuucaaaacaaaaagugggaucuguucguggagagaagcaaagccuauuccaauuguuacccuuaugacguucccgauuacgcuucucuccggagccugguggccuccagcgggacgcuugaauuuaacaaugagucuuucaacuggaccggagucacacagaauggcaccuccagcgcuugcauucgcagaucuaacaauuccuuuuucagccggcugaacuggcucacacaucugaaguuuaaguauccugcccuuaaugugaccaugcccaacaacgagaaauucgacaagcuguacaucuggggcguucaccauccugggacggauaaugaccagauuuuucucuaugcgcaggccucuggacgcaucacaguguccaccaaaagaagccaacagacagucauuccgaacaucggcucccggccccgcgugagaaauauuccuucucggaucagcaucuacuggaccauugugaagcccggggauauccugcugauuaacuccaccggaaaucucaucgcuccucgcggcuacuucaaaauuagaagcgggaagucuuccaucaugcggagcgacgcccccaucggaaaguguaacucugaaugcauuacaccgaauggcagcaucccuaacgacaaacccuuucagaaugucaaccgcauuacguauggcgcuuguccuagauacguuaagcagaauacccugaaacuugccacagggaugcggaacgugcccgagaagcaaacccgcggaaucuucggcgcgauugccggguuuaucgaaaauggaugggagggcaugguggaugggugguauggauucagacaccagaacuccgagggcaucggccaggcugccgaccugaaaucuacacaagcugccauugaucagaucaaugggaagcucaaccggcugauuggaaaaaccaacgaaaaguuccaccagaucgagaaggaauuuagcgaggucgaaggccgcauucaggaccuugagaaauacguggaggauacgaagaucgaccugugguccuauaaugccgaacuccugguugcucuggagaaccaacauacaauugaucucaccgacagcgaaaugaauaaacuguucgagaagaccaaaaagcagcuuagagaaaacgcggaggauauggggaauggaugcuuuaagaucuaccacaaaugugacaacgccugcaucggcucuauucggaaugggacauaugaucaugacguguacagagacgaggcucugaacaaucgcuuccagaucaagggcgucgaacucaaauccggauacaaggauuggauucuguggaucagcuuugccaugucuugcuuccuucuguguguggcccuccugggcuuuauuaugugggcuugccagaaagggaacauccgguguaauaucugcauuuga

SEQ ID NO: 194552 - RNA, 1683 nt, Artificial Sequence
  derived and/or modified CDS sequence (opt5) from hemagglutinin__InfluenzaA__ACJ67533
auggagaccaucagccugauuacaauccuccugguggucacggccuccaacgcugacaagauuugcaucggccaccagucuaccaauagcacagaaaccguugauacacuuaccgagacaaacgugcccgugacccaugccaaagaacugcuccacacggagcauaaugggaugcugugugcgaccucccuuggacacccucugauucucgacacaugcaccaucgaaggccuggucuacgggaacccgucuugugaucugcuccuggagggaagagaguggagcuauaucguggaacgguccucugcuguuaauggcacaugcuaccccgggaacguggagaaucuugaggaacugcgcacccucuucagcuccgccagcucuuaucaacggauucagaucuuuccugacacgacauggaacgucaccuacacaggaaccuccagagccuguagcggcucuuucuaucgcuccaugagauggcugacccaaaagagcggcuuuuaccccgugcaggaugcucaguauacaaauaaccgggggaaaucuauucuuuucguuuggggaauccaucacccucccacguacgccgagcagaccaaucuguacauucgcaacgacacaaccacauccgugaccacggaagaucucaauagaacauuuaagccugucaucggcccgcggccccuggugaacgggcugcagggacgcauugacuauuacuggagcgugcucaaaccuggccagacccugagaguccgguccaaugggaaccuuaucgcucccugguauggacacguucugucuggcggcagccaugggcgcauccucaagaccgaucugaaguccggaagcugcguggugcaaugucagacagagaaaggcgggcuuaacucuacccugccuuuccacaauauuuccaaguacgccuuuggaacaugccccaaauaugucagagugaacagccucaagcuggcgguuggccugcggaaugugccggcccgcucuagcagaggacucuucggggcuaucgccggcuuuauugaaggcggguggccuggacuggucgcuggcugguacggguuccagcauuccaacgaccagggagugggcauggccgcggaucgggacucuacgcaaaaagccaucgauaagauuaccagcaagguuaauaacaucguggacaaaaugaauaagcaguaugagaucauugaccacgaauuuuccgaggucgagacaagacuuaacaugaucaauaacaaaauugaugaccagauccaagaugugugggcuuacaaugccgaacugcucguccugcuugagaaccagaagacccuggacgaacacgaugcuaaugugaacaaucucuacaacaaaguuaagcgcgcccuggggagcaacgccauggaggacggcaaaggauguuucgaacuguaucauaagugcgaugaccaguguauggagacaauucggaauggcaccuacaacagacgcaaguaucgggaggaaucuagacucgagcgccagaaaaucgaaggggugaagcuggaguccgaacggacguacaaaauccuuaccauuuauagcacagucgcuucuucccuggugcucgcgaugggauuugccgcuuuccuguucugggccaugagcaauggcuccugcagaugcaacaucuguauuuga

SEQ ID NO: 194553 - RNA, 1704 nt, Artificial Sequence
  derived and/or modified CDS sequence (opt5) from hemagglutinin__InfluenzaA__ACJ68607
auggagaagaucgugcugcuccuggccauugucagccuuguuaaauccgaccagaucugcauuggcuaccacgcuaacaauucuaccgaacaaguggauacaaucauggagaagaacgugacggucacccaugcccaggacauucuggaaaagacacacaaugggaagcucugugaucuggacggagugaaaccccuuauccugggcgauugcagcguugcgggguggcuccugggaaacccuaugugugacgaguucaucaaugugccggaaugguccuauauugucgagaaggcuaaccccgccaaugaucugugcuacccuggcaacuuuaaugacuaugaggaacucaagcaucugcuuucuagaaucaaccacuucgagaaaauucagaucauucccaagagcuccuggucugaucaugaagccagcuccggggugagcucugcuuguccuuaccagggaacccccuccuuuuuccggaauguuguguggcugaucaaaaagaacaauacauauccuaccauuaaacgcagcuacaacaauacaaaccaagaggaccuccugauccuuuggggcauccaccacucuaacgaugccgcugagcagaccaagcuguaucagaauccgacgaccuacauuuccgucggcacaagcacccucaaccagagacuggugcccaagaucgccacacggucuaaagugaaugggcaauccggacgcauggacuuuuucuggaccauucugaagccuaacgaugcgaucaauuuugaaagcaacggcaauuucauugcccccgaguacgcuuauaaaaucgucaagaaaggggacuccgccaucaugaagucugaaguugaguacggaaacugcaauacgaaaugucagacaccuauuggcgcuaucaacagcuccaugcccuuucauaauauucacccgcucaccaucggggaaugcccuaaguaugugaaaagcaacaaacuggugcuugccacaggacugagaaauucuccccuccgggagcgcagacggaagcgcggccuguucggcgcgauugccggguuuaucgagggaggcuggcaggggauggucgacggaugguacggcuaucaucacuccaacgaacaggggagcggauacgcugccgauaaagagucuacccaaaaggcuaucgacggcgugaccaauaaaguuaacagcauuaucgauaagaugaacacacaguucgaagccgugggcagagaguuuaauaaccuugaacggcgcauugagaaucugaacaagaaaauggaggacggguuccucgaugucuggacguauaaugccgaacugcuggugcucauggagaacgaaagaacccuggacuuccacgauuccaauguuaagaaccuuuacgacaaagugcggcugcagcuccgcgauaaugcuaaggagcugggaaacggcuguuuugaguucuaccauaaaugcgacaaugaauguauggagucugucagaaacgggacauaugauuacccucaauauagcgaagaggcgcggcuuaagagagaagagaucuccggagugaagcuggagagcauuggcaccuaccagauccucucuauuuauuccacagucgccagcucucuggcucuggccaucaugguggccgggcucucccuguggaugugcagcaauggcucccuucagugccgcaucuguauuuga

SEQ ID NO: 194554 - RNA, 1704 nt, Artificial Sequence
  derived and/or modified CDS sequence (opt5) from hemagglutinin__InfluenzaA__ACJ68609
auggagaagaucgugcugcuccuggccauugucagccuuguuaaauccgaccagaucugcauuggcuaccacgcuaacaauucuaccgaacaaguggauacaaucauggagaagaacgugacggucacccaugcccaggacauucuggaaaagacacacaaugggaagcucugugaucuggacggagugaaaccccuuauccugagagauugcagcguugcgggcuggcuccuggggaacccuaugugugacgaguucaucaaugugccggaaugguccuauauugucgagaaggcuaaccccgccaaugaucugugcuacccuggaaacuuuaaugacuaugaggaacucaagcaucugcuuucucggaucaaccacuucgagaaaauucagaucauucccaagagcuccuggucugaucaugaagccagcuccggcgugagcucugcuuguccuuaccaggggacccccuccuuuuuccgcaauguuguguggcugaucaaaaagaacaauacauauccuaccauuaaaagaagcuacaacaauacaaaccaagaggaccuccugauccuuuggggaauccaccacucuaacgaugccgcugagcagaccaagcuguaucagaauccgacgaccuacauuuccgucggcacaagcacccucaaccagcggcuggugcccaagaucgccacacgcucuaaagugaauggccaauccgggagaauggacuuuuucuggaccauucugaagccuaacgaugcgaucaauuuugaaagcaacggaaauuucauugcccccgaguacgcuuauaaaaucgucaagaaaggcgacuccgccaucaugaagucugaaguugaguacgggaacugcaauacgaaaugucagacaccuauuggagcuaucaacagcuccaugcccuuucauaauauucacccgcucaccaucggcgaaugcccuaaguaugugaaaagcaacaaacuggugcuugccacagggcugcgcaauucuccccuccgggagagacggcgcaagagaggacuguucggcgcgauugccggcuuuaucgaagggggauggcagggcauggucgacgggugguacggauaucaucacuccaacgaacagggcagcggguacgcugccgauaaagagucuacccaaaaggcuaucgacggagugaccaauaaaguuaacagcauuaucgauaagaugaacacacaguucgaagccgugggccgggaguuuaauaaccuugaacgcagaauugagaaucugaacaagaaaauggaggacggcuuccucgaugucuggacguauaaugccgaacugcuggugcucauggagaacgaacggacccuggacuuccacgauuccaauguuaagaaccuuuacgacaaagugcgccugcagcucagagauaaugcuaaggagcuggggaacggauguuuugaguucuaccauaaaugcgacaaugaguguauggagucuguccggaacggcacauaugauuacccucaauauagcgaagaggcgagacuucgccgggaagagaucuccggggugaagcuggagagcauuggaaccuaccagauccucucuauuuauuccacagucgccagcucucuggcucuggccaucaugguggccggccucucccuguggaugugcagcaaugggucccuucagugcagaaucuguauuuga

SEQ ID NO: 194555 - RNA, 1704 nt, Artificial Sequence
  derived and/or modified CDS sequence (opt5) from hemagglutinin__InfluenzaA__ACJ68610
auggagaagaucgugcuguuccucgccauugucagccugguuaaguccgaccagaucugcauuggcuaccacgcuaacaauucuaccgaacaaguggauacaaucauggagaagaacgugacggucacccaugcccaggacauucuugagaaaacacacaaugggaagcugugugaucucgacggagugaaaccccugauccuuagagauugcagcguugcgggcuggcugcucgggaacccuaugugugacgaguuuaucaaugugccggaaugguccuauauugucgagaaggcuaaccccgccaaugaucugugcuacccuggaaacuucaaugacuaugaggaacugaagcaucuccugucucggaucaaccacuuugagaaaauucagaucauucccaagagcuccuggucugaucaugaagccagcuccggcgugagcucugcuuguccuuaccaggggacccccuccuucuuucgcaauguuguguggcuuaucaaaaagaacaauacauauccuaccauuaaaagaagcuacaacaauacaaaccaagaggaccugcucauccuguggggaauccaccacucuaacgaugccgcugagcagaccaaacuuuaucagaauccgacgaccuacauuuccgucggcacaagcacccugaaccagcggcucgugcccaagaucgccacacgcucuaaggugaauggccaauccgggagaauggacuucuuuuggaccauucugaagccuaacgaugcgaucaauuucgaaagcaacggaaauuuuauugcccccgaguacgcuuauaaaaucgucaagaaaggcgacuccgccaucauuaagucugaaguugaguacgggaacugcaauacgaaaugucagacaccuaucggagcuauuaacagcuccaugcccuuccauaauauccacccgcugaccauuggcgaaugcccuaaguaugugaagucuaacaaacucgugcuggccacagggcuucggaauagcccccugcgcgagagacggcgcaagagaggacucuuuggcgcgaucgccggcuucaucgaagggggauggcagggcauggucgacgggugguacggauaucaucacuccaacgaacagggcagcggguacgcugccgauaaagagucuacccaaaaggcuauugacggagugaccaauaaaguuaacagcaucauugauaagaugaacacacaguuugaagccgugggccgggaguucaauaaccuggaacgcagaaucgagaaucuuaacaagaaaauggaggacggcuuccuggaugucuggacguauaaugccgaacuccuggugcugauggagaacgaacggacccucgacuuucacgauuccaauguuaagaaccuguacgacaaagugcgccuucagcugagagauaaugcuaaggagcucgggaacggauguuucgaauuuuaccauaaaugcgacaaugaguguauggagucuguccggaacggcacauaugauuacccucaauauagcgaagaggcgagacugaagcgcgaagagauuuccggggugaaacuugagagcaucggaaccuaccagauucugucuaucuauuccacagucgccagcucucucgcucuggccaucaugguggccggccugucccucuggaugugcagcaaugggucccugcagugccggauuuguaucuga

SEQ ID NO: 194556 - RNA, 1704 nt, Artificial Sequence
  derived and/or modified CDS sequence (opt5) from hemagglutinin__InfluenzaA__ACJ68611
auggagaagaucgugcugcuccuggccauugucagccuuguuaaauccgaccagaucugcauuggcuaccacgcuaacaauucuaccgaacaaguggauacaaucauggagaagaacgugacggucacccaugcccaggacauucuggaaaagacacacaaugggaaacucugugaucuggacggagugaaaccccuuauccugagagauugcagcguugcgggcuggcuccuggggaacccuaugugugacgaguucaucaaugugccggaaugguccuauauugucgagaaggcuaaccccgccaaugaucugugcuacccuggaaacuuuaaugacuaugaggaacucaagcaucugcuuucucggaucaaccacuucgagaaaauucagaucauucccaagagcuccuggucugaucaugaagccagccugggcguguccagcgcuuguccuuaccaggggaugcccuccuuuuuccgcaauguuguguggcucaucaaaaagaacaauaccuauccuacaauuaaaagaucuuacaacaauaccaaccaagaggaccugcuuauccuguggggaauccaccacagcaacgaugccgcugagcagacaaagcucuaucagaauccgaccacguacauuucugucggcaccuccacacugaaccagcggcuggugcccaagaucgccacccgcagcaaagugaauggccaaucugggagaauggacuuuuucuggacaauucucaagccuaacgaugcgaucaauuuugaauccaacggaaauuucauugcccccgaguacgcuuauaaaaucgucaagaaaggcgacagcgccaucaugaaguccgaaguuggguacggaaacugcaauaccaaaugucagacgccuauuggcgcuaucaacucuagcaugcccuuucauaauauucacccgcugacaaucggggagugcccuaaguaugugaaguccaacaaacuugugcuggccaccggacuccggaauagcccccugcgcgaaagacggcgcaagagaggccuuuucggcgcgauugccggguuuaucgagggaggcuggcaggggauggucgacggaugguacggcuaucaucacucuaacgagcagggguccggauacgcugccgauaaagaaagcacacaaaaggcuaucgacggcgugaccaauaaaguuaacucuauuaucgauaagaugaacacccaguucgaggccgugggccgggaauuuaauaaccuggagcgcagaauugaaaaucucaacaagaaaauggaggacggguuccuggaugucuggacauauaaugccgagcugcucgugcugauggaaaacgagcggacgcuugacuuccacgauagcaauguuaagaaccuguacgacaaagugcgccuccagcugagagauaaugcuaaggaacuuggaaacggcuguuuugaguucuaccauaaaugcgacgaugaauguauggaguccguccggaaugggaccuaugacuacccucaauauucugaggaagcgagacugaagcgcgaggaaaucagcggagugaagcucgaguccauuggcacauaccagauccugagcauuuauucuaccgucgccuccagccuggcucucgccaucaugguggccgggcugucucuuuggaugugcuccaacggcagccugcagugccggaucuguauuuga

SEQ ID NO: 194557 - RNA, 1704 nt, Artificial Sequence
  derived and/or modified CDS sequence (opt5) from hemagglutinin__InfluenzaA__ACJ68612
auggagaagaucgugcugcuccuggccauugucagccuuguuaaauccgaccagaucugcauuggcuaccacgcuaacaauucuaccgaacaaguggauacaaucauggagaagaacgugacggucacccaugcccaggacauucuggagaaaacacacaaugggaagcucugugaucuggacggagugaaaccccuuauccugagagauugcagcguugcgggcuggcuccuggggaacccuaugugugacgaguucaucaaugugccggaaugguccuauauugucgagaaggcuaaccccgccaaugaucugugcuacccuggaaacuuuaaugacuaugaggaacucaagcaucugcuuucucggaucaaccacuucgagaaaauucagaucauucccaagagcuccuggccugaucaugaagccucuagcggcguguccagcgcuugucccuaccaggggaccccuucuuucuuccgcaauguuguguggcugaucaaaaagaacaauacauauccgaccauuaaaagauccuacaacaauacaaaccaagaggaccuccugauccuuuggggaauccaccacagcaacaaugccgcugagcagaccaagcuguaucagaaccccacgaccuacauuucugucggcacauccacccucaaucugcggcuggugccuaagaucgccacacgcagcaaagugaacggccagucugggagaauggacuuuuucuggaccauucucaagcccaaugaugcgaucaacuuugaauccaauggaaacuucauugccccugaguacgcuuauaaaaucgucaagaaaggcgauagcgccaucaugaaguccgaaguugaguacgggaauugcaacacgaaaugucaaacacccauuggagcuaucaauucuagcaugccguuucauaacauucacccucugaccaucggcgaaugccccaaguaugugaaguccaauaaacuugugcuggccacagggcuccggaacagcccucugcgcgagagacggcgcaagagaggacuuuucggcgcgauugccggcuuuaucgaagggggauggcagggcauggucgacgggugguacggauaucaucacucuaaugaacagggcuccggguacgcugccgacaaagagagcacccagaaggcuaucgauggagugaccaacaaaguuaacucuauuaucgacaagaugaauacacaauucgaagccgugggccgggaguuuaacaaucuggaacgcagaauugagaaccucaauaagaaaauggaggauggcuuccuggacgucuggacguauaacgccgaacugcucgugcugauggagaaugaacggacccuugauuuccacgacagcaacguuaagaaucuguacgauaaagugcgccuccagcugagagacaacgcuaaggagcuugggaauggauguuuugaauuuuaccauaaaugcgauaacgaguguauggaguccguccggaauggcacauaugacuacccccaguauucugaagaggcgagacugaagcgcgaagagaucagcggggugaagcucgaguccauuggagccuaccaaauccugagcauuuauucuaccgucgcuuccagccuggcccucgccaucaugguggcuggccugucucuuuggaugugcuccaacgggagccugcagugccggaucuguauuuga

SEQ ID NO: 194558 - RNA, 1704 nt, Artificial Sequence
  derived and/or modified CDS sequence (opt5) from hemagglutinin__InfluenzaA__ACJ68613
auggagaagaucgugcuguuccucgccauugucagccacguuaaauccgaccagaucugcauuggcuaccaugcuaacaauucuaccgaacaaguggauacaaucauggagaagaacgugacggucacccacgcccaggacauucuggaaaagacacauaaugggaaacuuugugaucugggaggcgugaaaccccucauccugagagacugcagcguugcgggguggcuucugggaaacccuaugugugaugaguuuaucaaugugccggaaugguccuauauugucgagaaggcuaaccccgccaaugaccucugcuacccuggcaacuucaaugauuaugaggaacugaagcaucugcucucucggaucaaccacuuugagaaaauucagaucauucccaagagcuccuggucugaccacgaagccagcuccggggugagcucuguuuguccuuaccagggaacccccuccuucuuucgcaauguggucuggcugaucaaaaagaacaauacauauccuaccauuaaaaagagcuacaacaauacaaaccaagaggaucuucugauccucuggggcauccaccauucuaacgacgcugccgagcagaccaagcuguaucagaauccgacgaccuacauuuccgugggcacaagcacccuuaaccagagacuggugcccaaaaucgcuacacggucuaaggucaaugggcaauccggacgcauggauuucuuuuggaccauucucaaaccuaacgacgccaucaauuucgaaagcaacggcaauuuuauugcgcccgaguacgccuauaagaucguuaaaaagggggauuccgcuaucaugaaaucugaaguggaguacggaaacugcaauacgaagugucagacaccuauuggcgccaucaacagcuccaugcccuuccacaauauucauccgcugaccaucggggaaugcccuaaguaugugaaaagcaacaagcugguccucgcuacaggacugagaaauucuccccuucgggagcgcagacggaaacgcggccuguuuggcgccauugcgggguucaucgagggaggcuggcaggggaugguggacggaugguacggcuaucaccacuccaacgaacaggggagcggauacgccgcugacaaggagucuacccaaaaagccaucgauggcguuaccaauaaggugaacagcauuaucgacaagaugaacacacaguuugaagcugucggcagagaguucaauaaccucgaacggcgcauugagaaucugaacaaaaagauggaggauggguuccuugacguguggacguauaaugccgaacugcucguucugauggagaacgaaagaacccuggauuuucaugacuccaaugugaaaaaccucuacgauaagguccggcugcagcuucgcgacaaugccaaagagcugggaaacggcuguuucgaauuuuaccacaagugcgauaaugaguguauggagucugugagaaacgggacauaugacuacccucaauauagcgaagaggcucggcucaagagagaagagaucuccggagucaaacuggagagcauuggcaccuaccagauccuuucuauuuauuccacaguggcgagcucucuggcccucgcuaucaugguugccgggcugucccuguggaugugcagcaauggcucccuccagugccgcaucuguauuuga

SEQ ID NO: 194559 - RNA, 1707 nt, Artificial Sequence
  derived and/or modified CDS sequence (opt5) from hemagglutinin__InfluenzaA__ACJ68614
auggagaagaucgugcugcuccuggccauugucagccuuguuaaauccgaccagaucugcauuggcuaccacgcuaacaauucuaccgaacaaguggauacaaucauggagaagaacgugacggucacccaugcccaggacauucuggaaaagacacacaaugggaagcucugugaucuggacggagugaaaccccuuauccugagagauugcagcguugcgggcuggcuccuggggaacccuaugugugacgaguuccugaaugugccggaaugguccuauaucgucgagaagauuaaccccgugaaugaucucugcuacccuggaaacuuuaaugacuaugaggaacugaagcaucuucugucucggaucaaccacuucgagaaaauucagaucauucccaagagcuccuggucugaucaugaagcuagcuccggcguuagcucugccuguccuuaccaggggcgcuccagcuuuuucagaaauguggucuggcucaucaaaaagaacaauaccuaucccacaauuaaacggucuuacaacaauaccaaccaagaggaccugcuugugcuguggggaauccaccacccuaacgaugccgcugagcagacacgccucuaucagaauccgaccacguacaucuccgugggcaccagcacacugaaccagagacugguccccaagcucgccacccggucuaagguuaauggccaauccgggcgcauggaauuuuucuggacaauucugaaaccuaacgacgcuaucaauuuugagagcaacggaaauuucauugcccccgaaaacgcguacaagaucgugaaaaagggcgauuccaccauuaugaaaucugagcuugaauaugggaauugcaacacgaagugucagacaccuaucggagccaucaauagcuccaugcccuuucauaacauucacccgcugaccaucggcgagugcccuaaauacgugaaaagcaauagacucguccuggcuacagggcuucggaacucuccccagggagagcgcagacggaagaaacgcggccuguucggcgccauugcuggguuuaucgaaggaggcuggcaggggaugguggacggaugguauggcuaccaucacuccaaugagagagggagcggauaugccgcggacaaggaaucuacccaaaaagccauugauggcguuaccaacaaggugaacagcaucaucgacaaaaugaauacacaguucgaggcugucggccgggaauuuaacaaucucgagcgcagaauugagaaccugaauaagaagauggaagauggguuccuggacguguggacguacaacgccgagcuccugguucuuauggaaaaugagcggacccuggauuuccacgacuccaacgugaaaaaucucuaugauaaggucagacugcagcuucgcgacaacgcuaaagaacugggaaauggcuguuuugaguucuaccaucggugcgauaacgaguguauggaaucugugagaaaugggacauacgacuauccucaauacagcgaggaagcccgccucaagcgggaggagaucuccggagucaaacuggaaagcauuggcaccuaucagauccugucuauuuacuccacaguggccagcucucucgcucuggcgaucaugguugccgggcuuucccuguggaugugcagcaacggcucccuccagugcagaauuuguaucuga

SEQ ID NO: 194560 - RNA, 1698 nt, Artificial Sequence
  derived and/or modified CDS sequence (opt5) from hemagglutinin__InfluenzaA__ACK99007
augaaggugaaacugcucguccugcuuugcaccuucacagccacguacgcugacaccaucuguauuggcuaucacgccaacaauagcacagauaccguugacacagugcuggagaagaacgugaccgucacacauuccgugaaucuccuggaaaacucucacaaugggaaacuuugccugcucaagggaaucgcgccccugcagcugggcaacuguagcguugcuggguggauucucggaaauccugagugcgaacugcuuaucuccaaagagucuuggagcuacauuguggaaaagccgaaccccgagaauggcaccuguuauccugggcauuuugccgauuacgaggaacugagagagcaacucuccucugucagcuccuucgaacgguuugagaucuuccccaaggagagcucuuggccuaaccacacggugaccggaguuuccgccagcugcucucauaauggcgaauccagcuuuuaucgcaaccugcuuuggcugacaggcaaaaaugggcucuaccccaaccugucuaaguccuaugcuaauaacaaagagaaggaagugcugguccucuggggagugcaccacccuccgaacaucggcgaccagaaagcccuguaccauaccgagaaugcuuacgugagcgucguuuccucucacuauagcagaaaguucacacccgaaauugccaagcggccuaaagugcgcgaucaggaggggagaaucaacuacuauuggacccuucuggagcccggagacacgauuaucuuugaagcgaauggcaaccucauugccccucgguacgcuuucgcccugucccgcggguuuggaagcggcaucauuaauucuaacgcucccauggauaagugugacgccaaaugccagacaccgcaaggcgcgaucaauuccagccuuccuuuccagaacgugcaucccgucaccaucggggaguguccuaaguaugugagaucugccaaacugcggaugguuacaggacuccgcaauauucccagcauccaguccagaggccuguuuggggcuauugccggauucaucgaaggcggguggaccggaaugguggauggcugguacggcuaucaccaccagaacgagcaagggucuggauacgcugccgaccaaaagagcacccagaaugccauuaacggcaucacaaauaaagucaacuccgugaucgaaaagaugaauacgcaguuuaccgcuguugggaaggaguucaacaaacuggagcggcgcauggaaaaccucaauaagaaaguggaugacggauucauugauaucuggacauacaacgcggagcugcuuguccugcucgaaaaugagagaacccuggacuuucaugacagcaacgugaagaaucuuuaugaaaaagucaagucucagcugaagaacaaugccaaagagauuggcaacgggugcuucgaguuuuaccacaaguguaaugaugaaugcauggaguccgugaaaaacggcacauaugacuaccccaaguauagcgaagagucuaaacucaaucgggagaagaucgauggaguuaagcuggaauccaugggcguguaccagauucuggcuaucuauagcaccgucgccuccucucucgugcugcuuguuagccugggggccaucuccuucuggaugugcucuaacggaagccuccagugucgcauuugcaucuga

SEQ ID NO: 194561 - RNA, 1698 nt, Artificial Sequence
  derived and/or modified CDS sequence (opt5) from hemagglutinin__InfluenzaA__ACK99008
augaaggugaaacugcucguccugcuuugcaccuucacagccacguacgcugacaccaucuguauuggcuaucacgccaacaauagcacagauaccguugacacagugcuggagaagaacgugaccgucacacauuccgugaaucuccuggaaaacucucacaaugggaaacuuugccugcucaagggaaucgcgccccugcagcugggcaacuguagcguugcuggguggauucucggaaauccugagugcgaacugcuuaucuccaaagagucuuggagcuacauuguggaaaagccgaaccccgagaauggcaccuguuauccugggcauuuugccgauuacgaggaacugagagagcaacucuccucugucagcuccuucgaacgguuugagaucuuccccaaggagagcucuuggccuaaccacacggugaccggaguuuccgccagcugcucucauaauggcgaauccagcuuuuaucgcaaccugcuuuggcugacaggcaaaaaugggcucuaccccaaccugucuaaguccuaugcuaauaacaaagagaaggaagugcugguccucuggggagugcaccacccuccgaacaucggcgaccagaaagcccuguaccauaccgagaaugcuuacgugagcgucguuuccucucacuauagcagaaaguucacacccgaaauugccaagcggccuaaagugcgcgaucaggaggggagaaucaacuacuauuggacccuucuggagcccggagacacgauuaucuuugaagcgaauggcaaccucauugccccucgguacgcuuucgcccugucccgcggguuuggaagcggcaucauuaauucuaacgcucccauggauaagugugacgccaaaugccagacaccgcaaggcgcgaucaauuccagccuuccuuuccagaacgugcaucccgucaccaucggggaguguccuaaguaugugagaucugccaaacugcggaugguuacaggacuccgcaauauucccagcauccaguccagaggccuguuuggggcuauugccggauucaucgaaggcggguggaccggaaugguggauggcugguacggcuaucaccaccagaacgagcaagggucuggauacgcugccgaccaaaagagcacccagaaugccauuaacggcaucacaaauaaagucaacuccgugaucgaaaagaugaauacgcaguuuaccgcuguugggaaggaguucaacaaacuggagcggcgcauggaaaaccucaauaagaaaguggaugacggauucauugauaucuggacauacaacgcggagcugcuuguccugcucgaaaaugagagaacccuggacuuucaugacagcaacgugaagaaucuuuaugaaaaagucaagucucagcugaagaacaaugccaaagagauuggcaacgggugcuucgaguuuuaccacaaguguaaugaugaaugcauggaguccgugaaaaacggcacauaugacuaccccaaguauagcgaagagucuaaacucaaucgggagaagaucgauggaguuaagcuggaauccauggagguguaccagauucuggcuaucuauagcaccgucgccuccucucucgugcugcuuguuagccugggcgccaucuccuucuggaugugcucuaacgggagccuccagugucgcauuugcaucuga

SEQ ID NO: 194562 - RNA, 1698 nt, Artificial Sequence
  derived and/or modified CDS sequence (opt5) from hemagglutinin__InfluenzaA__ACK99009
augaaggugaaacugcucguccugcuuugcaccuucacagccacguacgcugacaccaucuguauuggcuaucacgccaacaauagcacagauaccguugacacagugcuggagaagaacgugaccgucacacauuccgugaaucuccuggaaaacucucacaaugggaaacuuugccugcucaagggaaucgcgccccugcagcugggcaacuguagcguugcuggguggauucucggaaauccugagugcgaacugcuuaucuccaaagagucuuggagcuacauuguggaaaagccgaaccccgagaauggcaccuguuauccugggcauuuugccgauuacgaggaacugagagagcaacucuccucugucagcuccuucgaacgguuugagaucuuccccaaggagagcucuuggccuaaccacacggugaccggaguuuccgccagcugcucucauaauggcgaauccagcuuuuaucgcaaccugcuuuggcugacaggcaaaaaugggcucuaccccaaccugucuaaguccuaugcuaauaacaaagagaaggaagugcugguccucuggggagugcaccacccuccgaacaucggcgaccagaaagcccuguaccauaccgagaaugcuuacgugagcgucguuuccucucacuauagcagaaaguucacacccgaaauugccaagcggccuaaagugcgcgaucaggaggggagaaucaacuacuauuggacccuucuggagcccggagacacgauuacauuugaagcgaauggcaaccucaucgccccucgguacgcuuucgcccugucccgcggguuuggaagcggcauuaucaauucuaacgcucccauggauaagugugacgccaaaugccagaccccgcaaggcgcgauuaauuccagccuuccuuuccagaacgugcaucccgucacaaucggggaguguccuaaguaugugagaucugccaaacugcggaugguuaccggacuccgcaauauccccagcauucaguccagaggccuguuuggggcuaucgccggauucauugaaggcggguggaccggaaugguggauggcugguacggcuaucaccaccagaacgagcaagggucuggauacgcugccgaccaaaagagcacacagaaugccaucaacggcauuacgaauaaagucaacuccgugaucgaaaagaugaauacccaguuuacagcuguugggaaggaguucaacaaacuggagcggcgcauggaaaaccucaauaagaaaguggaugacggauucaucgauauuuggaccuacaacgcggagcugcuuguccugcucgaaaaugagagaacacuggacuuucaugacagcaacgugaagaaucuuuaugaaaaagucaagucucagcugaagaacaaugccaaagagaucggcaacgggugcuucgaguuuuaccacaaguguaaugaugaaugcauggaguccgugaaaaacggcaccuaugacuaccccaaguauagcgaagagucuaaacucaaucgggagaagauugauggaguuaagcuggaauccaugggcguguaccagauccuggcuauuuauagcacggucgccuccucucucgugcugcuuguuagccugggggccaucuccuucuggaugugcucuaacggaagccuccagugucgcaucugcauuuga

SEQ ID NO: 194563 - RNA, 1698 nt, Artificial Sequence; identical to SEQ ID NO: 194560
  derived and/or modified CDS sequence (opt5) from hemagglutinin__InfluenzaA__ACK99011

SEQ ID NO: 194564 - RNA, 1698 nt, Artificial Sequence
  derived and/or modified CDS sequence (opt5) from hemagglutinin__InfluenzaA__ACK99012
augaaggugaaacugcucguccugcuuugcaccuucacagccacguacgcugacaccaucuguauuggcuaucacgccaacaauagcacagauaccguugacacagugcuggagaagaacgugaccgucacacauuccgugaaucuccuggaaaacucucacaaugggaaacuuugccugcucaagggaaucgcgccccugcagcugggcaacuguagcguugcuggguggauucucggaaauccugagugcgaacugcuuaucuccaaagagucuuggagcuacauuguggaaaagccgaaccccgagaauggcaccuguuauccugggcauuuugccgauuacgaggaacugagagagcaacucuccucugucagcuccuucgaacgguuugagaucuuccccaaggagagcucuuggccuaaccacacggugaccggaguuuccgccagcugcucucauaauggcgaauccagcuuuuaucgcaaccugcuuuggcugacaggcaaaaaugggcucuaccccaaccugucuaaguccuaugcuaauaacaaagagaaggaagugcugguccucuggggagugcaccacccuccgaacaucggcgaccagaaagcccuguaccauaccgagaaugcuuacgugagcgucguuuccucucacuauagcagaaaguucacacccgaaauugccaagcggccuaaagugcgcgaucaggaggggagaaucaacuacuauuggacccuucuggagcccggagacacgauuaucuuugaagcgaauggcaaccucauugccccucgguacgcuuucgcccugucccgcggguuuggaagcggcaucauuaauucuaacgcucccauggauaagugugacgccaaaugccagacaccgcaaggcgcgaucaauuccagccuuccuuuccagaacgugcaucccgucaccaucggggaguguccuaaguaugugagaucugccaaacugcggaugguuacaggacuccgcaauauucccagcauccaguccagaggccuguuuggggcuauugccggauucaucgaaggcggguggaccggaaugguggauggcugguacggcuaucaccaccagaacgagcaagggucuggauacgcugccgaccaaaagagcacccagaaugccauuaacggcaucacaaauaaagucaacuccgugaucgaaaagaugaauacgcaguuuaccgcuguugggaaggaguucaacaaacuggagcggcgcauggaaaaccucaauaagaaaguggaugacggauucauugauaucuggacauacaacgcggagcugcuuguccugcucgaaaaugagagaacccuggacuuucaugacagcaacgugaagaaucuuuaugaaaaagucaagucucagcugaagaacaaugccaaagagauuggcaacgggugcuucgaguuuuaccacaaguguaaugaugaaugcauggaguccgugaaaaacggcacauaugacuaccccaaguauagcgaagagucuaaacucaaucgggagaagaucgauggaguuaagcuggaauccaugggcguguaccagauucuggcuaucuauagcaccgucgccuccucucucgugcugcuuaucagccugggggccauuuccuucuggaugugcucuaacggaagccuccagugucgcaucugcauuuga

SEQ ID NO: 194565 - RNA, 1698 nt, Artificial Sequence; identical to SEQ ID NO: 194560
  derived and/or modified CDS sequence (opt5) from hemagglutinin__InfluenzaA__ACK99013

SEQ ID NO: 194566 - RNA, 1698 nt, Artificial Sequence
  derived and/or modified CDS sequence (opt5) from hemagglutinin__InfluenzaA__ACK99014
augaaggugaaacugcucguccugcuuugcaccuucacagccacguacgcugacaccaucuguauuggcuaucacgccaacaauagcacagauaccguugacacagugcuggagaagaacgugaccgucacacauuccgugaaucuccuggaaaacucucacaaugggaaacuuugccugcucaagggaaucgcgccccugcagcugggcaacuguagcguugcuggguggauucucggaaauccugagugcgaacugcuuaucuccaaagagucuuggagcuacauuguggaaaagccgaaccccgagaauggcaccuguuauccugggcauuuugccgauuacgaggaacugagagagcaacucuccucugucagcuccuucgaacgguuugagaucuuccccaaggagagcucuuggccuaaccacacggugaccggaguuuccgccagcugcucucauaauggcgaauccagcuuuuaucgcaaccugcuuuggcugacaggcaaaaaugggcucuaccccaaccugucuaaguccuaugcuaauaacaaagagaaggaagugcugguccucuggggagugcaccacccuccgaacaucggcgaccagaaagcccuguaccauaccgagaaugcuuacgugagcgucguuuccucucacuauagcagaaaguucacacccgaaauugccaagcggccuaaagugcgcgaucaggaggggagaaucaacuacuauuggacccuucuggagcccggagacacgauuaucuuugaagcgaauggcaaccucauugccccucgguacgcuuucacacugucccgcggguuuggaagcggcaucauuaauucuaacgcccccauggauaagugugacgcuaaaugccagaccccgcaaggcgccaucaauuccagccuuccuuuccagaacgugcaucccgucacaaucggggaguguccuaaguaugugagaucugcgaaacugcggaugguuaccggacuccgcaauauucccagcauccaguccagaggccuguuuggggccauugcuggauucaucgaaggcggguggaccggaaugguggauggcugguacggcuaucaccaccagaacgagcaagggucuggauacgccgcugaccaaaagagcacacagaaugccauuaacggcaucacgaauaaagucaacuccgugaucgaaaagaugaauacccaguuuacagccguugggaaggaguucaacaaacuggagcggcgcauggaaaaccucaauaagaaaguggaugacggauucauugauaucuggaccuacaacgcugagcugcuuguccugcucgaaaaugagagaacacuggacuuucaugacagcaacgugaagaaucuuuaugaaaaagucaagucucagcugaagaacaaugcgaaagagauuggcaacgggugcuucgaguuuuaccacaaguguaaugaugaaugcauggaguccgugaaaaacggcaccuaugacuaccccaaguauagcgaagagucuaaacucaaucgggagaagaucgauggaguuaagcuggaauccaugggcguguaccagauucuggccaucuauagcacggucgcuuccucucucgugcugcuuguuagccugggggccaucuccuucuggaugugcucuaacggaagccuccagugucgcauuugcaucuga

SEQ ID NO: 194567 - RNA, 1698 nt, Artificial Sequence; identical to SEQ ID NO: 194560
  derived and/or modified CDS sequence (opt5) from hemagglutinin__InfluenzaA__ACK99016

SEQ ID NO: 194568 - RNA, 1698 nt, Artificial Sequence; identical to SEQ ID NO: 194560
  derived and/or modified CDS sequence (opt5) from hemagglutinin__InfluenzaA__ACK99018

SEQ ID NO: 194569 - RNA, 1698 nt, Artificial Sequence; identical to SEQ ID NO: 194560
  derived and/or modified CDS sequence (opt5) from hemagglutinin__InfluenzaA__ACK99023

SEQ ID NO: 194570 - RNA, 1698 nt, Artificial Sequence
  derived and/or modified CDS sequence (opt5) from hemagglutinin__InfluenzaA__ACK99026
augaaggugaaacugcucguccugcuuugcaccuucacagccacguacgcugacaccaucuguauuggcuaucacgccaacaauagcacagauaccguugacacagugcuggagaagaacgugaccgucacacauuccgugaaucuccuggaaaacucucacaaugggaaacuuugccugcucaagggaaucgcgccccugcagcugggcaacuguagcguugcuggguggauucucggaaauccugagugcgaacugcuuaucuccaaagagucuuggagcuacauuguggaaaagccgaaccccgagaauggcaccuguuauccugggcauuuugccgauuacgaggaacugagagagcaacucuccucugucagcuccuucgaacgguuugagaucuuccccaaggagagcucuuggccuaaccacacggugaccggaguuuccgccagcugcucucauaauggcgaauccagcuuuuaucgcaaccugcuuuggcugacaggcaaaaaugggcucuaccccaaccugucuaaguccuaugcuaauaacaaagagaaggaagugcugguccucuggggagugcaccacccuccgaacaucggcgaccagaaagcccuguaccauaccgagaaugcuuacgugagcgucguuuccucucacuauagcagaaaguucacacccgaaauugccaagcggccuaaagugcgcgaucaggaggggagaaucaacuacuauuggacccuucuggagcccggagacacgauuaucuuugaagcgaauggcaaccucauugccccucgguacgcuuucgcccugucccgcggguuuggaagcggcaucauuaauucuaacgcucccauggauaagugugacgccaaaugccagacaccgcaaggcgcgaucaauuccagccuuccuuuccagaacgugcaucccaucaccauuggggaguguccuaaguaugucagaucugccaaacugcggauggugacaggacuccgcaauauccccagcauucaguccagaggccuguuuggggcuaucgccggauucauugaaggcggguggaccggaaugguugauggcugguacggcuaucaccaccagaacgagcaagggucuggauacgcugccgaccaaaagagcacccagaaugccaucaacggcaucacaaauaaagugaacuccgucauugaaaagaugaauacgcaguuuaccgcuguggggaaggaguucaacaaacuggagcggcgcauggaaaaccucaauaagaaaguugaugacggauucaucgauauuuggacauacaacgcggagcugcuugugcugcucgaaaaugagagaacccuggacuuucaugacagcaacgucaagaaucuuuaugaaaaagugaagucucagcugaagaacaaugccaaagagaucggcaacgggugcuucgaguuuuaccacaaguguaaugaugaaugcauggaguccgucaaaaacggcacauaugacuaccccaaguauagcgaagagucuaaacucaaucgggagaagauugauggagugaagcuggaauccaugggcguuuaccagauccuggcuaucuauagcaccguggccuccucucucguccugcuugugagccugggggccauuuccuucuggaugugcucuaacggaagccuccagugucgcaucugcauuuga

SEQ ID NO: 194571 - RNA, 1698 nt, Artificial Sequence; identical to SEQ ID NO: 194244
  derived and/or modified CDS sequence (opt5) from hemagglutinin__InfluenzaA__ACK99027

SEQ ID NO: 194572 - RNA, 1698 nt, Artificial Sequence
  derived and/or modified CDS sequence (opt5) from hemagglutinin__InfluenzaA__ACK99028
augaaggugaaacugcucguccugcuuugcaccuucacagccacguacgcugacaccaucuguauuggcuaucacgccaacaauagcacagauaccguugacacagugcuggagaagaacgugaccgucacacauuccgugaaucuccuggaaaacucucacaaugggaaacuuugccugcucaagggaaucgcgccccugcagcugggcaacuguagcguugcuggguggauucucggaaauccugagugcgaacugcuuaucuccaaagagucuuggagcuacauuguggaaaagccgaaccccgagaauggcaccuguuauccugggcauuuugccgauuacgaggaacugagagagcaacucuccucugucagcuccuucgaacgguuugagaucuuccccaaggagagcucuuggccuaaccacacggugaccggaguuuccgccagcugcucucauaauggcgaauccagcuuuuaucgcaaccugcuuuggcugacaggcaaaaaugggcucuaccccaaccugucuaaguccuaugcuaauaacaaagagaaggaagugcugguccucuggggagugcaccacccuccgaacaucggcgaccagaaagcccuguaccauaccgagaaugcuuacgugagcgucguuuccucucacuauagcagaaaguucacacccgaaauugccaagcggccuaaagugcgcgaucaggaggggagaaucaacuacuauuggacccuucuggagcccggagacacgauuaucuuugaagcgaauggcaaccucauugccccucgguacgcuuucgcccugucccgcggguuuggaagcggcaucauuaauucuaacgcucccauggauaagugugacgccaaaugccagacaccgaagggcgcgaucaauuccagccuuccuuuccaaaacgugcaucccgucaccaucggggaguguccuaaauaugugagaucugccaagcugcggaugguuacaggacuccgcaauauucccagcauccaguccagaggccuguuuggggcuauugccggauucaucgaaggcggguggaccggaaugguggauggcugguacggcuaucaccaccagaacgagcaggggucuggauacgcugccgaccagaaaagcacccaaaaugccauuaacggcaucacaaauaaggucaacuccgugaucgaaaagaugaauacgcaguuuaccgcuguugggaaagaguucaacaagcuggagcggcgcauggaaaaccucaauaaaaagguggaugacggauucauugauaucuggacauacaacgcggagcugcuuguccugcucgaaaaugagagaacccuggacuuucaugacagcaacgugaaaaaucuuuaugaaaaggucaagucucagcugaaaaacaaugccaaggagauuggcaacgggugcuucgaguuuuaccacaaauguaaugaugaaugcauggaguccgugaagaacggcacauaugacuaccccaaauauagcgaagagucuaagcucaaucgggagaagaucgauggaguuaaacuggaauccaugggcguguaccaaauucuggcuaucuauagcaccgucgccuccucucucgugcugcuuguuagccugggggccaucuccuucuggaugugcucuaacggaagccuccagugucgcauuugcaucuga

SEQ ID NO: 194573 - RNA, 1698 nt, Artificial Sequence
  derived and/or modified CDS sequence (opt5) from hemagglutinin__InfluenzaA__ACK99029
augaaggugaaacugcucguccugcuuugcaccuucacagccacguacgcugacaccaucuguauuggcuaucacgccaacaauagcacagauaccguugacacagugcuggagaagaacgugaccgucacacauuccgugaaucuccuggaaaacucucacaaugggaaacuuugccugcucaagggaaucgcgccccugcagcugggcaacuguagcguugcuggguggauucucggaaauccugagugcgaacugcuuaucuccaaagagucuuggagcuacauuguggaaaagccgaaccccgagaauggcaccuguuauccugggcauuuugccgauuacgaggaacugagagagcaacucuccucugucagcuccuucgaacgguuugagaucuuccccaaggagagcucuuggccuaaccacacggugaccggaguuuccgccagcugcucucauaauggcgaauccagcuuuuaucgcaaccugcuuuggcugacaggcaaaaaugggcucuaccccaaccugucuaaguccuaugcuaauaacaaagagaaggaagugcugguccucuggggagugcaccacccuccgaacaucggcgaccagaaagcccuguaccauaccgagaaugcuuacgugagcgucguuuccucucacuauagcagaaaguucacacccgaaauuuccaagcggccuaaagugcgcgaucaggaggggagaaucaacuacuauuggacccuucuggagcccggagacacgauuaucuuugaagccaauggcaaccucauugcgccucgguacgccuucgcucugagccgcggguuuggaucuggcaucauuaauuccaacgcccccauggauaagugugacgcuaaaugccagacaccgcaaggcgccaucaauagcucucuuccuuuccagaacgugcaucccgucaccaucggggaguguccuaaguaugugagaagcgcgaaacugcggaugguuacaggacuccgcaauauucccuccauccagucuagaggccuguuuggggccauugcuggauucaucgaaggcggguggaccggaaugguggauggcugguacggcuaucaccaccagaacgagcaagggagcggauacgccgcugaccagaaguccacccagaaugccauuaacggcaucacaaauaaagucaacagcgugaucgaaaagaugaauacgcaguuuaccgccguugggaaggaguucaacaaacuggagcggcgcauggaaaaccucaauaagaaaguggaugacggauucauugauaucuggacauacaacgcugagcugcuuguccugcucgaaaaugagagaacccuggacuuucaugacucuaacgugaagaaucuuuaugaaaaagucaagucccaacugaagaacaaugcgaaagagauuggcaacgggugcuucgaguuuuaccacaaguguaaugaugaaugcauggagagcgugaaaaacggcacauaugacuaccccaaguauucugaagaguccaaacucaaucgggagaagaucgauggaguuaagcuggaaagcaugggcguguaccagauucuggccaucuauuccaccgucgcuucuagccucgugcugcuuguuucccugggggccaucucuuucuggaugugcagcaacggaucccuccagugucgcauuugcaucuga

SEQ ID NO: 194574 - RNA, 1698 nt, Artificial Sequence; identical to SEQ ID NO: 194560
  derived and/or modified CDS sequence (opt5) from hemagglutinin__InfluenzaA__ACK99030

SEQ ID NO: 194575 - RNA, 1698 nt, Artificial Sequence; identical to SEQ ID NO: 194560
  derived and/or modified CDS sequence (opt5) from hemagglutinin__InfluenzaA__ACK99031

SEQ ID NO: 194576 - RNA, 1698 nt, Artificial Sequence; identical to SEQ ID NO: 194560
  derived and/or modified CDS sequence (opt5) from hemagglutinin__InfluenzaA__ACK99032

SEQ ID NO: 194577 - RNA, 1698 nt, Artificial Sequence; identical to SEQ ID NO: 194560
  derived and/or modified CDS sequence (opt5) from hemagglutinin__InfluenzaA__ACK99033

SEQ ID NO: 194578 - RNA, 1698 nt, Artificial Sequence
  derived and/or modified CDS sequence (opt5) from hemagglutinin__InfluenzaA__ACK99034
augaaggugaaacugcucguccugcuuugcaccuucacagccacguacgcugacaccaucuguauuggcuaucacgccaacaauagcacagauaccguugacacagugcuggagaagaacgugaccgucacacauuccgugaaucuccuggaaaacucucacaaugggaaacuuugccugcucaagggaaucgcgccccugcagcugggcaacuguagcguugcuggguggauucucggaaauccugagugcgaacugcuuaucuccaaagagucuuggagcuacauuguggaaaagccgaaccccgagaauggcaccuguuauccugggcauuuugccgauuacgaggaacugagagagcaacucuccucugucagcuccuucgaacgguuugagaucuuccccaaggagagcucuuggccuaaccacacggugaccggaguuuccgccagcugcucucauaauggcgaauccagcuuuuaucgcaaccugcuuuggcugacaggcaaaaaugggcucuaccccaaccugucuaaguccuaugcuaauaacaaagagaaggaagugcugguccucuggggagugcaccacccuccgaacaucggcgaccagaaagcccuguaccauaccgagaaugcuuacgugagcgucguuuccucucacuauagcagaaaguucacacccgaaauugccaagcggccuaaagugcgcgaucaggaggggagaaucaacuacuauuggacccuucuggagcccggagacacgauuaucuuugaagcgaauggcaaccucauugccccucgguacgcuuucgcccugucccgcgauuuugggagcggaaucauuaauucuaacgcucccauggacaagugugaugccaaaugccagacaccgcaaggcgcgaucaauuccagccuuccuuuccagaacgugcaucccgucaccaucggcgaguguccuaaguaugugagaucugccaaacugcggaugguuacagggcuccgcaauauucccagcauccaguccagaggacuguuuggcgcuauugccggguucaucgaaggaggcuggaccgggaugguggacggaugguacggcuaucaccaccagaacgagcaaggcucuggguacgcugccgaucaaaagagcacccagaaugccauuaacggaaucacaaauaaagucaacuccgugaucgaaaagaugaauacgcaguuuaccgcuguuggcaaggaguucaacaaacuggagcggcgcauggaaaaccucaauaagaaaguggacgauggguucauugacaucuggacauacaacgcggagcugcuuguccugcucgaaaaugagagaacccuggacuuucaugauagcaacgugaagaaucuuuaugaaaaagucaagucucagcugaagaacaaugccaaagagauuggaaacggcugcuucgaguuuuaccacaaguguaaugacgaaugcauggaguccgugaaaaacgggacauaugauuaccccaaguauagcgaagagucuaaacucaaucgggagaagaucgacggcguuaagcuggaauccaugggaguguaccagauucuggcuaucuauagcaccgucgccuccucucucgugcugcuuguuagccugggcgccaucuccuucuggaugugcucuaacgggagccuccagugucgcauuugcaucuga

SEQ ID NO: 194579 - RNA, 1698 nt, Artificial Sequence
  derived and/or modified CDS sequence (opt5) from hemagglutinin__InfluenzaA__ACK99035
augaaggugaaacugcucguccugcuuugcaccuucacagccacguacgcugacaccaucuguauuggcuaucacgccaacaauagcacagauaccguugacacagugcuggagaagaacgugaccgucacacauuccgugaaucuccuggaaaacucucacaaugggaaacuuugccugcucaagggaaucgcgccccugcagcugggcaacuguagcguugcuggguggauucucggaaauccugagugcgaacugcuuaucuccaaagagucuuggagcuacauuguggaaaagccgaaccccgagaauggcaccuguuauccugggcauuuugccgauuacgaggaacugagagagcaacucuccucugucagcgccuucgaacgguuugagaucuuccccaaggaguccagcuggccuaaccacacggugaccggaguuucugcuuccugcagccauaauggcgaaucuuccuuuuaucgcaaccugcuuuggcugacaggcaaaaaugggcucuaccccaaccugagcaagucuuaugccaauaacaaagagaaggaagugcugguccucuggggagugcaccacccuccgaacaucggcgaccagaaagcucuguaccauaccgagaaugccuacguguccgucguuagcucccacuauucuagaaaguucacacccgaaauuagcaagcggccuaaagugcgcgaucaggaggggagaaucaacuacuauuggacccuucuggagcccggagacacgauuaucuuugaagcgaauggcaaccucauugccccucgguacgcuuucgcccugucccgcggguuuggaagcggcaucauuaauucuaacacacccauggauaagugugacgcuaaaugccagaccccgcaaggcgccaucaauuccagccuuccuuuccagaacgugcaucccgucacaaucggggaguguccuaaguaugugagaucugcgaaacugcggaugguuaccggacuccgcaauauucccagcauccaguccagaggccuguuuggggccauugcuggauucaucgaaggcggguggaccggaaugguggauggcugguacggcuaucaccaccagaacgagcaagggucuggauacgccgcugaccaaaagagcacacagaaugccauuaacggcaucacgaauaaagucaacuccgugaucgaaaagaugaauacccaguuuacagccguugggaaggaguucaacaaacuggagcggcgcauggaaaaccucaauaagaaaguggaugacggauucauugauaucuggaccuacaacgcugagcugcuuguccugcucgaaaaugagagaacacuggacuuucaugacagcaacgugaagaaucuuuaugaaaaagucaagucucagcugaagaacaaugcgaaagagauuggcaacgggugcuucgaguuuuaccacaaguguaaugaugaaugcauggaguccgugaaaaacggcaccuaugacuaccccaaguauagcgaagagucuaaacucaaucgggagaagaucgauggaguuaagcuggaauccaugggcguguaccagauucuggccaucuauagcacggucgcuuccucucucgugcugcuuguuagccugggggccaucuccuucuggaugugcucuaacggaagccuccagugucgcauuugcaucuga

SEQ ID NO: 194580 - RNA, 1701 nt, Artificial Sequence; identical to SEQ ID NO: 194410
  derived and/or modified CDS sequence (opt5) from hemagglutinin__InfluenzaA__ACK99421

SEQ ID NO: 194581 - RNA, 1689 nt, Artificial Sequence
  derived and/or modified CDS sequence (opt5) from hemagglutinin__InfluenzaA__ACK99432
auggccaucauuuaccugauccuccuguucaccgcugugagaggcgaccagauuugcaucggguaucacgccaacaauagcacagagaagauugauacgauccuugaacggaacgucaccguuacacaugcgaaagacauccuggagaagacccacaauggaaaacucuguaagcugaacggcauucccccucuugaacugggggauugcuccaucgcuggauggcuccugggcaauccggagugugaccgccugcucagagugcccgaauggucuuacauuauggagaaagagaacccucgguauagccugugcuaccccggguccuuuaaugauuaugaagaacuuaagcaucugcucucuagcgugaagcacuucgaaaaagucaagauccugccuaaagaccgcuggacacaacauaccacaaccggaggcuccauggccugugccgugucuggcaagcccagcuuuuucagaaacaugguuuggcuuacgaccaaagggccuaauuacccgguggcucagggauccuauaacaauacaagcggcgagcagaugcugauuaucuggggaguccaccaccccaacgaugaggccgaacagcgggcucucuaccaaaagguggggaccuacguuucugccuccacaagcacccuguauaagcgcucuauuccugagaucgcggccagacccaaagugaauggccuggggucccggauggaauuuagcuggacgcuccuggacaugugggauacaaucaacuucgagucuaccggaaaucuugucgcuccugaauacggcuuuaagauuuccaaacgcggcagcuccgggaucaugaagacagagggaacccuggagaacugcgaaaccaaaugucagacaccccucggcgccauuaacacgacccugccguuccauaaugugcacccucuuacaaucggggagugccccaaguaugugaaaucugaaaagcugguccucgcuaccggacugagaaacguuccucagauugagagccggggccuguuuggggccaucgcgggauucaucgaaggcggcuggcaggggaugguggacggaugguacggcuaucaucacuccaaugaucaagggagcggauacgccgcugacaaggagucuacacagaaagccuuugauggcauuaccaacaaggucaauuccgugaucgagaaaaugaacacgcaguucgaagcuguggggaaggaguuuagcaaucucgaaaaacgccuggagaaccuuaauaagaagauggaagacggcuuccuggacguuuggacauauaacgccgagcuccuggugcuuauggagaaugaaagaacccuggauuuccacgacucuaacgucaaaaaucucuacgauaaggugcggaugcagcugcgcgacaacguuaaagagcugggaaauggcuguuuugaguucuaccauaagugcgauaacgaguguauggacagcgugaaaaacgggaccuaugauuaccccaaguaugaggaagaguccaagcucaauagaaacgaaauuaaaggagucaagcugucuagcaugggcguguaccaaauccuugccauuuaugcuacagucgcggggucccugagccucgccaucaugauggcuggaaucucuuuuuggaugugcuccaauggcagccugcagugccggauuuguaucuga

SEQ ID NO: 194582 - RNA, 1701 nt, Artificial Sequence
  derived and/or modified CDS sequence (opt5) from hemagglutinin__InfluenzaA__ACK99443
augaaggccaaacugcucgugcugcuuugcgcuuucaccgccacagacgcggauacgaucuguauuggcuaccacgcuaacaauagcaccgacacagucgauaccguucuggagaagaacgugacagugacccauuccgucaaucuccuggaagacucucacaacgggaaacuuugcagacugaagggaaucgccccgcuccagcugggcaauuguagcauugccggguggauccugggaaacccugagugcgaaucccucuuuucuaaagagagcugguccuauauugcugaaacacccaauucugagaacggcaccuguuaccccggguauuucgccgauuacgaggaacugcgggagcaacuuagcuccgugagcucuuuugaacgcuucgagaucuuuccuaaggaguccagcuggcccaaucauacgguuaccaagggagugacagcugccugcucucacaacggcaaauccagcuucuauagaaaucugcucuggcugaccgaaaagaacggccuuuacccuaaucugucuaaauccuaugucaacaauaaggagaaagaagugcucguucuguggggagugcaucaccccagcaacaucggggaccagcgggcgauuuaccacacagagaacgccuacgucuccguggugucuagccauuauucccgcagauuuaccccugaaaucgcuaagcggccgaagguccgcggccaggaggggagaauuaauuacuauuggacgcugcucgagcccggagauacaaucauuuucgaagccaacggcaaucugaucgcuccuugguacgccuuugcgcuuagccggggguucggaucuggcauuaucaccuccaacgccagcauggacgagugugaugcuaaaugccagacaccccaaggcgccaucaauucuagccugccuuuucagaacguucaccccgugaccauuggggaauguccgaaguaugugcgcuccaccaaacucagaauggucacaggacugcggaauaucccuucugugcagagccgcggccuuuucggggcuauugccggauuuaucgagggcggguggacgggaaugauugacggcugguacggcuaucaucaccagaacgaacaaggguccggauacgccgcugaucaaaagagcacccagaaugcgaucaacggcaucacaaauaaaguuaacucugugauugagaagaugaauacccaguucacagccgucgggaaagaguucaacaagcuggaaagacggauggagaaucucaacaagaaaguggacgauggauuucuggacaucuggaccuacaacgcugaacugcucguucugcuugagaaugaacgcacgcuggacuuccacgauuccaacgugaagaaucucuaugagaaagucaagagccagcugaaaaacaaugccaaggagauuggcaacgggugcuuugaguucuaccauaaguguaauaacgaaugcauggaaucugugaaaaauggcacauaugacuaccccaaguauuccgaggagagcaaacuuaacagagaaaagaucgauggagucaaacuggaguccaugggcguguaccagauucucgccaucuauucuaccguugcuagcucccuggugcugcucgucucucugggggccaucagcuuuuggaugugcuccaauggaagccuucagugucggauuugcaucuga

SEQ ID NO: 194583 - RNA, 1701 nt, Artificial Sequence
  derived and/or modified CDS sequence (opt5) from hemagglutinin__InfluenzaA__ACK99465
augaaggccaaacugcucgugcugcuuugcgcuuucaccgccacauacgcggacacgaucuguauuggcuaucacgcuaacaauagcaccgauacagucgacaccguucuggagaagaacgugacagugacccauuccgucaaucuccuggaagauucucacaacgggaaacuuugcagacugaagggaacagcuccccuccagcugggcaauuguagcguggccggguggauccugggaaacccugagugcgaaucccucuuuucuaaagagagcugguccuacauugccgaaaagccgaaucccgagaacggcaccuguuauccuggguacuucgccgacuaugaggaacugcgggagcaacuuucuagcguuuccagcuuugaacgcuucgagaucuuucccaaggagucuuccuggccuaaucauacggugaccaaaggagucacagcuagcugcucucacaacggcaaguccagcuucuacaaaaaucugcucuggcugaccaagaaaaacggccuuuaucccaaucugucuaaguccuacgugaacaauaaggaaaaagagguucucgugcuguggggaguccaucacccuagcaacauuggggaucagagagccaucuaccacacagaaaacgcguauguguccguggucucuagccauuacucccggcgcuuuaccccggagaucgccaagagacccaaaguucgggaccaggaaggccgcauuaauuauuacuggacgcugcucgagccuggggauacaaucauuuucgaggcuaacggaaaucugaucgcccccugguaugcuuuugcccuuagcagaggcuucgggucuggaauuaucaccuccaacgcgagcaugggcgaaugugacgccaagugccagacaccucaaggcgcuauuaauucuagccugcccuuucagaacgugcacccggugaccaucggggaguguccuaaauacguccgguccaccaagcuccgcauggugacaggacugagaaauauccccucuauucagagccggggccuuuucggggccaucgcuggauuuauugaaggcggguggacgggaaugaucgauggcugguauggcuaccaucaccagaacgagcaaggguccggauacgccgccgacaaaaagagcacccagaaugcuauugauggcaucacaaacaagguuaauucugugaucgaaaagaugaacacccaguucacagcggucgggaaggaguucaauaaacuggagcgcagaauggaaaaccucaauaagaaaguggacgauggauuucuggacauuuggaccuauaacgccgagcugcucguucugcuugaaaacgagcggacgcuggacuuccacgauuccaaugugaagaaccucuacgaaaaggucaaaaaucagcugaagaacaaugcuaaagagaucggcaacgggugcuuugaguucuaucauaaguguaauaacgaaugcauggagagcgugaaaaauggcacauacgacuauccuaaguacucugaagaguccaaacuuaaacgcgagaagauugauggagucaaacuggaaagcaugggcguguaucaaauccucgccauuuacuccaccguugccucuagccuggugcugcucgucucccugggggcuaucucuuuuuggaugugcagcaacggaucccuucaguguagaaucugcauuuga

SEQ ID NO: 194584 - RNA, 1701 nt, Artificial Sequence
  derived and/or modified CDS sequence (opt5) from hemagglutinin__InfluenzaA__ACK99476
augaagaccaucauugcccugagcuacauccucugcaugguguucgcucagaaacugcccggcaacgacaauuccacagccacgcuuugucuggggcaccaugcggucccuaacggaacccucguuaagacaauuaccaaugaucaaaucgaggugacaaacgcuaccgaacuggugcagucuagcuccacaggcagaauuugcgacucuccgcaccggauccuugaugggaaaaauuguacccugaucgacgcccuccugggagauccccauugcgacgauuuucagaacaaggagugggaccuguucgucgaacgcagcaaagccuauuccaauuguuacccuuaugaugugcccgacuacgcuucucucagaagccugguugccuccagcggcacgcuugaguuuaacaaugaaucuuucaacuggaccgggguggcucagaauggaacauccuaugccugcaagcggcgcagcgucaagucuuucuucuccagacugaacuggcuccacaaacuggaguacaaguauccugcgcuuaaugugaccaugcccaacaaugauaaauuugacaagcuguacauuuggggcguucaucacccucggacagauagcgaccaaaccucucucuacgugcaggccuccggccgcgucacggugagcacaaaaagaucccagcagaccgugaucccgaacauugggucuagccccuggguccggggaguuuccagccgcaucucuauuuauuggacaaucgugaagccuggcgacauucugcugaucaacuccaccgggaaucucaucgcucccagaggauacuucaagauucggagcggcaaaucuagcaucaugcgcuccgaugccccuauugggaacuguaauucugagugcaucacccccaacggaagcauuccgaaugacaagccuuuucaaaacgugaauagaaucacauauggcgcuuguccccgguacgucaaacagaacacgcugaagcuggccaccggcaugcgcaaugugccugaaaaacagacaagagggaucuucggagcgauugccggcuuuaucgagaacgggugggaaggaaugguugauggcugguauggguuccggcaccaaaauuccgagggaaccggccaggcugccgaccuuaagagcacacaggcugccauuaaccagaucaauggcaaacucaacagacugauugagaagaccaaugaaaaguuucaucaaaucgagaaagaauuuucugagguggaagggcgcauccaggaucuugagaaguacgucgaggacacgaaaauugaucugugguccuauaacgccgaacuccugguggcucuggagaaccagcacacaaucgaccucaccgauagcgaaaugaauaagcuguucgagcggaccagaaaacagcuucgcgaaaacgcggaggacaugggaaauggcugcuuuaagauuuaccauaagugugauaacgccugcaucgggucuauucggaauggaacauacgaccacgacguuuauagagaugaggcucugaacaaucgcuuccaaaucaaaggcguggaacucaaguccggguacaaagacuggauucuguggaucagcuuugccaucuccugcuuccuucugugugucgugcuccugggcuuuauuaugugggccugccagaagggaaacauccgguguaauauuugcaucuga

SEQ ID NO: 194585 - RNA, 1698 nt, Artificial Sequence; identical to SEQ ID NO: 193986
  derived and/or modified CDS sequence (opt5) from hemagglutinin__InfluenzaA__ACL12063

SEQ ID NO: 194586 - RNA, 1701 nt, Artificial Sequence
  derived and/or modified CDS sequence (opt5) from hemagglutinin__InfluenzaA__ACL12129
augaagaccaucauugcccugagcuacauccucugccugguguucgcucagaaacuucccggcaacgacaauuccacagccacgcugugucucgggcaccaugcggucccuaacggaacccugguuaagacaauuaccaaugaucaaaucgaggugacaaacgcuaccgaacuugugcagucuagcuccacaggcagaauuugcgggucuccgcaccggauccuggacgggaaaaauuguacccucaucgaugcccugcugggcgacccccauugcgauggguuucagaacaaggagugggaccucuucgucgaacgcagcaaagccuauuccaauuguuacccuuaugaugugcccgacuacgcuucucugagaagccuuguugccuccagcggaacgcuggaguuuauuaacgaagauuucaauuggaccggcguggcucaggacggcgggucuuaugccugcaagcggggauccgucaacagcuuuuucucucgccucaauuggcugcacaaacuugaguacaaguauccugcgcugaacgugacaaugcccaauaacggcaaguuugauaaacucuacaucuggggaguucaucacccuuccaccgacagcgaucaaacaucucuguacgugagagccuccggacgggucaccgugagcacgaagcgcucccagcagacagugaccccgaauauuggcucuagacccuggguccgggggcagagcucccgcaucagcauuuauuggacaaucguuaaaccuggagacauucugcucaucgacucuaccggcaaccugaucgcucccagaggcuacuucaagauucggaacgggaaguccagcaucaugcgcucugaugccccuauuggaaauuguagcuccgagugcaucacccccaacggcucuauuccgaaugacaaaccuuuucaaaacgugaauagaaucacauauggggcuuguccccgguacgugaagcagaacacgcuuaaacuggccaccggaaugcgcaaugucccugaaaagcagacaagaggcaucuucggggcgauugccggauuuaucgagaacggcugggaaggcaugguggaugggugguauggauuccggcaccagaauagcgagggcaccgggcaagcugccgaccucaaauccacacaggcugccauugaucagaucaacggaaagcugaauagacuuauugagaaaaccaacgaaaaguuucaacagaucgagaaggaguucagcgaaguugaaggccgcauccaggaccuggagaaauacguggaggauacgaagauugaccucuggucuuauaaugccgaacugcuggucgcucucgagaaccagcauacaaucgaucugaccgacuccgaaaugaauaaacuuuucgagaagacccggaaacaacugagagaaaacgcggaggauauggggaacggcugcuuuaagauuuaccacaagugugacaaugccugcaucggaagcauucgcaacggcacauacgaccaugauguguaucgggacgaggcucucaauaacagauuccagaucaaagggguugaacugaagucuggauacaaagauuggauucuuuggaucuccuuugccaucagcugcuuccugcucugugugguccugcugggcuuuauuaugugggccugccagaaggggaauauccgcuguaacauuugcaucuga

SEQ ID NO: 194587 - RNA, 1701 nt, Artificial Sequence; identical to SEQ ID NO: 194428
  derived and/or modified CDS sequence (opt5) from hemagglutinin__InfluenzaA__ACL12140

SEQ ID NO: 194588 - RNA, 1698 nt, Artificial Sequence; identical to SEQ ID NO: 194512
  derived and/or modified CDS sequence (opt5) from hemagglutinin__InfluenzaA__ACL12151

SEQ ID NO: 194589 - RNA, 1701 nt, Artificial Sequence; identical to SEQ ID NO: 194506
  derived and/or modified CDS sequence (opt5) from hemagglutinin__InfluenzaA__ACL12162

SEQ ID NO: 194590 - RNA, 1701 nt, Artificial Sequence
  derived and/or modified CDS sequence (opt5) from hemagglutinin__InfluenzaA__ACL12173
augaagaccaucauugcccugagcuacauccucugccugguguucgcucagaaacuucccggcaacgacaauuccacagccacgcugugucucgggcaccaugcggucccuaacggaaccauuguuaagacaaucaccaaugaucaaauugaggugacaaacgcuaccgaacuggugcagucuagcuccacaggcgagaucugcgacucuccgcaccagauccuugauggggaaaauuguacccugauugacgcccuccugggagauccccagugcgacggcuuucaaaacaaaaagugggaucuguucgucgagagaagcaaagccuauuccaauuguuacccuuaugacgugcccgauuacgcuucucuccggagccugguugccuccagcgggacgcuugaauuuaacaaugagucuuucaacuggaccggagugacacagaauggcaccuccagcgcuugcauccgcagaucuaacaauuccuuuuucagccggcugaacuggcucacacaucugaaguuuaaguauccugcccuuaaugucaccaugcccaacaacgagcaguucgacaaacuguacauuuggggcgugcaccauccugggacggauaaugaccagaucuuucucuaugcgcaagccucuggacgcauuacaguuuccaccaagagaagccagcagacagugaucccgaacauuggcucccggccccgcgucagaaauaucccuucucggaucagcauuuacuggaccaucgugaaacccggggauauucugcugaucaacuccaccggaaaucucauugcuccucgcggcuacuucaagaucagaagcgggaaaucuuccaucaugcggagcgacgcccccauuggaaaguguaacucugaaugcaucacaccgaauggcagcauuccuaacgacaagcccuuucagaaugugaaccgcaucacguauggcgcuuguccuagauacgucaaacaaaauacccugaaacuugccacagggaugcggaacguucccgagaagcagacccgcggaauuuucggcgcgaucgccggguuuaucgaaaauggaugggagggcaugguggaugggugguauggauucagacaccagaacuccgagggccggggccaagcugccgaccugaagucuacacaggcugccauuaaucagaucaacgggaaacucaacagacugauuggaaagaccaaugaaaaauuccaccagaucgagaaggaauuuagcgagguggaaggccgcauucaagaucuugagaaguacgucgaggacacgaaaaucgaucugugguccuauaacgccgaacuccugguggcucuggagaaucagcauacaauugaccucaccgauagcgaaaugaacaagcuguucgagaaaaccaagaaacagcuucgggaaaaugcggaggacauggggaacggaugcuuuaagaucuaccacaagugugauaaugccugcaucggcucuauuagaaacgggacauaugaccaugauguuuaccgcgacgaggcucugaauaaccgguuccagaucaaaggcguggaacucaaguccggauacaaagacuggauucuguggaucagcuuugccauuucuugcuuccuucugugugucgcccuccugggcuuuaucaugugggcuugccaaaaggggaauaucagauguaacauuugcaucuga

SEQ ID NO: 194591 - RNA, 1701 nt, Artificial Sequence
  derived and/or modified CDS sequence (opt5) from hemagglutinin__InfluenzaA__ACL12184
augaagaccaucauugcccugagcuacauccucugccugguguucgcucagaaacuucccggcaacgacaauuccacagccacgcugugucucgggcaccaugcggucccuaacggaaccauuguuaagacaaucaccaaugaucaaauugaggugacaaacgcuaccgaacuggugcagucuagcuccacaggcgagaucugcgacucuccgcaccagauccuugauggggaaaauuguacccugauugacgcccuccugggagauccccagugcgacggcuuucaaaacaaaaagugggaucuguucgucgagagaagcaaagccuauuccaauuguuacccuuaugacgugcccgauuacgcuucucuccggagccugguugccuccagcgggacgcuugaauuuaacaaugagucuuucaacuggaccggagugacacagaauggcaccuccagcgcuugcauccgcagaucuaacaauuccuuuuucagccggcugaacuggcucacacaucugaaguuuaaguauccugcccuuaaugucaccaugcccaacaacgagcaguucgacaaacuguacauuuggggcgugcaccauccugggacggauaaugaccagaucuuucucuaugcgcaagccucuggacgcauuacaguuuccaccaagagaagccagcagacagugaucccgaacauuggcucccggccccgcgucagaaauaucccuucucggaucagcauuuacuggaccaucgugaaacccggggauauucugcugaucaacuccaccggaaaucucauugcuccucgcggcuacuucaagaucagaagcgggaaaucuuccaucaugcggagcgacgcccccauuggaaaguguaacucugaaugcaucacaccgaauggcagcauuccuaacgacaagcccuuucagaaugugaaccgcaucacguauggcgcuuguccuagauacgucaaacaaaauacccugaaacuugccacagggaugcggaacguucccgagaagcagacccgcggaauuuucggcgcgaucgccggguuuaucgaaaauggaugggagggcaugguggaugggugguauggauucagacaccagaacuccgagggccggggccaagcugccgaccugaagucuacacaggcugccauugaucagaucaaugggaaacucaacagacugauuggaaagaccaacgaaaaauuccaccagaucgagaaggaauuuagcgagguggaaggccgcauucaagaccuugagaaguacgucgaggauacgaaaaucgaccugugguccuauaaugccgaacuccugguggcucuggagaaccagcauacaauugaucucaccgacagcgaaaugaauaagcuguucgagaaaaccaagaaacagcuucgggaaaacgcggaggauauggggaauggaugcuuuaagaucuaccacaagugugacaacgccugcaucggcucuauuagaaaugggacauauaaccaugauguuuaccgcgacgaggcucugaauaaccgguuccagaucaaaggcguggaacucaaguccggauacaaagacuggauucuguggaucagcuuugccauuucuugcuuccuucugugugucgcccuccugggcuuuaucaugugggcuugccaaaaggggaauaucagauguaacauuugcaucuga

SEQ ID NO: 194592 - RNA, 1701 nt, Artificial Sequence; identical to SEQ ID NO: 194506
  derived and/or modified CDS sequence (opt5) from hemagglutinin__InfluenzaA__ACL12195

SEQ ID NO: 194593 - RNA, 1701 nt, Artificial Sequence
  derived and/or modified CDS sequence (opt5) from hemagglutinin__InfluenzaA__ACL12217
augaagaccaucauugcccugagcuacauccucugccugguguucgcucagaaacuucccggcaacgacaauuccacagccacgcugugucucgggcaccaugcggucccuaacggaaccauuguuaagacaaucaccaaugaucaaauugaggugacaaacgcuaccgaacuggugcagucuagcuccacaggcgagaucugcgacucuccgcaccagauccuugauggggaaaauuguacccugauugacgcccuccugggagauccccagugcgacggcuuucaaaacaaaaagugggaucuguucgucgagagaagcaaagccuauuccaauuguuacccuuaugacgugcccgauuacgcuucucuccggagccugguugccuccagcgggacgcuugaauuuaacaaugagucuuucaacuggaccggagugacacagaauggcaccuccagcgcuugcauccgcagaucuaacaauuccuuuuucagccggcugaacuggcucacacaucugaaguuuaaguauccugcccuuaaugucaccaugcccaacaacgagcaguucgacaaacuguacauuuggggcgugcaccauccugggacggauaaugaccagaucuuucucuaugcgcaagccucuggacgcauuacaguuuccaccaagagaagccagcagacagugaucccgaacauuggcucccggccccgcgucagaaauaucccuucucggaucagcauuuacuggaccaucgugaaacccggggaugugcugcugauuaacuccaccggaaaucucaucgcuccucgcggcuacuucaagauuagaagcgggaaaucuuccaucaugcggagcgacgcccccaucggaaaguguaacucugaaugcauuacaccgaauggcagcaucccuaacgacaagcccuuucagaaugucaaccgcauuacguauggcgcuuguccuagauacguuaaacaaaauacccugaaacuugccacagggaugcggaacgugcccgagaagcagacccgcggaaucuucggcgcgauugccggguuuaucgaaaauggaugggagggcaugguggaugggugguauggauucagacaccagaacuccgagggccggggccaagcugccgaccugaagucuacacaggcugccaucgaucagauuaaugggaaacucaacagacugaucggaaagaccaacgaaaaauuccaccagauugagaaggaauuuagcgaggucgaaggccgcauccaagaccuugagaaguacguggaggauacgaaaauugaccugugguccuauaaugccgaacuccugguugcucuggagaaccagcauacaaucgaucucaccgacagcgaaaugaauaagcuguucgagaaaaccaagaaacagcuucgggaaaacgcggaggauauggggaauggaugcuuuaagauuuaccacaagugugacaacgccugcaucggcucuaucagaaaugggacauaugaucaugacguguaccgcgacgaggcucugaacaaucgguuccagauuaaaggcgucgaacucaaguccggauacaaagauuggauccuguggauuagcuuugccaucucuugcuuccuucuguguguggcccuccugggcuuuauuaugugggcuugccaaaaggggaacaucagauguaauaucugcauuuga

SEQ ID NO: 194594 - RNA, 1701 nt, Artificial Sequence; identical to SEQ ID NO: 194506
  derived and/or modified CDS sequence (opt5) from hemagglutinin__InfluenzaA__ACL12228

SEQ ID NO: 194595 - RNA, 1701 nt, Artificial Sequence; identical to SEQ ID NO: 194506
  derived and/or modified CDS sequence (opt5) from hemagglutinin__InfluenzaA__ACL12239

SEQ ID NO: 194596 - RNA, 1701 nt, Artificial Sequence
  derived and/or modified CDS sequence (opt5) from hemagglutinin__InfluenzaA__ACL12250
augaagaccaucauugcccugagcuacauccucugccugguguucgcucagaaauuucccggcaacgacaauuccacagccacgcuuugucuggggcaccaugcggucccuaacggaaccauuguuaagacaaucaccaaugaucaaauugaggugacaaacgcuaccgaacucgugcagucuagcuccacaggcgagaucugcgacucuccgcaccagauccuggauggggaaaauuguacccuuauugacgcccugcucggagauccccagugcgacggcuuccaaaacaaaaauugggaucuguuugucgagagaagcaaggccuauuccaacuguuacccuuaugacgugcccgauuacguuucucugcggagccucguggcuuccagcgggacgcuggaguucaauaacgaaucuuuuaauuggaccggagucacacagaacggcaccuccagcgccugcauccgcagaucuaauaacuccuucuuuagccggcuuaauuggcugacacauucuaaauucaaguauccugcucucaacgugaccaugcccaacaaugagaacuuugacaagcuguacauuuggggcguucaccauccugggacggauaaugaccagaucuuccuuuaugcccaggcguccggacgcauuacagugagcaccaaaagaucccaacagacagucaucccgaacauuggcucucggccccgcgugagaaauaucccuagccggaucuccauuuacuggaccaucgugaagcccggggauauucugcucaucaacagcaccggaaaucugauugccccucgcggcuacuuuaaaaucagaucugggaaguccagcaucaugcggucugacgcucccauuggaaaauguaacagcgaaugcaucacaccgaauggcuccauuccuaacgacaagcccuuccagaaugucaaccgcaucacguauggcgccuguccuagauacguuaagcagaauacccugaaacucgcuacagggaugcggaacgugcccgagaagcaaacccgcggaauuuuuggcgccaucgcgggguucaucgaaaauggaugggagggcaugguggaugggugguauggauucagacaccagaacucugagggcauuggccaggccgcugaccugaaaagcacacaagccgcuaucgaucagauuaacgggaaacuuaaucggcugaucggaaagaccaacgaaaaguuucaccagauugagaaagaguucuccgaagucgaaggcagaauccaggaccucgagaaguacguggaggauacgaagauugaccuguggagcuauaaugccgaacuucugguugcccucgagaaccaacauacaaucgaucugaccgacucugaaaugaauaaacuguuugagaagaccaaaaagcagcuccgcgaaaacgcugaggauauggggaauggaugcuucaaaaucuaccacaagugugacaacgcgugcauuggcuccauccggaaugggacauaugaucaugacguguacagagacgaggcccugaacaaucgcuuucagauuaagggcgucgaacuuaaaagcggauacaaggauuggauccuguggauuucuuucgcuaucuccugcuuucuccuguguaucgcccuucugggcuucauuaugugggccugccagaaagggaacauccgguguaauauuugcaucuga

SEQ ID NO: 194597 - RNA, 1701 nt, Artificial Sequence
  derived and/or modified CDS sequence (opt5) from hemagglutinin__InfluenzaA__ACL12261
augaaggccaaacugcucgugcugcuuugcgcuuucaccgccacagacgcggauacgaucuguauuggcuaccacgcuaacaauagcaccgacacagucgauaccguucuggagaagaacgugacagugacccauuccgucaaucuccuggaagacucucacaacgggaaacuuugcagacugaagggaaucgccccgcuccagcugggcaauuguagcauugccggguggauccugggaaacccugagugcgaaucccucuuuucuaaaaagagcugguccuauauugcugagacacccaauucugaaaacggcaccuguuaccccggguauuucgccgauuacgaggagcugcgggaacaacuuagcuccgugagcucuuuugagcgcuucgaaaucuuuccuaaggaguccagcuggcccaaucauacgguuaccaaaggagugacagcugccugcucucacaagggcagauccagcuucuaucggaaccugcucuggcugaccgagaaaaauggccuuuacccuaaccugucuaaguccuaugucaauaacaaagaaaaggaggugcucguucuguggggagugcaucaccccagcaauaucggggaccagcgcgcgauuuaccacacagaaaacgccuacgucuccguggugucuagccauuauaacagacgguuuaccccugagaucgcuaagcgcccgaaagucagaggccaggaagggcggauuaauuacuauuggacgcugcucgagcccggagauacaaucauuuucgaggccaacggcaaucugaucgcuccuugguacgccuuugcgcuuucccgcggguucggaagcggcauuaucaccucuaacgccuccauggacgaaugugaugcuaagugccagacaccccaaggcgccaucaauagcucucugccuuuucagaacguucaccccgugaccauuggggaguguccgaaauaugugagaagcaccaagcuccggauggucacaggacugcgcaauaucccuuccauucagucuagaggccuuuucggggcuaucgccggauuuauugaaggcggguggacgggaaugaucgacggcugguacggcuaucaucaccagaacgagcaagggagcggauacgccgcugaucagaaauccacccagaaugcgaucaacggcauuacaaauaaggugaacagcguuaucgaaaagaugaauacccaguucacagccguggggaaagaguucaacaagcuggagaaacggauggaaaaucucaacaagaaagucgacgauggauuucuggacauuuggaccuacaacgcugagcugcucgugcugcuugaaaaugagcgcacgcuggacuuccacgauucuaacguuaagaaucucuaugaaaaagugaagaaccaacugaagaauaacgccaaagagaucggcaaugggugcuuugaguucuaccauaaguguaacaaugaaugcauggaguccgucaaaaacggcacauaugacuaccccaaguauagcgaagagucuaaacuuaauagagagaagauugauggagugaagcuggaauccaugggcgucuaccagauccucgccaucuauagcaccguggcuuccucucugguucugcucgugagccugggggccauuuccuuuuggaugugcucuaacggaagccuucagugucggaucugcauuuga

SEQ ID NO: 194598 - RNA, 1689 nt, Artificial Sequence
  derived and/or modified CDS sequence (opt5) from hemagglutinin__InfluenzaA__ACN32272
auggccaucauuuaccugauccuccuguucaccgcugugagaggcgaccagauuugcaucggguaucacgccaacaauagcacagagaagauugauacgauccuugaacggaacgucaccguuacacaugcgaaagacauccuggagaagacccacaauggaaaacucuguaagcugaacggcauucccccucuugaacugggggauugcuccaucgcuggauggcuccugggcaauccggagugugaccgccugcucagagugcccgaauggucuuacauuauggagaaagagaacccucgguauagccugugcuaccccggguccuuuaaugauuaugaagaacuuaagcaucugcucucuagcgugaagcacuucgaaaaagucaagauccugccuaaagaccgcuggacacaacauaccacaaccggaggcuccauggccugugccgugucuggcaagcccagcuuuuucagaaacaugguuuggcuuacgaccaaagggccuaauuacccgguggcucagggauccuauaacaauacaagcggcgagcagaugcugauuaucuggggaguccaccaccccaacgaugaggccgaacagcgggcucucuaccaaaauguggggaccuacguuucugccuccacaagcacccuguauaagcgcucuauuccugagaucgcggccagacccaaggugaacggccuggggucccggauggaauuuagcuggacgcuccuggacaugugggauacaaucaauuucgagucuaccggaaaccuugucgcuccugaauacggcuuuaaaauuuccaagcgcggcagcuccgggaucaugaaaacagagggaacccuggagaacugcgaaaccaagugucagacaccccucggcgccauuaauacgacccugccguuccauaacgugcacccucuuacaaucggggagugccccaaauaugugaagucugaaaaacugguccucgcuaccggacugagaaauguuccucagauugagagccggggccuguuuggggccaucgcgggauucaucgaaggcggcuggcaggggaugguggacggaugguacggcuaucaucacuccaacgaucaagggagcggauacgccgcugacaaggagucuacacagaaggccuuugauggcauuaccaauaaagugaacuccgucaucgagaagaugaauacgcaguucgaagcuguggggaaagaguuuagcaaccucgaaaagcgccuggagaaucuuaacaaaaagauggaagacggcuuccuggacguuuggacauauaaugccgagcuccuggugcuuauggagaacgaaagaacccuggauuuccacgacucuaaugucaagaaccucuacgauaaagugcggaugcagcugcgcgacaauguuaaggagcugggaaacggcuguuuugaguucuaccauaaaugcgauaacgaguguauggacagcgugaagaaugggaccuaugauuaccccaaauaugaggaagaguccaagcucaacagaaaugaaauuaagggagucaaacugucuagcaugggcguguaccaaauccuugccauuuaugcuacagucgcggggucccugagccucgccaucaugauggcuggaaucucuuuuuggaugugcuccaacggcagccugcagugccggauuuguaucuga

SEQ ID NO: 194599 - RNA, 1701 nt, Artificial Sequence
  derived and/or modified CDS sequence (opt5) from hemagglutinin__InfluenzaA__ACN32283
augaagaccaucauugcccugagcuacauccucugccugguguccgcucagaaauuccccggcaacgacaauucuacagccacgcuuugucuggggcaccaugcggucccuaacggaaccauuguuaagacaaucaccaaugaucaaauugaggugacaaacgcuaccgaacucgugcagagcuccucuacaggcgagaucugcgacagcccgcaccagauccuggauggggaaaauuguacccuuauugacgcccugcucggagauccccagugcgacggcuuucaaaacaaaaagugggaucuguucgucgagagauccaaagccuauucuaauuguuacccuuaugacgugcccgauuacgcuagccugcggucccucguugccagcucugggacgcuggaauuuaacaaugaguccuucaacuggaccggagugacacagaauggcaccagcucugcuugcauccgcagauccaacaauagcuuuuucucucggcuuaacuggcugacacaucucaaguuuaaguauccugcccugaaugucaccaugcccaacaacgaggaguucgacaaacuuuacauuuggggcgugcaccauccugggacggauaaugaccagaucuuucuguaugcgcaggccuccggacgcauuacaguuagcaccaagagaucccaacagacagugaucccgaacauuggcucucggccccgcgucagaaauaucccuagccggaucuccauuuacuggaccaucgugaaacccggggauauucuccugaucaacagcaccggaaaucugauugcuccucgcggcuacuucaagaucagaucugggaaauccagcaucaugcggucugacgcccccauuggaaaguguaacagcgaaugcaucacaccgaauggcuccauuccuaacgacaagcccuuucagaaugugaaccgcaucacguauggcgcuuguccuagauacgucaaacagaauacccucaagcuggccacagggaugcggaacguucccgaaaaacaaacccgcggaauuuucggcgcgaucgccggguuuaucgagaauggaugggagggcaugguggaugggugguauggauucagacaccagaacucugaaggcauuggccaggcugccgaccuuaagagcacacaagcugccaucgaucagauuaaugggaaacugaaccggcucaucggaaagaccaacgagaaauuccaccagauugaaaaggaguuuuccgaaguggagggcagaauccaggaccuggagaaguacgucgaagauacgaaaauugaccuuuggagcuauaaugccgagcugcucguggcucuggaaaaccaacauacaaucgaucugaccgacucugagaugaauaaacucuucgaaaagaccaagaaacagcugcgcgagaacgcggaggauauggggaauggaugcuuuaagaucuaccacaagugugacaacgccugcauuggcuccauccggaaugggacauaugaucaugacguuuacagagacgaagcucuuaacaaucgcuuccagauuaaaggcguggagcucaagagcggauacaaagauuggauccuguggauuucuuuugccaucuccugcuuccugcuuugugucgcccugcucggcuuuaucaugugggcuugccagaaggggaacauucgguguaauaucugcauuuga

SEQ ID NO: 194600 - RNA, 1701 nt, Artificial Sequence
  derived and/or modified CDS sequence (opt5) from hemagglutinin__InfluenzaA__ACN32474
augaagaccaucauugcccugagcuacauccucugccugguguccgcucagaaacuucccggcaacgacaauucuacagccacgcugugucucgggcaccaugcggucccuaacggaaccauuguuaagacaaucaccaaugaucaaauugaggugacaaacgcuaccgaacuggugcagagcuccucuacaggcgagaucugcgacagcccgcaccagguccuugauggggaaaauuguacccugaucgacgcccuccugggagauccccagugcgacggcuuccaaaacaaaaagugggaucuguuuguggagagauccaaagccuauucuaauuguuacccuuaugacguucccgauuacacgagccuccggucccugguggcuagcucugggacccuugaguucaacaaugaauccuuuaacuggacaggagucacccagaauggcacaagcucugccugcauucgcagauccaacaauagcuucuuuucucggcugaacuggcucacccaucugaaguucaaguauccugcucuuaauaugacgaugcccaacaacgaggaauuugacaaacuguacaucuggggcgugcaccauccugggacagauaaugaccagauuuuccucuaugcccaggcguccggacgcaucaccguuagcacaaagagaucccaacagaccgugauuccgaacaucggcucucggccccgcgucagaaauauuccuagccggaucuccaucuacuggaccauugugaaacccggggauauccugcugauuaacagcacaggaaaucucaucgccccucgcggcuacuuuaagauuagaucugggaaauccagcaucaugcggucugacgcucccaucggaaaguguaacagcgagugcauuacgccgaauggcuccaucccuaacgacaagcccuuccagaaugugaaccgcauuaccuauggcgccuguccuagauacgucaaacagaauacacugaaacuugcuaccgggaugcggaacguucccgaaaaacaaacacgcggaaucuuuggcgccauugcgggguucaucgagaauggaugggagggcaugguggaugggugguauggauuuagacaccagaacucugaaggcaucggccaggccgcugaccucaagagcacccaagccgcuauugaucagaucaaugggaaacugaaccggcugauuggaaagacgaacgagaaauuccaccagaucgaaaaggaguucuccgaaguggagggccgcauucaggaccuugagaaguacgucgaagauacaaaaaucgaccuguggagcuauaaugccgagcuccugguggcccuggaaaaccaacauaccauugaucucaccgacucugagaugaauaagcuguuugaaaagacaaagaaacagcuuagagagaacgcugaggauauggggaauggaugcuucaagaucuaccacaagugugacaacgcgugcaucggcuccauucggaaugggaccuaugaucaugaaguuuacagagacgaggcccugaacaaucgcuuucagaucaaaggcguggaacucaagagcggauacaaagacuggauucuguggaucucuuucgcuauuuccugcuuucuucugugugucgcccuccugggcuucaucaugugggccugccagaaggggaacauccgguguaauauuugcaucuga

SEQ ID NO: 194601 - RNA, 1698 nt, Artificial Sequence; identical to SEQ ID NO: 194560
  derived and/or modified CDS sequence (opt5) from hemagglutinin__InfluenzaA__ACN32501

SEQ ID NO: 194602 - RNA, 1701 nt, Artificial Sequence
  derived and/or modified CDS sequence (opt5) from hemagglutinin__InfluenzaA__ACN32534
augaagaccaucauugcccugagcuacauccucugccugguguucgcucagaaacuucccggcaacgacaauuccacagccacgcugugucucgggcaccaugcggucccuaacggaacccugguuaagacaauuaccaaugaucaaaucgaggugacaaacgcuaccgaacuugugcagucuagcuccacaggcagaauuugcgacucuccgcaccagauccuggauggggagaauuguacccucaucgacgcccugcugggagauccccauugcgacggcuuucagaacaaagaaugggaucucuucgucgagcggagcaaggccuauuccaauuguuacccuuaugacgugcccgauuacguuucucugcgcagccuuguggcuuccagcgggacgcuggaauuuaacaaugagucuuucaacuggaccggagucgcccaaaauggcacauccagcgcuugcaaaagacggucugacaaguccuuuuucagccgccucaacuggcugcaccagcuuaaguauaaauacccugcccugaaugugaccaugcccaacaaugagaaguuugauaaacucuauauuuggggcguucaucacccugggacagacucugaucagaucucccuguacgcgcaggccagcggaagagugaccgucuccacgaagcggucucaacagacagugauuccgaacaucggcagcgggcccugggugcgcggagucuccagcagaauuucuaucuacuggaccauuguuaaaccuggcgacauccugcucaucaacuccacagggaaucugauugcuccccggggauauuucaagauccgcagcggcaagucuagcauuaugagauccgacgccccuaucggcaaauguaacucugaaugcauuacccccaaugggagcaucccgaacggaaagccuuuucagaaugugaaccggaucaccuacggcgcuuguccccgcuaugugaaacagaauacacuuaagcuggccacggggaugagaaacgucccugagaaacaaacccggggaauuuucggcgcgaucgccggguuuauugaaaauggaugggagggcaugauggauggcugguacggguuccgccaccagaacuccgagggaacaggccaggcugccgaccucaagagcacccaagcugccaucaaucagauuaacgggaaacugaauagacuuaucgaaaagacaaacgagaaguuucaucagaucgaaaaagaguucucugaaguggagggacggauucaggaucuggagaaguauguugaagacaccaaaaucgaucucugguccuacaaugccgagcugcugguggcucucgaaaaccaacacacgauugaccugacagauagcgagaugaacaaacuuuucgaaagaaccaagaagcagcugcgcgagaaugcggaggacaugggcaacgggugcuuuaagaucuaucauaaaugugauaaugccugcauuggcucuauccggaacggaaccuacgaccacgaugucuacagagacgaagcucucaauaaccgcuuccagauuaagggcguggagcugaaauccggguauaaggacuggauccuuuggaucagcuuugccauuuccugcuuccugcucuguaucguucugcugggauuuauuaugugggccugccagaaaggcaauauccgguguaacauuugcaucuga

SEQ ID NO: 194603 - RNA, 1701 nt, Artificial Sequence
  derived and/or modified CDS sequence (opt5) from hemagglutinin__InfluenzaA__ACN32545
augaagaccaucauugcccugagcuacauccucugccugguguucgcucagaaacuucccggcaacgacaauuccacagccacgcugugucucgggcaccaugcggucccuaacggaaccauuguuaagacaaucaccaaugaucaaauugaggugacaaacgcuaccgaacuggugcagucuagcuccacaggcgagaucugcgacucuccgcaccagauccuugauggggaaaauuguacccugauugacgcccuccugggagauccccauugcgacggcuuucagaacaaaaagugggaucuguucgucgagagaagcaaagccuauuccaauuguuacccuuaugacgugcccgauuacgcuucucuccggagccugaucgccuccagcgggacgcuugaauuuaacaaugagucuuucaacuggaccggaguuacacaaaauggcaccuccagcgcuugcauucgcagaucuaacaauuccuuuuucagccggcugaacuggcucacacaccugaaguuuaaguauccugcccuuaaugugaccaugcccaacaacgagaaauucgacaagcuguacaucuggggcguccaucacccugggacggauaaugaccagauuuuucucuaugcgcaggccucuggacgcaucacaguguccaccaaaagaagccagcaaacaguuauuccgaacaucggcucccggccccgcgugagaaauaucccuucucggauuagcaucuacuggaccauugucaagcccggggauauccugcugauuaacuccaccggaaaucucaucgcuccucgcggcuacuucaaaaucagaagcgggaagucuuccauuaugcggagcgacgcccccaucggaaaguguaacucugaaugcauuacaccgaauggcagcaucccuaacgacaaacccuuucagaaugugaaccgcauuacguauggcgcuuguccuagauacgugaagcagaauacccugaaacuugccacagggaugcggaacguccccgagaagcagacccgcggaaucuucggcgcgaucgccggguuuauugaaaauggaugggagggcaugguugaugggugguauggauucagacaccaaaacuccgagggcaucggccaggcugccgaccugaaaucuacacaggcugccauugaucaaaucaaugggaagcucaaccggcugauuggaaaaaccaacgaaaaguuccaucagaucgagaaggaauuuagcgagguggaaggccgcauucaggaccuugagaaauacguggaggauacgaagaucgaccugugguccuauaaugccgaacuccuggucgcucuggagaaccagcacacaaucgaucucaccgacagcgaaaugaauaaacuguucgagaagaccaaaaagcaacuuagagaaaacgcggaggauauggggaauggaugcuuuaagauuuaccauaaaugugacaacgccugcaucggcucuauucggaaugggacauaugaucacgacguguacagagacgaggcucugaacaaucgcuuccagaucaagggcguugaacucaaauccggauacaaggauuggauucuguggaucagcuuugccaucucuugcuuccuucuguguguggcccuccugggcuuuauuaugugggcuugccagaaagggaacauccgguguaauauuugcaucuga

SEQ ID NO: 194604 - RNA, 1698 nt, Artificial Sequence
  derived and/or modified CDS sequence (opt5) from hemagglutinin__InfluenzaA__ACN32793
augaaggugaaacugcucguccugcuuugcaccuucacagccacguacgcugacaccaucuguauuggcuaucacgccaacaauagcacagauaccguugacacagugcuggagaagaacgugaccgucacacauuccgugaaucuccuggaagauucucacaacgggaaacuuugccugcucaagggaaucgcgccccugcagcugggcaauuguagcguugcuggguggauucucggaaacccugagugcgaacugcuuaucuccaaagagucuuggagcuacauuguggaaaccccgaaucccgagaacggcacguguuauccuggguacuuugccgacuaugaggaacugagagagcaacucuccucugucagcuccuucgaacgguuugagaucuuccccaaggagagcucuuggccuaaucauaccgugacaggaguuuccgccagcugcucucacaacggcaaguccagcuuuuaccgcaaucugcuuuggcugaccggcaaaaacgggcucuaucccaaucugucugaauccuacgcuaacaauaaggagaaagaagugcugguccucuggggagugcaucacccuccgaacaucggcgaucagagagcccuguaccacacagagaacgcuuaugugagcgucguuuccucucauuacagccggcgcuucacccccgaaauugccaagagaccuaaagugcgggaccaggaggggcgcaucaauuauuacuggacgcuucuggagcccggagauacaauuaucuuugaagcgaacggcaaucucauugccccuagauucgcuuuugcccugucccggggguucggaagcggcaucauuaccucuaacgcucccauggacgagugugaugccaagugccagacaccgcaaggcgcgaucaauuccagccuuccuuuucagaacgugcaccccgucaccaucggggaauguccuaaguaugugcgcucuaccaaacugagaaugguuacaggacuccggaauauucccagcauccagucccgcggccuguucggggccauugcuggauuuaucgagggcggguggacgggaaugguggacggcugguacggcuaucaucaccagaacgaacaagggucuggauacgccgcugaucaaaagagcacccagaaugccauuaacggcaucacaaauaaagucaacuccgugaucgagaagaugaauacccaguucacagccguugggaaagaguucaacaagcuggaaagacggauggagaaucucaacaaaaagguggacgauggauuucuggacauuuggaccuacaacgcugaacuucugguccuccuggagaaugaacgcacgcuugacuuccacgauagcaacgugaagaaucuguaugagaaagucaagucucagcucaaaaacaaugcgaaggagaucggcaacgggugcuuugaguucuaccauaaauguaaugacgaaugcauggaauccgugaagaacggcacauaugauuaccccaaguauagcgaggagucuaaacugaauagagaaaagauugacggaguuaaacuggaguccaugggcguguaccagauccucgccauuuauagcaccgucgcuuccucucuggugcuucugguuagccucggggccaucuccuuuuggaugugcucuaacggaagccugcagugucggaucugcauuuga

SEQ ID NO: 194605 - RNA, 1698 nt, Artificial Sequence; identical to SEQ ID NO: 194029
  derived and/or modified CDS sequence (opt5) from hemagglutinin__InfluenzaA__ACN32804

SEQ ID NO: 194606 - RNA, 1698 nt, Artificial Sequence; identical to SEQ ID NO: 194017
  derived and/or modified CDS sequence (opt5) from hemagglutinin__InfluenzaA__ACN32815

SEQ ID NO: 194607 - RNA, 1698 nt, Artificial Sequence; identical to SEQ ID NO: 194027
  derived and/or modified CDS sequence (opt5) from hemagglutinin__InfluenzaA__ACN32826

SEQ ID NO: 194608 - RNA, 1701 nt, Artificial Sequence; identical to SEQ ID NO: 194506
  derived and/or modified CDS sequence (opt5) from hemagglutinin__InfluenzaA__ACN32848

SEQ ID NO: 194609 - RNA, 1701 nt, Artificial Sequence
  derived and/or modified CDS sequence (opt5) from hemagglutinin__InfluenzaA__ACN32870
augaagaccaucauugcccugagcuacauccucugccugguguucgcucagaaauuucccggcaacgacaauuccacagccacgcuuugucuggggcaccaugcggucccuaacggaaccauuguuaagacaaucaccaaugaucaaauugaggugacaaacgcuaccgaacucgugcagucuagcuccacaggcgagaucugcgacucuccgcaccagauccuggauggggaaaauuguacccuuauugacgcccugcucggagauccccagugcgacggcuuccaaaacaaaaauugggaucuguuugucgagagaagcaaggccuauuccaacuguuacccuuaugacgugcccgauuacgcuucucugcggagccucguugccuccagcgggacgcuggaguucaauaacgaaucuuuuaauuggaccggagugacacagaacggcaccuccagcgcuugcauccgcagaucuaauaacuccuucuuuagccggcuuaauuggcugacacauucuaaauucaaguauccugcccucaacgucaccaugcccaacaaugagaacuuugacaagcuguacauuuggggcgugcaccauccugggacggauaaugaccagaucuuccuuuaugcgcaggccuccggacgcauuacaguuagcaccaaaagaucccaacagacagugaucccgaacauuggcucucggccccgcgucagaaauaucccuagccggaucuccauuuacuggaccaucgugaagcccggggauauucugcucaucaacagcaccggaaaucugauugcuccucgcggcuacuuuaaaaucagaucugggaaguccagcaucaugcggucugacgcccccauuggaaaauguaacagcgaaugcaucacaccgaauggcuccauuccuaacgacaagcccuuccagaaugugaaccgcaucacguauggcgcuuguccuagauacgucaagcagaauacccugaaacucgccacagggaugcggaacguucccgagaagcaaacccgcggaauuuuuggcgcgaucgccggguucaucgaaaauggaugggagggcaugguggaugggugguauggauucagacaccagaacucugagggcauuggccaggcugccgaccugaaaagcacacaagcugccaucgaucagauuaacgggaaacuuaaucggcugaucggaaagaccaacgaaaaguuucaccagauugagaaagaguucuccgaaguggaaggcagaauccaggaccucgagaaguacgucgaggauacgaagauugaccuguggagcuauaaugccgaacuucugguggcucucgagaaccaacauacaaucgaucugaccgacucugaaaugaauaaacuguuugagaagaccaaaaagcagcuccgcgaaaacgcggaggauauggggaauggaugcuucaaaaucuaccacaagugugacaacgccugcauuggcuccauccggaaugggacauaugaucaugacguuuacagagacgaggcucugaacaaucgcuuucagauuaagggcguggaacuuaaaagcggauacaaggauuggauccuguggauuucuuucgccaucuccugcuuucuccuguguaucgcccuucugggcuucauuaugugggcuugccagaaagggaacauccgguguaauauuugcaucuga

SEQ ID NO: 194610 - RNA, 1701 nt, Artificial Sequence; identical to SEQ ID NO: 194609
  derived and/or modified CDS sequence (opt5) from hemagglutinin__InfluenzaA__ACN32892

SEQ ID NO: 194611 - RNA, 1701 nt, Artificial Sequence; identical to SEQ ID NO: 194506
  derived and/or modified CDS sequence (opt5) from hemagglutinin__InfluenzaA__ACN32903

SEQ ID NO: 194612 - RNA, 1701 nt, Artificial Sequence
  derived and/or modified CDS sequence (opt5) from hemagglutinin__InfluenzaA__ACN32914
augaagaccaucauugcccugagcuacauccucugccuggcuuucgcccagaaacuucccggcaacgacaauuccacagcgacgcugugucucgggcaccaugcugugccuaacggaaccauugucaagacaaucaccaaugaucaaauugagguuacaaacgccaccgaacuggugcagucuagcuccacaggcgagaucugcgacucuccgcaccagauccuugauggggaaaauuguacccugauugacgcccuccugggagauccccagugcgacggcuuucaaaacaaaaagugggaucuguucguggagagaagcaaggcuuauuccaauuguuacccuuaugacguccccgauuacgccucucuccggagccugguggcuuccagcgggacgcuugaauuuaacaaugagucuuucaacuggaccggaguuacacagaauggcaccuccagcgccugcauccgcagaucuaacaauuccuuuuucagccggcugaacuggcucacacaucugaaguuuaaguauccugcgcuuaaugugaccaugcccaacaacgagcaguucgacaaacuguacauuuggggcguccaccauccugggacggauaaugaccagaucuuucucuaugcccaggcuucuggacgcauuacaguguccaccaagagaagccaacagacaguuaucccgaacauuggcucccggccccgcgugagaaauaucccuucucggaucagcauuuacuggaccaucgucaaacccggggauauucugcugaucaacuccaccggaaaucucauugccccucgcggcuacuucaagaucagaagcgggaaaucuuccaucaugcggagcgacgcucccauuggaaaguguaacucugaaugcaucacaccgaauggcagcauuccuaacgacaagcccuuucagaaugugaaccgcaucacguauggcgccuguccuagauacgugaaacaaaauacccugaaacuugcgacagggaugcggaacguccccgagaaacagacccgcggaauuuucggcgccaucgcuggguuuaucgaaaauggaugggagggcaugguugaugggugguauggauucagacaccagaacuccgagggccggggccaagccgcugaccugaagucuacacaggccgccauugaucagaucaaugggaaacucaacagacugauuggaaagaccaacgaaaaauuccaccagaucgagaaggaauuuagcgagguggaaggccgcauucaagaccuugagaaguacguggaggauacgaaaaucgaccugugguccuauaaugcugaacuccuggucgcgcuggagaaccagcauacaauugaucucaccgacagcgaaaugaauaagcuguucgagaaaaccaagaaacagcuucgggaaaacgccgaggauauggggaauggaugcuuuaagaucuaccacaagugugacaacgcuugcaucggcucuauuagaaaugggacauaugaucaugacguguaccgcgacgaggcccugaacaaucgguuccagaucaaaggcguugaacucaaguccggauacaaagauuggauucuguggaucagcuuugccauuucuugcuuccuucuguguguggcucuccugggcuuuaucaugugggccugccaaaaggggaacaucagauguaauauuugcaucuga

SEQ ID NO: 194613 - RNA, 1701 nt, Artificial Sequence; identical to SEQ ID NO: 194506
  derived and/or modified CDS sequence (opt5) from hemagglutinin__InfluenzaA__ACN32925

SEQ ID NO: 194614 - RNA, 1701 nt, Artificial Sequence
  derived and/or modified CDS sequence (opt5) from hemagglutinin__InfluenzaA__ACN32936
augaagaccaucauugcccugagcuacauccucugccugguguucgcucagaaauuucccggcaacgacaauuccacagccacgcuuugucuggggcaccaugcggucccuaacggaaccauuguuaagacaaucaccaaugaucaaauugaggugacaaacgcuaccgaacucgugcagucuagcuccacaggcgagaucugcgacucuccgcaccagauccuggauggggaaaauuguacccuuauugacgcccugcucggagauccccagugcgacggcuuccaaaacaaaaauugggaucuguuugucgagagaagcaaggccuauuccaacuguuacccuuaugacgugcccgauuacgcuucucugcggagccucguugccuccagcgggacgcuggaguucaauaacgaaucuuuuaauuggaccggagugacacagaacggcaccuccagcgcuugcauccgcagaucuaauaacuccuucuuuagccggcuuaauuggcugacacauucuaaauucaaguauccugcccucaacgucaccaugcccaacaaugagaacuuugacaagcuguacauuuggggcgugcaccauccugggacggauaaugaccagaucuuccuuuaugcgcaggccuccggacgcauuacaguuagcaccaaaagaucccaacagacagugaucccgaacauuggcucucggccccgcaucaagaauaucccuagcagaauuuccaucuacuggaccauugucaaacccggggauauccugcucauuaacagcaccggaaaucugaucgcuccucggggcuacuuuaagauccgcucugggaaauccagcauuaugagaucugacgcccccaucggaaaguguaacagcgaaugcauuacaccgaauggcuccaucccuaacgacaagcccuuccagaaugugaaccggauuacguauggcgcuuguccucgcuacgugaaacagaauacccugaagcucgccacagggaugagaaacguccccgagaaacaaacccggggaaucuuuggcgcgaucgccggguucauugaaaauggaugggagggcaugguugaugggugguauggauuccgccaccagaacucugagggcaucggccaggcugccgaccuuaagagcacacaagcugccauugaucagaucaacgggaaacugaauagacugauuggaaagaccaacgaaaaauuucaccagaucgagaaggaguucuccgaaguggaaggccggauucaggaccucgagaaguacguggaggauacgaaaaucgaccuguggagcuauaaugccgaacuucuggucgcucucgagaaccaacauacaaucgaucugaccgacucugaaaugaauaagcuguuugagaaaaccaagaaacagcucagagaaaacgcggaggauauggggaauggaugcuucaagauuuaccacaagugugacaacgccugcaucggcuccauucgcaaugggacauaugaucaugacguguaccgggacgaggcucugaacaauagauuucagaucaaaggcguugaacuuaagagcggauacaaagauuggauucuguggaucucuuucgccaucuccugcuuucuccuguguauugcccuucugggcuucaucaugugggcuugccagaaggggaacauucgcuguaauaucugcauuuga

SEQ ID NO: 194615 - RNA, 1701 nt, Artificial Sequence; identical to SEQ ID NO: 194506
  derived and/or modified CDS sequence (opt5) from hemagglutinin__InfluenzaA__ACN32947

SEQ ID NO: 194616 - RNA, 1701 nt, Artificial Sequence
  derived and/or modified CDS sequence (opt5) from hemagglutinin__InfluenzaA__ACN32958
augaagaccaucauugcccugagcuacauccucugccugguguucgcucagaaacuucccggcaacgacaauuccacagccacgcugugucucgggcaccaugcggucccuaacggaaccauuguuaagacaaucaccaaugaucaaauugaggugacaaacgcuaccgaacuggugcagucuagcuccacaggcgagaucugcgacucuccgcaccagauccuugauggggaaaauuguacccugauugacgcccuccugggagauccccagugcgacggcuuucaaaacaaaaagugggaucuguucgucgagagaaauaaagccuauagcaacuguuacccuuaugacgugcccgauuacgcuucccuccggucucugguugccagcuccgggacgcuugaauuuaauaacgagagcuucaauuggaccggagugacacagaacggcaccucuuccgcuugcauccgcagaagcaauaacuccuuuuucucucggcugaauuggcucacacaucugaaguuuaaguauccugcccuuaacgucaccaugcccaacaaugagcaguucgacaaacuguacauuuggggcgugcaccauccugggacggauaacgaccagaucuuucucuaugcgcaagccagcggacgcauuacaguuucuaccaagagaucccagcagacagugaucccgaauauuggcagccggccccgcgucagaaacaucccuucccggaucucuauuuacuggaccaucgugaaacccggggauauucugcugaucaauagcaccggaaaccucauugcuccucgcggcuacuucaagaucagauccgggaaaagcucuaucaugcgguccgacgcccccauuggaaaguguaauagcgaaugcaucacaccgaacggcucuauuccuaaugacaagcccuuucagaacgugaaucgcaucacguauggcgcuuguccuagauacgucaaacaaaacacccugaaacuugccacagggaugcggaauguucccgagaagcagacccgcggaauuuucggcgcgaucgccggguuuaucgaaaacggaugggagggcaugguggaugggugguauggauucagacaccagaauagcgagggccggggccaagcugccgaccugaaguccacacaggcugccauugaucagaucaacgggaaacucaacagacugauuggaaagaccaaugaaaaauuccaccagaucgagaaggaauuuucugagguggaaggccgcauucaagaccuugagaaguacgucgaggauacgaaaaucgaccuguggagcuauaacgccgaacuccugguggcucuggagaaucagcauacaauugaucucaccgacuccgaaaugaacaagcuguucgagaaaaccaagaaacagcuucgggaaaaugcggaggauauggggaacggaugcuuuaagaucuaccacaagugugacaaugccugcaucggcagcauuagaaacgggacauaugaucaugacguuuaccgcgacgaggcucugaauaaccgguuccagaucaaaggcguggaacucaagucuggauacaaagauuggauucuguggaucuccuuugccauuagcugcuuccuucugugugucgcccuccugggcuuuaucaugugggcuugccaaaaggggaauaucagauguaacauuugcaucuga

SEQ ID NO: 194617 - RNA, 1701 nt, Artificial Sequence
  derived and/or modified CDS sequence (opt5) from hemagglutinin__InfluenzaA__ACN32969
augaagaccaucauugcccugagcuacauccucugccugguguccgcucagaaacuucccggcaacgacaauucuacagccacgcugugucucgggcaccaugcggucccuaacggaaccauuguuaagacaaucaccaaugaucaaauugaggugacaaacgcuaccgaacuggugcagagcuccucuacaggcgagaucugcgacagcccgcaccagguccuugauggggaaaauuguacccugaucgacgcccuccugggagauccccagugcgacggcuuccaaaacaaaaagugggaucuguuuguggagagauccaaagccuauucuaauuguuacccuuaugacguucccgauuacgcuagccuccggucccugguggccagcucugggacgcuugaguucaacaaugaauccuuuaacuggaccggagucacacagaauggcaccagcucugcuugcauucgcagauccaacaauagcuucuuuucucggcugaacuggcucacacauuccaaguucaaguauccugcccugaaugugaccaugcccaacaacgaggaauuugacaaacuuuacaucuggggcguucaccauccugggacggauaaugaccagauuuuccuguaugcgcaggccagcggacgcaucacaguguccaccaagagaucucaacagacagucauuccgaacaucggcagccggccccgcgugagaaauauuccuucccggaucagcaucuacuggaccauugugaaacccggggauauccuccugauuaacucuaccggaaaucugaucgcuccucgcggcuacuuuaagcucagauccgggaaaagcucuauuaugcggagcgacgcccccaucggaaaguguaacuccgagugcaucacaccgaauggcucuauuccuaacgacaagcccuuccagaaugucaaccgcaucacguauggcgcuuguccuagauacguuaaacagaauacccugaaacuugccacagggaugcggaacgugcccgaaaaacaaacccgcggaauuuuuggcgcgaucgccggguucauugagaauggaugggagggcaugguggaugggugguauggauuuagacaccagaacagcgaaggcaucggccaggcugccgaccugaaguccacacaagcugccaucgaucagauuaaugggaaacucaaccggcugaucggaaagaccaacgagaaauuccaccagauugaaaaggaguucagcgaagucgagggcagaauccaggaccuugagaaguacguggaagauacgaaaauugaccuguggucuuauaaugccgagcuccugguugcucuggaaaaccaacauacaaucgaucucaccgacuccgagaugaauaagcuguuugaaaagaccaagaaacagcuucgcgagaacgcggaggauauggggaauggaugcuucaagauuuaccacaagugugacaacgccugcaucggcagcauccggaaugggacauaugaucaugaaguguacagagacgaggcucugaacaaucgcuuucagauuaaaggcgucgaacucaagucuggauacaaagacuggauccuguggauuuccuucgccaucagcugcuuucuucuguguguggcccuccugggcuucauuaugugggcuugccagaaggggaacauccgguguaauaucugcauuuga

SEQ ID NO: 194618 - RNA, 1701 nt, Artificial Sequence
  derived and/or modified CDS sequence (opt5) from hemagglutinin__InfluenzaA__ACN32980
augaagaccaucauugcccugagcuacauccucugccugguguucgcucagaaacuucccggcaacgacaauuccacagccacgcugugucucgggcaccaugcggucccuaacggaaccauuguuaagacaaucaccaaugaucaaauugaggugacaaacgcuaccgaacuggugcagucuagcuccacaggcgagaucugcgacucuccgcaccagauccuugauggggaaaauuguacccugauugacgcccuccugggagauccccagugcgacggcuuucaaaacaaaaagugggaucuguucgucgagagaagcaaagcccauuccaauuguuauccuuacgacgugcccgauuaugcuucucuccggagccugguugccuccagcgggacgcuugaauuuaacaaugagucuuucaacuggaccggagugacacagaauggcaccuccagcgcuugcauccgcagaucuaagaacuccuuuuucagccggcugaauuggcucacacaccugaaguuuaaauacccugcccuuaacgucaccaugcccaaugacgagaaguucgauaaacuguauauuuggggcgugcaucacccugggacggacaacgaucagaucuuucucuacgcgcaggccucuggacgcauuacaguuuccaccaagagaagccaacagacagugaucccgaacauuggcucccggccccgcgucagaaauaucccuucucggaucagcauuuauuggaccaucgugaaacccggggacauucugcugaucaacuccaccggaaaucucauugcuccucgcggcuacuucaagaucagaagcgggaagucuuccaucaugcggagcgacgcccccauuggaaaauguaacucugaaugcaucacaccgaauggcagcauuccuaacgauaagcccuuucagaaugugaaccgcaucacguacggcgcuuguccuagauaugucaaacagaauacccugaaacuugccacagggaugcggaacguucccgagaagcaaacccgcggaauuuucggcgcgaucgccggguuuaucgaaaauggaugggagggcaugguggacgggugguacggauucagacaccagaacuccgagggcauuggccaggcugccgaucugaagucuacacaagcugccaucgaccagauuaaugggaaacucaaccggcugaucggaaagaccaaugaaaaguuccaucagauugagaaagaauuuagcgagguggaaggcagaauccaggaucuugagaaguaugucgaggacacgaaaauugaucugugguccuacaacgccgaacuccugguggcucuggagaaccaacacacaaucgaccucaccgauagcgaaaugaauaagcuguucgagaaaaccaagaagcagcuucgcgaaaacgcggaggacauggggaauggaugcuuuaaaaucuaucauaagugugauaacgccugcguuggcucuauucggaaugggacauacgaccacgacguguauagagaugaggcucugaacaaucgcuuccagaucaaaggcgucgaacucaaguccggauacaaagacuggauucuguggaucagcuuugccauuucuugcuuccuucuguguguggcccuccugggcuuuaucaugugggcuugccagaaggggaacauccgguguaauauuugcaucuga

SEQ ID NO: 194619 - RNA, 1701 nt, Artificial Sequence; identical to SEQ ID NO: 194506
  derived and/or modified CDS sequence (opt5) from hemagglutinin__InfluenzaA__ACN32991

SEQ ID NO: 194620 - RNA, 1701 nt, Artificial Sequence; identical to SEQ ID NO: 194506
  derived and/or modified CDS sequence (opt5) from hemagglutinin__InfluenzaA__ACN33002

SEQ ID NO: 194621 - RNA, 1701 nt, Artificial Sequence; identical to SEQ ID NO: 194506
  derived and/or modified CDS sequence (opt5) from hemagglutinin__InfluenzaA__ACN33013

SEQ ID NO: 194622 - RNA, 1701 nt, Artificial Sequence
  derived and/or modified CDS sequence (opt5) from hemagglutinin__InfluenzaA__ACN33035
augaagaccaucauugcccugagcuacauccucugccugguguucgcucagaaacuucccggcaacgacaauuccacagccacgcugugucucgggcaccaugcggucccuaacggaaccauuguuaagacaaucaccaaugaucaaauugaggugacaaacgcuaccgaacuggugcagucuagcuccacaggcgagaucugcgacucuccgcaccagauccuugauggggaaaauuguacccugauugacgcccuccugggagauccccagugcgacggcuuucaaaacaaaaagugggaucuguucgucgagagaagcaaagccuauuccaauuguuacccuuaugacgugcccgauuacgcuucucuccggagccugguugccuccagcgggacgcuugaauuuaacaaugagucuuucaacuggaccggagugacacagaauggcaccuccagcgcuugcauccgcagaucuaacaauuccuuuuucagccggcugaacuggcucacacaucugaaguuuaaguauccugcccuuaaugucaccaugcccaacaacgagcaguucgacaaacuguacguguggggcguucaccauccugggacggauaaugaccagauuuuucucuaugcgcaagccucuggacgcaucacaguguccaccaagagaagccagcagacagucauuccgaacaucggcucccggccccgcgugagaaauauuccuucucggaucagcaucuacuggaccauugugaaacccggggauauccugcugauuaacuccaccggaaaucucaucgcuccucgcggcuacuucaagauuagaagcgggaaaucuuccaucaugcggagcgacgcccccaucggaaaguguaacucugaaugcauuacaccgaauggcagcaucccuaacgacaagcccuuucagaaugucaaccgcauuacguauggcgcuuguccuagauacguuaaacaaaauacccugaaacuugccacagggaugcggaacgugcccgagaagcagacccgcggaaucuucggcgcgauugccggguuuaucgaaaauggaugggagggcaugguggaugggugguauggauucagacaccagaacuccgagggccggggccaagcugccgaccugaagucuacacaggcugccaucgaucagauuaaugggaaacucaacagacugaucggaaagaccaacgaaaaauuccaccagauugagaaggaauuuagcgaggucgaaggccgcauccaagaccuugagaaguacguggaggauacgaaaauugaccugugguccuauaaugccgaacuccugguugcucuggagaaccagcauacaaucgaucucaccgacagcgaaaugaauaagcuguucgagaaaaccaagaaacagcuucgggaaaacgcggaggauauggggaauggaugcuuuaagauuuaccacaagugugacaacgccugcaucggcucuaucagaaaugggacauaugaucaugacguguaccgcgacgaggcucugaacaaucgguuccagauuaaaggcgucgaacucaaguccggauacaaagauuggauccuguggauuagcuuugccaucucuugcuuccuucuguguguggcccuccugggcuuuauuaugugggcuugccaaaaggggaacaucagauguaauaucugcauuuga

SEQ ID NO: 194623 - RNA, 1701 nt, Artificial Sequence; identical to SEQ ID NO: 194506
  derived and/or modified CDS sequence (opt5) from hemagglutinin__InfluenzaA__ACN33046

SEQ ID NO: 194624 - RNA, 1701 nt, Artificial Sequence; identical to SEQ ID NO: 194506
  derived and/or modified CDS sequence (opt5) from hemagglutinin__InfluenzaA__ACN33057

SEQ ID NO: 194625 - RNA, 1701 nt, Artificial Sequence; identical to SEQ ID NO: 194506
  derived and/or modified CDS sequence (opt5) from hemagglutinin__InfluenzaA__ACN33068

SEQ ID NO: 194626 - RNA, 1701 nt, Artificial Sequence; identical to SEQ ID NO: 194609
  derived and/or modified CDS sequence (opt5) from hemagglutinin__InfluenzaA__ACN33079

SEQ ID NO: 194627 - RNA, 1698 nt, Artificial Sequence
  derived and/or modified CDS sequence (opt5) from hemagglutinin__InfluenzaA__ACN33090
augaaggugaaacugcucauccugcuuugcaccuucacagccacguacgcugacaccauuuguaucggcuaucacgccaacaauagcacagauaccgucgacacaguucuggagaagaacgugaccgugacacauuccgucaaucuccuggaagauucucacaacgggaaacuuugccugcucaagggaauugcgccccugcagcugggcaauuguagcguggcuggguggauccucggaaacccugagugcgaacugcuuauuuccaaagagucuuggagcuacaucguugaaaccccgaaucccgagaacggcacguguuauccuggguacuuugccgacuaugaggaacugagagagcaacucuccucugugagcuccuucgaacgguuugagaucuuccccaaggagagcucuuggccuaaucauaccgucacaggaguguccgccagcugcucucacaacggcaaguccagcuuuuaccgcaaucugcuuuggcugaccggcaaaaacgggcucuaucccaaucugucuaaguccuacgcuaacaauaaagaaaaggagguucuggugcucuggggaguccaucacccuagcaacauuggcgaucagagagcccuguaccacacagaaaacgcuuauguguccguggucucuagccauuacucccggcgcuucaccccggagaucgccaaaagacccaagguucgggaccaggaagggcgcauuaauuauuacuggacgcuucuggagccuggagauacaaucauuuuugaggcgaacggcaaucucaucgcccccagauucgcuuuugcccugagccggggguucggaucuggcauuaucaccuccaacgcuccuauggacgaaugugaugccaagugccagacaccccaaggcgcgaucaauagcucucuuccguuucagaacgugcacccugugaccauuggggagugucccaaauauguccgcagcaccaagcugagaauggugacaggacuccggaauaucccuuccauucagucucgcggccuguucggggccaucgcuggauuuauugaaggcggguggacgggaaugguugacggcugguacggcuaucaucaccagaacgagcaagggagcggauacgccgcugaucagaaauccacccagaaugccaucaacggcaucacaaauaaggugaacagcgucauugaaaagaugaauacccaguucacagccguggggaaagaguucaacaaacuggagagacggauggaaaaucucaacaagaagguugacgauggauuucuggacaucuggaccuacaacgcugagcuucuggugcuccuggaaaaugagcgcacgcuugacuuccacgauucuaacgucaaaaaucuguaugaaaaggugaaaucccaacucaagaacaaugcgaaagagauuggcaacgggugcuuugaguucuaccauaaguguaaugacgaaugcauggagagcgucaagaacggcacauaugauuaccccaaauauucugaagaguccaagcugaauagagagaaaaucgacggagugaagcuggaaagcaugggcguuuaccagauucucgccaucuauuccaccguggcuucuagccugguccuucuggugucccucggggccaucucuuuuuggaugugcagcaacggaucccugcagugucggauuugcaucuga

SEQ ID NO: 194628 - RNA, 1698 nt, Artificial Sequence; identical to SEQ ID NO: 193986
  derived and/or modified CDS sequence (opt5) from hemagglutinin__InfluenzaA__ACN33101

SEQ ID NO: 194629 - RNA, 1701 nt, Artificial Sequence; identical to SEQ ID NO: 194609
  derived and/or modified CDS sequence (opt5) from hemagglutinin__InfluenzaA__ACN33112

SEQ ID NO: 194630 - RNA, 1698 nt, Artificial Sequence; identical to SEQ ID NO: 194560
  derived and/or modified CDS sequence (opt5) from hemagglutinin__InfluenzaA__ACN33123

SEQ ID NO: 194631 - RNA, 1698 nt, Artificial Sequence; identical to SEQ ID NO: 194560
  derived and/or modified CDS sequence (opt5) from hemagglutinin__InfluenzaA__ACN33145

SEQ ID NO: 194632 - RNA, 1701 nt, Artificial Sequence; identical to SEQ ID NO: 194506
  derived and/or modified CDS sequence (opt5) from hemagglutinin__InfluenzaA__ACN33156

SEQ ID NO: 194633 - RNA, 1701 nt, Artificial Sequence
  derived and/or modified CDS sequence (opt5) from hemagglutinin__InfluenzaA__ACN33178
augaagaccaucauugcccugagcuacauccucugccugguguucgcucagaaauuucccggcaacgacaauuccacagccacgcuuugucuggggcaccaugcggucccuaacggaaccauuguuaagacaaucaccaaugaucaaauugaggugacaaacgcuaccgaacucgugcagucuagcuccacaggcgagaucugcgacucuccgcaccagauccuggauggggaaaauuguacccuuauugacgcccugcucggagauccccagugcgacggcuuccaaaacaaaaauugggaucuguuugucgagagaagcaaggccuauuccaacuguuacccuuaugacgugcccgauuacgcuucucugcggagccucguugccuccagcgggacgcuggaguucaauaacgaaucuuuuaauuggaccggagugacacagaacggcaccuccagcgcuugcauccgcagaucuaauaacuccuucuuuagccggcuuaauuggcugacacauucuaaauucaaguauccugcccucaacgucaccaugcccaacaaugagaacuuugacaagcuguacauuuggggcgugcaccauccugggacggauaaugaccagaucuuccuuuaugcgcaggccuccggacgcauuacaguuagcaccaaaagaucccaacagacagugaucccgaacauuggcucucggccccgcgucagaaauaucccuagccggaucuccauuuacuggaccaucgugaagcccggggauauucugcucaucaacagcaccggaaaucugauugcuccucgcggcuacuuuaaaaucagaucugggaaguccagcaucaugcggucugacgcccccauuggaaaauguaacagcgaaugcaucacaccgaauggcuccauuccuaacgacaagcccuuccagaaugugaaccgcaucacguauggcgcuuguccuagauacgucaagcagaauacccugaaacucgccacagggaugcggaacguucccgagaagcaaacccgcggaauuuuuggcgcgaucgccggguucaucgaaaauggaugggagggcaugguggaugggugguauggauucagacaccagaacucugagggcauuggccaggcugccgaccugaaaagcacacaagcugccaucgaucagauuaacgggaaacuuaaucggcugaucggaaagaccaacgaaaaguuucaccagauugagaaagaguucuccgaaguggaaggcagaauccaggaccucgagaaguacgucgaggauacgaagauugaccuguggagcuauaaugccgaacuucugguggcucucgagaaccaacauacaaucgaucugaccgacucugaaaugaauaaacuguuugagaagaccaaaaagcagcuccgcgaaaacgcggaggauauggggaauggaugcuucaaaaucuaccacaagugugacaacgccugcauuggcuccauccggaaugggacauaugaucaugacguuuacagagacgaggcucugaacaaucgcuuucacauuaagggcguggaacuuaaaagcggauacaaggauuggauccuguggauuucuuucgccaucuccugcuuucuccuguguaucgcccuucugggcuucauuaugugggcuugccagaaagggaacauccgguguaauauuugcaucuga

SEQ ID NO: 194634 - RNA, 1701 nt, Artificial Sequence; identical to SEQ ID NO: 194506
  derived and/or modified CDS sequence (opt5) from hemagglutinin__InfluenzaA__ACN33189

SEQ ID NO: 194635 - RNA, 1701 nt, Artificial Sequence
  derived and/or modified CDS sequence (opt5) from hemagglutinin__InfluenzaA__ACN33200
augaagaccaucauugcccugagcuacauccucugccugguguucgcucagaaauuucccggcaacgacaauuccacagccacgcuuugucuggggcaccaugcggucccuaacggaaccauuguuaagacaaucaccaaugaucaaauugaggugacaaacgcuaccgaacucgugcagucuagcuccacaggcgagaucugcgacucuccgcaccagauccuggauggggaaaauuguacccuuauugacgcccugcucggagauccccagugcgacggcuuccaaaacaaaaauugggaucuguuugucgagagaagcaaggccuauuccaacuguuacccuuaugacgugcccgauuacgcuucucugcggagccucguugccuccagcgggacgcuggaguucaauaacgaaucuuuuaauuggaccggagugacacagaacggcaccuccagcgcuugcauccgcagaucuaauaacuccuucuuuagccggcuuaauuggcugacacauucuaaauucaaguauccugcccucaacgucaccaugcccaacaaugagaacuuugacaagcuguacauuuggggcgugcaccauccugggacggauaaugaccagaucuuccuuuaugcgcaggccuccggacgcauuacaguuagcaccaaaagaucccaacagacagugaucccgaacauuggcucucggccccgcgucagaaauaucccuagccggaucuccauuuacuggaccaucguggaacccggggauauucugcucaucaacagcaccggaaaucugauugcuccucgcggcuacuuuaagaucagaucugggaaauccagcaucaugcggucugacgcccccauuggaaaguguaacagcgagugcaucacaccgaauggcuccauuccuaacgacaaacccuuccagaaugugaaccgcaucacguauggcgcuuguccuagauacgucaagcagaauacccugaagcucgccacagggaugcggaacguucccgaaaaacaaacccgcggaauuuuuggcgcgaucgccggguucaucgagaauggaugggagggcaugguggaugggugguauggauucagacaccagaacucugaaggcauuggccaggcugccgaccugaaaagcacacaagcugccaucgaucagauuaacgggaaacuuaaucggcugaucggaaagaccaacgagaaauuucaccagauugaaaaggaguucuccgaaguggagggcagaauccaggaccucgagaaauacgucgaagauacgaagauugaccuguggagcuauaaugccgagcuucugguggcucucgaaaaccaacauacaaucgaucugaccgacucugagaugaauaagcuguuugaaaagaccaagaaacagcuccgcgagaacgcggaggauauggggaauggaugcuucaagaucuaccacaaaugugacaacgccugcauuggcuccauccggaaugggacauaugaucaugacguuuacagagacgaagcucugaacaaucgcuuucagauuaagggcguggagcuuaagagcggauacaaagauuggauccuguggauuucuuucgccaucuccugcuuucuccuguguaucgcccuucugggcuucauuaugugggcuugccagaaggggaacauccgguguaauauuugcaucuga

SEQ ID NO: 194636 - RNA, 1701 nt, Artificial Sequence
  derived and/or modified CDS sequence (opt5) from hemagglutinin__InfluenzaA__ACN33211
augaagaccaucauugcccugagcuacauccucugccugguguucgcucagaaacuucccggcaacgacaauuccacagccacgcugugucucgggcaccaugcggucccuaacggaaccauuguuaagacaaucaccaaugaucaaauugaggugacaaacgcuaccgaacuggugcagucuagcuccacaggcgagaucugcgacucuccgcaccagauccuugauggggaaaauuguacccugauugacgcccuccugggagauccccagugcgacggcuuucaaaacaaaaagugggaucuguucgucgagagaagcaaagccuauuccaauuguuacccuuaugacgugcccgauuacgcuucucuccggagccugguugccuccagcgggacgcuugaauuuaacaaugagucuuucaacuggaccggagugacacagaauggcaccuccagcgcuugcauccgcagaucuaacaauuccuuuuucagccggcugaacuggcucacacaucugaaguuuaaguauccugcccuuaaugucaccaugcccaacaacgagcaguucgacaaacuguacauuuggggcgugcaccauccugggacggauaaugaccagaucuuucucuaugcgcaagccucuggacgcauuacaguuuccaccaagagaagccagcagacagugaucccgaacauuggcucccggccccgcgucagaaauaucccuucucggaucagcauuuacuggaccaucgugaaacccggggauauucugcugaucaacuccaccggaaaucucauugcuccucgcggcuacuucaagaucagaagcgggaaaucuuccaucaugcggagcgacgcccccauuggaaaguguaacucugaaugcaucacaccgaauggcagcauuccuaacgacaagcccuuucagaaugugaaccgcaucacguauggcgcuuguccuagauacgucaaacaaaauacccugaaacuugccacagggaugcggaacguucccgagaagcagacccgcggaauuuucggcgcgaucgccggguuuaucgaaaauggaugggagggcaugguggaugggugguauggauucagacaccagaacuccgagggccggggccaagcugccgaccugaagucuacacaggcugccauugaucagaucaaugggaaacucaacagacugauuggaaagaccaacgaaaaauuccaccagaucgagaaggaauuuagcgagguggaaggccgcauucaagaccuugagaaguacgucgaggauacgaaaaucgaccugugguccuauaaugccgaacuccugguggcucuggagaaccagcauacaauugaucucaccgacagcgaaaugaauaagcuguucgagaaaaccaagaaacagcuucgggaaaacgcggaggauauggggaauggaugcuuuaagaucuaccacaagugugacaacgccugcaucggcucuauuagaaaugggacauaugaucaugacguuuaccgcgacgaggcucuguccaaccgguuccagaucaaaggcguggaacucaagagcggauacaaagauuggauucuguggaucucuuuugccauuuccugcuuccuucugugugucgcccuccugggcuuuaucaugugggcuugccaaaaggggaauaucagauguaacauuugcaucuga

SEQ ID NO: 194637 - RNA, 1698 nt, Artificial Sequence; identical to SEQ ID NO: 194028
  derived and/or modified CDS sequence (opt5) from hemagglutinin__InfluenzaA__ACN42981

SEQ ID NO: 194638 - RNA, 1698 nt, Artificial Sequence; identical to SEQ ID NO: 194262
  derived and/or modified CDS sequence (opt5) from hemagglutinin__InfluenzaA__ACN42992

SEQ ID NO: 194639 - RNA, 1701 nt, Artificial Sequence; identical to SEQ ID NO: 194506
  derived and/or modified CDS sequence (opt5) from hemagglutinin__InfluenzaA__ACN43003

SEQ ID NO: 194640 - RNA, 1701 nt, Artificial Sequence
  derived and/or modified CDS sequence (opt5) from hemagglutinin__InfluenzaA__ACN43014
augaagaccaucauugcccugagcuacauccucugccugguguucgcucagaaauuucccggcaacgacaauuccacagccacgcuuugucuggggcaccaugcggucccuaacggaaccauuguuaagacaaucaccaaugaucaaauugaggugacaaacgcuaccgaacucgugcagucuagcuccacaggcgagaucugcgacucuccgcaccagauccuggauggggaaaauuguacccuuauugacgcccugcucggagauccccagugcgacggcuuccaaaacaaaaauugggaucuguuugucgagagaagcaaggccuauuccaacuguuacccuuaugacgugcccgauuacgcuucucugcggagccucguugccuccagcgggacgcuggaguucaauaacgaaucuuuuaauuggaucggagugacccagaacggcacauccagcgcuugcauucgcagaucuaauaacuccuucuuuagccggcuuaauuggcugacccauucuaaauucaaguauccugcccucaacgucacaaugcccaacaaugagaacuuugacaagcuguacaucuggggcgugcaccauccugggaccgauaaugaccagauuuuccuuuaugcgcaggccuccggacgcaucacgguuagcacaaaaagaucccaacagaccgugauuccgaacaucggcucucggccccgcgucagaaauaucccuagccggauuuccaucuacuggacaauugugaagcccggggauauccugcucauuaacagcaccggaaaucugaucgcuccucgcggcuacuuuaaaaucagaucugggaaguccagcauuaugcggucugacgcccccaucggaaacuguaauagcgaaugcauuaccccgaacggcuccaucccuaaugacaaacccuuccagaacgugaaucgcauuacauauggcucuuguccuagauacgucaagcagaacacgcugaagcucgcuaccgggaugcggaauguucccgagaaacaaacacgcggaaucuuuggcgccaucgcgggguucauugaaaacggaugggagggcaugguggaugggugguauggauucagacaccagaacagcgagggcaucggccaggccgcugaccugaaguccacccaagccgcuauugaucagaucaaugggaaacuuaaccggcugauuggaaagacaaaugaaaaauuucaccagaucgagaaggaguucagcgaaguggaaggccgcauucaggaccucgagaaauacgucgaggauaccaagaucgaccuguggucuuauaacgccgaacuucugguggcccucgagaaucaacauacgaucgaucugacagacuccgaaaugaacaagcuguuugagaaaaccaagaaacagcucagagaaaaugcugaggauauggggaacggaugcuucaagauuuaccacaaaugugacaaugcgugcaucggcagcauucggaacgggaccuaugaucaugacguuuacagagacgaggcccugaauaaccgcuuucagaucaagggcguggaacuuaagucuggauacaaagauuggauucuguggaucuccuucgcuaucagcugcuuucuccuguguauugcccuucugggcuucaucaugugggccugccagaaggggaauauucgguguaacaucugcauuuga

SEQ ID NO: 194641 - RNA, 1701 nt, Artificial Sequence; identical to SEQ ID NO: 194506
  derived and/or modified CDS sequence (opt5) from hemagglutinin__InfluenzaA__ACN43025

SEQ ID NO: 194642 - RNA, 1701 nt, Artificial Sequence; identical to SEQ ID NO: 194506
  derived and/or modified CDS sequence (opt5) from hemagglutinin__InfluenzaA__ACN43036

SEQ ID NO: 194643 - RNA, 1701 nt, Artificial Sequence; identical to SEQ ID NO: 194506
  derived and/or modified CDS sequence (opt5) from hemagglutinin__InfluenzaA__ACN43047

SEQ ID NO: 194644 - RNA, 1701 nt, Artificial Sequence
  derived and/or modified CDS sequence (opt5) from hemagglutinin__InfluenzaA__ACN43058
augaagaccaucauugcccugagcuacauccucugccugguguucgcucagaaacuucccggcaacgacaauuccacagccacgcugugucucgggcaccaugcggucccuaacggaaccauuguuaagacaaucaccaaugaucaaauugaggugacaaacgcuaccgaacuggugcagucuagcuccacaggcgagaucugcgggucuccgcaccagauccuugacggagaaaauuguacccugauugaugcccuccugggcgacccccagugcgauggguuucaaaacaaaaagugggaccuguucgucgagagaagcaaagccuauuccaauuguuacccuuaugaugugcccgacuacgcuucucuccggagccugguugccuccagcggaacgcuugaauuuaacaaugagucuuucaacuggaccggcgugacacagaauggcaccuccagcgcuugcauccgcagaucuaacaauuccuuuuucagccggcugaacuggcucacacaucugaaguuuaaguauccugcccuuaaugucaccaugcccaacaacgagcaguucgauaaacuguacauuuggggagugcaccauccugggacggacaaugaucagaucuuucucuaugcgcaagccucuggccgcauuacaguuuccaccaagagaagccagcagacagugaucccgaacauugggucccggccccgcgucagaaauaucccuucucggaucagcauuuacuggaccaucgugaaacccggagacauucugcugaucaacuccaccggcaaucucauugcuccucgcggguacuucaagaucagaagcggaaaaucuuccaucaugcggagcgaugcccccauuggcaaguguaacucugaaugcaucacaccgaauggcagcauuccuaacgacaagcccuuucagaaugugaaccgcaucacguauggggcuuguccuagauacgucaaacaaaauacccugaaacuugccacaggaaugcggaacguucccgagaagcagacccgcggcauuuucggggcgaucgccggauuuaucgaaaauggcugggaggggaugguggacggaugguauggcuucagacaccagaacuccgagggccgggggcaagcugccgaucugaagucuacacaggcugccauugaccagaucaauggaaaacucaacagacugauuggcaagaccaacgaaaaauuccaccagaucgagaaggaauuuagcgagguggaagggcgcauucaagaucuugagaaguacgucgaggacacgaaaaucgaucugugguccuauaaugccgaacuccugguggcucuggagaaccagcauacaauugaccucaccgauagcgaaaugaauaagcuguucgagaaaaccaagaaacagcuucgggaaaacgcggaggacaugggaaauggcugcuuuaagaucuaccacaagugugauaacgccugcaucgggucuauuagaaauggcacauaugaccaugauguuuaccgcgacgaggcucugaacaaucgguuccagaucaaaggaguggaacucaaguccggcuacaaagacuggauucuguggaucagcuuugccauuucuugcuuccuucugugugucgcccuccugggguuuaucaugugggcuugccaaaagggaaacaucagauguaauauuugcaucuga

SEQ ID NO: 194645 - RNA, 1701 nt, Artificial Sequence; identical to SEQ ID NO: 194506
  derived and/or modified CDS sequence (opt5) from hemagglutinin__InfluenzaA__ACN43069

SEQ ID NO: 194646 - RNA, 1701 nt, Artificial Sequence; identical to SEQ ID NO: 194609
  derived and/or modified CDS sequence (opt5) from hemagglutinin__InfluenzaA__ACN43080

SEQ ID NO: 194647 - RNA, 1701 nt, Artificial Sequence
  derived and/or modified CDS sequence (opt5) from hemagglutinin__InfluenzaA__ACN72617
auggaggccaagcuguucgugcucuuuugcgcuuucaccgcccugaaagcggacacaaucugugucggcuaccacgcuaacaauagcacggauaccguugacacaauucuugaaaagaacgugaccgugacacauuccgucaaucugcucgagaacucucacaaugggaaacugugcagccuuaacggaaaggcuccccugcagcucggcaauuguaacguggccggguggauccugggaaauccugaaugcgaucugcuccugaccgccaacuccuggucuuauauuaucgagacaagcgacuccaaaaauggcgccuguuacccgggggaauuugcugauuaugaggagcuuagagaacaacugucuaccguuagcuccuucgagcgguuugaaauuuuccccaaggccacgagcuggccuaaccaugagaccacaaagggaaccacaguggcgugcucucacuccggcgccaauagcuuuuaccgcaaccuccuguggaucgucaaaaagggcaauucuuaucccaaacuuuccaagagcuacaccaacaacaaagggaaggaggugcugguuaucuggggagugcaucacccucccacggacucugaucagcagacacucuaucagaauaagcacaccuacgucuccgugggcagcuccaaauacuaucaaagauucacaccugaaauugugacccggccgaagguccgcgagcaggcugggagaaugaacuacuauuggacccugcuggaccagggagauacaaucacguuugaagccaccggcaaucucauugcucccuggcaugccuucgcgcugaacaaagggucuaauagcggaaucaugauguccgacgcccacguucauaacuguacaaccaagugccagacaccucacggcgcucuuaaaggcaaucugcccuuucaaaacgugcacccuauuaccaucggggagugucccaaguacgugaaaagcacgcagcuccggauggccacaggacugcgcaauauuccgucuauccaguccagaggccuuuucggggcuaucgccggauuuauugaaggcggguggaccggaaugaucgauggcugguauggcuaccaucaccagaacgagcaagggagcggauaugccgcugaccggaagucuacccagauugcgaucgauggcauuagcaauaaggucaacuccgugaucgagaaaaugaauauccaguucacaucuguugggaaggaguucaacaaucuggaaaaacgcauugaaaaccucaacaagaaaguggacgacggauuucuggaugucuggaccuacaaugccgagcugcucauccugcuugaaaacgagagaacacuggacuuccaugauuuuaaugugaagaaccucuacgagaagguuaaaagccaacugcggaauaacgcuaaggaaauuggcaaugggugcuucgaguuuuaucacaaaugugacaacgaaugcauggaguccgugaagaauggcacguacaacuauccucgcuacagcgaagagucuaaacuuaauagagaggaaaucgauggagucaagcuggaguccgugggcguccaucagauucucgccaucuauagcaccguggccucuucccugguucugcucgugagccugggggcuaucuccuucuggaugugcucuaacggaagccuucagugucggauuugcaucuga

SEQ ID NO: 194648 - RNA, 1701 nt, Artificial Sequence
  derived and/or modified CDS sequence (opt5) from hemagglutinin__InfluenzaA__ACN72632
augaagaccgugaucgcccugagcuacgucuucugccucguuuuuggccaggaccugcccgggaaaggaaacaauacagcuacgcuuugucugggccaccaugccgugccuaacgggacccucgugaagacaauuaccgaugaccaaaucgaggucacaaaugcgaccgaacuggugcagaacuucuccauuggaaaaaucugcaagaauccgcaccggauucuugauggcgcuaacuguacacugaucgacucucuccugggggauccccauugcgacggauuucagaaugagaaaugggaucuguucaucgaaagaagcaaggccuuuuccaacuguuauccuuacgacguucccgaguauaccucucuccgcagccugauugccuccucuggcacgcuugaguucaccaaugaagauuuuaacuggacaggcgugacccagaaugggggaagcuccgcuugcaagagaggcccuaacaauagcuucuuuucucggcugaacuggcucuacaaauccgggaauacauaucccaugcugaacgucaccaugccuaacagcgacgauuucgacaaacuuuacaucuggggagugcaccauccgucuacggaucgcgagcaaacaaaucuguauauucaggccuccggcaagaucauuguuagcaccaagagaucucagcagacaaucauucccaacaucgggucccggccuugggugcgcggacucagcuccagaaucucuauuuacuggaccaucgucaaacccggcgacauucugaucauuaauagcaacggcaaucugaucgcuccucggggguacuuuaagauccaaaccggaaaguccagcgugaugcgcucugacgcccccauuggcacauguaacuaugaaugcaucacgccgaauggguccauuccuaacgauaaacccuuccagaaugugaacagaaucaccuacggagcguguccucacuauauuaagcagaauacacucaaacuggccaccggcaugcggaacauccccgagcgccagacaagagggaucuuuggagcuauugccggcuucaucgaaaauggcugggaggggauggucaacggaugguacggcuuccggcaccaaaauagcgaggggauuggacaggcugccgaccuuaagucuacccaggcggccaucaaccaaauuaacggcaaacugaaucgcguuaucgaaaagacgaacgagaaauuucaucagauugaaaaggaguucagcgaaguggaggggagaauccaggaucucgagcgguauguggaagacacaaagaucgaucugugguccuacaaugcugagcuucuggucgcccucgaaaaccagcacaccauugaccugaccgauucugagaugaauaaacuguuugaaaagacaagaaaacaacuccgcgagaacgcugaggacaugggcaauggaugcuucaagaucuaucauaaaugugauaacagcugcauggaauccauucggaauggcaccuacgaccacaacgaguacagagaugaagccgugaauaaccgcuuucagaucaagagcguugagcugaagucuggguauaaagacuggauucuuuggaucuccuucgccaucagcugcuuucugcucugugcuguguggcugggauucauuaucugggcgugccagaagggcaauauucgguguaacaucugcauuuga

SEQ ID NO: 194649 - RNA, 1701 nt, Artificial Sequence; identical to SEQ ID NO: 194506
  derived and/or modified CDS sequence (opt5) from hemagglutinin__InfluenzaA__ACN76478

SEQ ID NO: 194650 - RNA, 1701 nt, Artificial Sequence
  derived and/or modified CDS sequence (opt5) from hemagglutinin__InfluenzaA__ACN76489
augaagaccaucauugcccugggcuacauccucugccuggugagcgcucagaaacuucccgggaacgacaauuccacagccacgcugugucucggacaccaugcggucccuaacggcaccauuguuaagacaaucaccaaugaucaaauugaggugacaaacgcuaccgaacuggugcagucuagcuccacaggggagaucugcgacucuccgcaccagguccuugauggagaaaauuguacccugaucgacgcccuccugggcgauccccagugcgacggguuccaaaacaaaaagugggaucuguuuguggagagaagcaaagccuauuccaauuguuacccuuaugacguucccgauuacgcuucucuccggagccugguggccuccagcggaacgcuugaguucaacaaugaaucuuuuaacuggaccggcgucacacagaauggcaccuccagcgcuugcauucgcagaucuaacaauuccuucuuuagccggcugaacuggcucacacaucugaaguucaaguauccugcccuuaaugugaccaugcccaacaacgaggaauuugacaaacuguacaucuggggaguucaccauccugggacggauaaugaccagauuuuccucuaugcgcaggccucuggccgcaucacaguguccaccaagagaagccaacagacagucauuccgaacaucgggucccggccccgcgugagaaauauuccuucucggaucagcaucuacuggaccauugugaaacccggagauauccugcugauuaacuccaccggcaaucucaucgcuccucgcggguacuuuaagauuagaagcggaaaaucuuccaucaugcggagcgacgcccccaucggcaaguguaacucugagugcauuacaccgaauggcagcaucccuaacgacaagcccuuccagaaugucaaccgcauuacguauggggcuuguccuagauacguuaaacagaauacccugaaacuugccacaggaaugcggaacgugcccgaaaaacaaacccgcggcaucuuuggggcgauugccggauucaucgagaauggcugggaggggaugguggauggaugguauggcuuuagacaccagaacuccgaaggcaucgggcaggcugccgaccugaagucuacacaagcugccauugaucagaucaauggaaaacucaaccggcugauuggcaagaccaacgagaaauuccaccagaucgaaaaggaguucagcgaagucgaggggcgcauucaggaccuugagaaguacguggaagauacgaaaaucgaccugugguccuauaaugccgagcuccugguugcucuggaaaaccaacauacaauugaucucaccgacagcgagaugaauaagcuguuugaaaagaccaagaaacagcuuagagagaacgcggaggauaugggaaauggcugcuucaagaucuaccacaagugugacaacgccugcaucgggucuauucggaauggcacauaugaucaugaaguguacagagacgaggcucugaacaaucgcuuucagaucaaaggagucgaacucaaguccggcuacaaagacuggauucuguggaucagcuucgccauuucuugcuuucuucuguguguggcccuccugggguucaucaugugggcuugccagaagggaaacauccgguguaauauuugcaucuga

SEQ ID NO: 194651 - RNA, 1701 nt, Artificial Sequence; identical to SEQ ID NO: 194506
  derived and/or modified CDS sequence (opt5) from hemagglutinin__InfluenzaA__ACN76500

SEQ ID NO: 194652 - RNA, 1701 nt, Artificial Sequence; identical to SEQ ID NO: 194506
  derived and/or modified CDS sequence (opt5) from hemagglutinin__InfluenzaA__ACN76511

SEQ ID NO: 194653 - RNA, 1701 nt, Artificial Sequence; identical to SEQ ID NO: 194506
  derived and/or modified CDS sequence (opt5) from hemagglutinin__InfluenzaA__ACN76522

SEQ ID NO: 194654 - RNA, 1701 nt, Artificial Sequence; identical to SEQ ID NO: 194506
  derived and/or modified CDS sequence (opt5) from hemagglutinin__InfluenzaA__ACO36331

SEQ ID NO: 194655 - RNA, 1701 nt, Artificial Sequence
  derived and/or modified CDS sequence (opt5) from hemagglutinin__InfluenzaA__ACO36342
augaagaccaucauugcccugagcuacauccucugccugguguucgcucagaaauuucccggcaacgacaauuccacagccacgcuuugucuggggcaccaugcggucccuaacggaaccauuguuaagacaaucaccaaugaucaaauugaggugacaaacgcuaccgaacucgugcagucuagcuccacaggcgagaucugcgacucuccgcaccagauccuggauggggaaaauuguacccuuauugacgcccugcucggagauccccagugcgacggcuuccaaaacaaaaauugggaucuguuugucgagagaagcaaggccuauuccaacuguuacccuuaugacgugcccgauuacgcuucucugcggagccucguugccuccagcgggacgcuggaguucaauaacgaaucuuuuaauuggaccggagugacacagaacggcaccuccagcgcuugcauccgcagaucuaauaacuccuucuuuagccggcuuaauuggcugacacauucuaaauucaaguauccugcccucaacgucaccaugcccaacaaugagaacuuugacaagcuguacauuuggggcgugcaccauccugggacggauaaugaccagaucuuccuuuaugcgcaggccuccggacgcauuacaguuagcaccaaaagaucccaacagacagugaucccgaacauuggcucucggccccgcgucagaaauaucccuagccggaucuccauuuacuggaccaucgugaagcccggggauauucugcucaucaacagcaccggaaaucugauugcuccucgcggcuacuuuaaaaucagaucugggaaguccagcaucaugcggucugacgcccccauuggaaaauguaacagcgaaugcaucacaccgaauggcuccauuccuaacgacaagcccuuccagaaugugaaccgcaucacguauggcgcuuguccuagauacgucaagcagaauacccugaaacucgccacagggaugcggaacguucccgagaagcaaacccgcggaauuuuuggcgcgaucgccggguucaucgaaaauggaugggagggcaugguggaugggugguauggauucagacaccagaacucugagggcauuggccaggcugccgaccugaaaagcacacaagcugccaucgaucagauuaacgggaaacuuaaucggcugaucggaaagaccaacgaaaaguuucaccagauugagaaagaguucuccgaaaucgaaggccgcauucaggaccucgagaaguacguggaggauacgaagaucgaccuguggagcuauaaugccgaacuucuggucgcucucgagaaccaacauacaaucgaucugaccgacucugaaaugaauaaacuguuugagaagaccaaaaagcagcucagagaaaacgcggaggauauggggaauggaugcuucaaaauuuaccacaagugugacaacgccugcaucggcuccauucggaaugggacauaugaucaugacguguacagagacgaggcucugaacaaucgcuuucagaucaagggcguugaacuuaaaagcggauacaaggauuggauucuguggaucucuuucgccaucuccugcuuucuccuguguauugcccuucugggcuucaucaugugggcuugccagaaagggaacauucgguguaauaucugcauuuga

SEQ ID NO: 194656 - RNA, 1701 nt, Artificial Sequence
  derived and/or modified CDS sequence (opt5) from hemagglutinin__InfluenzaA__ACO36364
augaagaccaucauugcccugagcuacauccucugccugguguucgcucagaaacuucccggcaacgacaauuccacagccacgcugugucucgggcaccaugcggucccuaacggaaccauuguuaagacaaucaccaaugaucaaauugaggugacaaacgcuaccgaacuggugcagucuagcuccacaggcgagaucugcgacucuccgcaccagauccuugauggggaaaauuguacccugauugacgcccuccugggagauccccagugcgacggcuuucaaaacaaaaagugggaucuguucgucgagagaagcaaagccuauuccaauuguuacccuuaugacgugcccgauuacgcuucucuccggagccugguugccuccagcgggacgcuugaauuuaacaaugagucuuucaacuggaccggagugacacagaauggcaccuccagcgcuugcauccgcagaucuaacaauuccuuuuucagccggcugaacuggcucacacaucugaaguuuaaguauccugcccuuaaugucaccaugcccaacaacgagaaauucgacaagcuguacauuuggggcgugcaccauccugggacggauaaugaccagaucuuucucuaugcgcaggccucuggacgcauuacaguuuccaccaaaagaagccaacagacagugaucccgaacauuggcucccggccccgcgucagaaauaucccuucucggaucagcauuuacuggaccaucgugaagcccggggauauucugcugaucaacuccaccggaaaucucauugcuccucgcggcuacuucaaaaucagaagcgggaagucuuccaucaugcggagcgacgcccccauuggaaaguguaacucugaaugcaucacaccgaauggcagcauuccuaacgacaaacccuuucagaaugugaaccgcaucacguauggcgcuuguccuagauacgucaagcagaauacccugaaacuugccacagggaugcggaacguucccgagaagcaaacccgcggaauuuucggcgcgaucgccggguuuaucgaaaauggaugggagggcaugguggaugggugguauggauucagacaccagaacuccgagggcacaggccaggcugccgaccugaaaucuacccaagcugccauugaucagaucaaugggaagcucaaccggcugauuggaaaaacgaacgaaaaguuccaccagaucgagaaggaauuuagcgagguggaaggccgcauucaggaccuugagaaauacgucgaggauacaaagaucgaccugugguccuauaaugccgaacuccugguggcucuggagaaccaacauaccauugaucucaccgacagcgaaaugaauaaacuguucgagaagaccaaaaagcagcuuagagaaaacgcggaggauauggggaauggaugcuuuaagaucuaccacaaaugugacaacgccugcaucggcucuauucggaaugggacauaugaucaugacguuuacagagacgaggcucugaacaaucgcuuccagaucaagggcguggaacucaaauccggauacaaggauuggauucuguggaucagcuuugccauuucuugcuuccuucugugugucgcccuccugggcuuuaucaugugggcuugccagaaagggaacauccgguguaauauuugcaucuga

SEQ ID NO: 194657 - RNA, 1701 nt, Artificial Sequence; identical to SEQ ID NO: 194373
  derived and/or modified CDS sequence (opt5) from hemagglutinin__InfluenzaA__ACO36375

SEQ ID NO: 194658 - RNA, 1698 nt, Artificial Sequence; identical to SEQ ID NO: 194560
  derived and/or modified CDS sequence (opt5) from hemagglutinin__InfluenzaA__ACO36397

SEQ ID NO: 194659 - RNA, 1701 nt, Artificial Sequence; identical to SEQ ID NO: 194373
  derived and/or modified CDS sequence (opt5) from hemagglutinin__InfluenzaA__ACO36408

SEQ ID NO: 194660 - RNA, 1701 nt, Artificial Sequence; identical to SEQ ID NO: 194000
  derived and/or modified CDS sequence (opt5) from hemagglutinin__InfluenzaA__ACO36419

SEQ ID NO: 194661 - RNA, 1701 nt, Artificial Sequence; identical to SEQ ID NO: 194000
  derived and/or modified CDS sequence (opt5) from hemagglutinin__InfluenzaA__ACO36430

SEQ ID NO: 194662 - RNA, 1701 nt, Artificial Sequence
  derived and/or modified CDS sequence (opt5) from hemagglutinin__InfluenzaA__ACO36441
augaagaccaucauugcccugagcuacauccucugccugguguucgcucagaaacuucccggcaacgacaauuccacagccacgcugugucucgggcaccaugcggucccuaacggaaccauuguuaagacaaucaccaaugaucaaauugaggugacaaacgcuaccgaacuggugcagucuagcuccacaggcgggaucugcgacucuccgcaccagauccuugauggagagaauuguacccugauugacgcccuccugggcgauccccagugcgacggguuucaaaacaaaaagugggaucuguucgucgaaagaagcaaagccuauuccaauuguuacccuuaugacgugcccgauuacgcuucucuccggagccugguugccuccagcggaacgcuugaguuuaacaaugaaucuuucgacuggaccggcgugacacagaacggcaccuccagcgcuugcaagcgcagaucuaauaaguccuuuuucagccggcugaacuggcucacacaucugaaauauaaguacccugcccuuaaugucaccaugcccaacaaugagaaauuugauaagcuguauaucuggggagugcaccauccugggacggacucugaucagauuucccucuacgcgcaggccagcggccgcaucacaguuuccaccaaaagaucucaacagacagugauuccgaacaucgggagccggccccgcgucagagacguguccagccggauuucuaucuacuggaccaucgugaagccuggagacauucugcugaucaacuccaccggcaaucucauugcuccccgcggguauuucaagaucagaagcggaaaaucuagcauuaugcgguccgaugccccuaucggcaaguguaacucugagugcaucacacccaauggcagcauuccgaacgacaaaccuuuucagaaugucaaccgcaucacguacggggcuugucccagauauguuaagcagaauacccugaaacuugccacaggaaugcggaacgugccugaaaagcaaacccgcggcauuuucggggcgaucgccggauuuauugagaauggcugggaagggaugguggauggaugguacggcuucagacaccagaacuccgagggcacagggcaggcugccgaccugaaaagcacccaagcugccaucaaucagaucaacggaaagcucaaucggcugauuggcaagacgaacgagaaauuucaccagaucgaaaaggaguucucugaagucgaggggcgcauucaggaucuugaaaaauauguggaggacacaaagaucgaucugugguccuacaaugccgagcuccugguugcucuggaaaaccaacauaccauugaccucaccgauagcgagaugaacaaacuguucgaaagaacaaagaagcagcuucgggagaaugcggaagacaugggaaacggcugcuuuaaaaucuaucacaagugugauaaugccugcauugggucuaucagaaacggcaccuacgaccaugacguguaccgcgaugaggcucugaauaaccgguuccagaucaaaggagucgagcucaaguccggcuauaaagacuggauucuguggaucagcuuugccauuuccugcuuccuucuguguguggcccuccugggguuuaucaugugggcuugccagaagggaaauauuagaugugauaucugcaucuga

SEQ ID NO: 194663 - RNA, 1701 nt, Artificial Sequence
  derived and/or modified CDS sequence (opt5) from hemagglutinin__InfluenzaA__ACO36452
augaagaccaucauugcccugagcuacauccucugccugguguucgcucagaaacuucccggcaacgacaauuccacagccacgcugugucucgggcaccaugcggucccuaacggaaccauuguuaagacaaucaccaaugaucaaauugaggugacaaacgcuaccgaacuggugcagucuagcuccacaggcgggaucugcgacucuccgcaccagauccuugauggagagaauuguacccugauugacgcccuccugggcgauccccagugcgacggguuucaaaacaaaaagugggaucuguucgucgaaagaagcaaagccuauuccaauuguuacccuuaugacgugcccgauuacgcuucucuccggagccugguugccuccagcggaacgcuugaguuuaacaaugaaucuuucgacuggaccggcgugacacagaacggcaccuccagcucuugcaagcgcagauccaauaacagcuuuuucucucggcugaauuggcucacacaucugaaguauaaauacccugcucuuaacgucaccaugcccaauaacgagaaguuugauaaacuguauaucuggggagugcaccauccugggacggacuccgaucagauuagccucuacgcccaggcguccggccgcaucacaauuucuaccaagagaagccaacagacaguuaucccgaacauugggucccggccccgcgugagagacgucagcucucggaucuccaucuacuggaccauugugaaaccuggagacauccugcugauuaauagcaccggcaaccucaucgcuccccgcggguauuucaagauuagaucuggaaagagcuccaucaugcggucugaugccccuaucggcaaauguaauagcgagugcauuacacccaacggcuccaucccgaaugacaagccuuuucagaacgugaaucgcauuacguacggggccugucccagauaugucaaacagaacacccugaaacuugcuacaggaaugcggaauguuccugaaaaacaaacccgcggcaucuucggggccauugcgggauuuaucgagaacggcugggaagggaugguggauggaugguacggcuucagacaccagaauagcgagggcacagggcaggccgcugaccugaagucuacccaagccgcuaucaaccagauuaauggaaaacucaaccggcugaucggcaagacgaaugagaaguuucaccagauugaaaaagaguucuccgaaguggaggggagaauccaggaucuugaaaaguaugucgaggacacaaaaauugaucuguggagcuacaacgccgagcuccugguggcccuggaaaaccaacauaccaucgaccucaccgauucugagaugaauaagcuguucgaacgcacaaagaagcagcuucgggagaacgcugaagacaugggaaauggcugcuuuaagauuuaucacaaaugugauaacgcgugcaucggguccaucagaaauggcaccuacgaccaugacguuuaccgcgaugaggcccugaacaaucgguuccagauuaagggaguggagcucaaaagcggcuauaaggacuggauccuguggauuuccuuugcuaucucuugcuuccuucugugugucgcccuccugggguuuauuaugugggccugccagaaaggaaacaucagauguaauaucugcauuuga

SEQ ID NO: 194664 - RNA, 1701 nt, Artificial Sequence
  derived and/or modified CDS sequence (opt5) from hemagglutinin__InfluenzaA__ACO36463
augaagaccaucauugcccugagcuacauccucugccugguguucgcucagaaacuucccggcaacgacaauuccacagccacgcugugucucgggcaccaugcggucccuaacggaaccauuguuaagacaaucaccaaugaucaaauugaggugacaaacgcuaccgaacuggugcagucuagcuccacaggcgggaucugcgacucuccgcaccagauccuugauggagagaauuguacccugauugacgcccuccugggcgauccccagugcgacggguuucaaaacaaaaagugggaucuguucaucgaaagaagcaaagccuauuccaauuguuacccuuaugacguccccgauuacgcuucucuccggagccugguggccuccagcggaacgcuugaguuuaacaaugaaucuuucaacuggaccggcguuacacagaauggcaccuccagcgcuugccagcgcagaucuaacaaguccuuuuucagccggcugaauuggcucacacaucugaaguuuaaauauccugcccuuaacgugaccaugcccaauaacgagaaguucgacaaacuguacauuuggggaguccaccauccugggacggauaacgaccagaucucucucuaugcgcaaacauccggccgcauuaccgugagcacaaagagaucccagcagaccguuaucccgaauauugggucucggccccgcgugagagaugucccuagccggaucuccaucuacuggaccauugugaaacccggagacauccugcugauuaacagcacaggcaaucucaucgccccucgcggguacuuuaagauuagaucuggaaaguccagcaucaugcggucugacgcucccaucggcaaauguaacagcgagugcauuacgccgaauggcuccaucccuaacgauaagcccuuccagaaugugaaccgcauuaccuauggggccuguccuagauacgucaaacaaaauacacugaagcuggcuaccggaaugcggaacguucccgaacgccagacaagaggcaucuuuggggccauugcgggauucaucgagaauggcugggaagggaugguggacggaugguauggcuuucggcaccagaacucugagggcaccgggcaagccgcugaucuuaaaagcacgcaggccgcuaucaaucagauuaacggaaagcucaauagacugaucggcaaaacaaacgagaaguuccaccagauugaaaaggaguucuccgaaguggaggggcgcauccaagaccuugaaaaauacgucgaggauaccaagauugaccuguggagcuauaacgccgagcuccugguggcccuggaaaaucagcauaccaucgaucucacagacucugagaugaacaaacuguuugaacggaccaagaaacagcuuagagagaaugcugaagauaugggaaacggcugcuucaagauuuaccacaagugugacaaugcgugcaucggguccauccgcaacggcacauaugaucaugacguuuaccgggacgaggcccugaauaacagauuucagauuaaaggaguggagcucaagagcggcuacaaagauuggauccuguggauuucuuucgcuaucuccugcuuuguccuuuguguggcccugcucggguucauuaugugggccugccaaaagggaaauauccgcuguaacaucugcauuuga

SEQ ID NO: 194665 - RNA, 1701 nt, Artificial Sequence
  derived and/or modified CDS sequence (opt5) from hemagglutinin__InfluenzaA__ACO36474
augaagaccaucauugcccugagcuacauccucugccugguguucgcucagaaacuucccggcaacgacaauuccacagccacgcugugucucgggcaccaugcggucccuaacggaaccauuguuaagacaaucaccaaugaucaaauugaggugacaaacgcuaccgaacuggugcagucuagcuccacaggcgggaucugcgacucuccgcaccagauccuugauggagagaauuguacccugauugacgcccuccugggcgauccccagugcgacggguuucaaaacaaaaagugggaucuguucgucgaaagaagcaaagccuauuccaauuguuacccuuaugacgugcccgauuacgcuucucuccggagccugguugccuccagcggaacgcuugaguuuaacaaugaaucuuucgacuggaccggcgugacacagaacggcaccuccagcucuugcaagcgcagauccaauaacagcuuuuucucucggcugaauuggcucacacaucugcgcuauaaguacccugcucuuaacgucaccaugcccaauaacgagaaauuugauaagcuguauaucuggggagugcaccauccugggacggacuccgaucagauuagccucuacgcccaggcguccggcagaaucacaguuucuaccaaacggagccaacagacagugauuccgaacaucgggucccgccccagaguccgggacgugagcucucgcauuuccaucuacuggaccaucgugaagccuggagacauucugcugaucaauagcaccggcaaccucauugcccccagaggguauuucaaaauccggucuggaaagagcuccauuaugcgcucugaugcuccuaucggcaaguguaauagcgagugcaucacacccaacggcuccauuccgaaugacaaaccuuuucagaacgucaauagaaucacguacggggauuguccccgguauguuaagcagaacacccugaaacuugccacaggaaugcgcaaugugccugaaaagcaaaccagaggcauuuucggggcuaucgccggauuuauugagaacggcugggaagggaugguggacggaugguacggcuuccggcaccagaauagcgagggcacagggcaggcggccgaucugaaaucuacccaagcugccaucaaccagaucaauggaaagcucaacagacugauuggcaaaacgaaugagaaguuucaccagaucgaaaaggaguucuccgaagucgaggggcgcauucaggaccuugaaaaauauguggaggauacaaagaucgaccuguggagcuacaacgcugagcuccugguugcccuggaaaaccaacauaccauugaucucaccgacucugagaugaauaaacuguucgaacggacaaagaaacagcuuagagagaacgccgaagauaugggaaauggcugcuuuaagaucuaucacaagugugacaacgcuugcauuggguccauccgcaauggcaccuacgaccaugauguguaccgggacgaggcgcugaacaauagauuccagaucaaaggagucgagcucaagagcggcuauaaagauuggauucuguggaucuccuuugccauuucuugcuuccuucuguguguggcucuccugggguuuaucaugugggccugccagaagggaaacauucgcuguaauaucugcaucuga

SEQ ID NO: 194666 - RNA, 1701 nt, Artificial Sequence
  derived and/or modified CDS sequence (opt5) from hemagglutinin__InfluenzaA__ACO36496
augaagaccaucauugcccugagcuacauccucugccugguguucgcucagaaacuucccggcaacgacaauuccacagccacgcugugucucgggcaccaugcggucccuaacggaaccauuguuaagacaaucaccaaugaucaaauugaggugacaaacgcuaccgaacuggugcagucuagcuccacaggcgggaucugcgacucuccgcaccagauccuugauggagagaauuguacccugauugacgcccuccugggcgauccccagugcgacggguuucaaaacaaaaagugggaucuguucgucgaaagaagcaaagccuauuccaauuguuacccuuaugacgugcccgauuacgcuucucuccggagccugguugccuccagcggaacgcuugaguuuaacaaugaaucuuucaacuggaccggcgugacacagaauggcaccuccagcgcuugcaagcgcagaucuaacaauggguuuuucucccggcugaacuggcucacacaucugaaguuuaaauauccugcccuuaaugucaccaugcccaacaacgagaaguucgacaaacuguacaucuggggagugcaccauccuggcacggauaaugaccagauuagccucuaugcgcaggccucugggcgcaucacaguuuccaccaagagaagccaacagacagugauuccgaacaucggaucccggccccgcgucagagauauuucuagccggaucuccaucuacuggaccauugugaaaccuggcgacauccugcugauuaauagcaccgggaaccucaucgcuccccgcggauacuuuaagauuagaucuggcaaguccagcaucaugcggucugacgccccuaucggcaaauguaauagcgagugcauuacacccaacggguccaucccgaaugauaagccuuuccagaacgugaaucgcauuacguauggagcuugucccagauacgucaaacagaacacccugaagcuggccacaggcaugcggaauguuccugaaacccaaacacgcgggaucuuuggagcgauugccggcuucaucgagaacgggugggaaggaaugguggacggcugguauggcuuuagacaccaaaauucugaggggaccggacaggcugccgaucuuaaaagcacgcaggcugccaucaaccagauuaauggcaagcucaaccggcugaucgggaaaacaaacgagaaguuccaccagauugaaaaggaguucuccgaaguggagggaagaauccaggaccuugaaaaauacgucgaggauaccaagauugaccuguggagcuauaaugccgagcuccugguggcucuggaaaaccaacauaccaucgaucucacagacucugagaugaauaaacuguuugaacgcaccaagaaacagcuucgggagaacgcggaagauaugggcaaugggugcuucaagauuuaccacaagugugacaacgccugcaucggcuccaucagaaauggaacauaugaucaugacguuuaccgcgacgaggcucugaacaaucgguuucagauuaaaggcguggagcucaagagcggguacaaagauuggauccuguggauuucuuucgccaucuccugcuuucuucugugugucgcccuccugggauucauuaugugggcuugccagaagggcaacaucagauguaauaucugcauuuga

SEQ ID NO: 194667 - RNA, 1701 nt, Artificial Sequence
  derived and/or modified CDS sequence (opt5) from hemagglutinin__InfluenzaA__ACO36518
augaagaccaucauugcccugagcuacauccucugccugguguucgcucagaaacuucccggcaacgacaauuccacagccacgcugugucucgggcaccaugcggucccuaacggaaccauuguuaagacaaucaccaaugaucaaauugaggugacaaacgcuaccgaacuggugcagucuagcuccacaggcgggaucugcgacucuccgcaccagauccuugauggagagaauuguacccugauugacgcccuccugggcgauccccagugcgacggguuucaaaacaaaaagugggaucuguucgucgaaagaagcaaagccuauuccaauuguuacccuuaugacgugcccgauuacgcuucucuccggagccugguugccuccagcggaacgcuugaguuuaacaaugaaucuuucaacuggaccggcgugacacagaauggcaccuccagcgcuugcaagcgcagaucuaacaaguccuuuuucagccggcugaauuggcucacacaucugaaauuuaaguauccugcccuuaacgucaccaugcccaauaacgagaaauucgacaagcuguacaucuggggagugcaccauccugggacggauaacgaccagauuucucucuaugcgcaggccuccggccgcaucacaguuagcaccaaaagaucccaacagacagugauuccgaauaucgggucucggccccgcgucagagaugugccuagccggauuuccaucuacuggaccaucgugaagcccggagacauucugcugaucaacagcaccggcaaucucauugcuccucgcggguacuuuaagaucagaucuggaaaauccagcauuaugcggucugacgcccccaucggcaaguguaacagcgagugcaucacaccgaauggcuccauuccuaacgauaaacccuuccagaaugucaaccgcaucacguaugggaccuguccuagauacguuaagcagaauacacugaaacuugcuaccggaaugcggaacgugcccgaaaagcaaacacgcggcauuuuuggggccaucgcgggauucauugagaauggcugggaagggaugguggacggaugguauggcuuuagacaccagaacucugagggcaccgggcaggccgcugaucugaaaagcacgcaagccgcuaucaaucagaucaacggaaagcucaaucggcugauuggcaagacaaacgagaaauuccaccagaucgaaaaggaguucuccgaagucgaggggcgcauucaggaccuugaaaaauacguggaggauaccaagaucgaccuguggagcuauaacgccgagcuccugguugcccuggaaaaucaacauaccauugaucucacagacucugagaugaacaaacuguuugaaagaaccaagaagcagcuucgggagaaugcugaagauaugggaaacggcugcuucaaaaucuaccacaagugugacaaugcgugcauuggguccaucagaaacggcacauaugaucaugacguguaccgcgacgaggcccugaauaaccgguuucagaucaaaggagucgagcucaagcugggcuacaaagauuggauucuuuggaucagcuucgcuauuucuugcuuucugcucuguguggcccugcugggguucaucaugugggccugccagaagggaaauauuagauguaacaucugcaucuga

SEQ ID NO: 194668 - RNA, 1701 nt, Artificial Sequence
  derived and/or modified CDS sequence (opt5) from hemagglutinin__InfluenzaA__ACO36551
augaagaccaucauugcccugagccacauccucugccugguguucgcucagaaacccccuggcaacgacaauuccacagccacgcuuugucuggggcaucacgcggucccgaacggaaccauuguuaagacaaucaccaaugaucaaauugaggugacaaacgcuaccgaacucgugcagucuagcuccacaggcgggaucugcgacucuccccaucagauccuggauggagagaauuguacccuuauugacgcccugcucggcgauccucagugcgacggguuucaaaacaaaaagugggaucuguucgucgaaagaagcaaagccuacuccaauuguuaucccuacgacgugccugauuaugcuucucugcggagccucguugccuccagcggaacgcuggaguuuaacaaugaaucuuucaacuggaccggcgugacacagaauggcaccuccagcgcuugcaagcgcagaucuaacaauuccuuuuucagccggcuuaacuggcugacacaccucaaguuuaaauaccccgcccugaaugucaccaugccuaacaacgagaaguucgacaaacuuuauaucuggggagugcaucacccggggacggauaaugaccagauuucucuguacgcgcaggccuccggccgcaucacaguuagcaccaagagaucccaacagacagugauucccaacaucgggucucggccucgcgucagagauauuagcucccggaucagcaucuauuggaccauugugaaacccggagacauccuccugauuaauucuaccggcaaccugaucgcuccucgcggguacuuuaagauuagauccggaaagagcucuaucaugcggagcgacgcccccaucggcaaauguaauuccgagugcauuacaccgaacggcucuaucccuaaugauaagcccuuccagaacgugaaucgcauuacguacggggcuuguccuagauaugucaaacagaacacccucaagcuggccacaggaaugcggaauguucccgaaacccaaacacgcggcaucuuuggggcgauugccggauucaucgagaacggcugggaagggaugguggacggaugguacggcuuuagacaccagaauagcgagggcaccgggcaggcugccgaucuuaaauccacgcaagcugccaucaaccagauuaauggaaagcugaaccggcucaucggcaaaacaaacgagaaguuccaucagauugaaaaggaguucagcgaaguggaggggagaauccaggaccuggaaaaauaugucgaggauaccaagauugaccuuuggucuuacaaugccgagcugcucguggcucuggaaaaccaacacaccaucgaucugacagacuccgagaugaauaaacucuuugaacgcaccaagaaacagcugcgggagaacgcggaagauaugggaaauggcugcuucaagauuuaucauaagugugacaacgccugcaucgggagcaucagaaaugagacauacgaucacgacguuuaucgcgacgaggcucuuaacaaucgguuucagauuaaaggcguggaacugaagucuggauacaaagauuggauccucuggauuuccuucgccaucagcugcuuucugcuuugugucgcccugcucggcuucauuaugugggcuugccagaaggggaacaucagauguaauaucugcauuuga

SEQ ID NO: 194669 - RNA, 1701 nt, Artificial Sequence
  derived and/or modified CDS sequence (opt5) from hemagglutinin__InfluenzaA__ACO36562
augaagaccaucauugcccugagcuacauccucugccugguguucgcucagaaacuucccggcaacgacaauuccacagccacgcugugucucgggcaccaugcggucccuaacggaaccauuguuaagacaaucaccaaugaucaaauugaggugacaaacgcuaccgaacuggugcagucuagcuccacaggcgggaucugcgacucuccgcaccagauccuugauggagagaauuguacccugauugacgcccuccugggcgauccccagugcgacggguuucaaaacaaaaagugggaucuguucgucgaaagaagcaaagccuauuccaauuguuacccuuaugacgugcccgauuacgcuucucuccggagccugguugccuccagcggaacgcuugaguuuaacaaugaaucuuucaacuggaccggcgugacacagaauggcaccuccagcgcuugcaagcgcagaucuaacaauuccuuuuucagccggcugaacuggcucacacaucugaaguuuaaauauccugcccuuaaugucaccaugcccaacaacgagaaguucgacaaacuguacaucuggggagugcaccauccugggacggauaaugaccagauuucucucuaugcgcaggccuccggccgcaucacaguuagcaccaagagaucccaacagacagugauuccgaacaucgggucucggccccgcgucagagauauuccuagccggaucuccaucuacuggaccauugugaaacccggagacauccugcugauuaauagcaccggcaaccucaucgcuccucgcggguacuuuaagauuagaucuggaaaguccagcaucaugcggucugacgcccccaucggcaaauguaauagcgagugcauuacaccgaacggcuccaucccuaaugauaagcccuuccagaacgugaaucgcauuacguauggggcuuguccuagauacgucaaacagaacacccugaagcuggccacaggaaugcggaauguucccgaaacccaaacacgcggcaucuuuggggcgauugccggauucaucgagaacggcugggaagggaugguggacggaugguauggcuuuagacaccaaaauucugagggcaccgggcaggcugccgaucuuaaaagcacgcaggcugccaucaaccagauuaauggaaagcucaaccggcugaucggcaaaacaaacgagaaguuccaccagauugaaaaggaguucuccgaaguggaggggagaauccaggaccuugaaaaauacgucgaggauaccaagauugaccuguggagcuauaaugccgagcuccugguggcucuggaaaaccaacauaccaucgaucucacagacucugagaugaauaaacuguuugaacgcaccaagaaacagcuucgggagaacgcggaagauaugggaaauggcugcuucaagauuuaccacaagugugacaacgccugcaucggguccaucagaaaugagacauaugaucaugacguuuaccgcgacgaggcucugaacaaucgguuucagauuaaaggcguggaacucaagagcggauacaaagauuggauccuguggauuucuuucgccaucuccugcuuucuucugugugucgcccuccugggcuucauuaugugggcuugccagaaggggaacaucagauguaauaucugcauuuga

SEQ ID NO: 194670 - RNA, 1701 nt, Artificial Sequence
  derived and/or modified CDS sequence (opt5) from hemagglutinin__InfluenzaA__ACO36573
augaagaccaucauugcccugagcuacauccucugccugguguucgcucagaaacuucccggcaacgacaauuccacagccacgcugugucucgggcaccaugcggucccuaacggaaccauuguuaagacaaucaccaaugaucaaauugaggugacaaacgcuaccgaacuggugcagucuagcuccacaggcgggaucugcgacucuccgcaccagauccuugauggagagaauuguacccugauugacgcccuccugggcgauccccagugcgacggguuucaaaacaaaaagugggaucuguucgucgaaagaagcaaagccuauuccaauuguuacccuuaugacgugcccgauuacgcuucucuccggagccugguugccuccagcggaacgcuugaguuuaacaaugaaucuuucaacuggaccggcgugacacagaauggcaccuccagcgcuugcaagcgcagaucuaacaauuccuuuuucagccggcugaacuggcucacacaucugaaguuuaaauauccugcccuuaaugucaccaugcccaacaacgagaaguucgacaaacuguacaucuggggagugcaccauccugggacggauaaugaccagauuucucucuaugcgcaggccuccggccgcaucacaguuagcaccaagagaucccaacagacagugauuccgaacaucgggucucggccccgcgucagagauauuagcucccggaucagcaucuacuggaccauugugaaaccuggagacauccugcugauuaauucuaccggcaaccucaucgcuccccgcggguacuuuaagauuagauccggaaagagcucuaucaugcggagcgacgccccuaucggcaaauguaauuccgagugcauuacacccaacggcucuaucccgaaugauaagccuuuccagaacgugaaucgcauuacguauggggcuugucccagauacgucaaacagaacacccugaaacuugccacaggaaugcggaauguuccugaaacccaaacacgcggcaucuuuggggcgauugccggauucaucgagaacggcugggaagggaugguggacggaugguauggcuuuagacaccagaauagcgagggcaccgggcaggcugccgaucugaaguccacgcaagcugccaucaaccagauuaauggaaagcucaaccggcugaucggcaaaacaaacgagaaguuccaccagauugaaaaggaguucagcgaaguggaggggagaauccaggaccuugaaaaauacgucgaggauaccaagauugaccuguggucuuauaaugccgagcuccugguggcucuggaaaaccaacauaccaucgaucucacagacuccgagaugaauaaacuguuugaacgcaccaagaaacagcuucgggagaacgcggaagauaugggaaauggcugcuucaagauuuaccacaagugugacaacgccugcaucgggagcaucagaaaugagacauaugaucaugacguuuaccgcgacgaggcucugaacaaucgguuucagauuaaaggcguggaacucaagucuggauacaaagauuggauccuguggauuuccuucgccaucagcugcuuucuucugugugucgcccuccugggcuucauuaugugggcuugccagaaggggaacaucagauguaauaucugcauuuga

SEQ ID NO: 194671 - RNA, 1701 nt, Artificial Sequence
  derived and/or modified CDS sequence (opt5) from hemagglutinin__InfluenzaA__ACO36584
augaagaccaucauugcccugagcuacauccucugccugguguucucccagaaacuucccggcaacgacaauucuacagcuacgcugugucucgggcaccaugccgucccuaacggaaccauuguuaagacaaucaccaaugaucaaauugaggugacaaacgcgaccgaacuggugcagagcuccucuacaggcgggaucugcgacagcccgcaccagauccuugauggagagaauuguacccugauugacgcucuccugggcgauccccagugcgacggguuucaaaacaaaaagugggaucuguucgucgaaagauccaaagccuauucuaauuguuacccuuaugacgugcccgauuacgccagccuccggucccugguugcuagcucuggaacgcuugaguuuaacaaugaauccuucaacuggaccggcgugacacagaauggcaccagcucugccugcaagcgcagauccaacaauagcuuuuucucucggcugaacuggcucacacaucugaaguuuaaauauccugcucuuaaugucaccaugcccaacaacgagaaguucgacaaacuguacaucuggggagugcaccauccugggacggauaaugaccagauuucccucuaugcccaggcgagcggccgcaucacaguuuccaccaagaaaucucaacagacagugauuccgaacaucgggagcagaccccggguccgcgauauuuccagcagaaucucuaucuacuggaccauugugaagccuggagacauccugcugauuaauuccaccggcaaccucaucgcuccccggggguacuuuaagauucgcagcggaaaaucuagcaucaugagauccgacgccccuaucggcaaguguaauucugagugcauuacacccaacggcagcaucccgaaugauaaaccuuuccagaacgugaaucggauuacguauggggccuguccccgcuacgucaagcagaacacccugaaacuugcuacaggaaugagaaauguuccugaaacccaaacacggggcaucuuuggggccauugcgggauucaucgagaacggcugggaagggaugguggacggaugguauggcuuucgccaccagaauagcgagggcaccgggcaggccgcugaucugaaguccacgcaagccgcuaucaaccagauuaauggaaaacucaacagacugaucggcaagacaaacgagaaguuccaccagauugaaaaagaguucucugaaguggaggggcggauccaggaccuugaaaaguacgucgaggauaccaaaauugaccugugguccuauaaugccgagcuccugguggcccuggaaaaccaacauaccaucgaucucacagacagcgagaugaauaagcuguuugaaagaaccaaaaagcagcuucgcgagaacgcugaagauaugggaaauggcugcuucaagauuuaccacaaaugugacaacgcgugcaucgggucuauccggaaugagacauaugaucaugacguuuacagagacgaggcccugaacaaucgcuuucagauuaagggcguggaacucaaauccggauacaaggauuggauccuguggauuagcuucgcuaucuccugcuuucuucugugugucgcccuccugggcuucauuaugugggccugccagaaagggaacauccgguguaauaucugcauuuga

SEQ ID NO: 194672 - RNA, 1701 nt, Artificial Sequence; identical to SEQ ID NO: 192702
  derived and/or modified CDS sequence (opt5) from hemagglutinin__InfluenzaA__ACO36595

SEQ ID NO: 194673 - RNA, 1701 nt, Artificial Sequence
  derived and/or modified CDS sequence (opt5) from hemagglutinin__InfluenzaA__ACO36606
augaagaccaucauugcccugagcuacauccucugccugguguucgcucagaaacuucccggcaacgacaauuccacagccacgcugugucucgggcaccaugcggucccuaacggaaccauuguuaagacaaucaccaaugaucaaauugaggugacaaacgcuaccgaacuggugcagucuagcuccacaggcgggaucugcgacucuccgcaccagauccuugauggagagaauuguacccugauugacgcccuccugggcgauccccagugcgacggguuucaaaacaaaaagugggaucuguucgucgaaagaagcaaagccuauuccaauuguuacccuuaugacgugcccgauuacgcuucucuccggagccugguugccuccagcggaacgcuugaguuuaagaacgaaucuuucaauuggaccggcgugacacagaacggcaccuccagcgcuugcaagcgcagaucuaauaacuccuuuuucagccggcugaauuggcucacacaucugaaauuuaaguauccugcccuuaacgucaccaugcccaauaacgagaaauucgacaagcuguacaucuggggagugcaccauccugggacggauaacgaccagauuuuucucuaugcgcaggccucuggccgcaucacaguuuccacccaaagaagccagcagacagugauuccgaauaucgggucccggccccgcgucagaaacauuccuucucggaucagcaucuacuggaccauugugaaacccggagauauccugcugauuaauuccaccggcaaccucaucgcuccucgcggguacuucaagauuagaagcggaaagucuuccaucaugcggagcgacgcccccaucggcaaauguaauucugagugcauuacaccgaacggcagcaucccuaaugacaagcccuuucagaacgugaaucgcauuacguauggggcuuguccuagauacgucaaacaaaacacccugaaacuugccacaggaaugcggaauguucccgaaaagcagacccgcggcaucuucggggcgauugccggauuuaucgagaacggcugggaagggaugguggauggaugguauggcuucagacaccaaaauuccgagggcaucgggcaggcugccgaccugaagucuacacaggcugccauuaaccagaucaauggaaaacucaaccggcugauuggcaagaccaacgagaaguuccaccagaucgaaaaagaguuuagcgaaguggaggggcgcauucaagaucuugaaaaguacgucgaggacacgaaaaucgaucugugguccuauaaugccgagcuccugguggcucuggaaaaccagcauacaauugaccucaccgauagcgagaugaauaagcuguucgaaagaaccaaaaagcagcuucgggagaacgcggaagacaugggaaauggcugcuuuaagaucuaccacaaaugugauaacgccugcaucgggucuauuagaaauggcacauaugaccaugauguuuaccgcgacgaggcucugaacaaucgguuccagaucaagggaguggagcucaaauccggcuacaaggacuggauucuguggaucagcuuugccauuucuugcuuccuucugugugucgcccuccugggguuuaucaugugggcuugccaaaaaggaaacaucagauguaauauuugcaucuga

SEQ ID NO: 194674 - RNA, 1701 nt, Artificial Sequence; identical to SEQ ID NO: 192702
  derived and/or modified CDS sequence (opt5) from hemagglutinin__InfluenzaA__ACO36617

SEQ ID NO: 194675 - RNA, 1701 nt, Artificial Sequence; identical to SEQ ID NO: 192702
  derived and/or modified CDS sequence (opt5) from hemagglutinin__InfluenzaA__ACO36628

SEQ ID NO: 194676 - RNA, 1701 nt, Artificial Sequence
  derived and/or modified CDS sequence (opt5) from hemagglutinin__InfluenzaA__ACO36639
augaagaccaucauugcccugagcuacauccucugccugguguucgcucagaaacuucccggcaacgacaauuccacagccacgcugugucucgggcaccaugcggucccuaacggaaccauuguuaagacaaucaccaaugaucaaauugaggugacaaacgcuaccgaacuggugcagucuagcuccacaggcgggaucugcgacucuccgcaccagauccuugauggagagaauuguacccugauugacgcccuccugggcgauccccagugcgacggguuucaaaacaaaaagugggaucuguucgucgaaagaagcaaagccuauuccaauuguuacccuuaugacgugcccgauuacgcuucucuccggagccugguugccuccagcggaacgcuugaguuuaacaaugaaucuuucaacuggaccggcgugacacagaauggcaccuccagcgcuugcaagcgcagaucuaacaauuccuuuuucagccggcugaacuggcucacacaucugaaguuuaaauauccugcccuuaaugucaccaugcccaacaacgagaaguucgacaaacuguacaucuggggagugcaccauccugggacggauaaugaccagauuuuucucuaugcgcaggccucuggccgcaucacaguuuccaccaagagaagccaacagacagugauuccgaacaucgggucccggccccgcgucagaaauauuccuucucggaucagcaucuacuggaccauugugaaacccggagauauccugcugauuaacuccaccggcaaucucaucgcuccucgcggguacuucaagauuagaagcggaaagucuuccaucaugcggagcgacgcccccaucggcaaauguaacucugagugcauuacaccgaauggcagcaucccuaacgacaagcccuuucagaaugugaaccgcauuacguauggggcuuguccuagauacgucaaacagaauacccugaaacuugccacaggaaugcggaacguucccgaaaagcaaacccgcggcaucuucggggcgauugccggauuuaucgagaauggcugggaagggaugguggauggaugguauggcuucagacaccagaacuccgagggcaucgggcaggcugccgaccugaagucuacacaagcugccauuaaucagaucaacggaaaacucaaccggcugauuggcaagaccaaugagaaguuccaccagaucgaaaaagaguuuagcgaaguggaggggcgcauucaggaucuugaaaaguacgucgaggacacgaaaaucgaucugugguccuauaacgccgagcuccugguggcucuggaaaaucaacauacaauugaccucaccgauagcgagaugaacaagcuguucgaaagaaccaaaaagcagcuucgggagaaugcggaagacaugggaaacggcugcuuuaagaucuaccacaaaugugauaaugccugcaucgggucuauuagaaacggcacauaugaccaugauguuuaccgcgacgaggcucugaauaaccgguuccagaucaagggaguggagcucaaauccggcuacaaggacuggauucuguggaucagcuuugccauuucuugcuuccuucuguguuuugcccuccugggguucaucaugugggcuugccagaaaggaaauaucagauguaacauuugcaucuga

SEQ ID NO: 194677 - RNA, 1701 nt, Artificial Sequence
  derived and/or modified CDS sequence (opt5) from hemagglutinin__InfluenzaA__ACO36661
augaagaccaucauugcccugagcuacauccucugccugguguucgcucagaaacuucccggcaacgacaauuccacagccacgcugugucucgggcaccaugcggucccuaacggaaccauuguuaagacaaucaccaaugaucaaauugaggugacaaacgcuaccgaacuggugcagucuagcuccacaggcgggaucugcgacucuccgcaccagauccuugauggagagaauuguacccugauugacgcccuccugggcgauccccagugcgacggguuucaaaacaaaaagugggaucuguucgucgaaagaagcaaagccuauuccaauuguuacccuuaugacgugcccgauuacgcuucucuccggagccugguugccuccagcggaacgcuugaguuuaacaaugaaucuuucaacuggaccggcgugacacagaauggcaccuccagcgcuugcaagcgcagaucuaacaauuccuuuuucagccggcugaacuggcucacacaucugaaguuuaaauauccugcccuuaaugucaccaugcccaacaacgagaaguucgacaaacuguacaucuggggagugcaccauccugggacggauaaugaccagauuuuucucuaugcgcaggccucuggccgcaucacaguuuccaccaagagaagccaacagacagugauuccgaacaucgggucccggccccgcgucagaaauauuccuucucggaucagcaucuacuggaccauugugaaacccggagauauccugcugauuaacuccaccggcaaucucaucgcuccucgcggguacuucaagauuagaagcggaaagucuuccaucaugcggagcgacgcccccaucggcaaauguaacucugagugcauuacaccgaauggcagcaucccuaacgacaagcccuuucagaaugugaaccgcauuacguauggggcuuguccuagauacgucaaacagaauacccugaaacuugccacaggaaugcggaacguucccgaaaagcaaacccgcggcaucuucggggcgauugccggauuuaucgagaauggcugggaagggaugguggauggaugguauggcuucagacaccagaacuccgagggcaucgggcaggcugccgaccugaagucuacacaagcugccauuaaucagaucaacggaaaacucaaccggcugauuggcaagaccaaugagaaguuccaccagaucgaaaaagaguuuagcgaaguggaggggcgcauucaggaucuugaaaaguacgucgaggacaucaaaauugaucugugguccuauaacgccgagcuccugguggcucuggaaaaucaacauacgaucgaccucacagauagcgagaugaacaagcuguucgaaagaaccaaaaagcagcuucgggagaaugcggaagacaugggaaacggcugcuuuaagaucuaccacaaaugugauaaugccugcauugggucuaucagaaacggcaccuaugaccaugauguuuaccgcgacgaggcucugaauaaccgguuccagauuaagggaguggagcucaaauccggcuacaaggacuggauccuguggauuagcuuugccaucucuugcuuccuucugugugucgcccuccugggguuuaucaugugggcuugccagaaaggaaauauuagauguaacaucugcauuuga

SEQ ID NO: 194678 - RNA, 1701 nt, Artificial Sequence; identical to SEQ ID NO: 192702
  derived and/or modified CDS sequence (opt5) from hemagglutinin__InfluenzaA__ACO36683

SEQ ID NO: 194679 - RNA, 1701 nt, Artificial Sequence; identical to SEQ ID NO: 194669
  derived and/or modified CDS sequence (opt5) from hemagglutinin__InfluenzaA__ACO37122

SEQ ID NO: 194680 - RNA, 1701 nt, Artificial Sequence
  derived and/or modified CDS sequence (opt5) from hemagglutinin__InfluenzaA__ACO94514
augaagaccaucauugcccugagcuacauccucugccugguguucgcucagaaacuucccggcaacgacaauuccacagccacgcugugucucgggcaccaugcggucccuaacggaaccauuguuaagacaaucaccaaugaucaaauugaggugacaaacgcuaccgaacuggugcagucuagcuccacaggcgagaucugcgacucuccgcaccagauccuugauggggaaaauuguacccugauugacgcccuccugggagauccccagugcgacggcuuucaaaacaaaaagugggaucuguucgucgagagaagcaaagccuauuccaauuguuacccuuaugacgugcccgauuacgcuucucuccggagccugguugccuccagcgggacgcuugaauuuaacaaugagucuuucaacuggaccggagugacacagaauggcaccuccagcgcuugcauccgcaagucuaacaauuccuuuuucagcagacugaacuggcucacacaucugaaguuuaaauauccugcccuuaaugucaccaugcccaacaacgagcaguucgacaagcuguacauuuggggcgugcaccauccugggacggauaaugaccagaucuuucucuaugcgcaagccucuggacggauuacaguuuccaccaaacgcagccagcagacagugaucccgaacauuggcuccagaccccggguccgcaauaucccuucuagaaucagcauuuacuggaccaucgugaagcccggggauauucugcugaucaacuccaccggaaaucucauugcuccucggggcuacuucaaaauccgcagcgggaagucuuccaucaugagaagcgacgcccccauuggaaaguguaacucugaaugcaucacaccgaauggcagcauuccuaacgacaaacccuuucagaaugugaaccggaucacguauggcgcuuguccucgcuacgucaagcaaaauacccugaaacuugccacagggaugagaaacguucccgagaagcagacccggggaauuuucggcgcgaucgccggguuuaucgaaaauggaugggagggcaugguggaugggugguauggauuccgccaccagaacuccgagggcagaggccaagcugccgaccugaaaucuacacaggcugccauugaucagaucaaugggaagcucaaccggcugauuggaaaaaccaacgaaaaguuccaccagaucgagaaggaauuuagcgagguggaaggccgcauucaagaccuugagaaauacgucgaggauacgaagaucgaccugugguccuauaaugccgaacuccugguggcucuggagaaccagcauacaauugaucucaccgacagcgaaaugaauaaacuguucgagaagaccaaaaagcagcuuagagaaaacgcggaggauauggggaauggaugcuuuaagaucuaccacaaaugugacaacgccugcaucggcucuauucggaaugggacauaugaucaugacguuuacagagacgaggcucugaacaaucgcuuccagaucaagggcguggaacucaaauccggauacaaggauuggauucuguggaucagcuuugccauuucuugcuuccuucugugugucgcccuccugggcuuuaucaugugggcuugccaaaaagggaacauccgguguaauauuugcaucuga

SEQ ID NO: 194681 - RNA, 1701 nt, Artificial Sequence
  derived and/or modified CDS sequence (opt5) from hemagglutinin__InfluenzaA__ACO94515
augaagaccaucauugcccugagcuacauccucugccugguguucgcucagaaacuucccggcaacgacaauuccacagccacgcugugucucgggcaccaugcggucccuaacggaaccauuguuaagacaaucaccaaugaucaaauugaggugacaaacgcuaccgaacuggugcagucuagcuccacaggcgagaucugcgacucuccgcaccagauccuugauggggaaaauuguacccugauugacgcccuccugggagauccccagugcgacggcuuucaaaacaaaaagugggaucuguucgucgagagaagcaaagccuauuccaauuguuacccuuaugacgugcccgauuacgcuucucuccggagccugguugccuccagcgggacgcuugaauuuaacaaugagucuuucaacuggaccggagugacacagaauggcaccuccagcgcuugcauccgcaagucuaacaauuccuuuuucagcagacugaacuggcucacacaucugaaguuuaaauauccugcccuuaaugucaccaugcccaacaacgagcaguucgacaagcuguacauuuggggcgugcaccauccugggacggauaaugaccagaucuuucucuaugcgcaagccucuggacggauuacaguuuccaccaaacgcagccagcagacagugaucccgaacauuggcuccagaccccggguccgcaauaucccuucuagaaucagcauuuacuggaccaucgugaagcccggggauauucugcugaucaacuccaccggaaaucucauugcuccucggggcuacuucaaaauccgcagcgggaagucuuccaucaugagaagcgacgcccccauuggaaaguguaacucugaaugcaucacaccgaauggcagcauuccuaacgacaaacccuuucagaaugugaaccggaucacguauggcgcuuguccucgcuacgucaagcaaaauacccugaaacuugccacagggaugagaaacguucccgagaagcagacccggggaauuuucggcgcgaucgccggguuuaucgaaaauggaugggagggcaugauggaugggugguauggauuccgccaccagaacuccgagggcagaggccaagcugccgaccugaaaucuacacaggcugccauugaucagaucaaugggaagcucaaccggcugauuggaaaaaccaacgaaaaguuccaccagaucgagaaggaauuuagcgagguggaaggccgcauucaagaccuugagaaauacguggaggauacgaagaucgaccugugguccuauaaugccgaacuccuggucgcucuggagaaccagcauacaauugaucucaccgacagcgaaaugaauaaacuguucgagaagaccaaaaagcagcuuagagaaaacgcggaggauauggggaauggaugcuuuaagaucuaccacaaaugugacaacgccugcaucggcucuauucggaaugggacauaugaucaugacguguacagagacgaggcucugaacaaucgcuuccagaucaagggcguugaacucaaauccggauacaaggauuggauucuguggaucagcuuugccauuucuugcuuccuucuguguguggcccuccugggcuuuaucaugugggcuugccaaaaagggaacauccgguguaauauuugcaucuga

SEQ ID NO: 194682 - RNA, 1701 nt, Artificial Sequence; identical to SEQ ID NO: 194506
  derived and/or modified CDS sequence (opt5) from hemagglutinin__InfluenzaA__ACO94516

SEQ ID NO: 194683 - RNA, 1701 nt, Artificial Sequence; identical to SEQ ID NO: 194506
  derived and/or modified CDS sequence (opt5) from hemagglutinin__InfluenzaA__ACO94672

SEQ ID NO: 194684 - RNA, 1701 nt, Artificial Sequence
  derived and/or modified CDS sequence (opt5) from hemagglutinin__InfluenzaA__ACO94683
augaagaccaucauugcccugagcuacauccucugccugguguccgcucagaaacuucccggcaacgacaauucuacagccacgcugugucucgggcaccaugcggucccuaacggaaccauuguuaagacaaucaccaaugaucaaauugaggugacaaacgcuaccgaacuggugcagagcuccucuacaggcgagaucugcgacagcccgcaccagguccuugauggggaaaauuguacccugaucgacgcccuccugggagauccccagugcgacggcuuccaaaacaaaaagugggaucuguuuguggagagauccaaagccuauucuaauuguuacccuuaugacguucccgauuacgcuagccuccggucccugguggccagcucugggacgcuugaguucaacaaugaauccuuuaacuggaccggagucacacagaauggcaccagcucugcuugcauucgcagauccaacaauagcuucuuuucucggcugaacuggcucacacauuccaaguucaaguauccugcccugaaugugaccaugcccaacaacgaggaauuugacaaacuuuacaucuggggcguucaccauccugggacggauaaugaccagauuuuccuguaugcgcaggccagcggacgcaucacaguguccaccaagagaucucaacagacagucauuccgaacaucggcagccggccccgcgugagaaauauuccuucccggaucagcaucuacuggaccauugugaaacccggggauauccuccugauuaacucuaccggaaaucugaucgcuccucgcggcuacuuuaagauuagauccgggaaaagcucuaucaugcggagcgacgcccccaucggaaaguguaacuccgagugcauuacaccgaauggcucuaucccuaacgacaagcccuuccagaaugucaaccgcauuacguauggcgcuuguccuagauacguuaaacagaauacccucaagcuggccacagggaugcggaacgugcccgaaaaacaaacccgcggaaucuuuggcgcgauugccggguucaucgagaauggaugggagggcaugguggaugggugguauggauuuagacaccagaacagcgaaggcaucggccaggcugccgaccuuaaguccacacaagcugccauugaucagaucaaugggaaacugaaccggcucauuggaaagaccaacgagaaauuccaccagaucgaaaaggaguucacggaagucgagggccgcauucaggaccuggagaaguacguggaagauacaaaaaucgaccuuuggagcuauaaugccgagcugcucguugcucuggaaaaccaacauaccauugaucugaccgacucugagaugaauaagcucuuugaaaagacaaagaaacagcugagagagaacgcggaggauauggggaauggaugcuucaagaucuaccacaagugugacaacgccugcaucggcuccauucggaaugggaccuaugaucaugaaguguacagagacgaggcucuuaacaaucgcuuucagaucaaaggcgucgaacugaaaagcggauacaaagacuggauucucuggaucucuuucgccauuuccugcuuucugcuuuguguggcccugcucggcuucaucaugugggcuugccagaaggggaacauccgguguaauauuugcaucuga

SEQ ID NO: 194685 - RNA, 1701 nt, Artificial Sequence; identical to SEQ ID NO: 194506
  derived and/or modified CDS sequence (opt5) from hemagglutinin__InfluenzaA__ACO94694

SEQ ID NO: 194686 - RNA, 1698 nt, Artificial Sequence; identical to SEQ ID NO: 194560
  derived and/or modified CDS sequence (opt5) from hemagglutinin__InfluenzaA__ACO94705

SEQ ID NO: 194687 - RNA, 1701 nt, Artificial Sequence
  derived and/or modified CDS sequence (opt5) from hemagglutinin__InfluenzaA__ACO94727
augaagaccaucauugcccugagcuacauccucugccugguguucgcucagaaacuucccggcaacgacaauuccacagccacgcugugucucgggcaccaugcggucccuaacggaaccauuguuaagacaaucaccaaugaucaaauugaggugacaaacgcuaccgaacuggugcagucuagcuccacaggcgagaucugcgacucuccgcaccagauccuugauggggaaaauuguacccugauugacgcccuccugggagauccccagugcgacggcuuucaaaacaaaaagugggaucuguucgucgagagaagcaaagccuauuccaauuguuacccuuaugacgugcccgauuacgcuucucuccggagccugguugccuccagcgggacgcuugaauuuaacaaugagucuuucaacuggaccggagugacacagaauggcaccuccagcgcuugcauccgcagaucuaacaauuccuuuuucagccggcugaacuggcucacacaucugaaguuuaaguauccugcccuuaaugucaccaugcccaacaacgagcaguucgacaaacuguacauuuggggcgugcaccauccugggacggauaaugaccagaucuuucucuaugcgcaagccucuggacgcauuacaguuuccaccaagagaagccagcagacagugaucccgaacauuggcucccggccccgcgucagaaauaucccuucucggaucagcauuuacuggaccaucgugaaacccggggauauucugcugaucaacuccaccggaaaucucauugcuccucgcggcuacuucaagaucagaagcgggaaaucuuccaucaugaaaagcgacgcccccauuggaaaguguaacucugaaugcaucacaccgaauggcagcauuccuaacgacaagcccuuucagaaugugaaccggaucacguauggcgcuuguccucgcuacgucaagcaaaauacccugaaacuugccacagggaugagaaacguucccgagaagcagacccggggaauuuucggcgcgaucgccggguuuaucgaaaauggaugggagggcaugguggaugggugguauggauuccgccaccagaacuccgagggcagaggccaagcugccgaccugaaaucuacacaggcugccauugaucagaucaaugggaagcucaaccggcugauuggaaaaaccaacgaaaaguuccaccagaucgagaaggaauuuagcgagguggaaggccgcauucaagaccuugagaaauacgucgaggauacgaagaucgaccugugguccuauaaugccgaacuccugguggcucuggagaaccagcauacaauugaucucaccgacagcgaaaugaauaaacuguucgagaagaccaaaaagcagcuuagagaaaacgcggaggauauggggaauggaugcuuuaagaucuaccacaaaugugacaacgccugcaucggcucuauucggaaugggacauaugaucaugacguuuacagagacgaggcucugaacaaucgcuuccagaucaagggcguggaacucaaauccggauacaaggauuggauucuguggaucagcuuugccauuucuugccuucugcucugugucgcccugcugggcuucaucaugugggcuugccaaaaagggaacauccgguguaauauuugcaucuga

SEQ ID NO: 194688 - RNA, 1701 nt, Artificial Sequence
  derived and/or modified CDS sequence (opt5) from hemagglutinin__InfluenzaA__ACO94738
augaagaccaucauugcccugagcuacauccagugccucguguucgcucaaaaauuucccggcaacgacaauuccacagccacgcugugucuugggcaccaugcggucccuaacggaaccguugugaagacaauuaccaaugaucagaucgaggugacaaacgcuaccgaacugguccagucuagcuccacaggcgagauuugcgacucuccgcaccagauccucgauggggaaaauuguacccugaucgacgcccuucugggagauccccaaugcgacggcuuccagaacaaaaauugggaucucuuuguggagagaagcaaggccuauuccaacuguuacccuuaugacguucccgauuacgcuucucugcggagccugguggccuccagcgggacgcucgaguucaauaacgaaucuuuuaauuggaccggagucacacagaacggcaccuccagcgcuugcauucgcagaucuaauaacuccuucuuuagccggcugaauuggcuuacacauucuaaauucaaguauccugcccugaacgugaccaugcccaacaaugagaacuuugacaagcucuacaucuggggcguucaccauccugggacggauaaugaccagauuuuccuguaugcgcgcgccuccggaagaaucacagugagcaccaaacggucccaacagacagucauuccgaacaucggcucucgccccagagugcggaauauuccuagccgcaucuccaucuacuggaccauugugaagcccggggauauccuucugauuaacagcaccggaaaucucaucgcuccuagaggcuacuuuaaaauucggucugggaaguccagcaucaugcgcucugacgcccccaucggaaaauguaacagcgaaugcauuacaccgaauggcuccaucccuaacgacaagcccuuccagaaugucaacagaauuacguauggcgcuuguccucgguacguuaagcagaauacccugaaacuggccacagggaugcgcaacgugcccgagaagcaaaccagaggaaucuuuggcgcgauugccggguucaucgaaaauggaugggagggcaugguggaugggugguauggauuccggcaccagaacucugagggcaucggccaggcugccgaccucaaaagcacacaagcugccauugaucagaucaacgggaagcugaauagacuuauuggaaaaaccaacgaaaaguuucaccagaucgagaaagaguucuccgaagucgaaggccgcauucaggaccuggagaaguacguggaggauacgaagaucgaccucuggagcuauaaugccgaacugcuuguugcucuggagaaccaacauacaauugaucucaccgacucugaaaugaauaaacuguuugagaagaccaaaaagcagcugcgggaaaacgcggaggauauggggaauggaugcuucaaaaucuaccacaagugugacaacgccugcaucggcuccauuagaaaugggacauaugaucaugacguguaccgcgacgaggcucucaacaaucgguuucagaucaagggcgucgaacugaaaagcggauacaaggauuggauucuuuggaucucuuucgccauuuccugcuuucugcucuguaucgcccugcuuggcuucaucaugugggcuugccagaaagggaacauuagauguaauaucugcauuuga

SEQ ID NO: 194689 - RNA, 1701 nt, Artificial Sequence; identical to SEQ ID NO: 194609
  derived and/or modified CDS sequence (opt5) from hemagglutinin__InfluenzaA__ACO94760

SEQ ID NO: 194690 - RNA, 1701 nt, Artificial Sequence
  derived and/or modified CDS sequence (opt5) from hemagglutinin__InfluenzaA__ACO94771
augaagaccaucauugcccugagcuacauccucugccugguguucgcucagaaacuucccggcaacgacaauuccacagccacgcugugucucgggcaccaugcggucccuaacggaaccauuguuaagacaaucaccaaugaucaaauugaggugacaaacgcuaccgaacuggugcagucuagcuccacaggcgagaucugcgacucuccgcaccagauccuugauggggaaaauuguacccugauugacgcccuccugggagauccccagugcgacggcuuucaaaacaaaaagugggaucuguucgucgagagaagcaaagccuauuccaauuguuacccuuaugacgugcccgauuacgcuucucuccggagccugguugccuccagcgggacgcuugaauuuaacaaugagucuuucaacuggaccggagugacacagaauggcaccuccagcgcuugcauccgcagaucuaacaauuccuuuuucagccggcugaacuggcucacacaucugaaguuuaaguauccugcccuuaaugucaccaugcccaacaacgagcaguucgacaaacuguacauuuggggcgugcaccauccugggacggauaaugaccagaucuuucucuaugcgcaagccucuggacgcauuacaguuuccaccaagagaagccagcagacagugaucccgaacauuggcucccggccccgcgucagaaauaucccuucucggaucagcauuuacuggaccaucgugaaacccggggauauucugcugaucaacuccaccggaaaucucauugcuccucgcggcuacuucaagaucagaagcgggaaaucuuccaucaugcggagcgacgcccccauuggaaaguguaacucugaaugcaucacaccgaauggcagcauuccuaacgacaagcccuuucagaaugugaaccgcaucacguauggcgcuuguccuagauacgucaaacaaaauacccugaaacuugccacagggaugcggaacguucccgagaagcagacccgcggaauuuucggcgcgaucgccggguuuaucgaaaauggaugggagggcaugguggaugggugguauggauucagacaccagaacuccgagggccggggccaagcugccgaccugaagucuacacaggcugccauugaucagaucaaugggaaacucaacagacugauuggaaagaccaacgaaaaauuccaccagaucgagaaggaauuuagcgagguggaaggccgcauucaagaccuugagaaguacgucgaggauacgaaaaucgaccugugguccuauaaugccgaacuccugguggcucuggagaaccagcauacaauugaucucaccgacagcgaaaugaauaagcuguucgagaaaaccaagaaacagcuucgggaaaacgcggaggauauggggaauggaugcuuuaagaucuaccacaagugugacaacgccugcaucggcucuauuagaaaugggacauaugaucaugacguuuaccgcgacgaggcucugaacaaucgguuccagaucaaaggcguggaacucaaguccggauacaaagauuggauucuguggaucagcuuugccauuucuugccuucugcucugugucgcccugcugggcuucaucaugugggcuugccaaaaggggaacaucagauguaauauuugcaucuga

SEQ ID NO: 194691 - RNA, 1701 nt, Artificial Sequence; identical to SEQ ID NO: 194506
  derived and/or modified CDS sequence (opt5) from hemagglutinin__InfluenzaA__ACO94782

SEQ ID NO: 194692 - RNA, 1701 nt, Artificial Sequence; identical to SEQ ID NO: 194506
  derived and/or modified CDS sequence (opt5) from hemagglutinin__InfluenzaA__ACO94793

SEQ ID NO: 194693 - RNA, 1698 nt, Artificial Sequence
  derived and/or modified CDS sequence (opt5) from hemagglutinin__InfluenzaA__ACO94804
augaaggugaaacugcucguccugcuuugcaccuucacagccacguacgcugacaccaucuguauuggcuaucacgccaacaauagcacagauaccguugacacagugcuggagaagaacgugaccgucacacauuccgugaaucuccuggaagauucucacaacgggaaacuuugccugcucaagggaaucgcgccccugcagcugggcaauuguagcguugcuggguggauucucggaaacccugagugcgaacugcuuaucuccagagagucuuggagcuacauuguggaaaaaccgaaucccgagaacggcaccuguuauccugggcauuuugccgacuacgaggaacugcgggagcaacucuccucugucagcuccuucgaacgcuuugagaucuuccccaaggagagcucuuggccuaaucacacgaccacaggaguguccgccagcugcucucauaacggcgaauccagcuuuuauaagaaucugcuuuggcugaccggcaaaaacgggcucuaccccaaucugucuaaguccuaugcuaacaauaaagagaaggaaguucuggugcucuggggaguccaccacccuccgaacaucggcaaccagagagcccuguaccauacagagaaugcuuacgugagcguggucuccucucacuauagccggaaauucacccccgaaauugccaagcgcccuaagguuagagaucaggaggggcggaucaacuacuauuggacgcuucuggagcccggagacacaauuaucuuugaagcgaauggcaaccucauugccccucgcuacgcuuucgcccuguccagaggguuuggaagcggcaucauuaauucuaacgcucccauggauggcugugacgccaaaugccagaccccgcaaggggcgaucaauuccagccuuccuuuccagaacgugcaucccgugacaaucggagaguguccuaaguauguccggucugccaaacugcgcauggugaccggccucagaaauauucccagcauccagucccgggggcuguuuggagcuauugccggcuucaucgaagggggauggaccggcaugguugauggcugguacggguaucaccaccagaacgagcaaggaucuggcuacgcugccgaccaaaagagcacacagaaugccauuaacgggaucacgaauaaagugaacuccgucaucgaaaagaugaauacccaguuuacagcugugggaaaagaguucaacaagcuggagcgcagaauggaaaaccucaauaagaaaguugaugacggcuucauugauaucuggaccuacaacgcggagcugcuugugcugcucgaaaaugagcggacacuggacuuucaugacagcuaugucaagaaccuuuacgaaaaagugaagucucagcugaaaaauaacgccaaggagauugggaauggcugcuucgaguuuuaucacaaguguaacgaugaaugcauggaguccgucaaaaauggaaccuacgacuaucccaaguacagcgaagagucuaaacucaaccgcgagaagaucgauggcgugaaacuggaauccauggggguuuaucagauucuggcuaucuacagcacgguggccuccucucucguccugcuugugagccugggagccaucuccuucuggaugugcucuaauggcagccuccaguguagaauuugcaucuga

SEQ ID NO: 194694 - RNA, 1701 nt, Artificial Sequence; identical to SEQ ID NO: 194373
  derived and/or modified CDS sequence (opt5) from hemagglutinin__InfluenzaA__ACO94815

SEQ ID NO: 194695 - RNA, 1701 nt, Artificial Sequence; identical to SEQ ID NO: 194380
  derived and/or modified CDS sequence (opt5) from hemagglutinin__InfluenzaA__ACO94848

SEQ ID NO: 194696 - RNA, 1698 nt, Artificial Sequence; identical to SEQ ID NO: 194560
  derived and/or modified CDS sequence (opt5) from hemagglutinin__InfluenzaA__ACO94859

SEQ ID NO: 194697 - RNA, 1698 nt, Artificial Sequence
  derived and/or modified CDS sequence (opt5) from hemagglutinin__InfluenzaA__ACO94870
augaaggugaaacugcucguccugcuuugcaccuucacagccacguacgcugacaccaucuguauuggcuaucacgccaacaauagcacagauaccguugacacagugcuggagaagaacgugaccgucacacauuccgugaaucuccuggaaaacucucacaaugggaaacuuugccugcucaagggaaucgcgccccugcagcugggcaacuguagcguugcuggguggauucucggaaauccugagugcgaacugcuuaucuccaaagagucuuggagcuacauuguggaaaagccgaaccccgagaauggcaccuguuauccugggcauuuugccgauuacgaggaacugagagagcaacucuccucugucagcuccuucgaacgguuugagaucuuccccaaggagagcucuuggccuaaccacacggugaccggaguuuccgccagcugcucucauaauggcgaauccagcuuuuaucgcaaccugcuuuggcugacaggcaaaaaugggcucuaccccaaccugucuaaguccuaugcuaauaacaaaggaaaggaggugcugguccucuggggcgugcaccacccuccgaacaucggggaccagaauacccuguaccauacagaaaacgccuacgugagcgucguuuccucucacuauagcagaaaauucacccccgagauugcuaagcggccuaaggugcgcgaucaggaaggaagaaucaauuacuauuggacgcuucuggagcccggcgacacaauuaucuuugaggccaacgggaaucucauugcgccucgguacgccuucgcucugaaccgcggauuuggcuccggcaucauuaauagcaacgcccccauggauaaaugugacgcuaagugccagaccccgcaaggggccaucaauucuucccuuccuuuccagaacgugcaucccgucacaaucggagaauguccuaaauaugugagaagcgcgaagcugcggaugguuaccggccuccgcaauauucccucuauccagagcagagggcuguuuggagccauugcuggcuucaucgaagggggauggaccggcaugguggauggcugguacggguaucaccaccagaacgaacaaggauccggcuacgccgcugaccagaaaucuacacagaaugccauuaacgggaucacgaauaaggucaacagcgugaucgagaaaaugaacacccaguuuacagccguuggaaaggaguucaauaagcuggagcggcgcauggagaaccucaauaaaaagguggaugacggcuucauugauaucuggaccuacaacgcugaacugcuuguccugcucgagaaugaaagaacacuggacuuucaugacuccaacgugaaaaaucuuuaugagaaggucaaaagccaacugaagaacaaugcgaaggaaauugggaacggcugcuucgaguuuuaccacaaauguaaugaugagugcauggaaucugugaagaacggaaccuaugacuaccccaaauauuccgaggaaagcaagcucaaucgggagaaaaucgauggcguuaagcuggagucuauggggguguaccagauucuggccaucuauuccacggucgcuagcucccucgugcugcuuguuucucugggagccaucagcuucuggaugugcuccaacggcucucuccagugucgcauuugcaucuga

SEQ ID NO: 194698 - RNA, 1701 nt, Artificial Sequence
  derived and/or modified CDS sequence (opt5) from hemagglutinin__InfluenzaA__ACO94881
augaagaccaucauugcccugagcuacauccucugccugguguucgcucagaaacuucccggcaacgacaauuccacagccacgcugugucucgggcaccaugcggucccuaacggaaccauuguuaagacaaucaccaaugaucaaauugaggugacaaacgcuaccgaacuggugcagucuagcuccacaggcgggaucugcgacucuccgcaccagauccuugauggagagaauuguacccugauugacgcccuccugggcgauccccagugcgacggguuucaaaacaaaaagugggaucuguucgucgaaagaagcaaagccuauuccaauuguuacccuuaugacgugcccgauuacgcuucucuccggagccugguugccuccagcggaacgcuugaguuuaacaaugaaucuuucgacuggaccggcgugacacagaacggcaccuccagcucuugcaagcgcagauccaauaacagcuuuuucucucggcugaauuggcucacacaucugaaguauaaauacccugcucuuaacgucaccaugcccaauaacgagaaguuugauaaacuguauaucuggggagugcaccauccugggacggacuccgaucagauuagccucuacgcccaggcguccggccgcaucacaguuucuaccaagagaagccaacagacagugauuccgaacaucgggucccggccccgcgucagagacgugagcucucggauuuccaucuacuggaccaucgugaaaccuggagacauucugcugaucaauagcaccggcaaccucauugcccccagaggguauuucaagaucagaucuggaaagagcuccauuaugcggucugaugcuccuaucggcaaauguaauagcgagugcaucacacccaacggcuccauuccgaaugacaagccuuuucagaacgucaaucgcaucacguacggggccugucccagauauguuaaacagaacacccugaaacuugcuacaggaaugcggaaugugccugaaaaacaaacccgcggcauuuucggggccaucgcgggauuuauugagaacggcugggaagggaugguggauggaugguacggcuucagacaccagaauagcgagggcacagggcaggccgcugaccugaagucuacccaagccgcuaucaaccagaucaauggaaaacucaaccggcugauuggcaagacgaaugagaaguuucaccagaucgaaaaagaguucuccgaagucgaggggcgcauucaggaucuugaaaaguauguggaggacacaaaaaucgaucuguggagcuacaacgccgagcuccugguugcccuggaaaaccaacauaccauugaccucaccgauucugagaugaauaagcuguucgaacgcacaaagaagcagcuucgggagaacgcugaagacaugggaaauggcugcuuuaagaucuaucacagaugugauaacgcgugcauuggguccauccgcaauggcaccuacgaccaugacguguaccgggaugaggcccugaacaauagauuccagaucaaaggagucgagcucaagagcggcuauaaagacuggauucuguggaucuccuuugcuauuucuugcuuccuucuguguguggcccuccugggguuuaucaugugggccugccagaagggaaacauucgcuguaauaucugcaucuga

SEQ ID NO: 194699 - RNA, 1701 nt, Artificial Sequence
  derived and/or modified CDS sequence (opt5) from hemagglutinin__InfluenzaA__ACO94892
augaagaccaucauugcccugagcuacauccucugccugguguucgcucagaaacuucccggcaacgacaauuccacagccacgcugugucucgggcaccaugcggucccuaacggaaccauuguuaagacaaucaccaaugaucaaauugaggugacaaacgcuaccgaacuggugcagucuagcuccacaggcgggaucugcgacucuccgcaccagauccuugauggagagaauuguacccugauugacgcccuccugggcgauccccagugcgacggguuucaaaacaaaaagugggaucuguucgucgaaagaagcaaagccuauuccaauuguuacccuuaugacgugcccgauuacgcuucucuccggagccugguugccuccagcggaacgcuugaguuuaacaaugaaucuuucaacuggaccggcgugacacagaauggcaccuccagcgcuugccagcgcagaucuaacaaguccuuuuucagccggcugaauuggcucacacaucugaaguuuaaauauccugcccuuaacgucaccaugcccaauaacgagaaguucgacaaacuguacaucuggggagugcaccauccugggacggauaacgaccagauuucucucuaugcgcaaacauccggccgcaucaccauuagcacaaagagaucccagcagaccguuaucccgaauauugggucucggccccgcgugagagaugucccuagccggaucuccaucuacuggaccauugugaaacccggagacauccugcugauuaacagcacaggcaaucucaucgccccucgcggguacuuuaagauuagaucuggaaaguccagcaucaugcggucugacgcucccaucgugaaauguaacagcgagugcauuacgccgaauggcuccaucccuaacgauaagcccuuccagaaugucaaccgcauuaccuauggcgccuguccuagauacguuaaacaaaauacacugaagcuggcuaccgggaugcggaacgugcccgaacgccagacaagaggaaucuuuggcgccauugcgggguucaucgagaauggaugggaaggcaugguggacgggugguauggauuucggcaccagaacucugagggcaccggccaagccgcugaucuuaaaagcacgcaggccgcuaucaaucagauuaacgggaagcucaauagacugaucggaaaaacaaacgagaaguuccaccagauugaaaaggaguucuccgaagucgagggccgcauccaagaccuugaaaaauacguggaggauaccaagauugaccuguggagcuauaacgccgagcuccugguugcccuggaaaaucagcauaccaucgaucucacagacucugagaugaacaaacuguuugaacggaccaagaaacagcuuagagagaaugcugaagauauggggaacggaugcuucaagauuuaccacaagugugacaaugcgugcaucggcuccauccgcaacgggacauaugaucaugacguguaccgggacgaggcccugaauaacagauuucagauuaaaggcgucgagcucaagagcggauacaaagauuggauccuguggauuucuuucgcuaucuccugcuuucuucuguguguggcccuccugggcuucauuaugugggccugccaaaaggggaauauccgcuguaacaucugcauuuga

SEQ ID NO: 194700 - RNA, 1701 nt, Artificial Sequence
  derived and/or modified CDS sequence (opt5) from hemagglutinin__InfluenzaA__ACO94903
augaagaccaucauugcccugagcuacauccucugccugguguucgcucagaaacuucccggcaacgacaauuccacagccacgcugugucucgggcaccaugcggucccuaacggaaccauuguuaagacaaucaccaaugaucaaauugaggugacaaacgcuaccgaacuggugcagucuagcuccacaggcgggaucugcgacucuccgcaccagauccuugauggagagaauuguacccugauugacgcccuccugggcgauccccagugcgacggguuucaaaacaaaaagugggaucuguucgucgaaagaagcgaggccuauuccaauuguuacccuuaugacgugcccgauuacgcuucucuccggagccugguugccuccagcggaacgcuugaauuuaacaaugagucuuucaacuggaccggcgugacacagaauggcaccuccagcgcuugcaaacgcagaucuaacaaguccuuuuucagccggcugaauuggcucacacaucugaaguuuaaauauccugcccuuaacgucaccaugcccaauaacgagaaguucgacaaacuguacaucuggggagugcaccauccugggacggauaacgaccagauuucucucuaugcgcaggccuccggccgcaucacaguuagcaccaagagaucccaacagacagugauuccgaauaucgggucucggccccgcgucagagaugugccuagccggauuuccaucuacuggaccaucgugaaacccggagacauucugcugaucaacagcaccggcaaucucauugcuccucgcggguacuuuaagaucagaucuggaaaguccagcauuaugcggucugacgcccccaucggcaaauguaacagcgaaugcaucacaccgaauggcuccauuccuaacgauaagcccuuccagaaugucaaccgcaucacguauggggcuuguccuagauacguuaaacagaauacccugaaacuugccacaggaaugcggaacgugcccgagaaacaaacccgcggcauuuuuggggcgaucgccggauucauugaaaauggcugggaggggaugguggacggaugguauggcuuuagacaccagaacucugagggcacagggcaggcugccgaucucaagagcacccaagcugccaucaaucagaucaacggaaaacugaaucggcugauuggcaagacgaacgaaaaguuccaccagaucgagaaagaguucuccgaagucgaagggcgcauucaggaccuugagaaguacguggaggauacaaaaaucgaccuguggagcuauaacgccgaacuccugguugcucuggagaaucaacauaccauugaucucaccgacucugaaaugaacaagcuguuugagagaacaaagaagcagcuucgggaaaaugcggaggauaugggaaacggcugcuucaagaucuaccacaaaugugacaaugccugcauuggguccaucagaaacggcaccuaugaucaugacguguaccgcgacgaggcucugaauaaccgguuucagaucaagggagucgaacucaaaagcggcuacaaggauuggauucuguggaucucuuucgccauuuccugcuuucuucuguguguggcccuccugggguucaucaugugggcuugccagaaaggaaauauuagauguaacaucugcaucuga

SEQ ID NO: 194701 - RNA, 1701 nt, Artificial Sequence
  derived and/or modified CDS sequence (opt5) from hemagglutinin__InfluenzaA__ACO94925
augaagaccaucauugcccugagcuacauccucugccugguguucgcucagaaacuucccggcaacgacaauuccacagccacgcugugucucgggcaccaugcggucccuaacggaaccguugugaagacaauuaccaaugaucaaaucgaggugacaaacgcuaccgaacugguccagucuagcuccacaggcgggauuugcgacucuccgcaccagauccuugauggagagaauuguacccugaucgacgcccuccugggcgauccccagugcgacggguuucaaaacaaaaagugggaucuguucguggaaagaagcaaagccuauuccaauuguuacccuuaugacguucccgauuacgcuucucuccggagccugguggccuccagcggaacgcuugaguuuaacaaugaaucuuucaacuggaccggcgucacacagaauggcaccuccagcgcuugcaagcgcagaucuaacaaguccuuuuucagccggcugaauuggcucacacaucugaaauuuaaguauccugcccuuaacgugaccaugcccaauaacgagaaauucgacaagcuguacauuuggggaguucaccauccugggacggauaacgaccagaucucucucuaugcgcaggccuccggccgcauuacagugagcaccaaaagaucccaacagacagucaucccgaauauugggucucggccccgcgugagagaugugccuagccggaucuccauuuacuggaccaucgucaagcccggagacauccugcugauuaacagcaccggcaaucucaucgcuccucgcggguacuuuaagauuagaucuggaaaauccagcaucaugcggucugacgcccccauuggcaaguguaacagcgagugcaucacaccgaauggcuccaucccuaacgauaaacccuuccagaauguuaaccgcauuacguauggggcuuguccuagauacgugaagcagaauacccugaaacuugccacaggaaugcggaacgugcccgaaaagcaaacccgcggcaucuuuggggcgauugccggauucaucgagaauggcugggaagggauggucgacggaugguauggcuuuagacaccagaacucugagggcacagggcaggcugccgaucugaaaagcacccaagcugccauuaaucagaucaacggaaagcucaaucggcugaucggcaagacgaacgagaaauuccaccagauugaaaaggaguucuccgaaguggaggggagaauccaggaccuugaaaaauacguugaggauacaaagauugaccuguggagcuauaacgccgagcuccugguggcucuggaaaaucaacauaccaucgaucucaccgacucugagaugaacaaacuguuugaacgcacaaagaagcagcuucgggagaaugcggaagauaugggaaacggcugcuucaaaauuuaccacaagugugacaaugccugcaucggguccauuagaaacggcaccuaugaucaugacgucuaccgcgacgaggcucugaauaaccgguuucagaucaaaggaguggagcucaagagcggcuacaaagauuggauccuguggauuucuuucgccaucuccugcuuucuucuguguguugcccuccugggguucauuaugugggcuugccagaagggaaauaucagauguaacauuugcaucuga

SEQ ID NO: 194702 - RNA, 1701 nt, Artificial Sequence
  derived and/or modified CDS sequence (opt5) from hemagglutinin__InfluenzaA__ACO94936
augaagaccaucauugcccugagcuacauccucugccugguguucgcucagaaacuucccggcaacgacaauuccacagccacgcugugucucgggcaccaugcggucccuaacggaaccauuguuaagacaaucaccaaugaucaaauugaggugacaaacgcuaccgaacuggugcagucuagcuccacaggcgggaucugcgacucuccgcaccagauccuugauggagaggacuguacccugauugaugcccuccugggcgacccccagugcgauggguuucaaaauaaaaagugggaccuguucgucgaaagaagcaaagccuauuccaacuguuacccuuaugaugugcccgacuacgcuucucuccggagccugguugccuccagcggaacgcuugaguuuaauaacgaaucuuucgauuggaccggcgugacacagaauggcaccuccagcucuugcaagcgcagauccaacaauagcuuuuucucucggcugaacuggcucacacaucugaaguauaaauacccugcucuuaaugucaccaugcccaacaaugagaaguuugacaaacuguauaucuggggagugcaccauccugggacggauuccgaccagauuagccucuacgcccaggcguccggccgcaucacaguuucuaccaagagaagccaacagacagugauuccgaacaucgggucccggccccgcgucagagacgugagcucucggauuuccaucuacuggaccaucgugaaaccuggagauauucugcugaucaacagcaccggcaaucucauugcccccagaggguauuucaagaucagaucuggaaagagcuccauuaugcggucugacgcuccuaucggcaaauguaacagcgagugcaucacacccaauggcuccauuccgaacgauaagccuuuucagaaugucaaccgcaucacguacggggccugucccagauauguuaaacagaauacccugaaacuugcuacaggaaugcggaacgugccugaaaaacaaacccgcggcauuuucggggccaucgcgggauuuauugagaauggcugggaagggaugguggacggaugguacggcuucagacaccagaacagcgagggcacagggcaggccgcugaucugaagucuacccaagccgcuaucaaucagaucaacggaaaacucaaucggcugauuggcaagacgaacgagaaguuucaccagaucgaaaaagaguucuccgaagucgaggggcgcauucaggaccuugaaaaguauguggaggauacaaaaaucgaccuguggagcuacaaugccgagcuccugguugcccuggaaaaccaacauaccauugaucucaccgacucugagaugaacaagcuguucgaacgcacaaagaagcagcuucgggagaaugcugaagauaugggaaacggcugcuuuaagaucuaucacaaaugugacaaugcgugcauuggguccaucagaaacggcaccuacgaccaugauguguaccgcgacgaggcccugaauaaccgguuccagaucaagggagucgagcucaaaagcggcuauaaggauuggauucuguggaucuccuuugcuauuucuugcuuccuucuguguguggcccuccugggguuuaucaugugggccugccagaaaggaaauauuagauguaacaucugcaucuga

SEQ ID NO: 194703 - RNA, 1701 nt, Artificial Sequence
  derived and/or modified CDS sequence (opt5) from hemagglutinin__InfluenzaA__ACO94947
augaagaccaucauugcccugagcuacauccucugccugguguucgcucagaaacuucccggcaacgacaauuccacagccacgcugugucucgggcaccaugcggucccuaacggaaccauuguuaagacaaucaccaaugaucaaauugaggugacaaacgcuaccgaacuggugcagucuagcuccacaggcgggaucugcgacucuccgcaccagauccuugauggagagaauuguacccugauugacgcccuccugggcgauccccagugcgacggguuucaaaacaaaaagugggaucuguucgucgaaagaagcaaagccuauuccaauuguuacccuuaugacgugcccgauuacgcuucucuccggagccugguugccuccagcggaacgcuugaguuuaacaaugaaucuuucaacuggaccggcgugacacagaauggcaccuccagcgcuugcaagcgcagaucuaacaaguccuuuuucagccggcugaauuggcucacacaucugaaauuuaaguauccugcccuuaacgucaccaugcccaauaacgagaaauucgacaagcuguacaucuggggagugcaccauccugggacggauaacgaccagauuucucucuaugcgcaggccuccggccgcaucacaguuagcaccaaaagaucccaacagacagugauuccgaauaucgggucucggccccgcgucagagaugugccuagccggauuuccaucuacuggaccaucgugaagcccggagacauucugcugaucaacagcaccggcaaucucauugcuccucgcggguacuuuagaauccggucuggaaaguccagcauuaugcgcucugacgcccccaucggcaaauguaacagcgagugcaucacaccgaauggcuccauuccuaacgauaagcccuuccagaaugucaacagaaucacguauggggcuuguccucgguacguuaaacagaauacccugaaacuugccacaggaaugcgcaacgugcccgaaaaacaaaccagaggcauuuuuggggcgaucgccggauucauugagaauggcugggaagggaugguggacggaugguauggcuuucggcaccagaacucugagggcacagggcaggcugccgaucucaagagcacccaagcugccaucaaucagaucaacggaaaacugaauagacugauuggcaagacgaacgagaaguuccaccagaucgaaaaagaguucuccgaagucgaggggcgcauucaggaccuugaaaaguacguggaggauacaaaaaucgaccuguggagcuauaacgccgagcuccugguugcucuggaaaaucaacauaccauugaucucaccgacucugagaugaacaagcuguuugaacggacaaagaagcagcuuagagagaaugcggaagauaugggaaacggcugcuucaagaucuaccacaaaugugacaaugccugcauuggguccauccgcaacggcaccuaugaucaugacguguaccgggacgaggcucugaauaacagauuucagaucaagggagucgagcucaaaagcggcuacaaggauuggauucuguggaucucuuucgccauuuccugcuuucuucuguguguggcccuccugggguucaucaugugggcuugccagaaaggaaauauucgcuguaacaucugcaucuga

SEQ ID NO: 194704 - RNA, 1701 nt, Artificial Sequence
  derived and/or modified CDS sequence (opt5) from hemagglutinin__InfluenzaA__ACO95153
augaagaccaucauugcccugagcuacauccucugccugguguucgcucagaaacuucccggcaacgacaauuccacagccacgcugugucucgggcaccaugcggucccuaacggaaccauuguuaagacaaucaccaaugaucaaauugaggugacaaacgcuaccgaacuggugcagucuagcuccacaggcgggaucugcgacucuccgcaccagauccuugauggagagaauuguacccugauugacgcccuccugggcgauccccagugcgacggguuucaaaacaaaaagugggaucuguucgucgaaagaagcaaagccuauuccaauuguuacccuuaugacgugcccgauuacgcuucucuccggagccugguugccuccagcggaacgcuugaguuuaacaaugaaucuuucaacuggaccggcgugacacagaauggcaccuccagcgcuugcaagcgcagaucuaacaauuccuuuuucagccggcugaacuggcucacacaucugaaguuuaaauauccugcccuuaaugucaccaugcccaacaacgagaauuucgacaagcuguacaucuggggagugcaccauccugggacggauaacgaccagauuucucucuaugcgcaggccuccggccgcaucacaguuagcaccaaaagaucccaacagacagugauuccgaauaucgggucucggccccgcgucagagauauuagcucccggaucagcaucuacuggaccauugugaagccuggagacauccugcugauuaacucuaccggcaaucucaucgcuccccgcggguacuuuaaaauuagauccggaaagagcucuaucaugcggagcgacgccccuaucggcaaguguaacuccgagugcauuacacccaauggcucuaucccgaacgauaaaccuuuccagaaugugaaccgcauuacguauggggcuugucccagauacgucaagcagaauacccugaaacuugccacaggaaugcggaacguuccugaaacccaaacacgcggcaucuuuggggcgauugccggauucaucgagaauggcugggaagggaugguggacggaugguauggcuuuagacaccagaacagcgagggcaccgggcaggcugccgaucugaaguccacgcaagcugccaucaaucagauuaacggaaaacucaaccggcugaucggcaagacaaaugagaaauuccaccagauugaaaaggaguucagcgaaguggaggggagaauccaggaccuugaaaaguacgucgaggauaccaaaauugaccuguggucuuauaacgccgagcuccugguggcucuggaaaaucaacauaccaucgaucucacagacuccgagaugaacaagcuguuugaacgcaccaaaaagcagcuucgggagaaugcggaagauaugggaaacggcugcuucaaaauuuaccacaagugugacaaugccugcaucgggagcaucagaaacggcacauaugaucaugacguuuaccgcgacgaggcucugaauaaccgguuucagauuaagggaguggagcucaaaucuggcuacaaggauuggauccuguggauuuccuucgccaucagcugcuuucuucugugugucgcccuccugggguucauuaugugggcuugccagaaaggaaauaucagauguaacaucugcauuuga

SEQ ID NO: 194705 - RNA, 1701 nt, Artificial Sequence; identical to SEQ ID NO: 194670
  derived and/or modified CDS sequence (opt5) from hemagglutinin__InfluenzaA__ACO95171

SEQ ID NO: 194706 - RNA, 1701 nt, Artificial Sequence
  derived and/or modified CDS sequence (opt5) from hemagglutinin__InfluenzaA__ACO95193
augaagaccaucauugcccugagcuacauccucugccugguguucgcucagaaacuucccggcaacgacaaguccacagccacgcugugucucgggcaccaugcggucccuaauggaaccauuguuaaaacaaucaccaacgaucaaauugaggugacaaaugcuaccgaacuggugcagucuagcuccacaggcgggaucugcgacucuccgcaccagauccuugauggagagaacuguacccugauugacgcccuccugggcgauccccagugcgacggguuucaaaauaagaaaugggaucuguucgucgaaagaagcaaggccuauuccaacuguuacccuuaugacgugcccgauuacgcuucucuccggagccugguugccuccagcggaacgcuugaguuuaauaacgaaaauuucaacuggaccggcgugacacagaauggcaccucuuccgcuugcaagcgcagaagcaacaauuccuuuuucucucggcugaacuggcucacacaucugaaauuuaaguauccugcccuuaaugucaccaugcccaacaacgagaaauucgacaagcuguacaucuggggagugcaccauccugggacggauaaugaccagauuagccucuaugcgcaggccucuggccgcaucacaguuuccaccaaaagaagccaacagacagugauuccgaacaucgggucccggccccgcgucagagauauuucuagccggaucuccaucuacuggaccauugugaagccuggagacauccugcugauuaauagcaccggcaaccucaucgcuccccgcggguacuuuaagauuagaucuggaaaauccagcaucaugcggucugacgccccuaucggcaaguguagcuccgagugcauuacacccaauggcucuaucccgaacgauaaaccuuuccagaaugugaaccgcauuacguauggggcuugucccagauacgucaagcagaauacccugaaacuugccacaggaaugcggaacguuccugaaacccaaacacgcggcaucuuuggggcgauugccggauucaucgagaauggcugggaagggaugguggacggaugguauggcuuuagacaccagaacagcgagggcaccgggcaggcugccgaucugaaguccacgcaagcugccaucaaucagauuaacggaaaacucaaucggcugaucggcaagacaaacgagaaguuccaccagauugaaaaagaguucagcgaaguggaggggagaauccaggaccuugaaaaguacgucgaggauaccaaaauugaccuguggucuuauaacgccgagcuccugguggcucuggaaaaucaacauaccaucgaucucacagacuccgagaugaacaagcuguuugaacgcaccaaaaagcagcuucgggagaaugcggaagauaugggaaacggcugcuucaagauuuaccacaaaugugacaaugccugcaucgggagcaucagaaacggcacauaugaucaugacguuuaccgcgacgaggcucugaauaaccgguuucagauuaagggaguggagcucaaaucuggcuacaaggauuggauccuguggauuuccuucgccaucagcugcuuucuucugugugucgcccuccugggguucauuaugugggcuugccagaaaggaaauaucagauguaacaucugcauuuga

SEQ ID NO: 194707 - RNA, 1701 nt, Artificial Sequence; identical to SEQ ID NO: 194669
  derived and/or modified CDS sequence (opt5) from hemagglutinin__InfluenzaA__ACO95204

SEQ ID NO: 194708 - RNA, 1701 nt, Artificial Sequence
  derived and/or modified CDS sequence (opt5) from hemagglutinin__InfluenzaA__ACO95215
augaagaccaucauugcccugagcuacauccucugccugguguucgcucagaaacuucccggcaacgacaauuccacagccacgcugugucucgggcaccaugcggucccuaacggaaccauuguuaagacaaucaccaaugaucaaauugaggugacaaacgcuaccgaacuggugcagucuagcuccacaggcgggaucugcgacucuccgcaccagauccuugauggagagaauuguacccugauugacgcccuccugggcgauccccagugcgacggguuucaaaacaaaaagugggaucuguucgucgaaagaagcaaagccuauuccaauuguuacccuuaugacgugcccgauuacgcuucucuccggagccugaucgccuccagcggaacgcuugaguuuaacaaugaaucuuucaacuggaccggcguuacacagaauggcaccuccagcgcuugcaagcgcagaucuaacaauuccuuuuucagccggcugaacuggcucacacaucugaaguuuaaauauccugcccuuaaugugaccaugcccaacaacgagaaguucgacaaacuguacauuuggggaguccaccauccugggacggauaaugaccagaucucucucuaugcgcaggccuccggccgcauuacagugagcaccaagagaucccaacagacaguuaucccgaacauugggucucggccccgcgugagagauaucagcucccggaucagcauuuacuggaccaucgucaaaccuggagacauucugcugaucaauucuaccggcaaccucauugcuccccgcggguacuuuaagaucagauccggaaagagcucuaucaugcggagcgacgccccuauuggcaaauguaauuccgagugcaucacacccaacggcucuauuccgaaugauaagccuuuccagaacgugaaucgcaucacguauggggcuugucccagauacgugaaacagaacacccugaaacuugccacaggaaugcggaaugucccugaaacccaaacacgcggcauuuuuggggcgaucgccggauucaucgagaacggcugggaagggaugguugacggaugguauggcuuuagacaccagaauagcgagggcaccgggcaggcugccgaucugaaguccacgcaagcugccauuaaccagaucaauggaaagcucaaccggcugauuggcaaaacaaacgagaaguuccaccagaucgaaaaggaguucagcgaaguggaggggcgcauucaggaccuugaaaaauacguggaggauaccaagaucgaccuguggucuuauaaugccgagcuccuggucgcucuggaaaaccaacauaccauugaucucacagacuccgagaugaauaaacuguuugaaagaaccaagaaacagcuucgggagaacgcggaagauaugggaaauggcugcuucaagaucuaccacaagugugacaacgccugcaucgggagcauuagaaaugagacauaugaucaugacguguaccgcgacgaggcucugaacaaucgguuucagaucaaaucuguugaacucaaguccggcuacaaagauuggauucuguggaucagcuucgccauuuccugcuuucuucuguguguggcccuccugggauucaucaugugggcuugccagaagggcaacaucagauguaauauuugcaucuga

SEQ ID NO: 194709 - RNA, 1701 nt, Artificial Sequence; identical to SEQ ID NO: 192353
  derived and/or modified CDS sequence (opt5) from hemagglutinin__InfluenzaA__ACO95226

SEQ ID NO: 194710 - RNA, 1701 nt, Artificial Sequence; identical to SEQ ID NO: 192702
  derived and/or modified CDS sequence (opt5) from hemagglutinin__InfluenzaA__ACO95248

SEQ ID NO: 194711 - RNA, 1701 nt, Artificial Sequence
  derived and/or modified CDS sequence (opt5) from hemagglutinin__InfluenzaA__ACO95270
augaagaccaucauugcccugagcuacauccucugccugguguucacacagaaacuucccggcaacgacaauuccacggcuacccugugucucgggcaccaugccgucccuaacggaacaauuguuaagaccaucacaaaugaucaaauugaggugaccaacgcgacagaacuggugcagucuagcuccaccggcgagaucugcgacucuccgcaccagauccuugauggggaaaauuguacgcugauugacgcucuccugggagauccccagugcgacggcuuucaaaacaaaaagugggaucuguucgucgagagaagcaaagccuauuccaauuguuacccuuaugacgugcccgauuacgccucucuccggagccugguugcuuccagcgggacccuugaauuuaacaaugagucuuucaacuggacaggagugacccagaauggcacauccagcgccugcauccgcagaucuaacaauuccuuuuucagccggcugaacuggcucacccaucugaaguuuaaguauccugcucuuaaugucacgaugcccaacaacgagaaauucgacaagcuguacauuuggggcgugcaccauccuguuacagauaauaaccagaucuuucucuaugcccaggcgucugggcgcauuaccguguccacaaaaagaagccaacagaccgucaucccgaauauuggaucccggccccgcgugagaaacaucccuucucggaucagcauuuacuggaccaucgugaagcccggcgacauucugcugaucaauuccacagggaaccucauugccccucgcggauacuucaaaaucagaagcggcaagucuuccaucaugcggagcgaugcucccauugggaaguguaauucugaaugcaucacgccgaacggaagcauuccuaaugacaaacccuuucagaacgucaaucgcaucaccuauggcgccuguccuagauacguuaagcagaacacacugaaacuugcuaccggcaugcggaaugugcccgagaagcaaacacgcgggauuuucggagccaucgcgggcuuuaucgaaaacgggugggagggaaugguggacggcugguauggguucagacaccaaaauuccgagggaauuggccaggccgcugaucugaaaucuacccaggccgcuaucgaccagauuaacggcaagcucaaccggcugaucgggaaaacgaaugaaaaguuccaccagauugagaaggaauuuagcgaggucgaaggaagaauccaggaucuugagaaauacguggaggacacaaagauugaucugugguccuauaacgccgaacuccugguugcccuggagaaucaacauaccaucgaccucaccgauagcgaaaugaacaaacuguucgagaagaccaaaaagcagcuucgcgaaaaugcugaggacaugggcaacgggugcuuuaagaucuaccacaaaugugauaaugcgugcauuggaucuauccggaacggcacauaugaccaugauguguacagagacgaggcccugaauaaccgcuuccagauuaagggggucgaacucaaauccggcuacaaggacuggauccuguggauuagcuuugcuaucucuugcuuccuucuguguguggcccuccugggauuuaucaugugggccugccagaaaggcaauauucgguguaacaucugcauuuga

SEQ ID NO: 194712 - RNA, 1701 nt, Artificial Sequence; identical to SEQ ID NO: 194506
  derived and/or modified CDS sequence (opt5) from hemagglutinin__InfluenzaA__ACO95281

SEQ ID NO: 194713 - RNA, 1701 nt, Artificial Sequence
  derived and/or modified CDS sequence (opt5) from hemagglutinin__InfluenzaA__ACO95292
augaagaccaucauugcccugagcuacauccucugccugguguucgcucagaaacuucccggcaacgacaauuccacagccacgcugugucucgggcaccaugcggucccuaacggaaccauuguuaagacaaucaccaaugaucaaauugaggugacaaacgcuaccgaacuggugcagucuagcuccacaggcgagaucugcgacucuccgcaccagauccuugauggggaaaauuguacccugauugacgcccuccugggagauccccagugcgacggcuuucaaaacaaaaagugggaucuguucgucgagagaagcaaagccuauuccaauuguuacccuuaugacgugcccgauuacgcuucucuccggagccugguugccuccagcgggacgcuugaauuuaacaaugagucuuucaacuggaccggagugacacagaauggcaccuccagcgcuugcauccgcagaucuaacaauuccuuuuucagccggcugaacuggcucacacaucugaaguuuaaguauccugcccuuaaugucaccaugcccaacaacgagcaguucgacaaacuguacauuuggggcgugcaccauccugggacggauaaugaccagaucuuucucuaugcgcaagccucuggacgcauuacaguuuccaccaagagaagccagcagacagugaucccgaacauuggcucccggccccgcgucagaaauaucccuucucggaucagcauuuacuggaccaucgugaaacccggggauauucugcugaucaacuccaccggaaaucucauugcuccucgcggcuacuucaagauccagagcgggaaaucuuccaucaugagaagcgacgcccccauuggaaaguguaacucugaaugcaucacaccgaauggcagcauuccuaacgacaagcccuuucaaaaugugaaccggaucacguauggcgcuuguccucgcuacgucaaacagaauacccugaaacuugccacagggaugagaaacguucccgagaagcagacccggggaauuuucggcgcgaucgccggguuuaucgaaaauggaugggagggcaugguggaugggugguauggauuccgccaccaaaacuccgagggcagaggccaggcugccgaccugaagucuacacaggcugccauugaucagaucaaugggaaacucaaccggcugauuggaaagaccaacgaaaaauuccaccaaaucgagaaggaauuuagcgagguggaaggccgcauucaggaccuugagaaguacgucgaggauacgaaaaucgaccugugguccuauaaugccgaacuccugguggcucuggagaaccagcauacaauugaucucaccgacagcgaaaugaauaagcuguucgagaaaaccaagaaacagcuuagagaaaacgcggaggauauggggaauggaugcuuuaagaucuaccacaagugugacaacgccugcaucggcucuauucggaaugggacauaugaucaugacguuuacagagacgaggcucugaacaaucgcuuccaaaucaaaggcguggaacucaaguccggauacaaagauuggauucuguggaucagcuuugccauuucuugcuuccuucugugugucgcccuccugggcuuuaucaugugggcuugccagaaggggaacauccgguguaauauuugcaucuga

SEQ ID NO: 194714 - RNA, 1701 nt, Artificial Sequence; identical to SEQ ID NO: 194609
  derived and/or modified CDS sequence (opt5) from hemagglutinin__InfluenzaA__ACO95303

SEQ ID NO: 194715 - RNA, 1698 nt, Artificial Sequence
  derived and/or modified CDS sequence (opt5) from hemagglutinin__InfluenzaA__ACO95382
augaaggugaaacugcucguccugcuuugcaccuucacagccacguacgcugacaccaucuguauuggcuaucacgccaacaauagcacagauaccguugacacagugcuggagaagaacgugaccgucacacauuccgugaaucuccuggaaaacucucacaaugggaaacuuugccugcucaagggaaucgcgccccugcagcugggcaacuguagcguugcuggguggauucucggaaauccugagugcgaacugcuuaucuccaaagagucuuggagcuacauuguggaaaagccgaaccccgagaauggcaccuguuauccugggcauuuugccgauuacgaggaacugagagagcaacucuccucugucagcuccuucgaacgguuugagaucuuccccaaggagggaagcuggccuaaccacacggugaccggcguuucugccuccugcagccauaauggcgaaucuuccuuuuaucgcaaccugcuuuggcugacagggaaaaauggacucuaccccaaccugagcaagucuuaugcuaauaacaaagagaaggaagugcugguccucuggggcgugcaccacccuccgaacaucggggaccagaaagcccuguaccauaccgagaaugcuuacguguccgucguuagcucccacuauucuagaaaguucacacccgaaauugccaagcggccuaaagugcgcgaucaggagggaagaaucaacuacuauuggacccuucuggagcccggcgacacgauuaucuuugaagcgaaugggaaccucauugccccucgguacgcuuucgcccugagccgcggauuuggcuccggcaucauuaauagcaacgcucccauggauaagugugacgccaaaugccagacaccgcaaggggcgaucaauucuucccuuccuuuccagaacgugcaucccgucaccaucggagaguguccuaaguaugugagaagcgccaaacugcggaugguuacaggccuccgcaauauucccucuauccagagcagagggcuguuuggagcuauugccggcuucaucgaagggggauggaccggcaugguggauggcugguacggguaucaccaccagaacgagcaaggauccggcuacgcugccgaccagaagucuacccagaaugccauuaacgggaucacaaauaaagucaacagcgugaucgaaaagaugaauacgcaguuuaccgcuguuggaaaggaguucaacaaacuggagcggcgcauggaaaaccucaauaagaaaguggaugacggcuucauugauaucuggacauacaacgcggagcugcuuguccugcucgaaaaugagagaacccuggacuuucaugacuccaacgugaagaaucuuuaugaaaaagucaagagccaacugaagaacaaugccaaagagauugggaacggcugcuucgaguuuuaccacaaguguaaugaugaaugcauggagucugugaaaaacggaacauaugacuaccccaaguauuccgaagagagcaaacucaaucgggagaagaucgauggcguuaagcuggaaucuauggggguguaccagauucuggcuaucuauuccaccgucgccagcucccucgugcugcuuguuucucugggagccaucagcuucuggaugugcuccaacggcucucuccagugucgcauuugcaucuga

SEQ ID NO: 194716 - RNA, 1698 nt, Artificial Sequence
  derived and/or modified CDS sequence (opt5) from hemagglutinin__InfluenzaA__ACO95415
augaaggugaaacugcucguccugcuuugcaccuucacagccacguacgcugacaccaucuguauuggcuaucacgccaacaauagcacagauaccaucgacacaguucuggagaagaacgugaccgugacacauuccgucaaucuccuggaaaacucucacaaugggaaacuuugccugcucaagggaauugcgccccugcagcugggcaacuguagcguggcuggguggauccucggaaauccugagugcgaacugcuuauuuccaaagagucuuggagcuacaucguugaaaagccgaaccccgagaauggcaccuguuauccugggcauuuugccgauuacgaggaacugagagagcaacucuccucugugagcuccuucgaacgguuugagaucuuccccaaggagagcucuuggccuaaccacacggucaccggaguguccgccagcugcucucauaauggcgaauccagcuuuuaucgcaaccugcuuuggcugacaggcaaaaaugggcucuaccccaaccugucuaaguccuaugcuaauaacaaaggaaaggagguucuggugcucuggggcguccaccacccuccgaacauuggggaccagaauacccuguaccauacagaaaacgccuacgugagcguggucuccucucacuauagcagaaaauucacccccgagaucgcuaagcggccuaagguucgcgaucaggaaggaagaauuaauuacuauuggacgcuucuggagcccggcgacacaaucauuuuugaggccaacgggaaucucaucgcgccucgguacgccuucgcucugucccgcggauuuggcagcggcauuaucaacucuaaugcccccauggauaaaugugacgcuaagugccagaccccgcaaggggccaucaacuccagccuuccuuuccagaaugugcaucccgugacaauuggagaauguccuaaauaugucagaucugcgaagcugcggauggugaccggccuccgcaacauccccagcauucaguccagagggcuguuuggagccaucgcuggcuucauugaagggggauggaccggcaugguugauggcugguacggguaucaccaccagaaugaacaaggaucuggcuacgccgcugaccagaaaagcacacagaacgccaucaaugggaucacgaacaaggucaauuccgugauugagaaaaugaacacccaguuuacagccgugggaaaggaguucaacaagcuggagcggcgcauggagaaucucaacaaaaagguugaugacggcuucaucgauauuuggaccuacaaugcugaacugcuugugcugcucgagaacgaaagaacacuggacuuucaugacagcaaugucaaaaaccuuuaugagaaggugaaaucucaacugaagaauaacgcgaaggaaaucgggaauggcugcuucgaguuuuaccacaaauguaacgaugagugcauggaauccgucaagaauggaaccuaugacuaccccaaauauagcgaggaaucuaagcucaaccgggagaaaauugauggcgugaagcuggaguccauggggguuuaccagauccuggccaucuauagcacgguggcuuccucucucguccugcuugugagccugggagccauuuccuucuggaugugcucuaauggcagccuccagugucgcaucugcauuuga

SEQ ID NO: 194717 - RNA, 1701 nt, Artificial Sequence
  derived and/or modified CDS sequence (opt5) from hemagglutinin__InfluenzaA__ACO95426
augaagaccaucauugcccugagcuacauccucugccugguguucgcucagaaacuucccggcaacgacaauuccacagccacgcugugucucgggcaccaugcggucccuaacggaaccauuguuaagacaaucaccaaugaucaaauugaggugacaaacgcuaccgaacuggugcagucuagcuccacaggcgggaucugcgacucuccgcaccagauccuugauggagagaauuguacccugauugacgcccuccugggcgauccccagugcgacggguuucaaaacaaaaagugggaucuguucgucgaaagaagcaaagccuauuccaauuguuacccuuaugacgugcccgauuacgcuucucuccggagccugguugccuccagcggaacgcuugaguuuaacaaugaaucuuucgacuggaccggcgugacacagaacggcaccuccagcucuugcaagcgcagauccaauaacagcuuuuucucucggcugaauuggcucacacaucugaaguauaaauacccugcucuuaacgucaccaugcccaauaacgagaaguuugauaaacuguauaucuggggagugcaccauccugggacggacuccgaucagauuagccucuacgcccaggcguccggccgcaucacaguuucuaccaagagaagccaacagacagugauuccgaacaucgggucccggccccgcgucagagacgugagcucucggauuuccaucuacuggaccaucgugaaaccuggagacauucugcugaucaauagcaccggcaaccucauugcccccagaggguauuucaagaucagaucuggaaagagcuccauuaugcggucugaugcuccuaucggcaaauguaauagcgagugcaucacacccaacggcuccauuccgaaugacaagccuuuucagaacgucaaucgcaucacguacggggccugucccagauauguuaaacagaacacccugaaacuugcuacaggaaugcggaaugugccugaaaaacaaacccgcggcauuuucggggccaucgcgggauuuauugagaacggcugggaagggaugguggauggaugguacggcuucagacaccagaauagcgagggcacagggcaggccgcugaccugaagucuacccaagccgcuaucaaccagaucaauggaaaacucaaccggcugauuggcaagacgaaugagaaguuucaccagaucgaaaaagaguucuccgaagucgaggggcgcauucaggaucuugaaaaguauguggaggacacaaaaaucgaucuguggagcuacaacgccgagcuccugguugcccuggaaaaccaacauaccauugaccucaccgauucugagaugaauaagcuguucgaacgcacaaagaagcagcuucgggagaacgcugaagacaugggaaauggcugcuuuaagaucuaucacaaaugugauaacgcgugcauuggguccaucagaaauggcaccuacgaccaugacguguaccgcgaugaggcccugaacaaucgguuccagaucaagggagucgagcucaaaagcggcuauaaggacuggauucuguggaucuccuuugcuauuucuugcuuccuucuguguguggcccuccugggguuuaucaugugggccugccagaaaggaaacauuagauguaauaucugcaucuga

SEQ ID NO: 194718 - RNA, 1701 nt, Artificial Sequence; identical to SEQ ID NO: 193867
  derived and/or modified CDS sequence (opt5) from hemagglutinin__InfluenzaA__ACO95437

SEQ ID NO: 194719 - RNA, 1701 nt, Artificial Sequence
  derived and/or modified CDS sequence (opt5) from hemagglutinin__InfluenzaA__ACO95448
augaagaccaucauugcccugagcuacauccucugccugguguucgcucagaaacuucccggcaacgacaauuccacagccacgcugugucucgggcaccaugcggucccuaacggaaccauuguuaagacaaucaccaaugaucaaauugaggugacaaacgcuaccgaacuggugcagucuagcuccacaggcgggaucugcgacucuccgcaccagauccuugauggagagaauuguacccugauugacgcccuccugggcgauccccagugcgacggguuucaaaacaaaaagugggaucuguucgucgaaagaagcaaagccuauuccaauuguuacccuuaugacgugcccgauuacgcuucucuccggagccugaucgccuccagcggaacgcuugaguuuaacaaugaaucuuucaacuggaccggcguuacacagaauggcaccuccagcgcuugcaagcgcagaucuaacaauuccuuuuucagccggcugaacuggcucacacaucugaaguuuaaauauccugcccuuaaugugaccaugcccaacaacgaggaguucgacaagcuguacauuuggggaguccaccauccugggacggauaaugaccagaucaaccucuaugcgcaggccucuggccgcauuacaguguccaccaaaagaagccaacagacaguuaucccgaauauugggucccggccccgcgugagagauaucccuucucggaucagcauuuacuggaccaucgucaagcccggagacauucugcugaucaacuccaccggcaaucucauugcuccucgcggguacuuuaaaaucagaagcggaaagucuuccaucaugcggagcgacgcccccauuggcaaguguaacucugaaugcaucacaccgaauggcagcauuccuaacgauaaacccuuccagaaugugaaccgcaucacguauggggcuuguccuagauacgugaagcagaauacccugaaacuugccacaggaaugcggaacguccccgagaagcaaacccgcggcauuuuuggggcgaucgccggauucaucgaaaauggcugggaggggaugguugacggaugguauggcuuuagacaccagaacuccgagggcauugggcaggcugccgaucugaaaucuacacaagcugccaucgaccagauuaauggaaagcucaaccggcugaucggcaaaaccaacgaaaaguuccaccagauugagaaggaguucagcgaaguggaagggagaauccaggaucuugagaaauacguggaggacacgaagauugaucugugguccuauaaugccgaacuccuggucgcucuggagaaccaacauacaaucgaccucaccgauagcgaaaugaauaaacuguuugagcgcaccaagaaacagcuucgggaaaacgcggaggacaugggaaauggcugcuucaagaucuaccacaagugugauaacgccugcauugggucuaucagaaauggcacauaugaccaugacguguaccgcgaugaggcucugaacaaucgguuucagauuaaaggaguugaacucaaguccggcuacaaagacuggauccuguggauuagcuucgccaucucuugcuuucuucuguguguggcccuccugggguucaucaugugggcuugccagaagggaaacauuagauguaauaucugcauuuga

SEQ ID NO: 194720 - RNA, 1701 nt, Artificial Sequence; identical to SEQ ID NO: 192702
  derived and/or modified CDS sequence (opt5) from hemagglutinin__InfluenzaA__ACO95459

SEQ ID NO: 194721 - RNA, 1701 nt, Artificial Sequence
  derived and/or modified CDS sequence (opt5) from hemagglutinin__InfluenzaA__ACO95470
augaagaccaucauugcccugagcuacauccucugccugguguucgcucagaaacuucccggcaacgacaauuccacagccacgcugugucucgggcaccaugcggucccuaacggaaccauuguuaagacaaucaccaaugaucaaauugaggugacaaacgcuaccgaacuggugcagucuagcuccacaggcgggaucugcgacucuccgcaccagauccuugauggagagaauuguacccugauugacgcccuccugggcgauccccagugcgacggguuucaaaacaaaaagugggaucuguucgucgaaagaagcaaagccuauuccaauuguuacccuuaugacgugcccgauuacgcuucucuccggagccugguugccuccagcggaacgcuugaguuuaacaaugaaucuuucaacuggaccggcgugacacagaauggcaccuccagcgcuugcaagcgcagaucuaacaauuccuuuuucagccggcugaacuggcucacacaucugaaguuuaaauauccugcccuuaaugucaccaugcccaacaacgagaaguucgacaaacuguacaucuggggagugcaccauccugggacggauaaugaccagauuuuucucuaugcgcaggccucuggccgcaucacaguuuccaccaagagaagccaacagacagugauuccgaacaucgggucccggccccgcgucagaaauauuccuucucggaucagcaucuacuggaccauugugaaacccggagauauccugcugauuaacuccaccggcaaucucaucgcuccucgcggguacuucaagauuagaagcggaaagucuuccaucaugcggagcgacgcccccaucggccgcuguaacucugagugcauuacaccgaauggcagcaucccuaacgacaaacccuuucagaaugugaacagaauuacguauggggcuuguccucgguacgucaagcagaauacccugaaacuugccacaggaaugcgcaacguucccgaaaagcaaaccagaggcaucuucggggcgauugccggauuuaucgagaauggcugggaagggaugguggauggaugguauggcuuccggcaccagaacuccgagggcaucgggcaggcugccgaccugaaaucuacacaagcugccauuaaucagaucaacggaaagcucaacagacugauuggcaaaaccaaugagaaguuccaccagaucgaaaaggaguuuagcgaaguggaggggcgcauucaggaucuugaaaaauacgucgaggacacgaagaucgaucugugguccuauaacgccgagcuccugguggcucuggaaaaucaacauacaauugaccucaccgauagcgagaugaacaaacuguucgaacggaccaagaaacagcuuagagagaaugcggaagacaugggaaacggcugcuuuaagaucuaccacaagugugauaaugccugcaucgggucuauucgcaacggcacauaugaccaugauguuuaccgggacgaggcucugaauaacagauuccagaucaaaggaguggagcucaaguccggcuacaaagacuggauucuguggaucagcuuugccauuucuugcuuccuucugugugucgcccuccugggguuuaucaugugggcuugccagaagggaaauauccgcuguaacauuugcaucuga

SEQ ID NO: 194722 - RNA, 1701 nt, Artificial Sequence
  derived and/or modified CDS sequence (opt5) from hemagglutinin__InfluenzaA__ACO95481
augaagaccaucauugcccugagcuacauccucugccugguguucgcucagaaacuucccggcaacgacaauuccacagccacgcugugucucgggcaccaugcggucccuaacggaaccauuguuaagacaaucaccaaugaucaaauugaggugacaaacgcuaccgaacuggugcagucuagcuccacaggcgggaucugcgacucuccgcaccagauccuugauggagagaauuguacccugauugacgcccuccugggcgauccccagugcgacggguuucaaaacaaaaagugggaucuguucgucgaaagaagcaaagccuauuccaauuguuacccuuaugacgugcccgauuacgcuucucuccggagccugguugccuccagcggaacgcuugaguuuaacaaugaaucuuucaacuggaccggcgugacacagaauggcaccuccagcgcuugcaagcgcagaucuaacaauuccuuuuucagccggcugaacuggcucacacaucugaaguuuaaauauccugcccuuaaugucaccaugcccaacaacgagaaguucgacaaacuguacaucuggggagugcaccauccugggacggauaaugaccagauuuuucucuaugcgcaggccucuggccgcaucacaguuuccaccaagagaagccaacagacagugauuccgaacaucgggucccggccccgcgucagaaauauuccuucucggaucagcaucuacuggaccauugugaaacccggagauauccugcugauuaacuccaccggcaaucucaucgcuccucgcggguacuucaagauuagaagcggaaagucuuccaucaugcggagcgacgcccccaucggcaaauguaacucugagugcauuacaccgaauggcagcaucccuaacgacaagcccuuucagaaugugaaccgcauuacguauggggcuuguccuagauacgucaaacagaauacccugaaacuugccacaggaaugcggaaccugcccgaaaagcaaacccgcggcaucuucggggcgauugccggauuuaucgagaauggcugggaagggaugguugauggaugguauggcuucagacaccagaacuccgagggcaucgggcaggcugccgaccucaagucuacacaagcugccauuaaucagaucaacggaaaacugaaccggcuuauuggcaagaccaaugagaaguuccaccagaucgaaaaagaguuuagcgaaguggaggggcgcauucaggaucuggaaaaguacguggaggacacgaaaaucgaucucugguccuauaacgccgagcugcuggucgcucucgaaaaucaacauacaauugaccugaccgauagcgagaugaacaaacuuuucgaaagaaccaagaagcagcugcgggagaaugcggaagacaugggaaacggcugcuuuaagaucuaccacaaaugugauaaugccugcaucgggucuauuagaaacggcacauaugaccaugauguguaccgcgacgaggcucucaauaaccgguuccagaucaagggaguugagcugaaauccggcuacaaggacuggauucuuuggaucagcuuugccauuucuugcuuccugcucuguguggcccugcugggguuuaucaugugggcuugccagaaaggaaauaucagauguaacauuugcaucuga

SEQ ID NO: 194723 - RNA, 1701 nt, Artificial Sequence; identical to SEQ ID NO: 192702
  derived and/or modified CDS sequence (opt5) from hemagglutinin__InfluenzaA__ACO95492

SEQ ID NO: 194724 - RNA, 1701 nt, Artificial Sequence; identical to SEQ ID NO: 192702
  derived and/or modified CDS sequence (opt5) from hemagglutinin__InfluenzaA__ACO95503

SEQ ID NO: 194725 - RNA, 1701 nt, Artificial Sequence; identical to SEQ ID NO: 192702
  derived and/or modified CDS sequence (opt5) from hemagglutinin__InfluenzaA__ACO95514

SEQ ID NO: 194726 - RNA, 1701 nt, Artificial Sequence; identical to SEQ ID NO: 192702
  derived and/or modified CDS sequence (opt5) from hemagglutinin__InfluenzaA__ACO95536

SEQ ID NO: 194727 - RNA, 1701 nt, Artificial Sequence; identical to SEQ ID NO: 192702
  derived and/or modified CDS sequence (opt5) from hemagglutinin__InfluenzaA__ACO95547

SEQ ID NO: 194728 - RNA, 1701 nt, Artificial Sequence
  derived and/or modified CDS sequence (opt5) from hemagglutinin__InfluenzaA__ACP41963
augaaggccauccuggugguccuccuguacaccuucgcuacagccaacgcggacacgcuuugcauuggcuaucacgcuaauaacagcaccgauacaguugacaccgugcuggagaagaaugugacagucacccauuccgugaaccuccuggaagauaagcacaaugggaaacuuuguaagcugagaggaguugcuccccuccaucugggcaaaugcaacaucgccggguggauucugggaaauccugagugugaaucucucagcacagccuccucuuggagcuacaucguggagaccuccucuagcgacaacggcacgugcuauccgggggauuuuauugacuacgaagaacugcgggagcagcuuuccagcgucucuuccuucgaacgcuuugagaucuuccccaagaccagcucuuggccuaaucacgauuccaacaagggagugacagccgcuuguccccaugccggcgcgaaaucuuuuuauaagaaucugaucuggcucguuaaaaagggcaacagcuacccuaaacuguccaagagcuauauuaaugacaaggggaaagaagugcuuguccuguggggaauccaccaccccuccaccucugccgaucaacagagccucuaccagaacgcugacgccuacguguucgugggcuccagcagauauucuaagaaauuuaagccugagauugcuauccggccgaaaguccgcgaucaggaggggagaaugaauuacuauuggacacugguugaacccggagacaagauuaccuucgaggccacgggcaaccugguggugccucgguacgcguuugccauggaacgcaacgcuggguccggaaucauuaucagcgauacacccguccaugacugcaauaccacaugucaaaccccuaaaggcgccaucaacaccucucuccccuuccagaauauucacccgaucacaauuggcaagugcccuaaguaugugaaaagcacgaagcugagacuugcuaccgggcugcggaacguucccuccauccagucucgcggacucuuuggcgccauugccggguucaucgagggaggcuggacagggaugguggacggaugguacggcuaucaucaccagaaugaacaaggcagcggguacgcugcggaucugaaauccacccagaacgccaucgacgagauuacaaauaaggucaacagcgugaucgagaaaaugaauacccaguuuacggcuguuggaaaggaguucaaccaccuugagaagagaauugaaaaucugaacaaaaagguggaugacggcuuccucgauaucuggacauacaaugccgagcugcugguccuccuggaaaacgagcggacccuugacuaucaugauucuaaugugaaaaaccuguacgagaagguccgcucccagcucaaaaacaaugccaaggaaauugggaacggauguuuugaguucuaucacaagugcgacaauaccuguauggaaagcgugaaaaacggcacauacgauuauccuaaguacucugaggaagcuaaacugaauagagaggagaucgacgggguuaaacuugaauccacccggaucuaucaaauucuggccaucuacagcacaguggcguccucucucguccuggugguuagccugggcgcuauuuccuuuuggaugugcucuaacggaagccuccagugccgcaucuguauuuga

SEQ ID NO: 194729 - RNA, 1698 nt, Artificial Sequence; identical to SEQ ID NO: 194715
  derived and/or modified CDS sequence (opt5) from hemagglutinin__InfluenzaA__ACP44192

SEQ ID NO: 194730 - RNA, 1698 nt, Artificial Sequence; identical to SEQ ID NO: 194715
  derived and/or modified CDS sequence (opt5) from hemagglutinin__InfluenzaA__ACP44203

SEQ ID NO: 194731 - RNA, 1698 nt, Artificial Sequence
  derived and/or modified CDS sequence (opt5) from hemagglutinin__InfluenzaA__ACP44225
augaaggugaaacugcucguccugcuuugcaccuucacagccacguacgcugacaccaucuguauuggcuaucacgccaacaauagcacagauaccguugacacagugcuggagaagaacgugaccgucacacauuccgugaaucuccuggaaaacucucacaaugggaaacuuugccugcucaagggaaucgcgccccugcagcugggcaacuguagcguugcuggguggauucucggaaauccugagugcggccugcuuaucuccaaagaaucuuggagcuacauuguggagaagccgaaccccgaaaaugggaccuguuauccuggacauuuugccgauuacgaggagcugagagaacaacucuccucugucagcuccuucgagcgguuugaaaucuuccccaaggagagcucuuggccuaaccacacggugaccggcguuuccgccagcugcucucauaauggcgaguccagcuuuuaucgcaaccugcuuuggcugacagggaaaaauggacucuaccccaaccugucuaaguccuaugcuaauaacaaagaaaaggaggugcugguccucuggggcgugcaccacccuccgaacaucggggaccagaaagcccuguaccauaccgaaaaugcuuacgugagcgucguuuccucucacuauagcagaaaguucacacccgagauugccaagcggccuaaagugcgcgaucaggaaggaagaaucaacuacuauuggacccuucuggagcccggcgacacgauuaucuuugaggcgaaugggaaccucauugccccucgguacgcuuucgcccugucccgcggauuuggcagcggcaucauuaauucuaacgcucccauggauaagugugacgccaaaugccagacaccgcaaggggcgaucaauuccagccuuccuuuccagaacgugcaucccgucaccaucggagaauguccuaaguaugugagaucugccaaacugcggaugguuacaggccuccgcaauauucccagcauccaguccagagggcuguuuggagcuauugccggcuucaucgaagggggauggaccggcaugguggauggcugguacggguaucaccaccagaacgaacaaggaucuggcuacgcugccgaccaaaagagcacccagaaugccauuaacgggaucacaaauaaagucaacuccgugaucgagaagaugaauacgcaguuuaccgcuguuggaaaggaguucaacaaacuggagcggcgcauggagaaccucaauaagaaaguggaugacggcuucauugauaucuggacauacaacgcggaacugcuuguccugcucgagaaugaaagaacccuggacuuucaugacagcaacgugaagaaucuuuaugagaaagucaagucucagcugaagaacaaugccaaagaaauugggaacggcugcuucgaguuuuaccacaaguguaaugaugagugcauggaauccgugaaaaacggaacauaugacuaccccaaguauagcaaagagucuaagcucaaucgggaaaagaucgauggcguuaaacuggaguccauggggguguaccagauucuggcuaucuauagcaccgucgccuccucucucgugcugcuuguuagccugggagccaucuccuucuggaugugcucuaacggcagccuccagugucgcauuugcaucuga

SEQ ID NO: 194732 - RNA, 1701 nt, Artificial Sequence
  derived and/or modified CDS sequence (opt5) from hemagglutinin__InfluenzaA__ACP44236
augaagaccaucauugcccugagcuacauccucugccugguguucgcucagaaacuucccggcaacgacaauuccacagccacgcugugucucgggcaccaugcggucccuaacggaaccauuguuaagacaaucaccaaugaucaaauugaggugacaaacgcuaccgaacuggugcagucuagcuccacaggcgggaucugcgacucuccgcaccagauccuugauggagagaauuguacccugauugacgcccuccugggcgauccccagugcgacggguuucaaaacaaaaagugggaucuguucgucgaaagaagcaaagccuauuccaauuguuacccuuaugacgugcccgauuacgcuucucuccggagccugguugccuccagcggaacgcuugaguuuaacaaugaaucuuucaacuggaccggcgugacacagaauggcaccuccagcgcuugcaagcgcagaucugacaaguccuuuuucagccggcugaacuggcucacacaucugaaauuuaaguauccugcccuuaaugucaccaugcccaacaaugagaaauucgauaagcuguacaucuggggagugcaccauccugggacggacaacgaucagauuucucucuaugcgcaggccuccggccgcaucacaguuagcaccaaaagaucccaacagacagugauuccgaacaucgggucucggccccgcgucagagacgugccuagccggauuuccaucuacuggaccaucgugaagcccggagacauucugcugaucaauagcaccggcaaccucauugcuccucgcggguacuuuaagaucagaucuggaaaauccagcauuaugcggucugaugcccccaucggcaaguguaauagcgagugcaucacaccgaacggcuccauuccuaaugacaaacccuuccagaacgucaaucgcaucacguauggggcuuguccuagauacguuaagcagaacacccugaaacuugccacaggaaugcggaaugugcccgaaaagcaaacccgcggcauuuuuggggcgaucgccggauucauugagaacggcugggaagggaugguggauggaugguauggcuuuagacaccaaaauucugagggcacagggcaggcugccgaccugaaaagcacccaggcugccaucaaccagaucaauggaaagcucaaccggcugauuggcaagacgaaugagaaauuccaccagaucgaaaaggaguucuccgaagucgaggggcgcauucaggaucuugaaaaauacguggaggacacaaagaucgaucuguggagcuauaacgccgagcuccugguugcucuggaaaaccaacauaccauugaccucaccgauucugagaugaauaaacuguuugaaagaacaaagaagcagcuucgggagaacgcggaagacaugggaaauggcugcuucaaaaucuaccacaagugugauaacgccugcauuggguccaucagaaauggcaccuaugaccaugacguguaccgcgaugaggcucugaacaaucgguuucagaucaaaggagucgagcucaagagcggcuacaaagacuggauucuguggaucucuuucgccauuuccugcuuucuucuguguguggcccuccugggguucaucaugugggcuugccagaagggaaacauuagauguaauaucugcaucuga

SEQ ID NO: 194733 - RNA, 1701 nt, Artificial Sequence; identical to SEQ ID NO: 194669
  derived and/or modified CDS sequence (opt5) from hemagglutinin__InfluenzaA__ACP44247

SEQ ID NO: 194734 - RNA, 1701 nt, Artificial Sequence; identical to SEQ ID NO: 192702
  derived and/or modified CDS sequence (opt5) from hemagglutinin__InfluenzaA__ACP44258

SEQ ID NO: 194735 - RNA, 1701 nt, Artificial Sequence; identical to SEQ ID NO: 192702
  derived and/or modified CDS sequence (opt5) from hemagglutinin__InfluenzaA__ACP44269

SEQ ID NO: 194736 - RNA, 1701 nt, Artificial Sequence; identical to SEQ ID NO: 194728
  derived and/or modified CDS sequence (opt5) from hemagglutinin__InfluenzaA__ACQ44554

SEQ ID NO: 194737 - RNA, 1701 nt, Artificial Sequence; identical to SEQ ID NO: 194728
  derived and/or modified CDS sequence (opt5) from hemagglutinin__InfluenzaA__ACQ44556

SEQ ID NO: 194738 - RNA, 1701 nt, Artificial Sequence; identical to SEQ ID NO: 194728
  derived and/or modified CDS sequence (opt5) from hemagglutinin__InfluenzaA__ACQ45338

SEQ ID NO: 194739 - RNA, 1701 nt, Artificial Sequence
  derived and/or modified CDS sequence (opt5) from hemagglutinin__InfluenzaA__ACQ55359
augaaggccauccuggugguccuccuguacaccuucgcuacagccaacgcggacacgcuuugcauuggcuaucacgcuaauaacagcaccgauacaguugacaccgugcuggagaagaaugugacagucacccauuccgugaaccuccuggaagauaagcacaaugggaaacuuuguaagcugagaggaguugcuccccuccaucugggcaaaugcaacaucgccggguggauucugggaaauccugagugugaaucucucagcacagccuccucuuggagcuacaucguggagaccccguccucugacaacggcacgugcuaucccggggauuuuauugacuacgaagaacugcgggagcagcuuagcuccgucagcucuuucgaacgcuuugagaucuucccuaagaccuccagcuggcccaaucacgauucuaacaagggagugacagccgcuuguccucaugccggcgcgaaauccuuuuauaagaaucugaucuggcucguuaaaaagggcaacagcuaccccaaacugucuaaguccuauauuaaugacaaggggaaagaagugcuuguccuguggggaauccaccacccuagcaccuccgccgaucaacagucucucuaccagaacgcugacgccuacguguucgugggcagcuccagauauagcaagaaauuuaagccggagauugcuauccggcccaaaguccgcgaucaggaggggagaaugaauuacuauuggacacugguugaaccuggagacaagauuaccuucgaggccacgggcaaccugguggugccccgguacgcguuugccauggaacgcaacgcugggucuggaaucauuaucuccgauacaccuguccaugacugcaauaccacaugucaaacccccaaaggcgccaucaacaccagccucccguuccagaauauucacccuaucacaauuggcaagugccccaaguaugugaaaucuacgaagcugagacuugcuaccgggcugcggaacaucccuagcauucagucccgcggacucuuuggcgccaucgccggguucaucgagggaggcuggacagggaugguugacggaugguacggcuaucaucaccagaaugaacaaggcucuggguacgcugcggaucugaaaagcacccagaacgccauugacgagaucacaaauaaggugaacuccgucauugagaaaaugaauacccaguuuacggcugugggaaaggaguucaaccaccuugagaagagaaucgaaaaucugaacaaaaagguugaugacggcuuccucgauauuuggacauacaaugccgagcugcuggugcuccuggaaaacgagcggacccuugacuaucaugauagcaaugucaaaaaccuguacgagaaggugcgcucucagcucaaaaacaaugccaaggaaaucgggaacggauguuuugaguucuaucacaagugcgacaauaccuguauggaauccgucaaaaacggcacauacgauuaucccaaguacagcgaggaagcuaaacugaauagagaggagaucgacggggugaaacuugaaucuacccggauuuaucaaauccuggccauuuacuccacaguugcgagcucccucgugcuggucgugucucugggcgcuaucagcuuuuggaugugcuccaacggaucucuccagugccgcauuuguaucuga

SEQ ID NO: 194740 - RNA, 1701 nt, Artificial Sequence; identical to SEQ ID NO: 194728
  derived and/or modified CDS sequence (opt5) from hemagglutinin__InfluenzaA__ACQ55361

SEQ ID NO: 194741 - RNA, 1701 nt, Artificial Sequence
  derived and/or modified CDS sequence (opt5) from hemagglutinin__InfluenzaA__ACQ63223
augaaggccauccuggugguccuccuguacaccuucgcuacagccaacgcggacacgcuuugcauuggcuaucacgcuaauaacagcaccgauacaguugacaccgugcuggagaagaaugugacagucacccauuccgugaaccuccuggaagauaagcacaaugggaaacuuuguaagcugagaggaguugcuccccuccaucugggcaaaugcaacaucgccggguggauucugggaaauccugagugugaaucucucagcacagccuccucuuggagcuacaucguggagaccuccucuagcgacaacggcacgugcuauccgggggauuuuauugacuacgaagaacugcgggagcagcuuuccagcgucucuuccuucgaacgcuuugagaucuuccccaagaccagcucuuggccuaaucacgauuccaacaagggagugacagccgcuuguccccaugccggcgcgaaaucuuuuuauaagaaucugaucuggcucguuaaaaagggcaacagcuacccuaaacuguccaagagcuauauuaaugacaaggggaaagaagugcuuguccuguggggaauccaccaccccuccaccucugccgaucaacagagccucuaccagaacgcugacgccuacguguucgugggcacauccagauauagcaagaaauuuaagccugagauugcuauccggccgaaaguccgcgaucaggaggggagaaugaauuacuauuggacccugguugaacccggagacaagauuacguucgaggccacaggcaaccugguggugccucgguacgcguuugccauggaacgcaacgcugggucuggaaucauuaucuccgauacccccguccaugacugcaauacaaccugucaaaccccuaaaggcgccaucaacacaagccuccccuuccagaauauucacccgaucacgauuggcaagugcccuaaguaugugaaaucuaccaagcugagacuugcuacagggcugcggaacguucccagcauccagucccgcggacucuuuggcgccauugccggguucaucgagggaggcuggaccgggaugguggacggaugguacggcuaucaucaccagaaugaacaaggcucuggguacgcugcggaucugaaaagcacacagaacgccaucgacgagauuaccaauaaggucaacuccgugaucgagaaaaugaauacgcaguuuacagcuguuggaaaggaguucaaccaccuugagaagagaauugaaaaucugaacaaaaagguggaugacggcuuccucgauaucuggaccuacaaugccgagcugcugguccuccuggaaaacgagcggacccuugacuaucaugauagcaaugugaaaaaccuguacgagaagguccgcucucagcucaaaaacaaugccaaggaaauugggaacggauguuuugaguucuaucacaagugcgacaauacauguauggaauccgugaaaaacggcaccuacgauuauccuaaguacagcgaggaagcuaaacugaauagagaggagaucgacgggguuaaacuugaaucuacacggaucuaucaaauucuggccaucuacuccacgguggcgagcucccucguccuggugguuucucugggcgcuauuagcuuuuggaugugcuccaacggaucucuccagugccgcaucuguauuuga

SEQ ID NO: 194742 - RNA, 1701 nt, Artificial Sequence; identical to SEQ ID NO: 194741
  derived and/or modified CDS sequence (opt5) from hemagglutinin__InfluenzaA__ACQ63239

SEQ ID NO: 194743 - RNA, 1701 nt, Artificial Sequence; identical to SEQ ID NO: 194741
  derived and/or modified CDS sequence (opt5) from hemagglutinin__InfluenzaA__ACQ63244

SEQ ID NO: 194744 - RNA, 1701 nt, Artificial Sequence; identical to SEQ ID NO: 194741
  derived and/or modified CDS sequence (opt5) from hemagglutinin__InfluenzaA__ACQ63257

SEQ ID NO: 194745 - RNA, 1701 nt, Artificial Sequence
  derived and/or modified CDS sequence (opt5) from hemagglutinin__InfluenzaA__ACQ65691
augaagaccaucauugcccugagcuacauccucugccugguguucgcucagaaacuucccggcaacgacaauuccacagccacgcugugucucgggcaccaugcggucccuaacggaaccauuguuaagacaaucaccaaugaucaaauugaggugacaaacgcuaccgaacuggugcagucuagcuccacaggcgggaucugcgacucuccgcaccagauccuugauggagagaauuguacccugauugacgcccuccugggcgauccccagugcgacggguuucaaaacaaaaagugggaucuguucgucgaaagaagcaaagccuauuccaauuguuacccuuaugacgugcccgauuacgcuucucuccggagccugguugccuccagcggaacgcuugaguuuaacaaugaaucuuucaacuggaccggcgugacacagaauggcaccuccagcucuugcaagcgcggguccgacaacagcuuuuucucuagacugaauuggcucacacaucugaaguuuaaauauccugcucuuaacgucaccaugcccaauaacgagaaguucgauaaacuguacaucuggggagugcaccauccuggcacggacaacgaucagauuuuuccguaugcccaggcguccgggcggaucacaguuagcaccaagcgcucccaacagacagugauucccaauaucggaucuagaccucggguccgcgacauucccagcagaaucuccaucuacuggaccauugugaaaccuggcgacauccuccugauuaacagcaccgggaaucugaucgcuccccggggauacuucaagauucgcucuggcaaguccagcaucaugagaucugaugccccgaucggcaaauguaacagcgagugcauuacaccuaauggguccauccccaacgacaagccuuuucagaaugugaaccggauuacguauggagccuguccccgcuacgucaaacagaauacccucaagcuggcuacaggcaugagaaacguucccgaaaaacaaacccgggggaucuucggagccauugcgggcuuuaucgagaaugggugggaaggaaugguggauggcugguauggcuuccgccaccagaacucugaggggaucggacaggccgcugaccuuaagagcacacaagccgcuauuaaucagaucaacggcaaacugaauagacucauugggaagaccaacgagaaguuccaccagaucgaaaaagaguuuuccgaaguggagggacggauucaggaucuggaaaaguacgucgaggacacgaaaaucgaucuuuggagcuauaacgccgagcugcucguggcccuggaaaaucaacauacaauugaccugaccgauucugagaugaacaaacucuucgaaagaaccaagaagcagcugcgcgagaaugcugaagacaugggcaacgggugcuuuaagaucuaccacaaaugugauaaugcgugcaucggcuccauucggaacggaacauaugaccaugacguuuacagagaugaggcccuuaauaaccgcuuccagaucaagggcguggagcugaaaagcggguacaaggacuggauucucuggaucucuuuuaccauuuccugcuuccugcuuugugucgcucugcucggauuuaucaugugggccugccagaaaggcaauauccgguguaacauuugcaucuga

SEQ ID NO: 194746 - RNA, 1701 nt, Artificial Sequence; identical to SEQ ID NO: 194506
  derived and/or modified CDS sequence (opt5) from hemagglutinin__InfluenzaA__ACQ65713

SEQ ID NO: 194747 - RNA, 1701 nt, Artificial Sequence
  derived and/or modified CDS sequence (opt5) from hemagglutinin__InfluenzaA__ACQ65724
augaagaccaucauugcccugagcuacauccucugccugguguucgcucagaaacuucccggcaacgacaauuccacagccacgcugugucucgggcaccaugcggucccuaacggaaccauuguuaagacaaucaccaaugaucaaauugaggugacaaacgcuaccgaacuggugcagucuagcuccacaggcgagaucugcgacucuccgcaccagauccuugauggggaaaauuguacccugauugacgcccuccugggagauccccagugcgacggcuuucaaaacaaaaagugggaucuguucgucgagagaagcaaagccuauuccaauuguuacccuuaugacgugcccgauuacgcuucucuccggagccugguugccuccagcgggacgcuugaauuuaacaaugagucuuucaacugggcuggagugacccagaauggcacauccagcgccugcauccgcagaucuaacaauuccuuuuucagccggcugaacuggcucacccaucugaaguuuaaguauccugcgcuuaaugucacaaugcccaacaacgagcaguucgacaaacuguacauuuggggcgugcaccauccugggaccgauaaugaccagaucuuucucuaugcccaggcuucuggacgcauuacgguuuccacaaagagaagccaacagaccgugaucccgaacauuggcucccggccccgcgucagaaauaucccuucucggaucagcauuuacuggacaaucgugaaacccggggauauucugcugaucaacuccaccggaaaucucauugccccucgcggcuacuucaagaucagaagcgggaaaucuuccaucaugcggagcgacgcucccauuggaaaguguaacucugaaugcaucaccccgaauggcagcauuccuaacgacaagcccuuucagaaugugaaccgcaucacauauggcgccuguccuagauacgucaaacaaaauacgcugaaacuugcgaccgggaugcggaacguucccgagaagcagacacgcggaauuuucggcgccaucgcuggguuuaucgaaaauggaugggagggcaugguggaugggugguauggauucagacaccagaacuccgagggccggggccaagccgcugaccugaagucuacccaggccgccauugaucagaucaaugggaaacucaacagacugauuggaaagacaaacgaaaaauuccaccagaucgagaaggaauuuagcgagguggaaggccgcauucaagaccuugagaaguacgucgaggauaccaaaaucgaccugugguccuauaaugcugaacuccugguggcgcuggagaaccagcauacgauugaucucacagacagcgaaaugaauaagcuguucgagaaaaccaagaaacagcuucgggaaaacgccgaggauauggggaauggaugcuuuaagaucuaccacaagugugacaacgcuugcaucggcucuauuagaaaugggaccuaugaucaugacguuuaccgcgacgaggcccugaacaaucgguuccagaucaaaggcguggaacucaaguccggauacaaagauuggauucuguggaucagcuuugccauuucuugcuuccuucugugugucgcucuccugggcuuuaucaugugggccugccaaaaggggaacaucagauguaauauuugcaucuga

SEQ ID NO: 194748 - RNA, 1701 nt, Artificial Sequence
  derived and/or modified CDS sequence (opt5) from hemagglutinin__InfluenzaA__ACQ65747
augaagaccaucauugcccugagcuacauccucugccugguguucgcucagaaacuucccggcaacgacaauuccacagccacgcugugucucgggcaccaugcggucccuaacggaaccauuguuaagacaaucaccaaugaucaaauugaggugacaaacgcuaccgaacuggugcagucuagcuccacaggcgagaucugcgacucuccgcaccagauccuugauggggaaaauuguacccugauugacgcccuccugggagauccccagugcgacggcuuucaaaacaaaaagugggaucuguucgucgagagaagcaaagccuauuccaauuguuacccuuaugacgugcccgauuacgcuucucuccggagccugguugccuccagcgggacgcuugaauuuaacaaugagucuuucaacuggaccggagugacacagaauggcaccuccagcgcuugcauccgcagaacaaacaauuccuuuuucucucggcugaacuggcucacccaucugaaguuuaaguauccugcccuuaaugucacgaugcccaacaacgagaaauucgacaagcuguacauuuggggcgugcaccauccugggacagauaaugaccagaucuuucucuaugcgcaggccagcggacgcauuaccguuucuacaaaaagaucccaacagaccgugaucccgaacauuggcagccggccccgcgucagaaauaucccuucccggaucucuauuuacuggaccaucgugaagcccggggauauucugcugaucaacagcacaggaaaucucauugcuccucgcggcuacuucaaaaucagauccgggaaaagcucuaucaugcgguccgacgcccccauuggaaaguguaacagcgaaugcaucacgccgaauggcucuauuccuaacgacaaacccuuucagaaugugaaccgcaucaccuauggcgcuuguccuagauacgucaagcagaauacacugaaacuugccaccgggaugcggaacguucccgagaagcaaacacgcggaauuuucggcgcgaucgccggguuuaucgaaaauggaugggagggcaugauggaugggugguauggauucagacaccagaacagcgagggcauuggccaggcugccgaccugaaauccacccaagcugccaucgaucagauuaaugggaagcucaacggacugaucggcaaaacgaacgaaaaguuccaccagauugagaaggaauuuucugagguggaagggcggauccaggaccuugagaaauacguggaggauacaaagauugaccuguggagcuauaaugccgaacuccuggucgcucuggagaaccaacauaccaucgaucucaccgacuccgaaaugaauaaacuguucgagaagacaaagaagcagcuuagagaaaacgcggaggauaugggaaauggcugcuuuaagaucuaccacaaaugugacaacgccugcauugggagcauccgcaauggcaccuaugaucaugacguguaccgggacgaggcucugaacaauagauuccagauuaagggaguugaacucaaaucuggcuacaaggauuggauccuguggauuuccuuugccaucagcugcuuccuucuguguguggcccuccugggguuuaucaugugggcuugccagaaaggaaacauucgcuguaauaucugcauuuga

SEQ ID NO: 194749 - RNA, 1698 nt, Artificial Sequence
  derived and/or modified CDS sequence (opt5) from hemagglutinin__InfluenzaA__ACQ65758
augaaggugaaacugcucguccugcuuugcaccuucacagccacguacgcugacaccaucuguauuggcuaucacgccaacaauagcacagauaccguugacacagugcuggagaagaacgugaccgucacacauuccgugaaucuccuggaaaacucucacaaugggaaacuuugccugcucaagggaaucgcgccccugcagcugggcaacuguagcguugcuggguggauucucggaaauccugagugcgaacugcuuaucuccaaagagucuuggagcuacguggucgaaaagccgaaccccgagaauggcaccuguuauccugggcauuuugccgauuacgaggaacugagagagcaacucuccucugugagcuccuucgaacgguuugagauuuuccccaaggagagcucuuggccuaaccacacgguuaccggaguguccgccagcugcucucauaauggcgaauccagcuuuuaucgcaaccugcuuuggcugacaggcaaaaaugggcucuaccccaaccugucuaaguccuaugcuaauaacaaaggaaaggagguccuggugcucuggggcgugcaccacccuccgaacaucggggaccagaauacccuguaccauacagaaaacgccuacgucagcguuguguccucucacuauagcagaaaauucacccccgagaucgcuaagcggccuaaggugcgcgaucaggaaggaagaauuaauuacuauuggacgcuucuggagcccggcgacacaaucauuuuugaggccaacgggaaucucaucgcgccucgguacgccuucgcucugucccgcggauuuggcagcggcauuaucaacucuaaugcccccauggauaaaugugacgcuaagugccagaccccgcaaggggccauuaacuccagccuuccuuuccagaauguccaucccgugacaaucggagaauguccuaaauauguuagaucugcgaagcugcggauggugaccggccuccgcaacauccccagcauucaguccagagggcuguuuggagccaucgcuggcuucauugaagggggauggaccggcauggucgauggcugguacggguaucaccaccagaaugaacaaggaucuggcuacgccgcugaccagaaaagcacacagaacgccaucaaugggauuacgaacaagguuaauuccgugaucgagaaaaugaacacccaguuuacagccgugggaaaggaguucaacaagcuggagcggcgcauggagaaucucaacaaaaaggucgaugacggcuucaucgauauuuggaccuacaaugcugaacugcuugugcugcucgagaacgaaagaacacuggacuuucaugacagcaaugucaaaaaccuuuaugagaaggugaaaucucaacugaagaauaacgcgaaggaaaucgggaauggcugcuucgaguuuuaccacaaauguaacgaugagugcauggaauccguuaagaauggaaccuaugacuaccccaaauauagcgaggaaucuaagcucaaccgggagaaaauugauggcgugaagcuggaguccaugggggucuaccagauccuggccauuuauagcacgguggcuuccucucucguucugcuugugagccugggagccaucuccuucuggaugugcucuaauggcagccuccagugucgcaucugcauuuga

SEQ ID NO: 194750 - RNA, 1701 nt, Artificial Sequence; identical to SEQ ID NO: 194728
  derived and/or modified CDS sequence (opt5) from hemagglutinin__InfluenzaA__ACQ73386

SEQ ID NO: 194751 - RNA, 1701 nt, Artificial Sequence; identical to SEQ ID NO: 194741
  derived and/or modified CDS sequence (opt5) from hemagglutinin__InfluenzaA__ACQ73387

SEQ ID NO: 194752 - RNA, 1701 nt, Artificial Sequence
  derived and/or modified CDS sequence (opt5) from hemagglutinin__InfluenzaA__ACQ73555
augaagaccaucauugcccugagcuacauccucugccugguguucgcucagaaacuucccggcaacgacaauuccacagccacgcugugucucgggcaccaugcggucccuaacggaaccauuguuaagacaaucaccaaugaucaaauugaggugacaaacgcuaccgaacuggugcagucuagcuccacaggcgggaucugcgacucuccgcaccagauccuugauggagagaauuguacccugauugacgcccuccugggcgauccccagugcgacggguuucaaaacaaaaagugggaucuguucgucgaaagaagcaaagccuauuccaauuguuacccuuaugacgugcccgauuacgcuucucuccggagccugguugccuccagcggaacgcuugaguuuaacaaugaaucuuucaacuggaccggcgugacacagaauggcaccuccagcgcuugcaagcgcagaucuaacaauuccuuuuucagccggcugaacuggcucacacaucugaaguuuaaauauccugcccuuaaugucaccaagcccaacaacgagaaauucgacaagcuguacaucuggggagugcaccauccugggacggauaaugaccagauuuuucucuaugcgcaggccucuggccgcaucacaguuuccaccaaaagaagccaacagacagugauuccgaacaucgggucccggccccgcgucagaaauauuccuucucggaucagcaucuacuggaccauugugaagcccggagauauccugcugauuaacuccaccggcaaucucaucgcuccucgcggguacuucaagauuagaagcggaaaaucuuccaucaugcggagcgacgcccccaucggcaaguguaacucugagugcauuacaccgaauggcagcaucccuaacgacaaacccuuucagaaugugaaccgcauuacguauggggcuuguccuagauacgucaagcagaauacccugaaacuugccacaggaaugcggaacguucccgaaaagcaaacccgcggcaucuucggggcgauugccggauuuaucgagaauggcugggaagggaugguggauggaugguauggcuucagacaccagaacuccgagggcaucgggcaggcugccgaccugaaaucuacacaagcugccauuaaucagaucaacggaaagcucaaccggcugauuggcaagaccaaugagaaauuccaccagaucgaaaaggaguuuagcgaaguggaggggcgcauucaggaucuugaaaaauacgucgaggacacgaagaucgaucugugguccuauaacgccgagcuccugguggcucuggaaaaucaacauacaauugaccucaccgauagcgagaugaacaaacuguucgaaagaaccaagaagcagcuucgggagaaugcggaagacaugggaaacggcugcuuuaaaaucuaccacaagugugauaaugccugcaucgggucuauuagaaacggcacauaugaccaugauguuuaccgcgacgaggcucugaauaaccgguuccagaucaaaggaguggagcucaaguccggcuacaaagacuggauucuguggaucagcuuugccauuucuugcuuccuucugugugucgcccuccugggguuuaucaugugggcuugccagaagggaaauaucagauguaacauuugcaucuga

SEQ ID NO: 194753 - RNA, 1701 nt, Artificial Sequence; identical to SEQ ID NO: 194741
  derived and/or modified CDS sequence (opt5) from hemagglutinin__InfluenzaA__ACQ76294

SEQ ID NO: 194754 - RNA, 1701 nt, Artificial Sequence; identical to SEQ ID NO: 194741
  derived and/or modified CDS sequence (opt5) from hemagglutinin__InfluenzaA__ACQ76314

SEQ ID NO: 194755 - RNA, 1701 nt, Artificial Sequence; identical to SEQ ID NO: 194741
  derived and/or modified CDS sequence (opt5) from hemagglutinin__InfluenzaA__ACQ76317

SEQ ID NO: 194756 - RNA, 1701 nt, Artificial Sequence
  derived and/or modified CDS sequence (opt5) from hemagglutinin__InfluenzaA__ACQ76318
augaaggccauccuggugguccuccuguacaccuucgcuacagccaacgcggacacgcuuugcauuggcuaucacgcuaauaacagcaccgauacaguugacaccgugcuggagaagaaugugacagucacccauuccgugaaccuccuggaagauaagcacaaugggaaacuuuguaagcugagaggaguugcuccccuccaucugggcaaaugcaacaucgccggguggauucugggaaauccugagugugaaucucucagcacagccuccucuuggagcuacaucguggagaccccguccucugacaacggcacgugcuaucccggggauuuuauugacuacgaagaacugcgggagcagcuuagcuccgucagcucuuucgaacgcuuugagaucuucccuaagaccuccagcuggcccaaucacgauucuaacaagggagugacagccgcuuguccucaugccggcgcgaaauccuuuuauaagaaucugaucuggcucguuaaaaagggcaacagcuaccccaaacugucuaaguccuauauuaaugacaaggggaaagaagugcuuguccuguggggaauccaccacccuagcaccuccgccgaucaacagucucucuaccagaacgcugacacauacguguucgugggcagcuccagauauagcaagaaauuuaagccggagauugccauccggcccaaaguccgcgaucaggaggggagaaugaauuacuauuggacccugguugaaccuggagacaagauuacguucgaggcuacaggcaaccugguggugccccgguacgccuuugcgauggaacgcaacgccgggucuggaaucauuaucuccgauaccccuguccaugacugcaauacaaccugucaaacccccaaaggcgcuaucaacacaagccucccguuccagaauauucacccuaucacgauuggcaagugccccaaguaugugaaaucuaccaagcugagacuugccacagggcugcggaacaucccuagcauucagucccgcggacucuuuggcgcuaucgccggguucaucgagggaggcuggaccgggaugguugacggaugguacggcuaucaucaccagaaugaacaaggcucuggguacgccgcugaucugaaaagcacacagaacgcgauugacgagaucaccaauaaggugaacuccgucauugagaaaaugaauacgcaguuuacagccgugggaaaggaguucaaccaccuugagaagagaaucgaaaaucugaacaaaaagguugaugacggcuuccucgauauuuggaccuacaaugcugagcugcuggugcuccuggaaaacgagcggacccuugacuaucaugauagcaaugucaaaaaccuguacgagaaggugcgcucucagcucaaaaacaaugccaaggaaaucgggaacggauguuuugaguucuaucacaagugcgacaauacauguauggaauccgucaaaaacggcaccuacgauuaucccaaguacagcgaggaagccaaacugaauagagaggagaucgacggggugaaacuugaaucuacacggauuuaucaaauccuggcuauuuacuccacgguugccagcucccucgugcuggucgugucucugggcgcgaucagcuuuuggaugugcuccaacggaucucuccagugccgcauuuguaucuga

SEQ ID NO: 194757 - RNA, 1701 nt, Artificial Sequence; identical to SEQ ID NO: 194728
  derived and/or modified CDS sequence (opt5) from hemagglutinin__InfluenzaA__ACQ76326

SEQ ID NO: 194758 - RNA, 1701 nt, Artificial Sequence; identical to SEQ ID NO: 194728
  derived and/or modified CDS sequence (opt5) from hemagglutinin__InfluenzaA__ACQ76336

SEQ ID NO: 194759 - RNA, 1701 nt, Artificial Sequence; identical to SEQ ID NO: 194728
  derived and/or modified CDS sequence (opt5) from hemagglutinin__InfluenzaA__ACQ76347

SEQ ID NO: 194760 - RNA, 1701 nt, Artificial Sequence; identical to SEQ ID NO: 194741
  derived and/or modified CDS sequence (opt5) from hemagglutinin__InfluenzaA__ACQ76365

SEQ ID NO: 194761 - RNA, 1701 nt, Artificial Sequence; identical to SEQ ID NO: 194741
  derived and/or modified CDS sequence (opt5) from hemagglutinin__InfluenzaA__ACQ76370

SEQ ID NO: 194762 - RNA, 1701 nt, Artificial Sequence; identical to SEQ ID NO: 194728
  derived and/or modified CDS sequence (opt5) from hemagglutinin__InfluenzaA__ACQ76376

SEQ ID NO: 194763 - RNA, 1701 nt, Artificial Sequence
  derived and/or modified CDS sequence (opt5) from hemagglutinin__InfluenzaA__ACQ76383
augaaggccauccuggugguccuccuguacaccuucgcuacagccaacgcggacacgcuuugcauuggcuaucacgcuaauaacagcaccgauacaguugacaccgugcuggagaagaaugugacagucacccauuccgugaaccuccuggaagauaagcacaaugggaaacuuuguaagcugagaggaguugcuccccuccaucugggcaaaugcaacaucgccggguggauucugggaaauccugagugugaaucucucagcacagccuccucuuggagcuacaucguggagaccuccucuagcgacaacggcacgugcuauccgggggauuuuauugacuacgaagaacugcgggagcagcuuuccagcgucucuuccuucgaacgcuuugagaucuuccccaagaccagcucuuggccuaaucacgauuccaacaagggaaucacagccgcuuguccccaugccggcgcgaaaucuuuuuauaagaaucugauuuggcucgugaaaaagggcaacagcuacccuaaacuguccaagagcuauaucaaugacaaggggaaagaaguucuugugcuguggggcauucaccaccccuccaccucugccgaucaacagagccucuaccagaacgcugacgccuacgucuucgugggauccagcagauauucuaagaaauuuaagccugagaucgcuauucggccgaaagugcgcgaucaggaggggagaaugaauuacuauuggacacuggucgaacccggagacaagaucaccuucgaggccacgggcaaccugguugugccucgguacgcguuugccauggaacgcaacgcuggguccggaauuaucaucagcgauacacccgugcaugacugcaauaccacaugucaaaccccuaaaggcgccauuaacaccucucuccccuuccagaauauccacccgauuacaaucggcaagugcccuaaguaugucaaaagcacgaagcugagacuugcuaccgggcugcggaacgugcccuccauucagucucgcggacucuuuggcgccaucgccggguucaucgagggaggcuggacagggaugguugacggaugguacggcuaucaucaccagaaugaacaaggcagcggguacgcugcggaucugaaauccacccagaacgccauugacgagaucacaaauaaggugaacagcgucauugagaaaaugaauacccaguuuacggcugugggaaaggaguucaaccaccuugagaagagaaucgaaaaucugaacaaaaagguugaugacggcuuccucgauauuuggacauacaaugccgagcugcuggugcuccuggaaaacgagcggacccuugacuaucaugauucuaaugucaaaaaccuguacgagaaggugcgcucccagcucaaaaacaaugccaaggaaaucgggaacggauguuuugaguucuaucacaagugcgacaauaccuguauggaaagcgucaaaaacggcacauacgauuauccuaaguacucugaggaagcuaaacugaauagagaggagaucgacggggugaaacuugaauccacccggauuuaucaaauccuggccauuuacagcacaguugcguccucucucgugcuggucgugagccugggcgcuaucuccuuuuggaugugcucuaacggaagccuccagugccgcauuuguaucuga

SEQ ID NO: 194764 - RNA, 1701 nt, Artificial Sequence; identical to SEQ ID NO: 194741
  derived and/or modified CDS sequence (opt5) from hemagglutinin__InfluenzaA__ACQ76389

SEQ ID NO: 194765 - RNA, 1701 nt, Artificial Sequence; identical to SEQ ID NO: 194728
  derived and/or modified CDS sequence (opt5) from hemagglutinin__InfluenzaA__ACQ76401

SEQ ID NO: 194766 - RNA, 1701 nt, Artificial Sequence; identical to SEQ ID NO: 194741
  derived and/or modified CDS sequence (opt5) from hemagglutinin__InfluenzaA__ACQ76405

SEQ ID NO: 194767 - RNA, 1701 nt, Artificial Sequence
  derived and/or modified CDS sequence (opt5) from hemagglutinin__InfluenzaA__ACQ76408
augaaggccauccugguggucaugcucuacaccuucgcuacagccaacgcggacacgcugugcauuggcuaucacgcuaauaacagcaccgauacaguugacaccgugcuugagaaaaaugugacagucacccauuccgugaaccugcucgaagauaagcacaaugggaaacuguguaaacuuagaggaguugcuccccugcaucucggcaagugcaacaucgccggguggauucugggaaauccugagugugaaucucugagcacagccuccucuuggagcuacaucguggagaccuccucuagcgacaacggcacgugcuauccgggggauuuuauugacuacgaagaacuccgggagcagcuguccagcgucucuuccuucgaacgcuuugagaucuuccccaagaccagcucuuggccuaaucacgauuccaacaagggagugacagccgcuuguccccaugccggcgcgaaaucuuuuuauaagaaucuuaucuggcugguuaaaaagggcaacagcuacccuaaacucuccaagagcuauauuaaugacaaggggaaagaagugcugguccuuuggggaauccaccaccccuccaccucugccgaucaacagagccuguaccagaacgcugacgccuacguguucgugggcuccagcagauauucuaagaaauuuaagccugagauugcuauccggccgaaaguccgcgaucaggaggggagaaugaauuacuauuggacacucguugaacccggagacaagauuaccuucgaggccacgggcaaccugguggugccucgguacgcguuugccauggaacgcaacgcuggguccggaaucauuaucagcgauacacccguccaugacugcaauaccacaugucaaaccccuaaaggcgccaucaacaccucucugcccuuccagaauauucacccgaucacaauuggcaagugcccuaaguaugugaaaagcacgaagcucagacuggcuaccgggcuucggaacguucccuccauccagucucgcggacuguuuggcgccauugccggguucaucgagggaggcuggacagggaugguggacggaugguacggcuaucaucaccagaaugaacaaggcagcggguacgcugcggaucucaaauccacccagaacgccaucgacgagauuacaaauaaggucaacagcgugaucgagaaaaugaauacccaguuuacggcuguuggaaaggaguucaaccaccuggagaagagaauugaaaaucuuaacaaaaagguggaugacggcuuccuggauaucuggacauacaaugccgagcuccugguccugcucgaaaacgagcggacccuggacuaucaugauucuaaugugaaaaaccuuuacgagaagguccgcucccagcugaaaaacaaugccaaggaaauugggaacggauguuuugaguucuaucacaagugcgacaauaccuguauggaaagcgugaaaaacggcacauacgauuauccuaaguacucugaggaagcuaaacucaauagagaggagaucgacgggguuaagcuggaauccacccggaucuaucaaauucuugccaucuacagcacaguggcguccucucugguccucgugguuagccugggcgcuauuuccuuuuggaugugcucuaacggaagccugcagugccgcaucuguauuuga

SEQ ID NO: 194768 - RNA, 1701 nt, Artificial Sequence
  derived and/or modified CDS sequence (opt5) from hemagglutinin__InfluenzaA__ACQ77601
augaagaccaucauugcccugagcuacauccucugccuggcuuucgcccagaaacuucccggcaacgacaauuccacagcgacgcugugucucgggcaccaugcugugccuaacggaacccuggucaagacaauuaccaaugaucaaaucgagguuacaaacgccaccgaacuugugcagucuagcuccacaggcagaauuugcgacucuccgcaccagauccuggauggggagaauuguacccucaucgacgcccugcugggagauccccauugcgacggcuuucagaacaaagaaugggaucucuucguggagcggagcaaggcuuauuccgacuguuacccuuaugauguccccgacuacgccucucugcgcagccuuguggcuuccagcgggacgcuggaauuuaauaacgagucuuucaauuggaccggaguugcccaaaacggcacauccagcgcgugcaaaagacggucuauuaaguccuuuuucagccgccucaauuggcugcaccagcuugagaacagauauccugcccccaaugugaccaugccuaacaaugauaaguuugacaaacuguacaucuggggcguccaucacccgucuacagauuccgaccagauuagcguguaugcucaggccuccgggcggguuaccgugucuacgaagcgcagccaacagacagucauccccaacauuggauccagaccuugggugcggggcaucagcucucgcauuuccaucuacuggaccaucgugaaacccggggacauucuccugaucaacagcacaggaaaucugauugcuccuagaggcuacuucaagauccggucugggaaaagcuccauuaugcgcucugaugcccccaucggaaaguguaacagcgaaugcaucaccccgaauggcuccauuccuaacgacaagcccuuucagaaugucaacagaaucaccuauggcgcguguccucgguacguuaaacagaauacacucaagcuggccacggggaugcgcaacgugcccgagaaacaaaccagaggaauuuucggcgcuaucgccggguuuauugaaaauggaugggagggcaugauggaugggugguauggauuccggcaccagaacagcgagggcacaggccaggcugccgaccuuaagucuacccaagccgcuaucaaucagaucaacgggaaacugaauaagcucauugagaaaacaaacgaaaaguuucaucagaucgaaaaggaguucuccgaaguggagggacgcauucaggaucuggagaaauacgucgaagacaccaagaucgaucuuuggagcuauaaugcggagcugcucguggcccuggaaaaccaacacacgauugaccugacagauucugagaugaacaaacucuucgaaagaacccggaagcagcugagagagaaugcugaggacaugggcaacgggugcuuuaaaaucuaccauaagugugauaaugccugcauuggauccauccgcaacggcaccuaugaccacgacguuuaccgggaugaagcccuuaauaacagauuccagaucaaggggguggagcugaaaagcggcuacaaggacuggauucucuggaucuccuuugcuauuucuugcuuccugcuuugugucgugcugcucggauuuaucaugugggccugccagaaaggcaauauucgcuguaacaucugcaucuga

SEQ ID NO: 194769 - RNA, 1701 nt, Artificial Sequence
  derived and/or modified CDS sequence (opt5) from hemagglutinin__InfluenzaA__ACQ83310
augaaggccauccuggugguccuccuguacaccuucgcuacagccaacgcggacacgcuuugcauuggcuaucacgcuaauaacagcaccgauacaguugacaccgugcuggagaaaaaugugacagucacccauuccgugaaccuccuggaagauaagcacaaugggaaacuuuguaagcugagaggaguugcuccccuccaucugggcaaaugcaacaucgccggguggauucugggaaauccugagugugaaucucucagcacagccuccucuuggagcuacaucguggagaccuccucuagcgacaacggcacgugcuauccgggggauuuuauugacuacgaggaacugcgggagcagcuuuccagcaugucuuccuucgaacgcuuugagaucuuccccaagaccagcucuuggccuaaucacgauuccaacaagggagucacagccgcuuguccccaugccggcgcgaaaucuuuuuauaagaaucugaucuggcucgugaaaaagggcaacagcuacccuaaacuguccaagagcuauauuaaugacaaggggaaagaaguucuugugcuguggggaauccaccaccccuccaccucugccgaucaacagagccucuaccagaacgcugacgccuacgucuucgugggcuccagcagauauucuaagaaacugaagccugagauugcuauccggccgaaagugcgcgaucaggaggggagaaugaauuacuauuggacacuggucgaacccggagacaagauuaccuuugaggccacgggcaaccucguugugccucgguacgcguucgccauggaacgcaacgcuggguccggaaucauuaucagcgauacacccgugcaugacugcaauaccacaugucaaaccccuaaaggcgccaucaacaccucucugcccuuucagaauauucacccgaucacaauuggcaagugcccuaaguaugucaaaagcacgaaacuuagacuggcuaccgggcuccggaacgugcccuccauccagucucgcggacuguucggcgccauugccggguuuaucgagggaggcuggacagggaugguugacggaugguacggcuaucaucaccagaaugaacaaggcagcggguacgcugcggaucuuaaguccacccagaacgccaucgacgagauuacaaauaaggugaacagcgucaucgagaaaaugaauacccaguucacggcugugggaaaggaauuuaaccaccuggagaagagaauugaaaaucucaacaaaaagguugaugacggcuuccuggauaucuggacauacaaugccgagcugcucgugcugcuugaaaacgagcggacccuggacuaucaugauucuaaugucaaaaaccucuacgagaaggugcgcucccagcugaaaaacaaugccaaggaaauugggaacggauguuucgaguuuuaucacaagugcgacaauaccuguauggaaagcgucaaaaacggcacauacgauuauccuaaguacucugaggaagcuaaacuuaauagagaggagaucgacggggugaagcuggaauccacccggaucuaucaaauucucgccaucuacagcacaguugcguccucucuggugcuggucgugagccucggcgcuauuuccuucuggaugugcucuaacggaagccugcagugccgcaucuguauuuga

SEQ ID NO: 194770 - RNA, 1701 nt, Artificial Sequence; identical to SEQ ID NO: 194728
  derived and/or modified CDS sequence (opt5) from hemagglutinin__InfluenzaA__ACQ84451

SEQ ID NO: 194771 - RNA, 1701 nt, Artificial Sequence; identical to SEQ ID NO: 194728
  derived and/or modified CDS sequence (opt5) from hemagglutinin__InfluenzaA__ACQ84457

SEQ ID NO: 194772 - RNA, 1701 nt, Artificial Sequence
  derived and/or modified CDS sequence (opt5) from hemagglutinin__InfluenzaA__ACQ84477
augaaggccauccugcucgugcugcuuuacaccuucacagcugccaacgcggacacgcugugcauuggcuaucacgcuaauaacagcaccgauacagucgacaccguucucgagaagaaugugacagugacccauuccgucaaccugcuugaagauagacacaaugggaagcuguguaaacuccggggaguggcuccccugcaucugggcaagugcaacaucgccggguggcuccugggaaauccugagugugaacuucuguuuacagccucuagcugguccuacauuguugagaccucuaacagcgacaauggcacgugcuauccgggggauuucaucaacuacgaagaacuccgcgagcagcuguccucugugagcuccuuugaaagauucgagauuuuucccaaagccagcucuuggccugaccacgaaaccaaucggggagucacagcugccugucccuaugcgggcgccaacuccuucuaccgcaaucuuaucuggcuggugaagaagggcaacagcuauccuaaacucucuaaguccuacguuaauaacaaagagaaggaggugcugguccugugggggauccaucaucccccuaccagcacagaucaacagucucucuaccagaacgcugacgccuauguguuugugggauccagcaaauacaauaagaaguucaaaccggaaauugcuaccagacccaagguccggggccaggccgggcgcaugaacuauuacuggacgcugguugagccuggagauacaaucaccuuugaagcgacaggcaaucuuguggugcccagauaugccuucgcuaugaaacggggguccggaucuggcauuaucauuagcgacaccccuguccacgauugcaacaccacaugucaaacgcccaagggcgccaucaauaccucccugccguuucagaacauucacccugugacaaucggggagugccccaaauacguuaagagcaccaaacuccgcauggcuacaggacugagaaauaucccuucuauucagucccggggccuuuucggggccaucgccggauuuauugaaggcggguggaccggaaugaucgacggcugguauggcuaccaccaucagaacgagcaagggagcggauacgcugcggaucagaagucuacgcagaaugccauugacggcaucacaaacaaggugaauagcgucaucgagaaaaugaacacccaguucaccgcuguggggaaggaguucaaucaccuggagaaacgcauugaaaaccucaauaagaaaguugacgauggauuucuggacguguggacauauaacgccgagcugcucguccugcuugaaaacgagagaacccuggauuaccacgacuccaaugugaagaaccucuaugagaagguccggucucaacugaaaaauaacgccaaggaaaucggcaauggguguuucgaguuuuaccauaaaugcgaugacacauguauggaaagcgugaagaacggcacguaugauuaccccaaauauuccgaggaaagcaaacuuaaucgcgaggagauugacggaguuaagcuggaaucuaccagaaucuaccagauucucgcuaucuacuccacaguggccagcucucugguccugcucgugucccugggcgcgaucagcuucuggaugugcuccaacgggucucuucagugccggauuuguaucuga

SEQ ID NO: 194773 - RNA, 1701 nt, Artificial Sequence
  derived and/or modified CDS sequence (opt5) from hemagglutinin__InfluenzaA__ACQ89900
augaaggccauccuggugguccuccuguacaccuucgcuacagccaacgcggacacgcuuugcauuggcuaucacgcuaauaacagcaccgauacaguugacaccgugcuggagaagaaugugacagucacccauuccgugaaccuccuggaagauaagcacaaugggaaacuuuguaagcugagaggaguugcuccccuccaucugggcaaaugcaacaucgccggguggauucugggaaauccugagugugaaucucucagcacagccuccucuuggagcuacaucguggagaccuccucuagcgacaacggcacgugcuauccgggggauuuuauugacuacgaagaacugcgggagcagcuuuccagcgucucuuccuucgaacgcuuugagaucuuccccaagaccagcucuuggccuaaucacgauuccaacaagggagugacagccgcuuguccccaugccggcgcgaaaucuuuuuauaagaaucugaucuggcucguuaaaaagggcaacagcuacccuaaacuguccaagagcuauauuaaugacaaggggaaagaagugcuuguccuguggggaauccaccaccccuccaccucugccgaucaacagagccucuaccagaacgcugacgccuacguguucgugggcuccagcagauauucuaagaaauuuaagccugagauugcuauccggccgaaaguccgcgaucaggaggggagaaugaauuacuauuggacacugguugaacccggagacaagauuaccuucgaggccacgggcaaccugguggugccucgguacgcguuugccauggaacgcaacgcuggguccggaaucauuaucagcgauacacccguccaugacugcaauaccacaugucaaaccccuaaaggcgccaucaacaccucucuccccuuccagaauauucacccgaucacaauuggcaagugcccuaaguaugugaaaagcacgaagcugagacuugcuaccgggcugcggaacguucccuccauccagucucgcggacucuuuggcgccauugccggguucaucgagggaggcuggacagggaugguggacggaugguacggcuaucaucaccagaaugaacaaggcagcggguacgcugcggaucugaaauccacccagaacgccaucgacgagauuacaaauaaggucaacagcgugguugagaaaaugaauacccaguuuacggcugugggaaaggaguucaaccaccuugagaagagaaucgaaaaucugaacaaaaaggucgaugacggcuuccucgauauuuggacauacaaugccgagcugcuggugcuccuggaaaacgagcggacccuugacuaucaugauucuaaugucaaaaaccuguacgagaaggugcgcucccagcucaaaaacaaugccaaggaaaucgggaacggauguuuugaguucuaucacaagugcgacaauaccuguauggaaagcguuaaaaacggcacauacgauuauccuaaguacucugaggaagcuaaacugaauagagaggagauugacggggugaaacuugaauccacccggaucuaucaaauccuggccauuuacagcacagucgcguccucucucgugcugguugugagccugggcgcuaucuccuuuuggaugugcucuaacggaagccuccagugccgcauuuguaucuga

SEQ ID NO: 194774 - RNA, 1701 nt, Artificial Sequence; identical to SEQ ID NO: 194741
  derived and/or modified CDS sequence (opt5) from hemagglutinin__InfluenzaA__ACQ89902

SEQ ID NO: 194775 - RNA, 1701 nt, Artificial Sequence
  derived and/or modified CDS sequence (opt5) from hemagglutinin__InfluenzaA__ACQ89904
augaaggccauccuggugguccuccuguacaccuucgcuacagccaacgcggacacgcuuugcauuggcuaucacgcuaauaacagcaccgauacaguugacaccgugcuggagaaaaaugugacagucacccauuccgugaaccuccuggaagauaagcacaaugggaaacuuuguaagcugagaggaguugcgccccuccaucugggcaaaugcaacaucgccggguggauucugggaaauccugagugugaaucucucagcacagcuuccucuuggagcuacaucguggagaccuccucuagcgacaagggcacgugcuauccgggggauuuuauugacuacgaagaacugcgggagcagcuuuccagcgucucuuccuucgaacgcuuugagaucuuccccaagaccagcucuuggccuaaccacgauuccaauaaaggagugacagccgcuuguccccaugccggcgccaagagcuuuuauaaaaaccugaucuggcucguuaagaaaggcaauucuuacccuaagcuguccaagagcuauauuaacgacaaagggaaggaagugcuuguccuguggggaauccaccaccccuccaccucugccgaucaacagagccucuaccagaaugcugacgccuacguguucgugggcacauccagauauagcaaaaaguuuaaaccugagauugcuauccggccgaagguccgcgaucaggaggggagaaugaacuacuauuggacccugguugaacccggagacaaaauuacguucgaggccacaggcaaucugguggugccucgguacgcguuugccauggaacgcaacgcugggucuggaaucauuaucuccgauacccccguccaugacugcaacacaaccugucaaaccccuaagggcgccaucaauacaagccuccccuuccagaacauucacccgaucacgauuggcaagugcccuaaauaugugaagucuaccaaacugagacuugcuacagggcugcggaauguucccagcauccagucccgcggacucuuuggcgccauugccggguucaucgagggaggcuggaccgggaugguggacggaugguacggcuaucaucaccagaacgaacaaggcucuggguacgcugcggaucuuaagagcacacagaaugccaucgacgagauuaccaacaaagucaauuccgugaucgagaagaugaacacgcaguuuacagcuguuggaaaggaguucaaucaccuggagaaaagaauugaaaaccugaauaagaaaguggaugacggcuuccucgauaucuggaccuacaacgccgagcugcugguccuccuggaaaaugagcggacccuugacuaucaugauagcaacgugaagaaucuguacgagaaaguccgcucucagcucaagaacaacgccaaggaaauugggaauggauguuuugaguucuaucacaaaugcgacaacacauguauggaauccgugaagaauggcaccuacgauuauccuaaauacagcgaggaagcuaagcugaacagagaggagaucgacgggguuaaacuugaaucuacacggaucuaucaaauucuggccaucuacuccacgguggcgagcucccucguccuggugguuucucugggcgcuauuagcuuuuggaugugcuccaauggaucucuccagugccgcaucuguauuuga

SEQ ID NO: 194776 - RNA, 1701 nt, Artificial Sequence; identical to SEQ ID NO: 194773
  derived and/or modified CDS sequence (opt5) from hemagglutinin__InfluenzaA__ACQ89905

SEQ ID NO: 194777 - RNA, 1701 nt, Artificial Sequence; identical to SEQ ID NO: 194728
  derived and/or modified CDS sequence (opt5) from hemagglutinin__InfluenzaA__ACQ99607

SEQ ID NO: 194778 - RNA, 1701 nt, Artificial Sequence; identical to SEQ ID NO: 194728
  derived and/or modified CDS sequence (opt5) from hemagglutinin__InfluenzaA__ACQ99608

SEQ ID NO: 194779 - RNA, 1701 nt, Artificial Sequence; identical to SEQ ID NO: 194728
  derived and/or modified CDS sequence (opt5) from hemagglutinin__InfluenzaA__ACQ99609

SEQ ID NO: 194780 - RNA, 1701 nt, Artificial Sequence; identical to SEQ ID NO: 194728
  derived and/or modified CDS sequence (opt5) from hemagglutinin__InfluenzaA__ACQ99611

SEQ ID NO: 194781 - RNA, 1701 nt, Artificial Sequence
  derived and/or modified CDS sequence (opt5) from hemagglutinin__InfluenzaA__ACQ99614
augaaggccauccuggugguccuccuguacaccuucgcuacagccaacgcggacacgcuuugcauuggcuaucacgcuaauaacagcaccgauacaguugacaccgugcuggagaagaaugugacagucacccauuccgugaaccuccuggaagauaagcacaaugggaaacuuuguaagcugagaggaguugcuccccuccaucugggcaaaugcaacaucgccggguggauucugggaaauccugagugugaaucucucagcacagccuccucuuggagcuacaucguggagaccuccucuagcgacaacggcacgugcuauccgggggauuuuauugacuacgaagaacugcgggagcagcuuuccagcgucucuuccuucgaacgcuuugagaucuuccccaagaccagcucuuggccuaaucacgauuccaacaagggagugacagccgcuuguccccaugccggcgcgaaaucuuuuuauaagaaucugaucuggcucguuaaaaagggcaacagcuacccuaaacuguccaagagcuauauuaaugacaaggggaaagaagugcuuguccuguggggaauccaccaccccuccaccucugccgaucaacagagccucuaccagaacgcugacgccuacguguucgugggcuccagcagauauucuaagaaauuuaagccugagauugcuauccggccgaaaguccgcgaucaggaggggagaaugaauuacuauuggacacugguugaacccggagacaagauuaccuucgaggccacgggcaaccugguggugccucgguacgcguuugccauggaacgcaacgcuggguccggaaucauuaucagcgauacacccguccaugacugcaauaccacaugucaaaccccuaaaggcgccaucaacaccucucuccccuuccagaauauucacccgaucacaauuggcaagugcccuaaguaugugaaaagcacgaagcugagacuugcuaccgggcugcggaacguucccuccauccagucucgcggacucuuuggcgccauugccggguucaucgagggaggcuggacagggaugguggacggaugguacggcuaucaucaccagaaugaacaaggcagcggguacgcugcggaucugaaauccacccagaacgccaucgacgagauuacaaauaaggucaacagcgugaucgagaaaaugaauacccaguuuacggcuguuggaaaggaguucaaccaccuugagaagagaauugaaaaucugaacaaaaagguggaugacggcuuccucgauaucuggacauacaaugccgagcugcugauucuccuggaaaacgagcggacccuugacuaucaugauucuaaugucaaaaaccuguacgagaaggugcgcucccagcucaaaaacaaugccaaggaaaucgggaacggauguuuugaguucuaucacaagugcgacaauaccuguauggaaagcgucaaaaacggcacauacgauuauccuaaguacucugaggaagcuaaacugaauagagaggagaucgacggggugaaacuugaauccacccggauuuaucaaauccuggccauuuacagcacaguugcguccucucucgugcuggucgugagccugggcgcuaucuccuuuuggaugugcucuaacggaagccuccagugccgcauuuguaucuga

SEQ ID NO: 194782 - RNA, 1701 nt, Artificial Sequence; identical to SEQ ID NO: 194781
  derived and/or modified CDS sequence (opt5) from hemagglutinin__InfluenzaA__ACQ99616

SEQ ID NO: 194783 - RNA, 1701 nt, Artificial Sequence; identical to SEQ ID NO: 194728
  derived and/or modified CDS sequence (opt5) from hemagglutinin__InfluenzaA__ACQ99617

SEQ ID NO: 194784 - RNA, 1701 nt, Artificial Sequence; identical to SEQ ID NO: 194728
  derived and/or modified CDS sequence (opt5) from hemagglutinin__InfluenzaA__ACQ99618

SEQ ID NO: 194785 - RNA, 1701 nt, Artificial Sequence; identical to SEQ ID NO: 194728
  derived and/or modified CDS sequence (opt5) from hemagglutinin__InfluenzaA__ACQ99619

SEQ ID NO: 194786 - RNA, 1701 nt, Artificial Sequence; identical to SEQ ID NO: 194728
  derived and/or modified CDS sequence (opt5) from hemagglutinin__InfluenzaA__ACQ99620

SEQ ID NO: 194787 - RNA, 1701 nt, Artificial Sequence; identical to SEQ ID NO: 194781
  derived and/or modified CDS sequence (opt5) from hemagglutinin__InfluenzaA__ACQ99621

SEQ ID NO: 194788 - RNA, 1701 nt, Artificial Sequence; identical to SEQ ID NO: 194728
  derived and/or modified CDS sequence (opt5) from hemagglutinin__InfluenzaA__ACQ99622

SEQ ID NO: 194789 - RNA, 1701 nt, Artificial Sequence
  derived and/or modified CDS sequence (opt5) from hemagglutinin__InfluenzaA__ACR01014
augaaggccauccuggugguccuccuguacaccuucgcuacagccaacgcggacacgcuuugcauuggcuaucacgcuaauaacagcaccgauacaguugacaccgugcuggagaagaaugugacagucacccauuccgugaaccuccuggaagauaagcacaaugggaaacuuuguaagcugagaggaguugcuccccuccaucugggcaaaugcaacaucgccggguggauucugggaaauccugagugugaaucucucagcacagccuccucuuggagcuacaucguggagaccuccucuagcgacaacggcacgugcuauccgggggauuuuauugacuacgaagaacugcgggagcagcuuuccagcgucucuuccuucgaacgcuuugagaucuuccccaagaccagcucuuggccuaaucacgauuccaacaagggagugacagccgcuuguccccaugccggcgcgaaaucuuuuuauaagaaucugaucuggcucguuaaaaagggcaacagcuacccuaaacuguccaagagcuauauuaaugacaaggggaaagaagugcuuguccuguggggaauccaccaccccuccaccucugccgaucaacagagccucuaccagaacgcugacgccuacguguucgugggcuccagcagauauucuaagaaauuuaagccugagauugcuauccggccgaaaguccgcgaucaggaggggagaaugaauuacuauuggacacugguugaacccggagacaagauuaccuucgaggccacgggcaaccugguggugccucgguacgcguuugccauggaacgcaacgcuggguccggaaucauuaucagcgauacacccguccaugacugcaauaccacaugucaaaccccuaaaggcgccaucaacaccucucuccccuuccagaauauucacccgaucacaauuggcaagugcccuaaguaugugaaaagcacgaagcugagacuugcuaccgggcugcggaacguucccuccauccagucucgcggacucuuuggcgccauugccggguucaucgagggaggcuggacagggaugguggacggaugguacggcuaucaucaccagaaugaacaaggcagcggguacgcugcggaucugaaauccacccagaacgccaucgacgagauuacaaauaaggucaacagcgugaucgagaaaaugaauacccaguuuacggcuguuggaaaggaguucaaccaccuugagaagagaauggaaaaucugaacaaaaagguggaugacggcuuccucgauauuuggacauacaaugccgagcugcugguccuccuggaaaacgagcggacccuugacuaucaugauucuaaugugaaaaaccuguacgagaagguccgcucccagcucaaaaacaaugccaaggaaaucgggaacggauguuuugaguucuaucacaagugcgacaauaccuguauggaaagcgugaaaaacggcacauacgauuauccuaaguacucugaggaagcuaaacugaauagagaggagauugacgggguuaaacuugaauccacccggaucuaucaaauccuggccauuuacagcacaguggcguccucucucguccuggugguuagccugggcgcuaucuccuuuuggaugugcucuaacggaagccuccagugccgcauuuguaucuga

SEQ ID NO: 194790 - RNA, 1701 nt, Artificial Sequence; identical to SEQ ID NO: 194741
  derived and/or modified CDS sequence (opt5) from hemagglutinin__InfluenzaA__ACR08419

SEQ ID NO: 194791 - RNA, 1701 nt, Artificial Sequence
  derived and/or modified CDS sequence (opt5) from hemagglutinin__InfluenzaA__ACR08429
augaaggccauccuggugguccuccuguacaccuucgcuacagccaacgcggacacgcuuugcauuggcuaucacgcuaauaacagcaccgauacaguugacaccgugcuggagaagaaugugacagucacccauuccgugaaccuccuggaagauaagcacaaugggaaacuuuguaagcugagaggaguugcuccccuccaucugggcaaaugcaacaucgccggguggauucugggaaauccugagugugaaucucucagcacagccuccucuuggagcuacaucguggagaccuccucuagcgacaacggcacgugcuauccgggggauuuuauugacuacgaagaacugcgggagcagcuuuccagcgucucuuccuucgaacgcuuugagaucuuccccaagaccagcucuuggccuaaucacgauuccaacaagggagugacagccgcuuguccccaugccggcgcgaaaucuuuuuauaagaaucugaucuggcucguuaaaaagggcaacagcuacccuaaacuguccaagagcuauauuaaugacaaggggaaagaagugcuuguccuguggggaauccaccaccccuccaccucugccgaucaacagagccucuaccagaacgcugacgccuacguguucgugggcacauccagauauagcaagaaauuuaagccugagauugcuauccggccgaaaguccgcgaucaggaggggagaaugaauuacuauuggacccugguugaacccggagacaagauuacguucgaggccacaggcaaccugguggugccucgguacgcguuugccauggaacgcaacaccgggucuggaaucauuaucuccgauacacccguccaugacugcaauaccaccugucaaacaccuaaaggcgcuaucaacacgagccuccccuuccagaauauucacccgaucaccauuggcaagugcccuaaguaugugaaaucuacaaagcugagacuugccaccgggcugcggaacguucccagcauccagucccgcggacucuuuggcgcuauugccggguucaucgagggaggcuggacagggaugguggacggaugguacggcuaucaucaccagaaugaacaaggcucuggguacgccgcugaucugaaaagcacccagaacgcgaucgacgagauuacgaauaaggucaacuccgugaucgagaaaaugaauacacaguuuaccgccguuggaaaggaguucaaccaccuugagaagagaauugaaaaucugaacaaaaagguggaugacggcuuccucgauaucuggaccuacaaugcugagcugcugguccuccuggaaaacgagcggacacuugacuaucaugauagcaaugugaaaaaccuguacgagaagguccgcucucagcucaaaaacaaugccaaggaaauugggaacggauguuuugaguucuaucacaagugcgacaauaccuguauggaauccgugaaaaacggcacauacgauuauccuaaguacagcgaggaagccaaacugaauagagaggagaucgacgggguuaaacuugaaucuacgcggaucuaucaaauucuggcuaucuacuccaccguggccagcucccucguccuggugguuucucugggcgcgauuagcuuuuggaugugcuccaacggaucucuccagugccgcaucuguauuuga

SEQ ID NO: 194792 - RNA, 1701 nt, Artificial Sequence; identical to SEQ ID NO: 194741
  derived and/or modified CDS sequence (opt5) from hemagglutinin__InfluenzaA__ACR08439

SEQ ID NO: 194793 - RNA, 1701 nt, Artificial Sequence; identical to SEQ ID NO: 194741
  derived and/or modified CDS sequence (opt5) from hemagglutinin__InfluenzaA__ACR08449

SEQ ID NO: 194794 - RNA, 1701 nt, Artificial Sequence
  derived and/or modified CDS sequence (opt5) from hemagglutinin__InfluenzaA__ACR08459
augaaggccauccuggugguccuccuguacaccuucgcuacagccaacgcggacacgcuuugcauuggcuaucacgcuaauaacagcaccgauacaguugacaccgugcuggagaagaaugugacagucacccauuccgugaaccuccuggaagauaagcacaaugggaaacuuuguaagcugagaggaguugcuccccuccaucugggcaaaugcaacaucgccggguggauucugggaaauccugagugugaaucucucagcacagccuccucuuggagcuacaucguggagaccuccucuagcgacaacggcacgugcuauccgggggauuuuauugacuacgaagaacugcgggagcagcuuuccagcgucucuuccuucgaacgcuuugagaucuuccccaagaccagcucuuggccuaaucacgauuccaacaagggagugacagccgcuuguccccaugccggcgcgaaaucuuuuuauaagaaucugaucuggcucguuaaaaagggcaacagcuacccuaaacuguccaagagcuauauuaaugacaaggggaaagaagugcuuguccuguggggaauccaccaccccuccaccucugccgaucaacagagccucuaccagaacgcugacgccuacguguucgugggcuccagcagauauucuaagaaauuuaagccugagauugcuauccggccgaaaguccgcgaucaggaggggagaaugaauuacuauuggacacugguugaacccggagacaagauuaccuucgaggccacgggcaaccugguggugccucgguacgcguuugccauggaacgcaacgcuggguccggaaucauuaucagcgauacacccguccaugacugcgacaccacaugucaaaccccuaaaggcgccaucaauaccucucuccccuuccagaacauucacccgaucacaauuggcaagugcccuaaguaugugaaaagcacgaagcugagacuugcuaccgggcugcggaauguucccuccauccagucucgcggacucuuuggcgccauugccggguucaucgagggaggcuggacagggaugguggauggaugguacggcuaucaucaccagaacgaacaaggcagcggguacgcugcggaccugaaauccacccagaaugccaucgaugagauuacaaacaaggucaauagcgugaucgagaaaaugaacacccaguuuacggcuguuggaaaggaguucaaucaccuugagaagagaauugaaaaccugaauaaaaagguggacgauggcuuccucgacaucuggacauacaacgccgagcugcugguccuccuggaaaaugagcggacccuugauuaucaugacucuaacgugaaaaaucuguacgagaagguccgcucccagcucaaaaacaacgccaaggaaauugggaauggauguuuugaguucuaucacaagugcgauaacaccuguauggaaagcgugaaaaauggcacauacgacuauccuaaguacucugaggaagcuaaacugaacagagaggagaucgaugggguuaaacuugaauccacccggaucuaucaaauucuggccaucuacagcacaguggcguccucucucguccuggugguuagccugggcgcuauuuccuuuuggaugugcucuaauggaagccuccagugccgcaucuguauuuga

SEQ ID NO: 194795 - RNA, 1701 nt, Artificial Sequence; identical to SEQ ID NO: 194728
  derived and/or modified CDS sequence (opt5) from hemagglutinin__InfluenzaA__ACR08528

SEQ ID NO: 194796 - RNA, 1701 nt, Artificial Sequence; identical to SEQ ID NO: 194728
  derived and/or modified CDS sequence (opt5) from hemagglutinin__InfluenzaA__ACR08530

SEQ ID NO: 194797 - RNA, 1701 nt, Artificial Sequence; identical to SEQ ID NO: 194794
  derived and/or modified CDS sequence (opt5) from hemagglutinin__InfluenzaA__ACR08531

SEQ ID NO: 194798 - RNA, 1701 nt, Artificial Sequence; identical to SEQ ID NO: 194741
  derived and/or modified CDS sequence (opt5) from hemagglutinin__InfluenzaA__ACR08533

SEQ ID NO: 194799 - RNA, 1701 nt, Artificial Sequence; identical to SEQ ID NO: 194794
  derived and/or modified CDS sequence (opt5) from hemagglutinin__InfluenzaA__ACR08535

SEQ ID NO: 194800 - RNA, 1701 nt, Artificial Sequence; identical to SEQ ID NO: 194741
  derived and/or modified CDS sequence (opt5) from hemagglutinin__InfluenzaA__ACR08536

SEQ ID NO: 194801 - RNA, 1701 nt, Artificial Sequence; identical to SEQ ID NO: 194794
  derived and/or modified CDS sequence (opt5) from hemagglutinin__InfluenzaA__ACR08537

SEQ ID NO: 194802 - RNA, 1701 nt, Artificial Sequence; identical to SEQ ID NO: 194794
  derived and/or modified CDS sequence (opt5) from hemagglutinin__InfluenzaA__ACR08538

SEQ ID NO: 194803 - RNA, 1701 nt, Artificial Sequence; identical to SEQ ID NO: 194741
  derived and/or modified CDS sequence (opt5) from hemagglutinin__InfluenzaA__ACR08539

SEQ ID NO: 194804 - RNA, 1701 nt, Artificial Sequence; identical to SEQ ID NO: 194741
  derived and/or modified CDS sequence (opt5) from hemagglutinin__InfluenzaA__ACR08540

SEQ ID NO: 194805 - RNA, 1701 nt, Artificial Sequence; identical to SEQ ID NO: 194728
  derived and/or modified CDS sequence (opt5) from hemagglutinin__InfluenzaA__ACR08542

SEQ ID NO: 194806 - RNA, 1701 nt, Artificial Sequence; identical to SEQ ID NO: 194728
  derived and/or modified CDS sequence (opt5) from hemagglutinin__InfluenzaA__ACR08543

SEQ ID NO: 194807 - RNA, 1701 nt, Artificial Sequence; identical to SEQ ID NO: 194767
  derived and/or modified CDS sequence (opt5) from hemagglutinin__InfluenzaA__ACR08544

SEQ ID NO: 194808 - RNA, 1701 nt, Artificial Sequence; identical to SEQ ID NO: 194794
  derived and/or modified CDS sequence (opt5) from hemagglutinin__InfluenzaA__ACR08545

SEQ ID NO: 194809 - RNA, 1701 nt, Artificial Sequence; identical to SEQ ID NO: 194728
  derived and/or modified CDS sequence (opt5) from hemagglutinin__InfluenzaA__ACR08546

SEQ ID NO: 194810 - RNA, 1701 nt, Artificial Sequence; identical to SEQ ID NO: 194741
  derived and/or modified CDS sequence (opt5) from hemagglutinin__InfluenzaA__ACR08547

SEQ ID NO: 194811 - RNA, 1701 nt, Artificial Sequence; identical to SEQ ID NO: 194794
  derived and/or modified CDS sequence (opt5) from hemagglutinin__InfluenzaA__ACR08548

SEQ ID NO: 194812 - RNA, 1701 nt, Artificial Sequence; identical to SEQ ID NO: 194741
  derived and/or modified CDS sequence (opt5) from hemagglutinin__InfluenzaA__ACR08549

SEQ ID NO: 194813 - RNA, 1701 nt, Artificial Sequence; identical to SEQ ID NO: 194741
  derived and/or modified CDS sequence (opt5) from hemagglutinin__InfluenzaA__ACR08550

SEQ ID NO: 194814 - RNA, 1701 nt, Artificial Sequence; identical to SEQ ID NO: 194741
  derived and/or modified CDS sequence (opt5) from hemagglutinin__InfluenzaA__ACR08551

SEQ ID NO: 194815 - RNA, 1701 nt, Artificial Sequence; identical to SEQ ID NO: 194728
  derived and/or modified CDS sequence (opt5) from hemagglutinin__InfluenzaA__ACR08552

SEQ ID NO: 194816 - RNA, 1701 nt, Artificial Sequence; identical to SEQ ID NO: 194767
  derived and/or modified CDS sequence (opt5) from hemagglutinin__InfluenzaA__ACR08553

SEQ ID NO: 194817 - RNA, 1701 nt, Artificial Sequence; identical to SEQ ID NO: 194767
  derived and/or modified CDS sequence (opt5) from hemagglutinin__InfluenzaA__ACR08554

SEQ ID NO: 194818 - RNA, 1701 nt, Artificial Sequence; identical to SEQ ID NO: 194728
  derived and/or modified CDS sequence (opt5) from hemagglutinin__InfluenzaA__ACR09365

SEQ ID NO: 194819 - RNA, 1701 nt, Artificial Sequence; identical to SEQ ID NO: 194728
  derived and/or modified CDS sequence (opt5) from hemagglutinin__InfluenzaA__ACR09366

SEQ ID NO: 194820 - RNA, 1701 nt, Artificial Sequence; identical to SEQ ID NO: 194728
  derived and/or modified CDS sequence (opt5) from hemagglutinin__InfluenzaA__ACR09367

SEQ ID NO: 194821 - RNA, 1701 nt, Artificial Sequence; identical to SEQ ID NO: 194728
  derived and/or modified CDS sequence (opt5) from hemagglutinin__InfluenzaA__ACR09368

SEQ ID NO: 194822 - RNA, 1701 nt, Artificial Sequence; identical to SEQ ID NO: 194728
  derived and/or modified CDS sequence (opt5) from hemagglutinin__InfluenzaA__ACR09369

SEQ ID NO: 194823 - RNA, 1701 nt, Artificial Sequence; identical to SEQ ID NO: 194728
  derived and/or modified CDS sequence (opt5) from hemagglutinin__InfluenzaA__ACR09370

SEQ ID NO: 194824 - RNA, 1701 nt, Artificial Sequence; identical to SEQ ID NO: 194728
  derived and/or modified CDS sequence (opt5) from hemagglutinin__InfluenzaA__ACR09371

SEQ ID NO: 194825 - RNA, 1701 nt, Artificial Sequence; identical to SEQ ID NO: 194728
  derived and/or modified CDS sequence (opt5) from hemagglutinin__InfluenzaA__ACR09373

SEQ ID NO: 194826 - RNA, 1701 nt, Artificial Sequence; identical to SEQ ID NO: 194728
  derived and/or modified CDS sequence (opt5) from hemagglutinin__InfluenzaA__ACR09374

SEQ ID NO: 194827 - RNA, 1701 nt, Artificial Sequence
  derived and/or modified CDS sequence (opt5) from hemagglutinin__InfluenzaA__ACR09375
augaaggccauccuggugguccuccuguacaccuucgcuacagccaacgcggacacgcuuugcauuggcuaucacgcuaauaacagcaccgauacaguugacaccgugcuggagaaaaaugugacagucacccauuccgugaaccuccuggaagauaagcacaaugggaaacuuuguaagcugagaggaguugcuccccuccaucugggcaaaugcaacaucgccggguggauucugggaaauccugagugugaaucucucagcacagccuccucuuggagcuacaucguggagaccuccucuagcgacaacggcacgugcuauccgggggauuuuauugacuacgaagaacugcgggagcagcuuuccagcgucucuuccuucgaacgcuuugagaucuuccccaagaccagcucuuggccuaaucacgauuccaacaagggagugacagccgcuuguccccaugccggcgcgaaaucuuuuuauaagaaucugaucuggcucguuaaaaagggcaacagcuacccuaaacuguccaagagcuauauuaaugacaaggggaaagaagugcuuguccuguggggaauccaccaccccuccaccucugccgaucaacagagccucuaccagaacgcugacgccuacguguucgugggcuccagcagauauucuaagaaauuuaagccugagauugcuauccggccgaaaguccgcgaucaggaggggagaaugaauuacuauuggacacugguugaacccggagacaagauuaccuucgaggccacgggcaaccugguggugccucgguacgcguuugccauggaaaagaacgcuggguccggaaucauuaucagcgauacacccguccaugacugcaauaccacaugucaaaccccuaagggcgccaucaacaccucucuccccuuccagaauauucacccgaucacaauuggcaagugcccuaaauaugugaaaagcacgaaacugcgccuugcuaccgggcugagaaacguucccuccauccagucucggggacucuuuggcgccauugccggguucaucgagggaggcuggacagggaugguggacggaugguacggcuaucaucaccagaaugaacaaggcagcggguacgcugcggaucugaaguccacccagaacgccaucgacgagauuacaaauaaagucaacagcgugaucgagaagaugaauacccaguuuacggcuguuggaaaggaguucaaccaccuugagaaacgcauugaaaaucugaacaagaaaguggaugacggcuuccucgauaucuggacauacaaugccgagcugcugguccuccuggaaaacgagagaacccuugacuaucaugauucuaaugugaagaaccuguacgagaaaguccggucccagcucaagaacaaugccaaggaaauugggaacggauguuuugaguucuaucacaaaugcgacaauaccuguauggaaagcgugaagaacggcacauacgauuauccuaaauacucugaggaagcuaagcugaaucgcgaggagaucgacgggguuaaacuugaauccaccagaaucuaucaaauucuggccaucuacagcacaguggcguccucucucguccuggugguuagccugggcgcuauuuccuuuuggaugugcucuaacggaagccuccagugccggaucuguauuuga

SEQ ID NO: 194828 - RNA, 1701 nt, Artificial Sequence; identical to SEQ ID NO: 194728
  derived and/or modified CDS sequence (opt5) from hemagglutinin__InfluenzaA__ACR09376

SEQ ID NO: 194829 - RNA, 1701 nt, Artificial Sequence; identical to SEQ ID NO: 194728
  derived and/or modified CDS sequence (opt5) from hemagglutinin__InfluenzaA__ACR09377

SEQ ID NO: 194830 - RNA, 1701 nt, Artificial Sequence; identical to SEQ ID NO: 194728
  derived and/or modified CDS sequence (opt5) from hemagglutinin__InfluenzaA__ACR09395

SEQ ID NO: 194831 - RNA, 1701 nt, Artificial Sequence; identical to SEQ ID NO: 194728
  derived and/or modified CDS sequence (opt5) from hemagglutinin__InfluenzaA__ACR09396

SEQ ID NO: 194832 - RNA, 1701 nt, Artificial Sequence
  derived and/or modified CDS sequence (opt5) from hemagglutinin__InfluenzaA__ACR10186
augaaggccauccuggugguccuccuguacaccuucgcuacagccaacgcggacacgcuuugcauuggcuaucacgcuaauaacagcaccgauacaguugacaccgugcuggagaagaaugugacagucacccauuccgugaaccuccuggaagauaagcacaaugggaaacuuuguaagcugagaggaguugcuccccuccaucugggcaaaugcaacaucgccggguggauucugggaaauccugagugugaaucucucagcacagccuccucuuggagcuacaucguggagaccuccucuagcgacaacggcacgugcuauccgggggauuuuauugacuacgaagaacugcgggagcagcuuuccagcgucucuuccuucgaacgcuuugagaucuuccccaagaccagcucuuggccuaaucacgauuccaacaagggagugacagccgcuuguccccaugccggcgcgaaaucuuuuuauaagaaucugaucuggcucguuaaaaagggcaacagcuacccuaaacuguccaagagcuauauuaaugacaaggggaaagaagugcuuguccuguggggaauccaccaccccuccaccucugccgaucaacagagccucuaccagaacgcugacgccuacguguucgugggcacauccagauauagcaagaaauuuaagccugagauugcuauccggccgaaaguccgcgaucaggaggggagaaugaauuacuauuggacccugguugaacccggagacaagauuacguucgaggccacaggcaaccugguggugccucgguacgcguuugccauggaacgcaacgcugggucuggaaucauuaucuccgauacccccguccaugacugcaauacaaccugucaaaccccuaaaggcgccaucaacacaagccuccccuuccagaauauucacccgaucacgauuggcaagugcccuaaguaugugaaaucuaccaagcugagacuugcuacagggcugcggaacguucccagcauccagucccgcggacucuuuggcgccauugccggguucaucgagggaggcuggaccgggaugguggacggaugguacggcuaucaucaccagaaugaacaaggcucuggguacgcugcggaucugaaaagcacacagaacgccaucgacgagauuaccaauaaggucaacuccgugaucgagaaaaugaauacgcaguuuacagcuguuggaaaggaguucaaccaccuugagaagagaauugaaaaucugaacaaaaagaucgaugacggcuuccucgauauuuggaccuacaaugccgagcugcuggugcuccuggaaaacgagcggacccuugacuaucaugauagcaaugucaaaaaccuguacgagaaggugcgcucucagcucaaaaacaaugccaaggaaaucgggaacggauguuuugaguucuaucacaagugcgacaauacauguauggaauccgucaaaaacggcaccuacgauuauccuaaguacagcgaggaagcuaaacugaauagagaggagaucgacggggugaaacuugaaucuacacggauuuaucaaauccuggccauuuacuccacgguugcgagcucccucgugcuggucgugucucugggcgcuaucagcuuuuggaugugcuccaacggaucucuccagugccgcauuuguaucuga

SEQ ID NO: 194833 - RNA, 1701 nt, Artificial Sequence; identical to SEQ ID NO: 194832
  derived and/or modified CDS sequence (opt5) from hemagglutinin__InfluenzaA__ACR10222

SEQ ID NO: 194834 - RNA, 1701 nt, Artificial Sequence
  derived and/or modified CDS sequence (opt5) from hemagglutinin__InfluenzaA__ACR10223
augaaggccauccuggugguccuccuguacaccuucacaacggcuaacgccgacacccuuugcauuggcuaucacgcgaauaacagcacagauaccguugacacagugcuggagaaaaaugugaccgucacacauuccgugaaccuccuggaagauaagcacaaugggaaacuuuguaagcugagaggaguugcuccccuccaucugggcaaaugcaacaucgccggguggauucugggaaauccugagugugaaucucucagcaccgccuccucuuggagcuacaucguggagacguccucuagcgacaacgggaccugcuauccgggcgauuuuauugacuacgaagaacugcgggagcagcuuuccagcgucucuuccuucgaacgcuuugagaucuuccccaagacaagcucuuggccuaaucacgauuccaacaagggagugaccgcugccuguccccaugcuggcgccaagagcuuuuauaagaaucugaucuggcucguuaaaaagggcaacucuuacccuaaacuguccaagagcuauauuaaugacaaggggaaagaagugcuuguccuguggggaauccaccaccccuccacaucugcggaucaacagagccucuaccagaacgccgacgcuuacguguucgugggcuccagcagauauucuaagaaauuuaagccugagauugccauccggccgaaaguccgcgaucaggaggggagaaugaauuacuauuggacccugguugaacccggagacaagauuacguucgaggcuacaggcaaccugguggugccucgguacgccuuugcgauggaacgcaacgccggguccggaaucauuaucagcgauacccccguccaugacugcaauacaaccugucaaaccccuaaaggcgcuaucaacacaucucuccccuuccagaauauucacccgaucacgauuggcaagugcccuaaguaugugaaaagcaccaagcugagacuugccacagggcugcggaacguucccuccauccagucucgcggacucuuuggcgcuauugccggguucaucgagggaggcuggaccgggaugguggacggaugguacggcuaucaucaccagaaugaacaaggcagcggguacgccgcugaucugaaauccacacagaacgcgaucgacgagauuaccaauaaggucaacagcgugaucgagaaaaugaauacgcaguuuacagccguuggaaaggaguucaaccaccuugagaagagaauugaaaaucugaacaaaaagguggaugacggcuuccucgauaucuggaccuacaaugcugagcugcugguccuccuggaaaacgagcggacccuugacuaucaugauucuaaugugaaaaaccuguacgagaagguccgcucccagcucaaaaacaaugccaaggaaauugggaacggauguuuugaguucuaucacaagugcgacaauacauguauggaaagcgugaaaaacggcaccuacgauuauccuaaguacucugaggaagccaaacugaauagagaggagaucgacgggguuaaacuugaauccacacggaucuaucaaauucuggcuaucuacagcacgguggccuccucucucguccuggugguuagccugggcgcgauuuccuuuuggaugugcucuaacggaagccuccagugccgcaucuguauuuga

SEQ ID NO: 194835 - RNA, 1701 nt, Artificial Sequence
  derived and/or modified CDS sequence (opt5) from hemagglutinin__InfluenzaA__ACR15183
augaagaccaucauugcccugagcuacauccucugccugguguucgcucagaaacuucccggcaacgacaauuccacagccacgcugugucucgggcaccaugcggucccuaacggaaccauuguuaagacaaucaccaaugaucaaauugaggugacaaacgcuaccgaacuggugcagucuagcuccacaggcgggaucugcgacucuccgcaccagauccuugauggagagaauuguacccugauugacgcccuccugggcgauccccagugcgacggguuucaaaacaaaaagugggaucuguucgucgaaagaagcaaagccuauuccaauuguuacccuuaugacgugcccgauuacgcuucucuccggagccugguugccuccagcggaacgcuugaguuuaacaaugaaucuuucaacuggaccggcgugacacagaauggcaccuccagcgcuugcaagcgcgggucugacaacuccuuuuucagcagacugaauuggcucacacaucugaaguuuaaauauccugcccuuaacgucaccaugcccaauaacgagaaguucgauaaacuguacaucuggggagugcaccauccuggcacggacaacgaucagauuuuuccguaugcgcaggccucugggcggaucacaguuuccaccaagcgcagccaacagacagugauucccaauaucggauccagaccucggguccgcaacauucccucuagaaucagcaucuacuggaccauugugaaaccuggcgacauccuccugauuaauuccaccgggaaccugaucgcuccccggggauacuucaagauucgcagcggcaagucuuccaucaugagaagcgacgccccgaucggcaaauguaauucugagugcauuacaccuaacgggagcauccccaaugauaagccuuuucagaacgugaaucggauuacguauggagcuuguccccgcuacgucaaacagaacacccucaagcuggccacaggcaugagaaauguucccgaaaaacaaacccgggggaucuucggagcgauugccggcuuuaucgagaacgggugggaaggaaugguggacggcugguauggcuuccgccaccaaaauuccgaggggaucggacaggcugccgaucuuaagucuacacaggcugccauuaaccagaucaauggcaaacugaacagacucauugggaagaccaacgagaaguuccaccagaucgaaaaagaguuuagcgaaguggagggacggauucaggaccuggaaaaguacgucgaggauacgaaaaucgaccuuugguccuauaaugccgagcugcucguggcucuggaaaaccaacauacaauugaucugaccgacagcgagaugaauaaacucuucgaaagaaccaagaagcagcugcgcgagaacgcggaagauaugggcaaugggugcuuuaagaucuaccacaaaugugacaacgccugcaucggcucuauucggaauggaacauaugaucaugacguuuacagagacgaggcucuuaacaaucgcuuccagaucaagggcguggagcugaaauccggguacaaggauuggauucucuggaucagcuuugccauuucuugcuuccugcuuugugucgcccugcucggauuuaucaugugggcuugccagaaaggcaacauccgguguaauauuugcaucuga

SEQ ID NO: 194836 - RNA, 1698 nt, Artificial Sequence
  derived and/or modified CDS sequence (opt5) from hemagglutinin__InfluenzaA__ACR15194
augaaggugaaacugcucguccugcuuugcaccuucacagccacguacgcugacaccaucuguauuggcuaucacgccaacaauagcacagauaccguugacacagugcuggagaagaacgugaccgucacacauuccgugaaucuccuggaaaacucucacaaugggaaacuuugccugcucaagggaaucgcgccccugcagcugggcaacuguagcguugcuggguggauucucggaaauccugagugcgaacugcuuaucuccaaagagucuuggagcuacauuguggaaaagccgaaccccgagaauggcaccuguuauccugggcauuuugccgauuacgaggaacugagagagcaacucuccucugucagcuccuucgaacgguuugagaucuuccccaaggagagcucuuggccuaaccacacggugaccggaguuuccgccagcugcucucauaauggcgaauccagcuuuuaucgcaaccugcuuuggcugacaggcaaaaaugggcucuaccccaaccugucuaaguccuaugcuaauaacaaagagaaggaagugcugguccucuggggagugcaccacccuccgaacaucggcaaucagaaagcccuguaccauaccgagaacgcuuacgugagcgucguuuccucucacuauagcagaaaguucacacccgaaauugccaagcggccuaaagugcgcgaccaggaggggagaaucaauuacuauuggacccuucuggagcccggagauacgauuaucuuugaagcgaacggcaaucucauugccccucgguacgcuuucgcccugucccgcgggcuuggaagcggcaucauuaacucuaaugcucccauggacaagugugaugccaaaugccagacaccgcaaggcgcgaucaacuccagccugccuuuucagaaugugcaucccgucaccaucggggaguguccuaaguaugugagaucugccaaacuccggaugguuacaggacugcgcaacauucccagcauccaguccagaggccuguucggggcuauugccggauuuaucgaaggcggguggaccggaaugguggacggcugguacggcuaucaccaccagaaugagcaagggucuggauacgcugccgaucaaaagagcacccagaacgccauuaauggcaucacaaacaaagucaauuccgugaucgaaaagaugaacacgcaguucaccgcuguugggaaggaguuuaacaaacucgagcggcgcauggaaaaucugaacaagaaaguggacgauggauucauugacaucuggacauacaaugcggagcuucugguccuccuggaaaacgagagaacccuugauuuccaugacagcaaugugaagaaccuguaugaaaaagucaagucucagcucaagaauaacgccaaagagauuggcaaucggugcuuugaguucuaccacaaguguaacgacgaaugcauggaguccgugaaaaaugggacauaugauuaccccaaguauagcgaagagucuaaacugaaccgcgagaagaucgacggcguuaagcuggaauccaugggaguguaccagauucucgcuaucuauagcaccgucgccuccucucuggugcuucugguuagccucggcgccaucuccuuuuggaugugcucuaaugggagccugcaguguagaauuugcaucuga

SEQ ID NO: 194837 - RNA, 1698 nt, Artificial Sequence; identical to SEQ ID NO: 192942
  derived and/or modified CDS sequence (opt5) from hemagglutinin__InfluenzaA__ACR15216

SEQ ID NO: 194838 - RNA, 1701 nt, Artificial Sequence
  derived and/or modified CDS sequence (opt5) from hemagglutinin__InfluenzaA__ACR15227
augaagaccaucauugcccugagcuacauccucugccugguguucgcucagaaacuucccggcaacgacaauuccacagccacgcugugucucgggcaccaugcggucccuaacggaaccauuguuaagacaaucaccaaugaucaaauugaggugacaaacgcuaccgaacuggugcagucuagcuccacaggcgggaucugcgacucuccgcaccagauccuugauggagagaauuguacccugauugacgcccuccugggcgauccccagugcgacggguuucaaaacaaaaagugggaucuguucgucgaaagaagcaaagccuauuccaauuguuacccuuaugacgugcccgauuacgcuucucuccggagccugguugccuccagcggaacgcuugaguuuaacaaugaaucuuucaacuggaccggcgugacacagaauggcaccuccagcgcuugccagcgcagaucuaacaaguccuuuuucagccggcugaauuggcucacacaucugaaguuuaaauauccugcccuuaacgucaccaugcccaauaacgagaaguucgacaaacuguacaucuggggagugcaccauccugggacggauaacgaccagauuucucucuaugcgcaaacauccggccgcaucaccguuagcacaaagagaucccagcagaccgugauuccgaauaucgggucucggccccgcgucagagaugugccuagccggauuuccaucuacuggaccaucgugaaacccggagacauucugcugaucaacagcacaggcaaucucauugccccucgcggguacuuuaagaucagaucuggaaaguccagcauuaugcggucugacgcucccaucggcaaauguaacagcgagugcaucacgccgaauggcuccauuccuaacgauaagcccuuccagaaugucaaccgcaucaccuauggggccuguccuagauacguuaaacaaaauacacugaagcuggcuaccggaaugcggaacgugcccgaacgccagacaagaggcauuuuuggggccaucgcgggauucauugagaauggcugggaagggaugauggacggaugguauggcuuucggcaccagaacucugagggcaccgggcaagccgcugaucuuaaaagcacgcaggccgcuaucaaucagaucaacggaaagcucaauagacugauuggcaaaacaaacgagaaguuccaccagaucgaaaaggaguucuccgaaguggaggggcgcauucaagaccuugaaaaauacgucgaggauaccaagaucgaccuguggagcuauaacgccgagcuccugguggcccuggaaaaucagcauaccauugaucucacagacucugagaugaacaaacuguuugaacggaccaagaaacagcuuagagagaaugcugaagauaugggaaacggcugcuucaagaucuaccacaagugugacaaugcgugcauuggguccauccgcaacggcacauaugaucaugacguuuaccgggacgaggcccugaauaacagauuucagaucaaaggaguggagcucaagagcggcuacaaagauuggauucuguggaucucuuucgcuauuuccugcuuucuucugugugucgcccuccugggguucaucaugugggccugccaaaagggaaauauucgcuguaacaucugcaucuga

SEQ ID NO: 194839 - RNA, 1698 nt, Artificial Sequence
  derived and/or modified CDS sequence (opt5) from hemagglutinin__InfluenzaA__ACR15238
augaaggugaaacugcucguccugcuuugcaccuucacagccacguacgcugacaccaucuguauuggcuaucacgccaacaauagcacagauaccguugacacagugcuggagaagaacgugaccgucacacauuccgugaaucuccuggaaaacucucacaaugggaaacuuugccugcucaagggaaucgcgccccugcagcugggcaacuguagcguugcuggguggauucucggaaauccugagugcgaacugcuuaucuccaaagagucuuggagcuacauuguggaaaagccgaaccccgagaauggcaccuguuauccugggcauuuugccgauuacgaggaacugagagagcaacucuccucugucagcuccuucgaacgguuugagaucuuccccaaggagagcucuuggccuaaccacacggugaccggaguuuccgccagcugcucucauaauggcgaauccagcuuuuaucgcaaccugcuuuggcugacaggcaaaaaugggcucuaccccaaccugucuaaguccuaugcuaauaacaaagagaaggaagugcugguccucuggggagugcaccacccuccgaacaucggcgugcagaaagcccuguaccauaccgagaaugcuuacgucagcguuguguccucucacuauagcagaaaguucacacccgaaauugccaagcggccuaaagugcgcgaccaggaggggagaaucaacuacuauuggacccuucuggagcccggagauacgauuaucuuugaagcgaauggcaaccucauugccccucgguacgcuuucgcccugucccgcggguuuggaagcggcaucauuaauucuaacgcucccauggacaagugugaugccaaaugccagacaccgcaaggcgcgaucaauuccagccuuccuuuccagaacguccaucccgugaccaucggggaguguccuaaguauguuagaucugccaaacugcggauggugacaggacuccgcaauauucccagcauccaguccagaggccuguuuggggcuauugccggauucaucgaaggcggguggaccggaauggucgacggcugguacggcuaucagcaccaaaacgagcaggggucuggauacgcugccgaucaaaagagcacccagaaugccauuaacggcaucacaaauaaagugaacuccguuaucgaaaagaugaauacgcaguuuaccgcuguggggaaggaguucaacaaacuggagcggcgcauggaaaaccucaauaagaaagucgacgauggauucauugacaucuggacauacaacgcggagcugcuugugcugcucgaaaaugagagaacccuggauuuucacgacagcaacgucaagaaucuuuaugaaaaagugaagucucagcugaagaacaaugccaaagagauuggcaacgggugcuucgaguuuuaccauaaguguaaugacgaaugcauggaguccguuaaaaacggcacauaugauuaccccaaguauagcgaagagucuaaacucaaucgggagaagaucgacggagugaagcuggaauccaugggcgucuaccagauucuggcuaucuauagcaccguggccuccucucucguucugcuugugagccugggggccaucuccuucuggaugugcucuaacggaagccuccaaugucgcauuugcaucuga

SEQ ID NO: 194840 - RNA, 1701 nt, Artificial Sequence
  derived and/or modified CDS sequence (opt5) from hemagglutinin__InfluenzaA__ACR15249
augaagaccaucauugcccugagcuacauccucugccugguguucgcucagaaacuucccggcaacgacaauuccacagccacgcugugucucgggcaccaugcggucccuaacggaaccauuguuaagacaaucaccaaugaucaaauugaggugacaaacgcuaccgaacuggugcagucuagcuccacaggcgagaucugcgacucuccgcaccagauccuugauggggaaaauuguacccugauugacgcccuccugggagauccccagugcgacggcuuucaaaacaaaaagugggaucuguucgucgagagaagcaaagccuauuccaauuguuacccuuaugacgugcccgauuacgcuucucuccggagccugguugccuccagcgggacgcuugaauuuaacaaugagucuuucaacuggaccggagugacacagaauggcaccuccagcgcuugcauccgcagaucuaacaauuccuuuuucagccggcugaacuggcucacacauucuaaguuuaaguauccugcccugaaugucaccaugcccaacaacgagaaauucgacaaacuuuacauuuggggcgugcaccauccugggacggauaaugaccagaucuuucuguaugcgcaggccuccggacgcauuacaguuagcaccaagagaucccaacagacagugaucccgaacauuggcucucggccccgcgucagaaauaucccuagccggaucuccauuuacuggaccaucgugaagcccggggauauucuccugaucaacagcaccggaaaucugauugcuccucgcggcuacuucaaaaucagaucugggaaguccagcaucaugcggucugacgcccccauuggaaaguguaacagcgaaugcaucacaccgaauggcuccauuccuaacgacaaacccuuucagaaugugaaccgcaucacguauggcgcuuguccuagauacgucaagcagaauacccucaaacuggccacagggaugcggaacguucccgagaagcaaacccgcggaauuuucggcgcgaucgccggguuuaucgaaaauggaugggagggcaugguggaugggugguauggauucagacaccagaacucugagggcauuggccaggcugccgaccuuaaaagcacacaagcugccaucgaucagauuaaugggaagcugaaccggcucaucggaaaaaccaacgaaaaguuccaccagauugagaaggaauuuuccgagguggaaggcagaauccaggaccuggagaaauacgucgaggauacgaagauugaccuuuggagcuauaaugccgaacugcucguggcucuggagaaccaacauacaaucgaucugaccgacucugaaaugaauaaacucuucgagaagaccaaaaagcagcugcgcgaaaacgcggaggauauggggaauggaugcuuuaagaucuaccacaaaugugacaacgccugcauuggcuccauccggaaugggacauaugaucaugacguuuacagagacgaggcucuuaacaaucgcuuccagauuaagggcguggaacugaaaagcggauacaaggauuggauccucuggauuucuuuugccaucuccugcuuccugcuuugugucgcccugcucggcuuuaucaugugggcuugccagaaagggaacauucgguguaauaucugcauuuga

SEQ ID NO: 194841 - RNA, 1701 nt, Artificial Sequence
  derived and/or modified CDS sequence (opt5) from hemagglutinin__InfluenzaA__ACR15282
augaagaccaucauugcccugagcuacauccucugccugguguucgcucagaaacuucccggcaacgacaauuccacagccacgcugugucucgggcaccaugcggucccuaacggaaccauuguuaagacaaucaugaaugaucaaauugaggugaccaacgcuacagaacuggugcagucuagcuccaccggcgagaucugcgacucuccgcaccagauccuugauggggaaaauuguacacugauugacgcccuccugggagauccccagugcgacggcuuucaaaacaaaaagugggaucuguucgucgagagaagcaaagccuauuccaauuguuacccuuaugacgugcccgauuacgcuucucuccggagccugguugccuccagcgggacccuugaauuuaacaaugagucuuucaacuggacgggagugacccagaauggcacauccagcgcuugcauccgcagaucuaacaauuccuuuuucagccggcugaacuggcucacccauucuaaguuuaaguauccugcccugaaugucacaaugcccaacaacgagaaauucgacaaacuuuacauuuggggcgugcaccauccugggaccgauaaugaccagaucuuucuguaugcgcaggccuccggacgcauuacgguuagcacaaagagaucccaacagaccgugaucccgaacauuggcucucggccccgcgucagaaauaucccuagccggaucuccauuuacuggacaaucgugaagcccggggauauucuccugaucaacagcaccggaaaucugauugcuccucgcggcuacuucaaaaucagaucugggaaguccagcaucaugcggucugacgcccccauuggaaaguguaacagcgaaugcaucaccccgaauggcuccauuccuaacgacaaacccuuucagaaugugaaccgcaucacauauggcgcuuguccuagauacgucaagcagaauacgcucaaacuggccaccgggaugcggaacguucccgagaagcaaacacgcggaauuuucggcgcgaucgccggguuuaucgaaaauggaugggagggcaugguggaugggugguauggauucagacaccagaacucugagggcauuggccaggcugccgaccuuaaaagcacccaagcugccaucgaucagauuaaugggaagcugaaccggcucaucggaaaaacaaacgaaaaguuccaccagauugagaaggaauuuuccgagguggaaggcagaauccaggaccuggagaaauacgucgaggauaccaagauugaccuuuggagcuauaaugccgaacugcucguggcucuggagaaccaacauacgaucgaucugacagacucugaaaugaauaaacucuucgagaagaccaaaaagcagcugcgcgaaaacgcggaggauauggggaauggaugcuuuaagaucuaccacaaaugugacaacgccugcauuggcuccauccggaaugggaccuaugaucaugacguuuacagagacgaggcucuuaacaaucgcuuccagauuaagggcguggaacugaaaagcggauacaaggauuggauccucuggauuucuuuugccaucuccugcuuccugcuuugugucgcccugcucggcuuuaucaugugggcuugccagaaagggaacauucgguguaauaucugcauuuga

SEQ ID NO: 194842 - RNA, 1701 nt, Artificial Sequence
  derived and/or modified CDS sequence (opt5) from hemagglutinin__InfluenzaA__ACR15293
augaagaccaucauugcccugagcuacauccucugccugguguucgcucagaaacuucccggcaacgacaauuccacagccacgcugugucucgggcaccaugcggucccuaacggaaccauuguuaagacaaucaccaaugaucaaauugaggugacaaacgcuaccgaacuggugcagucuagcuccacaggcgggaucugcgacucuccgcaccagauccuugauggagagaauuguacccugauugacgcccuccugggcgauccccagugcgacggguuucaaaacaaaaagugggaucuguucgucgaaagaagcaaagccuauuccaauuguuacccuuaugacgugcccgauuacgcuucucuccggagccugaucgccuccagcggaacgcuugaguuuaacaaugaaaacuucaauuggaccggcguuacacagaacggcaccucuuccgcuugcaagcgcgggagcgacaauuccuuuuucucuagacugaacuggcucacacaucugaaguuuaaauauccugcccuuaaggugaccaugcccaauaacgagaaauucgauaagcuguacauuuggggaguccaccauccuggcacggacaacgaucagaucuuucucuaugcgcaggccagcgggcggauuacagugucuaccaaacgcucccaacagacaguuaucccgaauauuggaagcagaccccgggugcgcaacaucccuuccagaaucucuauuuacuggaccaucgucaagcccggcgacauucugcugaucaauagcaccgggaaccucauugcuccucggggauacuucaagauccgcuccggcaaaagcucuaucaugagauccgacgcccccauuggcaaguguaauagcgagugcaucacaccgaacgggucuauuccuaaugauaaacccuuucagaacgugaaucggaucacguauggagcuuguccucgcuacgugaagcagaacacccugaaacuugccacaggcaugagaaauguccccgaaaagcaaacccgggggauuuucggagcgaucgccggcuuuaucgagaacgggugggaaggaaugguugacggcugguauggcuuccgccaccagaauagcgaggggauuggacaggcugccgaucugaaauccacacaagcugccaucaaccagauuaauggcaagcucaacagacugaucgggaagaccaacgagaaauuccaccagauugaaaaggaguuuucugaaguggagggacggauccaggaccuugaaaaauacguggaggauacgaagauugaccuguggagcuauaaugccgagcuccuggucgcucuggaaaaccaacauacaaucgaucucaccgacuccgagaugaauaaacuguucgaaagaaccaagaagcagcuucgcgagaacgcggaagauaugggcaaugggugcuuuaaaaucuaccacaagugugacaacgccugcauuggcagcauccggaauggaacauaugaucaugacguguacagagacgaggcucugaacaaucgcuuccagauuaaaggcguugagcucaagucuggguacaaagauuggauccuguggauuuccuuugccaucagcugcuuccuucuguguguggcccuccugggauuuaucaugugggcuugccagaagggcaacauucgguguaauaucugcauuuga

SEQ ID NO: 194843 - RNA, 1698 nt, Artificial Sequence
  derived and/or modified CDS sequence (opt5) from hemagglutinin__InfluenzaA__ACR15304
augaaggccaaacugcucgugcugcuuugcaccuucacagcuacguacgccgacaccaucuguauuggcuaucacgcgaacaauagcacagauaccgucgacacaguucuggagaagaacgugaccgugacacauuccgucaaucuccuggaagauucucacaacgggaaacuuugccugcucaagggaaucgcuccccugcagcugggcaauuguagcguggccggguggauucucggaaacccugagugcgaacugcuuaucuccaaagagucuuggagcuacauuguugaaaccccgaaucccgagaacggcacguguuauccuggguacuuugccgacuaugaggaacugagagagcaacucuccucugugagcuccuucgaacgguuugagaucuuccccaaggagagcucuuggccuaaucauaccgucacaggaguguccgcuagcugcucucacaacggcaaguccagcuuuuaccgcaaucugcuuuggcugaccggcaaaaacgggcucuaucccaaucugucuaaguccuacgccaacaauaaagaaaaggagguucuggugcucuggggaguccaucacccuccgaacacaggcaaccagagagcucuguaccacaccgaaaaugccuaugugagcguggucuccucucauuacagccggcgcuucacgcccgagaucgcgaaaagaccuaagguucgggaucaggaagggcgcauuaacuauuacuggacacuucuggagcccggagacaccaucauuuuugaggccaauggcaaccucaucgcuccuugguaugccuucgcucuguccagaggguuuggaagcggcauuaucacaucuaaugcccccauggaugaaugugacgcgaagugccagaccccgcaaggcgccauuaacuccagccuuccuuuccagaaugugcaccccgugaccaucggggaguguccuaaauacguccggucugcuaagcugcgcauggugacaggacucagaaacauccccagcauucagucccggggccuguuuggggccaucgcuggauucauugaaggcggguggacgggaaugguugauggcugguauggcuaccaucaccagaaugagcaagggucuggauacgccgccgaccagaaaagcacccagaacgcuaucaauggcauuacaaacaaggucaauuccgugaucgaaaagaugaacacccaguuuacagcgguggggaaagaguucaaucgccuggagagacggauggaaaaccucaacaaaaagguugaugacggauuccuggauaucuggaccuauaaugccgagcuucuggugcuccuggaaaacgagcgcacgcuugacuuucacgacagcaaugucaagaaccuguacgaaaaagugaagucucaacucaaaaauaacgcuaaggagauuggcaaugggugcuucgaguuuuaucauaaauguaacaaugaaugcauggaguccgucaagaacggcacauacgauuaucccaaguacagcgaagagucuaaacugaauagagagaagaucgacggagugaaacuggaauccaugggcguuuaucagauucucgccaucuacagcaccguggccuccucucugguccuucuggugagccucggggcuauuuccuucuggaugugcucuaacggaagccugcagugucggaucugcaucuga

SEQ ID NO: 194844 - RNA, 1698 nt, Artificial Sequence
  derived and/or modified CDS sequence (opt5) from hemagglutinin__InfluenzaA__ACR15315
augaaggccaaacugcucgugcugcuuugcaccuucacagcuacguacgccgacaccaucuguauuggcuaucacgcgaacaauagcacagauaccgucgacacaguucuggagaagaacgugaccgugacacauuccgucaaucuccuggaagauucucacaacgggaaacuuugccugcucaagggaaucgcuccccugcagcugggcaauuguagcguggccggguggauucucggaaacccugagugcgaacugcuuaucuccaaagagucuuggagcuacauuguugaaaccccgaaucccgagaacggcacguguuauccuggguacuuugccgacuaugaggaacugagagagcaacucuccucugugagcuccuucgaacgguuugagaucuuccccaagggaagcucuuggccuaaucauaccgucacaggcguguccgcuagcugcucucacaacggcaaguccagcuuuuaccgcaaucugcuuuggcugaccgggaaaaacggacucuaucccaaucugucuauguccuacguuaacaauaaggagaaagaagugcugguccucuggggcgugcaucacccuccgaacaucagagaucagcgggcccuguaccacacagagaacgcuuaugugagcgucguuuccucucauuacagccgcagauucacccccgaaauugccaagcggccuaaagugcgcgaccaggaggggagaaucaauuauuacuggacgcuucuggaacccggagauacaauuaucuuugaggcgaacggcaaucucauugccccuugguaugcuuucgcccugucccggggguuuggaagcggcaucauuaccucuaacgcucccaugggcgagugugacgccaagugccagacaccgcaaggggcgaucaauuccagccuuccuuuccagaacgugcaccccgucaccaucggagaauguccuaaguacgugcgcucugccaaacugagaaugguuaccggccuccggaauauucccagcauccagucccgcgggcuguuuggagcuauugccggcuucaucgaagggggauggacaggcaugguggauggcugguauggguaccaucaccagaacgaacaaggaucuggcuacgcugccgaccaaaagagcacgcagaaugccauuaacgggaucaccaauaaagucaacuccgugaucgagaagaugaauacacaguuuaccgcuguuggaaaagaguucaacaagcuggagagacggauggagaaucucaacaaaaagguggaugacggcuuccuggauauuuggacauauaacgcggaacuucugguccuccuggagaaugaacgcacccuugacuuucacgacagcaacgugaagaaucuguacgagaaagucaagucucagcucaaaaacaaugccaaggaaaucgggaacggcugcuucgaguuuuaucauaaauguaauaacgagugcauggaauccgugaagaauggaacguacgauuaucccaaguacagcgaggaaucuaaacugaacagagagaagauugacggcguuaaacuggaguccauggggguguaucagauccucgcuauuuacagcacagucgccuccucucuggugcuucugguuagccucggagccaucuccuucuggaugugcucuaauggcagccugcagugucggaucugcauuuga

SEQ ID NO: 194845 - RNA, 1698 nt, Artificial Sequence
  derived and/or modified CDS sequence (opt5) from hemagglutinin__InfluenzaA__ACR15326
augaaggccaaacugcucgugcugcuuugcaccuucacagcuacguacgccgacaccaucuguauuggcuaucacgcgaacaauagcacagauaccgucgacacaguucuggagaagaacgugaccgugacacauuccgucaaucuccuggaagauucucacaacgggaaacuuugccugcucaagggaaucgcuccccugcagcugggcaauuguagcguggccggguggauucucggaaacccugagugcgaacugcuuaucuccaaagagucuuggagcuacauuguugaaaccccgaaucccgagaacggcacguguuauccuggguacuuugccgacuaugaggaacugagagagcaacucuccucugugagcuccuucgaacgguuugagaucuuccccaagggaagcucuuggccuaaucauaccgucacaggcguguccgcuagcugcucucacaacggcaaguccagcuuuuaccgcaaucugcuuuggcugaccgggaaaaacggacucuaucccaaucugucuauguccuacguuaacaauaaggagaaagaagugcugguccucuggggcgugcaucacccuccgaacaucgggaaccagagagcccuguaccacacagagaaugcuuaugugagcgucguuuccucucauuacagccggcgcuucacccccgaaauugccaagagaccuaaagugcgggaucaggagggacgcaucaacuauuacuggacgcuucuggaacccggcgacacaauuaucuuugaggcgaaugggaaccucauugccccuugguaugcuuucgcccuguccagaggauuuggcagcggcaucauuaccucuaaugcucccaugggggagugugaugaaaagugccagacaccgcaaggagccaucaacuccagccuuccuuuccagaaugugcaccccgucaccaucggcgaguguccuaaguacgugcggucugcgaaacugcgcaugguuaccgggcucagaaacauucccagcauccagucccggggacuguuuggcgccauugcuggguucaucgaaggaggcuggacaggcaugguggacgggugguauggauaccaucaccagaaugagcaaggcucuggguacgccgcugaucaaaagagcacgcagaacgccauuaauggaaucaccaacaaagucaauuccgugaucgaaaagaugaacacacaguuuaccgccguuggcaaagaguucaauaagcuggagcgcagaauggaaaaccucaacaaaaagguggacgauggguuccuggacauuuggacauauaaugcugagcuucugguccuccuggaaaacgagcggacccuugauuuucacgacagcaaugugaagaaccuguacgaaaaagucaagucucagcucaaaaauaacgcgaaggagaucggcaauggaugcuucgaguuuuaucauaaauguaacaaugaaugcauggaguccgugaagaacggcacguacgacuaucccaaguacagcgaagagucuaaacugaaucgcgagaagauugaugggguuaaacuggaauccaugggaguguaucagauccucgccauuuacagcacagucgcuuccucucuggugcuucugguuagccucggcgccaucuccuucuggaugugcucuaacgggagccugcaguguagaaucugcauuuga

SEQ ID NO: 194846 - RNA, 1698 nt, Artificial Sequence
  derived and/or modified CDS sequence (opt5) from hemagglutinin__InfluenzaA__ACR15359
augaaggugaaacugcucguccugcuuugcaccuucacagccacguacgcugacaccaucuguauuggcuaucacgccaacaauagcacagauaccguugacacagugcuggagaagaacgugaccgucacacauuccgugaaucuccuggaaaacucucacaaugggaaacuuugccugcucaagggaaucgcgccccugcagcugggcaacuguagcguugcuggguggauucucggaaauccugagugcggccugcuuaucuccaaagaaucuuggagcuacauuguggagaagccgaaccccgaaaaugggaccuguuauccuggacauuuugccgauuacgaggagcugagagaacaacucuccucugucagcuccuucgagcgguuugaaaucuuccccaaggagagcucuuggccuaaccacacggugaccggcguuuccgccagcugcucucauaauggcgaguccagcuuuuaucgcaaccugcuuuggcugacagggaaaaauggacucuaccccaaccugucuaaguccuaugcuaauaacaaagaaaaggaggugcugguccucuggggcgugcaccacccuccgaacaucggggaccagaaagcccuguaccauaccgaaaaugcuuacgugagcgucguuuccucucacuauagcagaaaguucacacccgagauugccaagcggccuaaagugcgcgaucaggaaggaagaaucaacuacuauuggacccuucuggagcccggcgacacgauuaucuuugaggcgaaugggaaccucauugccccucgguacgcuuucgcccugucccgcggauuuggcagcggcaucauuaauucuaacgcucccauggauaagugugacgccaaaugccagacaccgcaaggggcgaucaauuccagccuuccuuuccagaacgugcaucccgucaccaucggagaauguccuaaguaugugagaucugccaaacugcggaugguuacaggccuccgcaauauucccagcauccaguccagagggcuguuuggagcuauugccggcuucaucgaagggggauggaccggcaugguggauggcugguacggguaucaccaccagaacgaacaaggaucuggcuacgcugccgaccaaaagagcacccagaaugccauuaacgggaucacaaauaaagucaacuccgugaucgagaagaugaauacgcaguuuaccgcuguuggaaaggaguucaacaaacuggagcggcgcauggagaaccucaauaagaaaguggaugacggcuucauugauaucuggacauacaacgcggaacugcuuguccugcucgagaaugaaagaacccuggacuuucaugacagcaacgugaagaaucuuuaugagaaagucaagucucagcugaagaacaaugccaaagaaauugggaacggcugcuucgaguuuuaccacaaguguaaugaugagugcauggaauccgugaaaaacggaacauaugacuaccccaaguauagcgaggaaucuaaacucaaucgggagaagaucgauggcguuaagcuggaguccauggggguguaccagauucuggcuaucuauagcaccgucgccuccucucucgugcugcuuguuagccugggagccaucuccuucuggaugugcucuaacggcagccuccagugucgcauuugcaucuga

SEQ ID NO: 194847 - RNA, 1698 nt, Artificial Sequence
  derived and/or modified CDS sequence (opt5) from hemagglutinin__InfluenzaA__ACR15370
augaaggugaaacugcucguccugcuuugcacccugacagccacguacgcugacaccaucuguauuggcuaucacgccaacaauagcacagauaccguugacacagugcucgagaagaacgugaccgucacacauuccgugaaucugcuugaaaacucucacaaugggaaacugugccuccugaagggaaucgcgccccugcagcucggcaacuguagcguugcuggguggauucugggaaauccugagugcgaacuucugaucuccaaagagucuuggagcuacauuguggaaaagccgaaccccgagaauggcaccuguuauccugggcauuucgccgauuacgaggaacucagagagcaacuguccucugucagcuccuuugaacgguucgagaucuuucccaaggagagcucuuggccuaaccacacggugaccggaguuuccgccagcugcucucauaauggcgaauccagcuucuaucgcaaccuucuguggcucacaggcaaaaaugggcuguaccccaaccugucuaaguccuaugcuaauaacaaagagaaggaagugcucguccuguggggagugcaccacccuccgaacaucggcgaccagaaagcccuuuaccauaccgagaaugcuuacgugagcgucguuuccucucacuauagcagaaaguuuacacccgaaauugccaagcggccuaaagugcgcgaucaggaggggagaaucaacuacuauuggacccugcucgagcccggagacacgauuaucuucgaagcgaauggcaaccugauugccccucgguacgcuuuugcccuuucccgcggguucggaagcggcaucauuaauucuaacgcucccauggauaagugugacgccaaaugccagacaccgcaaggcgcgaucaauuccagccugccuuuucagaacgugcaucccgucaccaucggggaguguccuaaguaugugagaucugccaaacuccggaugguuacaggacugcgcaauauucccagcauccaguccagaggccuguucggggcuauugccggauuuaucgaaggcggguggaccggaaugguggauggcugguacggcuaucaccaccagaacgagcaagggucuggauacgcugccgaccaaaagagcacccagaaugccauuaacggcaucacaaauaaagucaacuccgugaucgaaaagaugaauacgcaguucaccgcuguugggaaggaguuuaacaaacucgagcggcgcauggaaaaccugaauaagaaaguggaugacggauucauugauaucuggacauacaacgcggagcuucugguccuccuggaaaaugagagaacccuugacuuccaugacagcaacgugaagaaucuguaugaaaaagucaagucucagcucaagaacaaugccaaagagauuggcaacgggugcuuugaguucuaccacaaguguaaugaugaaugcauggaguccgugaaaaacggcacauaugacuaccccaaguauagcgaagagucuaaacugaaucgggagaagaucgauggaguuaagcuggaauccaugggcguguaccagauucucgcuaucuauagcaccgucgccuccucucugauccuucuggugagccucggggccauuuccuuuuggaugugcucuaacggaagccugcagugucgcaucugcauuuga

SEQ ID NO: 194848 - RNA, 1701 nt, Artificial Sequence; identical to SEQ ID NO: 194373
  derived and/or modified CDS sequence (opt5) from hemagglutinin__InfluenzaA__ACR15381

SEQ ID NO: 194849 - RNA, 1701 nt, Artificial Sequence; identical to SEQ ID NO: 194380
  derived and/or modified CDS sequence (opt5) from hemagglutinin__InfluenzaA__ACR15392

SEQ ID NO: 194850 - RNA, 1701 nt, Artificial Sequence; identical to SEQ ID NO: 194000
  derived and/or modified CDS sequence (opt5) from hemagglutinin__InfluenzaA__ACR15403

SEQ ID NO: 194851 - RNA, 1701 nt, Artificial Sequence; identical to SEQ ID NO: 194000
  derived and/or modified CDS sequence (opt5) from hemagglutinin__InfluenzaA__ACR15414

SEQ ID NO: 194852 - RNA, 1698 nt, Artificial Sequence; identical to SEQ ID NO: 194846
  derived and/or modified CDS sequence (opt5) from hemagglutinin__InfluenzaA__ACR15425

SEQ ID NO: 194853 - RNA, 1698 nt, Artificial Sequence
  derived and/or modified CDS sequence (opt5) from hemagglutinin__InfluenzaA__ACR15436
augaaggugaaacugcucguccugcuuugcaccuucacagccacguacgcugacaccaucuguauuggcuaucacgccaacaauagcacagauaccguugacacagugcuggagaagaacgugaccgucacacauuccgugaaucuccuggaaaacucucacaaugggaaacuuugccugcucaagggaaucgcgccccugcagcugggcaacuguagcguugcuggguggauucucggaaauccugagugcgaacugcuuaucuccaaagagucuuggagcuacauuguggaaaagccgaaccccgagaauggcaccuguuauccugggcauuuugccgauuacgaggaacugagagagcaacucuccucugucagcuccuucgaacgguuugagaucuuccccaaggagagcucuuggccuaaccacacggugaccggaguuuccgccagcugcucucauaauggcgaauccagcuuuuaucgcaaccugcuuuggcugacaggcaaaaaugggcucuaccccaaccugucuaaguccuaugcuaauaacaaaggaaaggaggugcugguccucuggggcgugcaccacccuccgaacaucggggaccagaauacccuguaccauacagaaaacgccuacgugagcgucguuuccucucacuauagcagaaaauucacccccgagauugcuaagcggccuaaggugcgcgaucaggaaggaagaaucaauuacuauuggacgcuucuggagcccggcgacacaauuaucuuugaggccaacgggaaucucauugcgccucgguacgccuucgcucugucccgcggauuuggcagcggcaucauuaacucuaaugcccccauggauaaaugugacgcuaagugccagaccccgcaaggggccaucaacuccagccuuccuuuccagaaugugcaucccgucacaaucggagaauguccuaaauaugugagaucugcgaagcugcggaugguuaccggccuccgcaacauucccagcauccaguccagagggcuguuuggagccauugcuggcuucaucgaagggggauggaccggcaugguggauggcugguacggguaucaccaccagaaugaacaaggaucuggcuacgccgcugaccagaaaagcacacagaacgccauuaaugggaucacgaacaaggucaauuccgugaucgagaaaaugaacacccaguuuacagccguuggaaaggaguucaacaagcuggagcggcgcauggagaaucucaacaaaaagguggaugacggcuucauugauaucuggaccuacaaugcugaacugcuuguccugcucgagaacgaaagaacacuggacuuucaugacagcaaugugaaaaaccuuuaugagaaggucaaaucucaacugaagaauaacgcgaaggaaauugggaauggcugcuucgaguuuuaccacaaauguaacgaugagugcauggaauccgugaagaauggaaccuaugacuaccccaaauauagcgaggaaucuaagcucaaccgggagaaaaucgauggcguuaagcuggaguccauggggguguaccagauucuggccaucuauagcacggucgcuuccucucucgugcugcuuguuagccugggagccaucuccuucuggaugugcucuaauggcagccuccagugucgcauuugcaucuga

SEQ ID NO: 194854 - RNA, 1698 nt, Artificial Sequence
  derived and/or modified CDS sequence (opt5) from hemagglutinin__InfluenzaA__ACR15458
augaaggugaaacugcucguccugcuuugcaccuucacagccacguacgcugacaccaucuguauuggcuaucacgccaacaauagcacagauaccguugacacagugcuggagaagaacgugaccgucacacauuccgugaaucuccuggaaaacucucacaaugggaaacuuugccugcucaagggaaucgcgccccugcagcugggcaacuguagcguugcuggguggauucucggaaauccugagugcgaacugcuuaucuccaaagagucuuggagcuacauuguggaaaacccgaaucccgagaacggcaccuguuauccugggcauuuugccgauuacgaggaacugagagagcaacucuccucugucagcuccuucgaacgguuugagaucuuccccaaggagagcucuuggccuaaucacacggugaccggaguuuccgccagcugcucucauaacggcgaauccagcuuuuaucgcaaucugcuuuggcugacaggcaagaacgggcucuaccccaaucugucuaaauccuaugcuaacaacaaggagaaagaagugcugguccucuggggagugcaccacccuccgaauaucggcgaccagaaggcccuguaccauaccgagaacgcuuacgugagcgucguuuccucucacuauagcagaaaauucacacccgaaauugccaagcggccuaaggugcgcgaucaggaggggagaaucaauuacuauuggacccuucuggagcccggagacacgauuaucuuugaagcgaacggcaaucucauugccccucgguacgcuuucgcccugucccgcggguuuggaagcggcaucauuaacucuaaugcucccauggauaaaugugacgccaagugccagacaccgcaaggcgcgaucaacuccagccuuccuuuccagaaugugcaucccgucaccaucggggaguguccuaaauaugugagaucugccaagcugcggaugguuacaggacuccgcaacauucccagcauccaguccagaggccuguuuggggcuauugccggauucaucgaaggcggguggaccggaaugguggauggcugguacggcuaucaccaccagaaugagcaagggucuggauacgcugccgaccagaaaagcacccagaacgccauuaauggcaucacaaacaaggucaauuccgugaucgaaaagaugaacacgcaguuuaccgcuguugggaaagaguucaacaagcuggagcggcgcauggaaaaucucaacaaaaagguggaugacggauucauugauaucuggacauacaaugcggagcugcuuguccugcucgaaaacgagagaacccuggacuuucaugacagcaaugugaaaaaccuuuaugaaaaggucaaaucucaacugaagaauaacgccaaggagauuggcaaugggugcuucgaguuuuaccacaaauguaacgaugaaugcauggaguccgugaagaauggcacauaugacuaccccaaauauagcgaagagucuaagcucaaccgggagaaaaucgauggaguuaagcuggaauccaugggcguguaccagauucuggcuaucuauagcaccgucgccuccucucucgugcugcuuguuagccugggggccaucuccuucuggaugugcucuaauggaagccuccagugucgcauuugcaucuga

SEQ ID NO: 194855 - RNA, 1698 nt, Artificial Sequence
  derived and/or modified CDS sequence (opt5) from hemagglutinin__InfluenzaA__ACR15469
augaaggugaaacugcucguccugcuuugcaccuucacagccacguacgcugacaccaucuguauuggcuaucacgccaacaauagcacagauaccguugacacagugcuggagaagaacgugaccgucacacauuccgugaaucuccuggaagauucucacaacgggaaacuuugccugcucaagggaaucgcgccccugcagcugggcaauuguagcguugcuggguggauucucggaaacccugagugcgaacugcuuaucuccaaagagucuuggagcuacauuguggaaaagccggaccccgagaauggcaccuguuauccugggcauuuugccgauuacgaggaacugagagagcaacucuccucugucagcuccuucgaacgguuugagaucuuccccaaggagagcucuuggccuaaccacacggugaccggaguuuccgccagcugcucucauaauggcgaauccagcuuuuaucgcaaccugcuuuggcugacaggcaaaaaugggcucuaccccaaccugucuaaguccuaugcuaauaacaaagagaaggaagugcugguccucuggggagugcaccacccuccgaauaucggcgaccagaacacccuguaccauacagagaacgccuacgugagcgucguuuccucucacuauagcagaaaauucacccccgaaauugcuaagcggccuaaggugcgcgaucaggaggggagaaucaauuacuauuggacgcuucuggagcccggagacacaauuaucuuugaagccaacggcaaucucauugcgccucgguacgccuucgcucugucccgcggguuuggaagcggcaucauuaacucuaaugcccccauggauaaaugugacgcuaagugccagaccccgcaaggcgccaucaacuccagccuuccuuuccagaaugugcaucccgucacaaucggggaguguccuaaauaugugagaucugcgaagcugcggaugguuaccggacuccgcaacauucccagcauccaguccagaggccuguuuggggccauugcuggauucaucgaaggcggguggaccggaaugguggauggcugguacggcuaucaccaccagaaugagcaagggucuggauacgccgcugaccagaaaagcacacagaacgccauuaauggcaucacgaacaaggucaauuccgugaucgaaaagaugaacacccaguuuacagccguugggaaagaguucaauaagcuggagcggcgcauggaaaaccucaacaaaaagguggaugacggauucauugacaucuggaccuacaaugcugagcugcuuguccugcucgaaaacgagagaacacuggauuuucaugacagcaaugugaaaaaccuuuaugaaaaggucaaaucucaacugaagaauaacgcgaaggagauuggcaaugggugcuucgaguuuuaccacaaauguaacgaugaaugcauggaguccgugaagaauggcaccuaugacuaccccaaauauagcgaagagucuaagcucaaccgggagaaaaucgauggaguuaagcuggaauccaugggcguguaccagauucuggccaucuauagcacggucgcuuccucucucgugcugcuuguuagccugggggccaucuccuucuggaugugcucuaauggaagccuccagugucgcauuugcaucuga

SEQ ID NO: 194856 - RNA, 1698 nt, Artificial Sequence; identical to SEQ ID NO: 194853
  derived and/or modified CDS sequence (opt5) from hemagglutinin__InfluenzaA__ACR15480

SEQ ID NO: 194857 - RNA, 1698 nt, Artificial Sequence
  derived and/or modified CDS sequence (opt5) from hemagglutinin__InfluenzaA__ACR15491
augaaggugaaacugcucguccugcuuugcaccuucacagccacguacgcugacaccaucuguauuggcuaucacgccaacaauagcacagauaccguugacacagugcuggagaagaacgugaccgucacacauuccgugaaucuccuggaaaacucucacaaugggaaacuuugccugcucaagggaaucgcgccccugcagcugggcaacuguagcguugcuggguggauucucggaaauccugagugcgaacugcuuaucuccaaagagucuuggagcuacauuguggaaaagccgaaccccgagaauggcaccuguuauccugggcauuuugccgauuacgaggaacugagagagcaacucuccucugucagcuccuucgaacgguuugagaucuuccccaaggagagcucuuggccuaaccacacggugaccggaguuuccgccagcugcucucauaauggcgaauccagcuuuuaucgcaaccugcuuuggcugacaggcagaaaugggcucuaccccaaccugucuaaauccuaugcuaauaacaaggagaaagaagugcugguccucuggggagugcaccacccuccgaacaucguggaccagaagacccuguaccggacagagaaugccuacgucagcguuguguccucucauuauagccgcaaauucacccccgaaauugcuaagagaccuaaggugcgggaucaggagggccgcaucaacuacuauuggacgcuucuggagcccggggacacaauuaucuuugaagccaauggaaaccucauugcgccuagauacgccuucgcucugucccggggcuuugggagcggaaucauuaauucuaacgcccccauggauaaaugugacgcuaagugccagaccccgcaaggcgccaucaauuccagccuuccuuuccagaacguccaccccgugacaaucggcgaguguccuaaauauguucgcucugcgaagcugagaauggugaccgggcuccggaauauucccagcauccagucccgcggacuguuuggcgccauugcuggguucaucgaaggaggcuggaccgggauggucgauggaugguacggcuaucaucaccagaacgagcaaggcucuggguacgccgcugaccagaaaagcacacagaaugccauuaacggaaucacgaauaaggugaacuccguuaucgaaaagaugaauacccaguuuacagccgugggcaaagaguucaacaagcuggagagacggauggaaaaccucaauaaaaaggucgaugacggguucauugauaucuggaccuacaacgcugagcugcuugugcugcucgaaaaugagcgcacacuggacuuucacgacagcaacgucaaaaaucuuuaugaaaaggugaaaucucaacugaagaacaaugcgaaggagauuggaaacggcugcuucgaguuuuaccauaaauguaaugaugaaugcauggaguccguuaagaacgggaccuaugacuaccccaaauauagcgaagagucuaagcucaauagagagaaaaucgauggcauuaagcuggaauccaugggaguguaccagauccuggccaucuauagcacggucgcuuccucucucgugcugcuuguuagccugggcgccauuuccuucuggaugugcucuaacgggagccuccagugucggaucugcauuuga

SEQ ID NO: 194858 - RNA, 1698 nt, Artificial Sequence
  derived and/or modified CDS sequence (opt5) from hemagglutinin__InfluenzaA__ACR15502
augaaggugaaacugcucguccugcuuugcaccuucacagccacguacgcugacaccaucuguauuggcuaucacgccaacaaugcgacagauaccguugacacagugcuggagaagaacgugaccgucacacauagcgugaaucuccuggaaaacucccacaaugggaaacuuugccugcucaagggaaucgcuccccugcagcugggcaacuguucuguugccggguggauucucggaaauccugagugcgaacugcuuaucagcaaagaguccuggucuuacauuguggaaaagccgaaccccgagaauggcaccuguuauccugggcauuuugccgauuacgaggaacugagagagcaacucagcuccgucucuagcuucgaacgguuugagaucuuccccaaggaguccagcuggccuaaccacacggugaccggaguuucugcuuccugcagccauaauggcgaaucuuccuuuuaucgcaaccugcuuuggcugacaggcaaaaaugggcucuaccccaaccugagcaagucuuaugccaauaacaaaggaaaggaggugcugguccucuggggcgugcaccacccuccgaacaucggggaccagaauacccuguaccauacagaaaacgcuuacguguccgucguuagcucccacuauucuagaaaauucacccccgagauugccaagcggccuaaggugcgcgaucaggaaggaagaaucaauuacuauuggacgcuucuggagcccggcgacacaauuaucuuugaggcgaacgggaaucucauugccccucgguacgcuuucgcccugagccgcggauuuggcuccggcaucauuaacagcaaugcucccauggauaaaugugacgccaagugccagaccccgcaaggggcgaucaacucuucccuuccuuuccagaaugugcaucccgucacaaucggagaauguccuaaauaugugagaagcgccaagcugcggaugguuaccggccuccgcaacauucccucuauccagagcagagggcuguuuggagcuauugccggcuucaucgaagggggauggaccggcaugguggauggcugguacggguaucaccaccagaaugaacaaggauccggcuacgcugccgaccagaaaucuacacagaacgccauuaaugggaucacgaacaaggucaauagcgugaucgagaaaaugaacacccaguuuacagcuguuggaaaggaguucaacaagcuggagcggcgcauggagaaucucaacaaaaagguggaugacggcuucauugauaucuggaccuacaaugcggaacugcuuguccugcucgagaacgaaagaacacuggacuuucaugacuccaaugugaaaaaccuuuaugagaaggucaaaagccaacugaagaauaacgccaaggaaauugggaauggcugcuucgaguuuuaccacaaauguaacgaugagugcauggaaucugugaagaauggaaccuaugacuaccccaaauauuccgaggaaagcaagcucaaccgggagaaaaucgauggcguuaagcuggagucuauggggguguaccagauucuggcuaucuauuccacggucgccagcucccucgugcugcuuguuucucugggagccaucagcuucuggaugugcuccaauggcucucuccagugucgcauuugcaucuga

SEQ ID NO: 194859 - RNA, 1698 nt, Artificial Sequence; identical to SEQ ID NO: 194715
  derived and/or modified CDS sequence (opt5) from hemagglutinin__InfluenzaA__ACR15513

SEQ ID NO: 194860 - RNA, 1701 nt, Artificial Sequence
  derived and/or modified CDS sequence (opt5) from hemagglutinin__InfluenzaA__ACR15524
augaagaccaucauugcccugagcuacauccucugccugguguucgcucagaaacuucccggcaacgacaauuccacagccacgcugugucucgggcaccaugcggucccuaacggaaccauuguuaagacaaucaccaaugaucaaauugaggugacaaacgcuaccgaacuggugcagucuagcuccacaggcgggaucugcgacucuccgcaccagauccuugauggagagaauuguacccugauugacgcccuccugggcgauccccagugcgacggguuucaaaacaaaaagugggaucuguucgucgaaagaagcaaagccuauuccaauuguuacccuuaugacgugcccgauuacgcuucucuccggagccugguugccuccagcggaacgcuugaguuuaacaaugaaucuuucaacuggaccggcgugacacagaauggcaccuccagcgcuugcaagcgcagaucuaacaaguccuuuuucagccggcugaauuggcucacacaucugaaauuuaaguauccugcccuuaacgucaccaugcccaauaacgagaaauucgacaagcuguacaucuggggagugcaccauccugggacggauaacgaccagauuucucucuaugcgcaggccuccggccgcaucacaguuagcaccaaaagaucccaacagacagugauuccgaauaucgggucucggccccgcgucagagaugugccuagccggauuuccaucuacuggaccaucgucaagagcggagacauucugcugaucaacucuaccggcaaucucauugcuccccgcggguacuuuaagaucagauccggaaaaagcucuauuaugcggagcgacgccccuaucggcaaguguaacuccgagugcaucacacccaauggcucuauuccgaacgauaaaccuuuccagaaugugaaccgcaucacguauggggcuugucccagauacguuaagcagaauacccugaaacuugccacaggaaugcggaacgugccugaaaagcaaacccgcggcauuuuuggggcgaucgccggauucauugagaauggcugggaagggaugguggacggaugguauggcuuuagacaccagaacagcgagggcacagggcaggcugccgaucugaaauccacccaagcugccaucaaucagaucaacggaaagcucaaucggcugauuggcaagacgaacgagaaauuccaccagaucgaaaaggaguucagcgaagucgaggggcgcauucaggaccuugaaaaauacguggaggauacaaagaucgaccuguggucuuauaacgccgagcuccugguugcucuggaaaaucaacauaccauugaucucaccgacuccgagaugaacaaacuguuugaaagaacaaagaagcagcuucgggagaaugcggaagauaugggaaacggcugcuucaaaaucuaccacaagugugacaaugccugcauugggagcaucagaaacggcaccuaugaucaugacguguaccgcgacgaggcucugaauaaccgguuucagaucaaaggagucgagcucaagucuggcuacaaagauuggauucuguggaucuccuucgccauuagcugcuuucuucugugugugguucuccugggguucaucaugugggccugccagaagggaaauauuagauguaacaucugcaucuga

SEQ ID NO: 194861 - RNA, 1701 nt, Artificial Sequence; identical to SEQ ID NO: 194669
  derived and/or modified CDS sequence (opt5) from hemagglutinin__InfluenzaA__ACR15535

SEQ ID NO: 194862 - RNA, 1701 nt, Artificial Sequence
  derived and/or modified CDS sequence (opt5) from hemagglutinin__InfluenzaA__ACR15546
augaagaccaucauugcccugagcuacauccucugccugguguucgcucagaaacuucccggcaacgacaauuccacagccacgcugugucucgggcaccaugcggucccuaacggaaccauuguuaagacaaucaccaaugaucaaauugaggugacaaacgcuaccgaacuggugcagucuagcuccacaggcgggaucugcgacucuccgcaccauauccuugauggagagaauuguacccugauugacgcccuccugggcgauccccagugcgacggguuucagaacaaaaagugggaucuguucgucgaaagaagcaaagccuauuccaauuguuacccuuaugacgugcccgauuacgcuucucuccggagccugguugccuccagcggaacgcuugaguuuaacaaugaaucuuucaacuggaccggcgugacacaaaauggcaccuccagcgcuugcaagcgcagaucuaacaauuccuuuuucagccggcugaacuggcucacacaccugaaguuuaaauauccugcccuuaaugucaccaugcccaacaacgagaaguucgacaaacuguacaucuggggagugcaucacccugggacggauaaugaccagauuucucucuaugcgcaggccuccggccgcaucacaguuagcaccaagagaucccagcaaacagugauuccgaacaucgggucucggccccgcgucagagauauuagcucccggaucagcaucuacuggaccauugugaaaccuggagacauccugcugauuaauucuaccggcaaccucaucgcuccccgcggguacuuuaagauuagauccggaaagagcucuaucaugcggagcgacgccccuaucggcaaauguaauuccgagugcauuacacccaacggcucuaucccgaaugauaagccuuuccagaacgugaaucgcauuacguauggggcuugucccagauacgucaaacagaacacccugaaacuugccacaggaaugcggaauguuccugaaacccagacacgcggcaucuuuggggcgauugccggauucaucgagaacggcugggaagggaugguggacggaugguauggcuuuagacaccaaaauagcgagggcaccgggcaggcugccgaucugaaguccacgcaggcugccaucaaccaaauuaauggaaagcucaaccggcugaucggcaaaacaaacgagaaguuccaucagauugaaaaggaguucagcgaaguggaggggagaauccaggaccuugaaaaauacgucgaggauaccaagauugaccuguggucuuauaaugccgagcuccugguggcucuggaaaaccagcacaccaucgaucucacagacuccgagaugaauaaacuguuugaacgcaccaagaaacaacuucgggagaacgcggaagauaugggaaauggcugcuucaagauuuaccauaagugugacaacgccugcaucgggagcaucagaaaugagacauaugaucacgacguuuaccgcgacgaggcucugaacaaucgguuucagauuaaaggcguggaacucaagucuggauacaaagauuggauccuguggauuuccuucgccaucagcugcuuucuucugugugucgcccuccugggcuucauuaugugggcuugccagaaggggaacaucagauguaauaucugcauuuga

SEQ ID NO: 194863 - RNA, 1701 nt, Artificial Sequence; identical to SEQ ID NO: 194444
  derived and/or modified CDS sequence (opt5) from hemagglutinin__InfluenzaA__ACR15557

SEQ ID NO: 194864 - RNA, 1701 nt, Artificial Sequence; identical to SEQ ID NO: 192702
  derived and/or modified CDS sequence (opt5) from hemagglutinin__InfluenzaA__ACR15568

SEQ ID NO: 194865 - RNA, 1701 nt, Artificial Sequence
  derived and/or modified CDS sequence (opt5) from hemagglutinin__InfluenzaA__ACR15579
augaagaccaucauugcccugagcuacauccucugccugguguucgcucagaaacuucccggcaacgacaauuccacagccacgcugugucucgggcaccaugcggucccuaacggaaccauuguuaagacaaucaccaaugaucaaauugaggugacaaacgcuaccgaacuggugcagucuagcuccacaggcgggaucugcgacucuccgcaccagauccuugauggagagaauuguacccugauugacgcccuccugggcgauccccagugcgacggguuucaaaacaaaaagugggaucuguucgucgaaagaagcaaagccuauuccaauuguuacccuuaugacgugcccgauuacgcuucucuccggagccugguugccuccagcggaacgcuugaguuuaacaaugaaucuuucaacuggaccggcgugacacagaauggcaccuccagcgcuugcaagcgcagaucuaacaauuccuuuuucagccggcugaacuggcucacacaucugaaguuuaaauauccugcccuuaaugucaccaugcccaacaacgagaaguucgacaaacuguacaucuggggagugcaccauccugggacggauaaugaccagauuuuucucuaugcgcaggccucuggccgcaucacaguuuccaccaagagaagccaacagacagugauuccgaacaucgggucccggccccgcgucagaaauauuccuucucggaucagcaucuacuggaccauugugaaccccggagauauccugcugauuaauuccaccggcaaccucaucgcuccucgcggguacuucaaaauuagaagcggaaagucuuccaucaugcggagcgacgcccccaucggcaaguguaauucugagugcauuacaccgaacggcagcaucccuaaugacaaacccuuucagaacgugaaucgcauuacguauggggcuuguccuagauacgucaagcagaacacccugaaacuugccacaggaaugcggaauguucccgaaaagcaaacccgcggcaucuucggggcgauugccggauuuaucgagaacggcugggaagggaugguggauggaugguauggcuucagacaccaaaauuccgagggcaucgggcaggcugccgaccugaaaucuacacaggcugccauuaaccagaucaacggaaagcucaaucggcugauuggcaaaaccaacgagaaguuccaccagaucgaaaaggaguuuagcgaaguggaggggcgcauucaggaucuugaaaaauacgucgaggacacgaagaucgaucugugguccuauaaugccgagcuccugguggcucuggaaaaccaacauacaauugaccucaccgauagcgagaugaauaaacuguucgaaagaaccaagaaacagcuucgggagaacgcggaagacaugggaaauggcugcuuuaagaucuaccacaagugugauaacgccugcaucgggucuauuagaaauggcacauaugaccaugauguuuaccgcgacgaggcucugaacaaucgguuccagaucaaaggaguggagcucaaguccggcuacaaagacuggauucuguggaucagcuuugccauuucuugcuuccuucugugugucgcccuccugggguuuaucaugugggcuugccagaagggaaacaucagauguaauauuugcaucuga

SEQ ID NO: 194866 - RNA, 1701 nt, Artificial Sequence
  derived and/or modified CDS sequence (opt5) from hemagglutinin__InfluenzaA__ACR15590
augaagaccaucauugcccugagcuacauccucugccugguguucacacagaaacuucccggcaacgacaauuccacggcuacccugugucucgggcaccaugccgucccuaacggaacaauuguuaagaccaucacaaaugaucaaauugaggugaccaacgcgacagaacuggugcagucuagcuccaccggcgggaucugcgacucuccgcaccagauccuugauggagagaauuguacgcugauugacgcucuccugggcgauccccagugcgacggguuucaaaacaaaaagugggaucuguucgucgaaagaagcaaagccuauuccaauuguuacccuuaugacgugcccgauuacgccucucuccggagccugguugcuuccagcggaacccuugaguuuaacaaugaaucuuucaacuggacaggcgugacccagaauggcacauccagcgccugcaagcgcagaucuaacaauuccuuuuucagccggcugaacuggcucacccaucugaaguuuaaauauccugcucuuaaugucacgaugcccaacaacgagaaguucgacaaacuguacaucuggggagugcaccauccugggacagauaaugaccagauuuuucucuaugcccaggcgucuggccgcaucaccguuuccacaaagagaagccaacagaccgugauuccgaacaucgggucccggccccgcgucagaaauauuccuucucggaucagcaucuacuggaccauugugaaacccggagauauccugcugauuaacuccacaggcaaucucaucgccccucgcggguacuucaagauuagaagcggaaagucuuccaucaugcggagcgacgcucccaucggcaaauguaacucugagugcauuacgccgaauggcagcaucccuaacgacaagcccuuucagaaugugaaccgcauuaccuauggggccuguccuagauacgucaaacagaauacacugaaacuugcuaccggaaugcggaacguucccgaaaaacaaacacgcggcaucuucggggccauugcgggauuuaucgagaauggcugggaagggaugguggauggaugguauggcuucagacaccagaacuccgagggcaucgggcaggccgcugaccugaagucuacccaagccgcuauuaaucagaucaacggaaaacucaaccggcugauuggcaagacgaaugagaaguuccaccagaucgaaaaagaguuuagcgaaguggaggggcgcauucaggaucuugaaaaguacgucgaggacacaaaaaucgaucugugguccuauaacgccgagcuccugguggcccuggaaaaucaacauaccauugaccucaccgauagcgagaugaacaagcuguucgaaagaacaaagaagcagcuucgggagaaugcugaagacaugggaaacggcugcuuuaagaucuaccacaaaugugauaaugcgugcaucgggucuauuagaaacggcaccuaugaccaugauguuuaccgcgacgaggcccugaauaaccgguuccagaucaagggaguggagcucaaauccggcuacaaggacuggauucuguggaucagcuuugcuauuucuugcuuccuucugugugucgcccuccugggguuuaucaugugggccugccagaaaggaaauaucagauguaacauuugcaucuga

SEQ ID NO: 194867 - RNA, 1701 nt, Artificial Sequence; identical to SEQ ID NO: 192702
  derived and/or modified CDS sequence (opt5) from hemagglutinin__InfluenzaA__ACR15601

SEQ ID NO: 194868 - RNA, 1701 nt, Artificial Sequence
  derived and/or modified CDS sequence (opt5) from hemagglutinin__InfluenzaA__ACR18920
augaaggccauccuggugguccuccuguacaccuucgcuacagccaacgcggacacgcuuugcauuggcuaucacgcuaauaacagcaccgauacaguugacaccgugcuggagaagaaugugacagucacccauuccgugaaccuccuggaagauaagcacaaugggaaacuuuguaagcugagaggaguugcuccccuccaucugggcaaaugcaacaucgccggguggauucugggaaauccugagugugaaucucucagcacagccuccucuuggagcuacaucguggagaccuccucuagcgacaacggcacgugcuauccgggggauuuuauugacuacgaagaacugcgggagcagcuuuccagcgucucuuccuucgaacgcuuugagaucuuccccaagaccagcucuuggccuaaucacgauuccaacaagggagugacagccgcuuguccccaugccggcgcgaaaucuuuuuauaagaaucugaucuggcucguuaaaaagggcaacagcuacccuaaacuguccaagagcuauauuaaugacaaggggaaagaagugcuuguccuguggggaauccaccaccccuccaccucugccgaucaacagagccucuaccagaacgcugacgccuacguguucgugggcuccagcagauauucuaagaaauuuaagccugagauugcuauccggccgaaaguccgcgaucaggaggggagaaugaauuacuauuggacacugguugaacccggagacaagauuaccuucgaggccacgggcaaccugguggugccucgguacgcguuugccauggaacgcaacgcuggguccggaaucauuaucagcgauacacccguccaugacugcaauaccacaugucaaaccccuaaaggcgccaucaacaccucucuccccuuccagaauauucacccgaucacaauuggcaagugcccuaaguaugugaaaagcacgaagcugagacuugcuaccgggcugcggaacguucccuccauccagucucgcggacucuuuggcgccauugccggguucaucgagggaggcuggacagggaugguggacggaugguacggcuaucaucaccagaaugaacaaggcagcggguacgcugcggaucugaaauccacccagaacgccaucgacgagauuacaaauaaggucaacagcgugaucgagaaaaugaauauucaguuuaccgcuguuggaaaggaguucaaccaccuugagaagagaaucgaaaaucugaacaaaaagguggaugacggcuuccucgauauuuggacguacaaugccgagcugcugguccuccuggaaaacgagcggacacuugacuaucaugauucuaaugugaaaaaccuguacgagaagguccgcucccagcucaaaaacaaugccaaggaaaucgggaacggauguuuugaguucuaucacaagugcgacaauaccuguauggaaagcgugaaaaacggcaccuacgauuauccuaaguacucugaggaagcuaaacugaauagagaggagaucgacgggguuaaacuugaauccacacggauuuaucaaauccuggccauuuacagcaccguggcguccucucucguccuggugguuagccugggcgcuaucuccuuuuggaugugcucuaacggaagccuccagugccgcauuuguaucuga

SEQ ID NO: 194869 - RNA, 1701 nt, Artificial Sequence; identical to SEQ ID NO: 194741
  derived and/or modified CDS sequence (opt5) from hemagglutinin__InfluenzaA__ACR18975

SEQ ID NO: 194870 - RNA, 1701 nt, Artificial Sequence; identical to SEQ ID NO: 194728
  derived and/or modified CDS sequence (opt5) from hemagglutinin__InfluenzaA__ACR18976

SEQ ID NO: 194871 - RNA, 1701 nt, Artificial Sequence; identical to SEQ ID NO: 194728
  derived and/or modified CDS sequence (opt5) from hemagglutinin__InfluenzaA__ACR18977

SEQ ID NO: 194872 - RNA, 1701 nt, Artificial Sequence; identical to SEQ ID NO: 194741
  derived and/or modified CDS sequence (opt5) from hemagglutinin__InfluenzaA__ACR18978

SEQ ID NO: 194873 - RNA, 1701 nt, Artificial Sequence; identical to SEQ ID NO: 194728
  derived and/or modified CDS sequence (opt5) from hemagglutinin__InfluenzaA__ACR18979

SEQ ID NO: 194874 - RNA, 1701 nt, Artificial Sequence; identical to SEQ ID NO: 194794
  derived and/or modified CDS sequence (opt5) from hemagglutinin__InfluenzaA__ACR18981

SEQ ID NO: 194875 - RNA, 1701 nt, Artificial Sequence; identical to SEQ ID NO: 194728
  derived and/or modified CDS sequence (opt5) from hemagglutinin__InfluenzaA__ACR18982

SEQ ID NO: 194876 - RNA, 1701 nt, Artificial Sequence; identical to SEQ ID NO: 194741
  derived and/or modified CDS sequence (opt5) from hemagglutinin__InfluenzaA__ACR18988

SEQ ID NO: 194877 - RNA, 1701 nt, Artificial Sequence
  derived and/or modified CDS sequence (opt5) from hemagglutinin__InfluenzaA__ACR18991
augaaggccauccuggugguccuccuguacaccuucgcuacagccaacgcggacacgcuuugcauuggcuaucacgcuaauaacagcaccgauacaguugacaccgugcuggagaagaaugugacagucacccauuccgugaaccuccuggaagauaagcacaauagaaaacuuuguaagcugcgcgggguugcuccccuccaucugggaaaaugcaacaucgccggcuggauucuggggaauccugagugugaaucucucagcacagccuccucuuggagcuacaucguggagaccuccucuagcgacaacggaacgugcuauccgggcgauuuuauugacuacgaggagcugcgggagcagcuuuccagcgucucuuccuucgaaagauuugagaucuuccccaagaccagcucuuggccuaaucacgauuccaacaagggggugacagccgcuuguccccaugccggagcgaaaucuuuuuauaagaaucugaucuggcucguuaaaaagggcaacagcuacccuaaacuguccaagagcuauauuaaugacaagggcaaagaagugcuuguccugugggggauccaccaccccuccaccucugccgaucaacagagccucuaccagaacgcugacgccuacguguucgugggauccagccgguauucuaagaaauuuaagccugagauugcuauccgcccgaaagucagagaucaggagggccggaugaauuacuauuggacacugguugaacccggggacaagauuaccuucgaggccacgggaaaccugguggugccucgcuacgcguuugccauggaaagaaacgcuggcuccgggaucauuaucagcgauacacccguccaugacugcaauaccacaugucaaaccccuaaaggagccaucaacaccucucuccccuuccagaauauucacccgaucacaauuggcaagugcccuaaguaugugaaaagcacgaagcugcggcuugcuaccggccugcgcaacguucccuccauccagucuagagggcucuuuggagccauugccggcuucaucgaagggggauggacaggcaugguggacgggugguacggauaucaucaccagaaugaacaaggcagcggcuacgcugcggaucugaaauccacccagaacgccaucgacgagauuacaaauaaggucaacagcgugaucgagaaaaugaauacccaguuuacggcuguugggaaggaguucaaccaccuugaaaagcggauugaaaaucugaacaaaaagguggaugacggauuccucgauaucuggacauacaaugccgagcugcugguccuccuggaaaacgagcgcacccuugacuaucaugauucuaaugugaaaaaccuguacgagaaggucagaucccagcucaaaaacaaugccaaggaaauuggcaacggguguuuugaguucuaucacaagugcgacaauaccuguauggaaagcgugaaaaacggaacauacgauuauccuaaguacucugaggaagcuaaacugaaucgggaggagaucgacggcguuaaacuugaauccacccgcaucuaucaaauucuggccaucuacagcacaguggcguccucucucguccuggugguuagccugggggcuauuuccuuuuggaugugcucuaacggcagccuccagugcagaaucuguauuuga

SEQ ID NO: 194878 - RNA, 1701 nt, Artificial Sequence; identical to SEQ ID NO: 194728
  derived and/or modified CDS sequence (opt5) from hemagglutinin__InfluenzaA__ACR18993

SEQ ID NO: 194879 - RNA, 1701 nt, Artificial Sequence; identical to SEQ ID NO: 194767
  derived and/or modified CDS sequence (opt5) from hemagglutinin__InfluenzaA__ACR18995

SEQ ID NO: 194880 - RNA, 1701 nt, Artificial Sequence; identical to SEQ ID NO: 194789
  derived and/or modified CDS sequence (opt5) from hemagglutinin__InfluenzaA__ACR23302

SEQ ID NO: 194881 - RNA, 1701 nt, Artificial Sequence; identical to SEQ ID NO: 194741
  derived and/or modified CDS sequence (opt5) from hemagglutinin__InfluenzaA__ACR33743

SEQ ID NO: 194882 - RNA, 1701 nt, Artificial Sequence; identical to SEQ ID NO: 194728
  derived and/or modified CDS sequence (opt5) from hemagglutinin__InfluenzaA__ACR38821

SEQ ID NO: 194883 - RNA, 1701 nt, Artificial Sequence; identical to SEQ ID NO: 194728
  derived and/or modified CDS sequence (opt5) from hemagglutinin__InfluenzaA__ACR38822

SEQ ID NO: 194884 - RNA, 1701 nt, Artificial Sequence; identical to SEQ ID NO: 194728
  derived and/or modified CDS sequence (opt5) from hemagglutinin__InfluenzaA__ACR38823

SEQ ID NO: 194885 - RNA, 1701 nt, Artificial Sequence; identical to SEQ ID NO: 194794
  derived and/or modified CDS sequence (opt5) from hemagglutinin__InfluenzaA__ACR38824

SEQ ID NO: 194886 - RNA, 1701 nt, Artificial Sequence
  derived and/or modified CDS sequence (opt5) from hemagglutinin__InfluenzaA__ACR38825
augaaggccauccuggugguccuccuguacaccuucgcuacagccaacgcggacacgcuuugcauuggcuaucacgcuaauaacagcaccgauacaguugacaccgugcuggagaagaaugugacagucacccauuccgugaaccuccuggaagauaagcacaaugggaaacuuuguaagcugagaggaguugcuccccuccaucugggcaaaugcaacaucgccggguggauucugggaaauccugagugugaaucucucagcacagccuccucuuggagcuacaucguggagaccuccucuagcgacaacggcacgugcuauccgggggauuuuauugacuacgaagaacugcgggagcagcuuuccagcgucucuuccuucgaacgcuuugagaucuuccccaagaccagcucuuggccuaaucacgauuccaacaagggagugacagccgcuuguccccaugccggcgcgaaaucuuuuuauaagaaucugaucuggcucguuaaaaagggcaacagcuacccuaaacuguccaagagcuauauuaaugacaaggggaaagaagugcuuguccuguggggaauccaccaccccuccaccucugccgaucaacagagccucuaccagaacgcugacgccuacguguucgugggcacauccagauauagcaagaaauuuaagccugagauugcuauccggccgaaaguccgcgggcaggagggaagaaugaauuacuauuggacccugguugaacccggcgauaagauuacguucgaggccacagggaaccugguggugccucgguacgcguuugccauggaacgcaacgcuggaucuggcaucauuaucuccgacacccccguccaugauugcaauacaaccugucaaaccccuaaaggcgccaucaacacaagccuccccuuccagaauauucacccgaucacgauugggaagugcccuaaguaugugaaaucuaccaagcugagacuugcuacaggacugcggaacguucccagcauccagucccgcggccucuuuggggccauugccggauucaucgagggcggguggaccggaaugguggacggcugguacggcuaucaucaccagaaugaacaagggucuggauacgcugcggaccugaaaagcacacagaacgccaucgaugagauuaccaauaaggucaacuccgugaucgagaaaaugaauacgcaguuuacagcuguuggcaaggaguucaaccaccuugagaagagaauugaaaaucugaacaaaaagaucgacgauggguuccucgacauuuggaccuacaaugccgagcugcuggugcuccuggaaaacgagcggacccuugauuaucaugacagcaaugucaaaaaccuguacgagaaggugcgcucucagcucaaaaacaaugccaaggaaaucggaaacggcuguuuugaguucuaucacaagugcgauaauacauguauggaauccgucaaaaacgggaccuacgacuauccuaaguacagcgaggaagcuaaacugaauagagaggagaucgauggcgugaaacuugaaucuacacggauuuaucaaauccuggccauuuacuccacgguugcgagcucccucgugcuggucgugucucugggagcuaucagcuuuuggaugugcuccaacggcucucuccagugccgcauuuguaucuga

SEQ ID NO: 194887 - RNA, 1701 nt, Artificial Sequence; identical to SEQ ID NO: 194741
  derived and/or modified CDS sequence (opt5) from hemagglutinin__InfluenzaA__ACR38826

SEQ ID NO: 194888 - RNA, 1701 nt, Artificial Sequence; identical to SEQ ID NO: 194728
  derived and/or modified CDS sequence (opt5) from hemagglutinin__InfluenzaA__ACR38827

SEQ ID NO: 194889 - RNA, 1701 nt, Artificial Sequence; identical to SEQ ID NO: 194794
  derived and/or modified CDS sequence (opt5) from hemagglutinin__InfluenzaA__ACR38828

SEQ ID NO: 194890 - RNA, 1701 nt, Artificial Sequence; identical to SEQ ID NO: 194728
  derived and/or modified CDS sequence (opt5) from hemagglutinin__InfluenzaA__ACR38829

SEQ ID NO: 194891 - RNA, 1701 nt, Artificial Sequence; identical to SEQ ID NO: 194767
  derived and/or modified CDS sequence (opt5) from hemagglutinin__InfluenzaA__ACR38830

SEQ ID NO: 194892 - RNA, 1701 nt, Artificial Sequence; identical to SEQ ID NO: 194741
  derived and/or modified CDS sequence (opt5) from hemagglutinin__InfluenzaA__ACR39354

SEQ ID NO: 194893 - RNA, 1701 nt, Artificial Sequence; identical to SEQ ID NO: 194741
  derived and/or modified CDS sequence (opt5) from hemagglutinin__InfluenzaA__ACR39393

SEQ ID NO: 194894 - RNA, 1701 nt, Artificial Sequence; identical to SEQ ID NO: 194741
  derived and/or modified CDS sequence (opt5) from hemagglutinin__InfluenzaA__ACR39403

SEQ ID NO: 194895 - RNA, 1701 nt, Artificial Sequence; identical to SEQ ID NO: 194741
  derived and/or modified CDS sequence (opt5) from hemagglutinin__InfluenzaA__ACR39413

SEQ ID NO: 194896 - RNA, 1701 nt, Artificial Sequence; identical to SEQ ID NO: 194741
  derived and/or modified CDS sequence (opt5) from hemagglutinin__InfluenzaA__ACR39423

SEQ ID NO: 194897 - RNA, 1701 nt, Artificial Sequence; identical to SEQ ID NO: 194741
  derived and/or modified CDS sequence (opt5) from hemagglutinin__InfluenzaA__ACR39433

SEQ ID NO: 194898 - RNA, 1701 nt, Artificial Sequence; identical to SEQ ID NO: 194741
  derived and/or modified CDS sequence (opt5) from hemagglutinin__InfluenzaA__ACR39443

SEQ ID NO: 194899 - RNA, 1701 nt, Artificial Sequence
  derived and/or modified CDS sequence (opt5) from hemagglutinin__InfluenzaA__ACR39453
auggaggccauccuggugguccuccuguacaccuucgcuacagccaacgcggacacgcuuugcauuggcuaucacgcuaauaacagcaccgauacaguugacaccgugcuggaaaagaaugugacagucacccauuccgugaaccuccuggaggauaaacacaaugggaagcuguguaaacugagaggaguugcgccccuccaucugggcaagugcaacaucgccggguggauucugggaaauccugaaugugagucucucagcacagcuuccucuuggagcuacaucguggaaaccuccucuagcgacaacggcacgugcuauccgggggauuuuauugacuacgaggagcugcgggaacagcuuuccagcgucucuuccuucgagcgcuuugaaaucuuccccaaaaccagcucuuggccuaaucacgauuccaacaagggagugacagccgcuuguccccaugccggcgccaagagcuuuuauaaaaaucugaucuggcucguuaagaaaggcaacucuuacccuaagcuguccaaaagcuauauuaaugacaaggggaaggaggugcuuguccuguggggaauccaccaccccuccaccucugccgaucaacagagccucuaccagaacgcugacgccuacguguucgugggcacauccagauauagcaaaaaguuuaaaccugagauugcuauccggccgaagguccgcgaucaggaagggagaaugaauuacuauuggacccugguugagcccggagacaaaauuacguucgaagccacaggcaaccugguggugccucgguacgcguuugccauggagcgcaacgcugggucuggaaucauuaucuccgauacccccguccaugacugcaauacaaccugucaaaccccuaagggcgccaucaacacaagccuccccuuccagaauauucacccgaucacgauuggcaaaugcccuaaguaugugaagucuaccaaacugagacuugcuacagggcugcggaacguucccagcauccagucccgcggacucuuuggcgccauugccggguucaucgaaggaggcuggaccgggaugguggacggaugguacggcuaucaucaccagaaugagcaaggcucuggguacgcugcggaucuuaagagcacacagaacgccaucgacgagauuaccaauaaagucaacuccgugaucgaaaagaugaauacgcaguuuacagcuguuggaaaagaguucaaccaccuugaaaagagaauugagaaucugaacaagaaaguggaugacggcuuccucgauaucuggaccuacaaugccgaacugcugguccuccuggagaacgagcggacccuugacuaucaugauagcaaugugaagaaccuguacgaaaaaguccgcucucagcucaagaacaaugccaaagagauugggaacggauguuuugaguucuaucacaagugcgacaauacauguauggaauccgugaagaacggcaccuacgauuauccuaaauacagcgaagaggcuaagcugaauagagaggaaaucgacgggguuaaacuugagucuacacggaucuaucaaauucuggccaucuacuccacgguggcgagcucccucguccuggugguuucucugggcgcuauuagcuuuuggaugugcuccaacggaucucuccagugccgcaucuguauuuga

SEQ ID NO: 194900 - RNA, 1701 nt, Artificial Sequence; identical to SEQ ID NO: 194741
  derived and/or modified CDS sequence (opt5) from hemagglutinin__InfluenzaA__ACR39463

SEQ ID NO: 194901 - RNA, 1701 nt, Artificial Sequence; identical to SEQ ID NO: 194741
  derived and/or modified CDS sequence (opt5) from hemagglutinin__InfluenzaA__ACR39473

SEQ ID NO: 194902 - RNA, 1701 nt, Artificial Sequence; identical to SEQ ID NO: 194741
  derived and/or modified CDS sequence (opt5) from hemagglutinin__InfluenzaA__ACR39483

SEQ ID NO: 194903 - RNA, 1701 nt, Artificial Sequence; identical to SEQ ID NO: 194741
  derived and/or modified CDS sequence (opt5) from hemagglutinin__InfluenzaA__ACR39493

SEQ ID NO: 194904 - RNA, 1701 nt, Artificial Sequence; identical to SEQ ID NO: 194741
  derived and/or modified CDS sequence (opt5) from hemagglutinin__InfluenzaA__ACR40288

SEQ ID NO: 194905 - RNA, 1701 nt, Artificial Sequence; identical to SEQ ID NO: 194741
  derived and/or modified CDS sequence (opt5) from hemagglutinin__InfluenzaA__ACR40298

SEQ ID NO: 194906 - RNA, 1701 nt, Artificial Sequence
  derived and/or modified CDS sequence (opt5) from hemagglutinin__InfluenzaA__ACR40308
augaaggccauccuggugguccuccuguacaccuucgcuacagccaacgcggacacgcuuugcauuggcuaucacgcuaauaacagcaccgauacaguugacaccgugcuggagaagaaugugacagucacccauuccgugaaccuccuggaagauaagcacaaugggaaacuuuguaagcugagaggaguugcuccccuccaucugggcaaaugcaacaucgccggguggauucugggaaauccugagugugaaucucucagcacagccuccucuuggagcuacaucguggagaccuccucuagcgacaacggcacgugcuauccgggggauuuuauugacuacgaagaacugcgggagcagcuuuccagcgucucuuccuucgaacgcuuugagaucuuccccaagaccagcucuuggccuaaucacgauuccaacaagggagugacagccgcuuguccccaugccggcgcgaaaucuuuuuauaagaaucugaucuggcucguuaaaaagggcaacagcuacccuaaacuguccaagagcuauauuaaugacaaggggaaagaagugcuuguccuguggggaauccaccaccccuccaccucugccgaucaacagagccucuaccagaacgcugacgccuacguguucgugggcuccagcagauauucuaagaaauuuaagccugagauugcuauccggccgaaaguccgcgaucaggaggggagaaugaauuacuauuggacacugguugaacccggagacaagauuaccuucgaggccacgggcaaccugguggugccucgguacgcguuugccauggaacgcaacgcuggguccggaaucauuaucagcgauacacccguccaugacugcaauaccacaugucaaaccccuaaaggcgccaucaacaccucucuccccuuccagaauauuuauccgaucacaauuggcaagugcccuaaguacgugaaaagcacgaagcugagacuugcuaccgggcugcggaacguucccuccauccagucucgcggacucuuuggcgccauugccggguucaucgagggaggcuggacagggaugguggacggaugguauggcuaccaccaucagaaugaacaaggcagcggguacgcugcggaucugaaauccacccagaacgccaucgacgagauuacaaauaaggucaacagcgugaucgagaaaaugaauacccaguuuacggcuguuggaaaggaguucaaccaccuugagaagagaauugaaaaucugaacaaaaagguggaugacggcuuccucgauaucuggacauauaaugccgagcugcugguccuccuggaaaacgagcggacccuugacuaccacgauucuaaugugaaaaaccuguaugagaagguccgcucccagcucaaaaacaaugccaaggaaauugggaacggauguuuugaguucuaccauaagugcgacaauaccuguauggaaagcgugaaaaacggcacauaugauuacccuaaguauucugaggaagcuaaacugaauagagaggagaucgacgggguuaaacuugaauccacccggaucuaccaaauucuggccaucuacagcacaguggcguccucucucguccuggugguuagccugggcgcuauuuccuuuuggaugugcucuaacggaagccuccagugccgcaucuguauuuga

SEQ ID NO: 194907 - RNA, 1701 nt, Artificial Sequence; identical to SEQ ID NO: 194741
  derived and/or modified CDS sequence (opt5) from hemagglutinin__InfluenzaA__ACR40318

SEQ ID NO: 194908 - RNA, 1701 nt, Artificial Sequence; identical to SEQ ID NO: 194741
  derived and/or modified CDS sequence (opt5) from hemagglutinin__InfluenzaA__ACR40328

SEQ ID NO: 194909 - RNA, 1701 nt, Artificial Sequence; identical to SEQ ID NO: 194741
  derived and/or modified CDS sequence (opt5) from hemagglutinin__InfluenzaA__ACR40338

SEQ ID NO: 194910 - RNA, 1701 nt, Artificial Sequence; identical to SEQ ID NO: 194741
  derived and/or modified CDS sequence (opt5) from hemagglutinin__InfluenzaA__ACR40348

SEQ ID NO: 194911 - RNA, 1701 nt, Artificial Sequence; identical to SEQ ID NO: 194741
  derived and/or modified CDS sequence (opt5) from hemagglutinin__InfluenzaA__ACR40358

SEQ ID NO: 194912 - RNA, 1701 nt, Artificial Sequence; identical to SEQ ID NO: 194741
  derived and/or modified CDS sequence (opt5) from hemagglutinin__InfluenzaA__ACR40378

SEQ ID NO: 194913 - RNA, 1701 nt, Artificial Sequence; identical to SEQ ID NO: 194741
  derived and/or modified CDS sequence (opt5) from hemagglutinin__InfluenzaA__ACR40388

SEQ ID NO: 194914 - RNA, 1701 nt, Artificial Sequence; identical to SEQ ID NO: 194728
  derived and/or modified CDS sequence (opt5) from hemagglutinin__InfluenzaA__ACR46986

SEQ ID NO: 194915 - RNA, 1701 nt, Artificial Sequence; identical to SEQ ID NO: 194728
  derived and/or modified CDS sequence (opt5) from hemagglutinin__InfluenzaA__ACR46988

SEQ ID NO: 194916 - RNA, 1701 nt, Artificial Sequence; identical to SEQ ID NO: 194728
  derived and/or modified CDS sequence (opt5) from hemagglutinin__InfluenzaA__ACR46989

SEQ ID NO: 194917 - RNA, 1701 nt, Artificial Sequence; identical to SEQ ID NO: 194728
  derived and/or modified CDS sequence (opt5) from hemagglutinin__InfluenzaA__ACR46990

SEQ ID NO: 194918 - RNA, 1701 nt, Artificial Sequence; identical to SEQ ID NO: 194728
  derived and/or modified CDS sequence (opt5) from hemagglutinin__InfluenzaA__ACR46992

SEQ ID NO: 194919 - RNA, 1701 nt, Artificial Sequence; identical to SEQ ID NO: 194728
  derived and/or modified CDS sequence (opt5) from hemagglutinin__InfluenzaA__ACR46993

SEQ ID NO: 194920 - RNA, 1701 nt, Artificial Sequence; identical to SEQ ID NO: 194728
  derived and/or modified CDS sequence (opt5) from hemagglutinin__InfluenzaA__ACR46994

SEQ ID NO: 194921 - RNA, 1701 nt, Artificial Sequence
  derived and/or modified CDS sequence (opt5) from hemagglutinin__InfluenzaA__ACR47006
augaaggccauccuggugguccuccuguacaccuucgcuacagccaacgcggacacgcuuugcauuggcuaucacgcuaauaacagcaccgauacaguugacaccgugcuggagaaaaaugugacagucacccauuccgugaacauccucgaagauaagcacaaugggaaacuguguaaacuuagaggaguugcuccccugcaucucggcaagugcaacauugccggguggauccugggaaauccugagugugaaucucugagcacagccuccucuuggagcuacauuguggagaccuccucuagcgacaacggcacgugcuauccgggggauuuuaucgacuacgaagaacuccgggagcagcuguccagcgucucuuccuucgaacgcuuugagaucuuccccaagaccagcucuuggccuaaucacgauuccaacaagggagugacagccgcuuguccccaugccggcgcgaaaucuuuuuauaagaaucuuauuuggcugguuaaaaagggcaacagcuacccuaaacucuccaagagcuauaucaaugacaaggggaaagaagugcugguccuuuggggcauucaccaccccuccaccucugccgaucaacagagccuguaccagaacgcugacgccuacguguucgugggauccagcagauauucuaagaaauuuaagccugagaucgcuauucggccgaaaguccgcgaucaggaggggagaaugaauuacuauuggacacucguugaacccggagacaagaucaccuucgaggccacgggcaaccugguggugccucgguacgcguuugccauggaacgcaacgcuggguccggaauuaucaucagcgauacacccguccaugacugcaauaccacaugucaaaccccuaaaggcgccauuaacaccucucugcccuuccagaauauccacccgauuacaaucggcaagugcccuaaguaugugaaaagcacgaagcucagacuggcuaccgggcuucggaacguucccuccauucagucucgcggacuguuuggcgccaucgccggguucaucgagggaggcuggacagggaugguggacggaugguacggcuaucaucaccagaaugaacaaggcagcggguacgcugcggaucucaaauccacccagaacgccauugacgagaucacaaauaaggucaacagcgugauugagaaaaugaauacccaguuuacggcuguuggaaaggaguucaaccaccuggagaagagaaucgaaaaucuuaacaaaaagguggaugacggcuuccuggauauuuggacauacaaugccgagcuccugguccugcucgaaaacgagcggacccuggacuaucaugauucuaaugugaaaaaccuuuacgagaagguccgcucccagcugaaaaacaaugccaaggaaaucgggaacggauguuuugaguucuaucacaagugcgacaauaccuguauggaaagcgugaaaaacggcacauacgauuauccuaaguacucugaggaagcuaaacucaauagagaggagaucgacgggguuaagcuggaauccacccggauuuaucaaauccuugccauuuacagcacaguggcguccucucugguccucgugguuagccugggcgcuaucuccuuuuggaugugcucuaacggaagccugcagugccgcauuuguaucuga

SEQ ID NO: 194922 - RNA, 1701 nt, Artificial Sequence; identical to SEQ ID NO: 194741
  derived and/or modified CDS sequence (opt5) from hemagglutinin__InfluenzaA__ACR49281

SEQ ID NO: 194923 - RNA, 1701 nt, Artificial Sequence
  derived and/or modified CDS sequence (opt5) from hemagglutinin__InfluenzaA__ACR49282
augaaggccauccuggugguccuccuguacaccuucgcuacagccaacgcggacacgcuuugcauuggcuaucacgcuaauaacagcaccgauacaguugacaccgugcuggagaagaaugugacagucacccauuccguggaucuccuggaagacaagcacaacgggaaacuuuguaagcugagaggaguugcuccccuccaucugggcaaaugcaauaucgccggguggauucugggaaacccugagugugaaucucucagcacagccuccucuuggagcuacaucguggagaccuccucuagcgauaauggcacgugcuauccgggggacuuuauugauuacgaagaacugcgggagcagcuuuccagcgucucuuccuucgaacgcuuugagaucuuccccaagaccagcucuuggccuaaccacgacuccaauaagggagugacagccgcuuguccccaugccggcgcgaaaucuuuuuauaagaaccugaucuggcucguuaaaaagggcaauagcuacccuaaacuguccaagagcuauauuaacgauaaggggaaagaagugcuuguccuguggggaauccaccaccccuccaccucugccgaccaacagagccucuaccagaaugcugaugccuacguguucgugggcuccagcagauauucuaagaaauuuaagccugagauugcuauccggccgaaaguccgcgaccaggaggggagaaugaacuacuauuggacacugguugaacccggagauaagauuaccuucgaggccacgggcaaucugguggugccucgguacgcguuugccauggaacgcaacgcuggguccggaaucauuaucagcgacacacccguccaugacugcaacaccacaugucaaaccccuaaaggcgccaucaauaccucucuccccuuccagaacauucacccgaucacaauuggcaagugcccuaaguaugugaaaagcacgaagcugagacuugcuaccgggcugcggaauguucccuccauccagucucgcggacucuuuggcgccauugccggguucaucgagggaggcuggacagggaugguggauggaugguacggcuaucaucaccagaacgaacaaggcagcggguacgcugcggaccugaaauccacccagaaugccaucgaugagauuacaaacaaggucaauagcgugaucgagaaaaugaacacccaguuuacggcuguuggaaaggaguucaaucaccuugagaagagaauugaaaaccugaauaaaaagguggacgauggcuuccucgacaucuggacauacaacgccgagcugcugguccuccuggaaaaugagcggacccuugauuaucaugacucuaacgugaaaaaucuguacgagaagguccgcucccagcucaaaaacaacgccaaggaaauugggaauggauguuuugaguucuaucacaagugcgauaacaccuguauggaaagcgugaaaaauggcacauacgacuauccuaaguacucugaggaagcuaaacugaacagagaggagaucgaugggguuaaacuugaauccacccggaucuaucaaauucuggccaucuacagcacaguggcguccucucucguccuggugguuagccugggcgcuauuuccuuuuggaugugcucuaauggaagccuccagugccgcaucuguauuuga

SEQ ID NO: 194924 - RNA, 1701 nt, Artificial Sequence; identical to SEQ ID NO: 194728
  derived and/or modified CDS sequence (opt5) from hemagglutinin__InfluenzaA__ACR49283

SEQ ID NO: 194925 - RNA, 1701 nt, Artificial Sequence; identical to SEQ ID NO: 194728
  derived and/or modified CDS sequence (opt5) from hemagglutinin__InfluenzaA__ACR49288

SEQ ID NO: 194926 - RNA, 1701 nt, Artificial Sequence; identical to SEQ ID NO: 194767
  derived and/or modified CDS sequence (opt5) from hemagglutinin__InfluenzaA__ACR49290

SEQ ID NO: 194927 - RNA, 1701 nt, Artificial Sequence; identical to SEQ ID NO: 194741
  derived and/or modified CDS sequence (opt5) from hemagglutinin__InfluenzaA__ACR49291

SEQ ID NO: 194928 - RNA, 1701 nt, Artificial Sequence; identical to SEQ ID NO: 194767
  derived and/or modified CDS sequence (opt5) from hemagglutinin__InfluenzaA__ACR49293

SEQ ID NO: 194929 - RNA, 1701 nt, Artificial Sequence; identical to SEQ ID NO: 194767
  derived and/or modified CDS sequence (opt5) from hemagglutinin__InfluenzaA__ACR49295

SEQ ID NO: 194930 - RNA, 1701 nt, Artificial Sequence; identical to SEQ ID NO: 194781
  derived and/or modified CDS sequence (opt5) from hemagglutinin__InfluenzaA__ACR50993

SEQ ID NO: 194931 - RNA, 1701 nt, Artificial Sequence; identical to SEQ ID NO: 194741
  derived and/or modified CDS sequence (opt5) from hemagglutinin__InfluenzaA__ACR50995

SEQ ID NO: 194932 - RNA, 1701 nt, Artificial Sequence; identical to SEQ ID NO: 194741
  derived and/or modified CDS sequence (opt5) from hemagglutinin__InfluenzaA__ACR51005

SEQ ID NO: 194933 - RNA, 1701 nt, Artificial Sequence; identical to SEQ ID NO: 194741
  derived and/or modified CDS sequence (opt5) from hemagglutinin__InfluenzaA__ACR51015

SEQ ID NO: 194934 - RNA, 1701 nt, Artificial Sequence; identical to SEQ ID NO: 194741
  derived and/or modified CDS sequence (opt5) from hemagglutinin__InfluenzaA__ACR51025

SEQ ID NO: 194935 - RNA, 1701 nt, Artificial Sequence; identical to SEQ ID NO: 194741
  derived and/or modified CDS sequence (opt5) from hemagglutinin__InfluenzaA__ACR51035

SEQ ID NO: 194936 - RNA, 1701 nt, Artificial Sequence; identical to SEQ ID NO: 194741
  derived and/or modified CDS sequence (opt5) from hemagglutinin__InfluenzaA__ACR51045

SEQ ID NO: 194937 - RNA, 1701 nt, Artificial Sequence; identical to SEQ ID NO: 194741
  derived and/or modified CDS sequence (opt5) from hemagglutinin__InfluenzaA__ACR51055

SEQ ID NO: 194938 - RNA, 1701 nt, Artificial Sequence; identical to SEQ ID NO: 194728
  derived and/or modified CDS sequence (opt5) from hemagglutinin__InfluenzaA__ACR51065

SEQ ID NO: 194939 - RNA, 1701 nt, Artificial Sequence; identical to SEQ ID NO: 194741
  derived and/or modified CDS sequence (opt5) from hemagglutinin__InfluenzaA__ACR52368

SEQ ID NO: 194940 - RNA, 1701 nt, Artificial Sequence; identical to SEQ ID NO: 194741
  derived and/or modified CDS sequence (opt5) from hemagglutinin__InfluenzaA__ACR52378

SEQ ID NO: 194941 - RNA, 1701 nt, Artificial Sequence; identical to SEQ ID NO: 194741
  derived and/or modified CDS sequence (opt5) from hemagglutinin__InfluenzaA__ACR52398

SEQ ID NO: 194942 - RNA, 1701 nt, Artificial Sequence; identical to SEQ ID NO: 194741
  derived and/or modified CDS sequence (opt5) from hemagglutinin__InfluenzaA__ACR52408

SEQ ID NO: 194943 - RNA, 1701 nt, Artificial Sequence; identical to SEQ ID NO: 194741
  derived and/or modified CDS sequence (opt5) from hemagglutinin__InfluenzaA__ACR52418

SEQ ID NO: 194944 - RNA, 1701 nt, Artificial Sequence; identical to SEQ ID NO: 194741
  derived and/or modified CDS sequence (opt5) from hemagglutinin__InfluenzaA__ACR52428

SEQ ID NO: 194945 - RNA, 1701 nt, Artificial Sequence; identical to SEQ ID NO: 194741
  derived and/or modified CDS sequence (opt5) from hemagglutinin__InfluenzaA__ACR52438

SEQ ID NO: 194946 - RNA, 1701 nt, Artificial Sequence; identical to SEQ ID NO: 194741
  derived and/or modified CDS sequence (opt5) from hemagglutinin__InfluenzaA__ACR52448

SEQ ID NO: 194947 - RNA, 1701 nt, Artificial Sequence; identical to SEQ ID NO: 194741
  derived and/or modified CDS sequence (opt5) from hemagglutinin__InfluenzaA__ACR52458

SEQ ID NO: 194948 - RNA, 1701 nt, Artificial Sequence; identical to SEQ ID NO: 194741
  derived and/or modified CDS sequence (opt5) from hemagglutinin__InfluenzaA__ACR52468

SEQ ID NO: 194949 - RNA, 1701 nt, Artificial Sequence; identical to SEQ ID NO: 194741
  derived and/or modified CDS sequence (opt5) from hemagglutinin__InfluenzaA__ACR52478

SEQ ID NO: 194950 - RNA, 1701 nt, Artificial Sequence; identical to SEQ ID NO: 194741
  derived and/or modified CDS sequence (opt5) from hemagglutinin__InfluenzaA__ACR52488

SEQ ID NO: 194951 - RNA, 1701 nt, Artificial Sequence; identical to SEQ ID NO: 194741
  derived and/or modified CDS sequence (opt5) from hemagglutinin__InfluenzaA__ACR54045

SEQ ID NO: 194952 - RNA, 1701 nt, Artificial Sequence
  derived and/or modified CDS sequence (opt5) from hemagglutinin__InfluenzaA__ACR54047
augaaggccauccuggugguccuccuguacaccuucgcuacagccaacgcggacacgcuuugcauuggcuaucacgcuaauaacagcaccgauacaguugacaccgugcuggagaagaaugugacagucacccauuccgugaaccuccuggaagauaagcacaaugggaaacuuuguaagcugagaggaguugcuccccuccaucugggcaaaugcaacaucgccggguggauucugggaaauccugagugugaaucucucagcacagccuccucuuggagcuacaucguggagaccuccucuagcgacaacggcacgugcuauccgggggauuuuauugacuacgaagaacugcgggagcagcuuuccagcgucucuuccuucgaacgcuuugagaucuuccccaagaccagcucuuggccuaaucacgauuccaacaagggagugacagccgcuuguccccaugccggcgcgaaaucuuuuuauaagaaucugaucuggcucguuaaaaagggcaacagcuacccuaaacuguccaagagcuauauuaaugacaaggggaaagaagugcuuguccuguggggaauccaccaccccuccaccucugccgaucaacagagccucuaccagaacgcugacgccuacguguucgugggcuccagcagauauucuaagaaauuuaagccugagauugcuauccggccgaaaguccgcgaucaggaggggagaaugaauuacuauuggacacugguugaacccggagacaagauuaccuucgaggccacgggcaaccugguggugccucgguacgcguuugccauggaacgcaacgcuggguccggaaucauuaucagcgauacacccguccaugacugcaauaccacaugucaaaccccuaaaggcgccaucaacaccucucuccccuuccagaauauucacccgaucacaauuggcaagugcccuaaguaugugaaaagcacgaagcugagacuugcuaccgggcugcggaacguucccuccauccagucucgcggacucuuuggcgccauugccggguucaucgagggaggcuggacagggaugguggacggaugguacggcuaucaucaccagaaugaacaaggcagcggguacgcugcggaucugaaauccacccagaacgccaucgacgagauuacaaauaaggucaacagcgugaucgagaaaaugaauacccaguuuacggcuguuggaaaggaguucaaccaccuugagaagagaauugaaaaucugaacaaaaagguggaugacggcuuccucgauaucuggacauacaaugccgagcugcugguccuccuggaaaacgagcggacccuugacuaucaugauucuaaugugaaaaaccuguacgagaagguccgcucccagcucaaaaacaaugccaaggaaauugggaacggauguuuugaguucuaucacaagugcgacaauaccuguauggaaagcgugaaaaacggcacauacgauuauccuaaguacucugaggaagcuaaacugaauagagaggagaucgacgggaucaaacuugaauccacccggauuuaucaaauccuggccauuuacagcacaguugcguccucucucgugcuggucgugagccugggcgcuaucuccuuuuggaugugcucuaacggaagccuccagugccgcauuuguaucuga

SEQ ID NO: 194953 - RNA, 1701 nt, Artificial Sequence
  derived and/or modified CDS sequence (opt5) from hemagglutinin__InfluenzaA__ACR54964
augaaggccauccuggugguccuccuguacaccuucgcuacagccaacgcggacacgcuuugcauuggcuaucacgcuaauaacagcaccgauacaguugacaccgugcuggagaagaaugugacagucacccauuccgugaaccuccuggaagauaagcacaaugggaaacuuuguaagcugagaggaguugcuccccuccaucugggcaaaugcaacaucgccggguggauucugggaaauccugagugugaaucucucagcacagccuccucuuggagcuacaucguggagaccuccucuagcgacaacggcacgugcuauccgggggauuuuauugacuacgaagaacugcgggagcagcuuuccagcgucucuuccuucgaacgcuuugagaucuuccccaagaccagcucuuggccuaaucacgauuccaacaagggagugacagccgcuuguccccaugccggcgcgaaaucuuuuuauaagaaucugaucuggcucguuaaaaagggcaacagcuacccuaaacuguccaagagcuauauuaaugacaaggggaaagaagugcuuguccuguggggaauccaccaccccuccaccucugccgaucaacagagccucuaccagaacgcugacgccuacguguucgugggcacauccagauauagcaagaaauuuaagccugagauugcuauccggccgaaaguccgcgaucaggaggggagaaugaauuacuauuggacccugguugaacccggagacaagauuacguucgaggccacaggcaaccugguggugccucgguacgcguuugccauggaacgcaacgcugggucuggaaucauuaucuccgauacccccguccaugacugcaauacaaccugucaaaccccuaaaggcgccaucaacacaagccuccccuuccagaauauucacccgaucacgauuggcaagugcccuaaguaugugaaaucuaccaagcugagacuugcuacagggcugcggaacguucccagcauccagucccgcggacucuuuggcgccauugccggguucaucgagggaggcuggaccgggaugguggacggaugguacggcuaucaucaccagaaugaacaaggcucuggguacgcugcggaucugaaaagcacacagaacgccaucgacgagauuaccaauaaggucaacuccgugaucgagaaaaugaauacgcaguuuauugcuguuggaaaggaguucaaccaccuugagaagagaaucgaaaaucugaacaaaaagguggaugacggcuuccucgauauuuggacauacaaugccgagcugcugguccuccuggaaaacgagcggacccuugacuaucaugauagcaaugugaaaaaccuguacgagaagguccgcucucagcucaaaaacaaugccaaggaaaucgggaacggauguuuugaguucuaucacaagugcgacaauaccuguauggaauccgugaaaaacggcacauacgauuauccuaaguacagcgaggaagcuaaacugaauagagaggagaucgacgggguuaaacuugaaucuacccggauuuaucaaauccuggccauuuacuccacaguggcgagcucccucguccuggugguuucucugggcgcuaucagcuuuuggaugugcuccaacggaucucuccagugccgcauuuguaucuga

SEQ ID NO: 194954 - RNA, 1701 nt, Artificial Sequence; identical to SEQ ID NO: 194832
  derived and/or modified CDS sequence (opt5) from hemagglutinin__InfluenzaA__ACR54974

SEQ ID NO: 194955 - RNA, 1701 nt, Artificial Sequence; identical to SEQ ID NO: 194741
  derived and/or modified CDS sequence (opt5) from hemagglutinin__InfluenzaA__ACR54984

SEQ ID NO: 194956 - RNA, 1701 nt, Artificial Sequence; identical to SEQ ID NO: 194728
  derived and/or modified CDS sequence (opt5) from hemagglutinin__InfluenzaA__ACR54994

SEQ ID NO: 194957 - RNA, 1701 nt, Artificial Sequence; identical to SEQ ID NO: 194728
  derived and/or modified CDS sequence (opt5) from hemagglutinin__InfluenzaA__ACR55004

SEQ ID NO: 194958 - RNA, 1701 nt, Artificial Sequence; identical to SEQ ID NO: 194921
  derived and/or modified CDS sequence (opt5) from hemagglutinin__InfluenzaA__ACR56380

SEQ ID NO: 194959 - RNA, 1701 nt, Artificial Sequence; identical to SEQ ID NO: 194794
  derived and/or modified CDS sequence (opt5) from hemagglutinin__InfluenzaA__ACR56390

SEQ ID NO: 194960 - RNA, 1701 nt, Artificial Sequence; identical to SEQ ID NO: 194741
  derived and/or modified CDS sequence (opt5) from hemagglutinin__InfluenzaA__ACR56400

SEQ ID NO: 194961 - RNA, 1701 nt, Artificial Sequence; identical to SEQ ID NO: 194741
  derived and/or modified CDS sequence (opt5) from hemagglutinin__InfluenzaA__ACR56410

SEQ ID NO: 194962 - RNA, 1701 nt, Artificial Sequence; identical to SEQ ID NO: 194741
  derived and/or modified CDS sequence (opt5) from hemagglutinin__InfluenzaA__ACR56420

SEQ ID NO: 194963 - RNA, 1701 nt, Artificial Sequence; identical to SEQ ID NO: 194741
  derived and/or modified CDS sequence (opt5) from hemagglutinin__InfluenzaA__ACR56430

SEQ ID NO: 194964 - RNA, 1701 nt, Artificial Sequence; identical to SEQ ID NO: 194741
  derived and/or modified CDS sequence (opt5) from hemagglutinin__InfluenzaA__ACR56440

SEQ ID NO: 194965 - RNA, 1698 nt, Artificial Sequence
  derived and/or modified CDS sequence (opt5) from hemagglutinin__InfluenzaA__ACR58541
augaaggugaaacugcucguccugcuuugcaccuucacagccacguacgcugacaccaucuguauuggcuaucacgccaacaauagcacagauaccguugacacagugcuggagaagaacgugaccgucacacauuccgugaaucuccuggaaaacucucacaaugggaaacuuugccugcucaagggaaucgcgccccugcagcugggcaacuguagcguugcuggguggauucucggaaauccugagugcgaacugcuuaucuccaaagagucuuggagcuacauuguggaaaagccgaaccccgagaauggcaccuguuauccugggcauuuugccgauuacgaggaacugagagagcaacucuccucugucagcuccuucgaacgguuugagaucuuccccaaggagagcucuuggccuaaccacacggugaccggaguuuccgccagcugcucucauaauggcgaauccagcuuuuaucgcaaccugcuuuggcugacaagaaagaauggccucuaccccaaccugucuaaguccuaugcuaauaacaaagagaaggaagugcugguccucuggggagugcaccacccuccgaacaucggggaccagaaagcccuguaccauaccgagaaugcuuacgugagcgucguuuccucucacuauagccggaaguucacacccgaaauugccaagcgcccuaaagugagagaucaggagggccggaucaacuacuauuggacccuucuggagcccggggacacgauuaucuuugaagcgaauggaaaccucauugccccucgcuacgcuuucgcccuguccagaggcuuugggagcggaaucauuaauucuaacgcucccauggauaagugugacgccaaaugccagacaccgcaaggcgcgaucaauuccagccuuccuuuccagaacgugcaucccgucaccaucggcgaguguccuaaguaugugcggucugccaaacugcgcaugguuacagggcucagaaauauucccagcauccagucccggggacuguuuggcgcuauugccggguucaucgaaggaggcuggaccgggaugguggauggaugguacggcuaucaccaccagaacgagcaaggcucuggguacgcugccgaccagaaaagcacccagaaugccauuaacggaaucacaaauaaagucaacuccgugaucgauaagaugaauacgcaguuuaccgcuguuggcaaggaguucaacaaacuggaacgcagaauggagaaccucaauaagaaaguggacgauggguucauugacaucuggacauacaacgcggaacugcuuguccugcucgagaaugaacggacccuggacuuucaugauagcaacgugaagaaucuuuaugagaaagucaagucucaacugaagaacaaugccaaagaaauuggaaacggcugcuucgaguuuuaccacaaguguaaugacgagugcauggaauccgugaaaaacgggacauaugauuaccccaaguauagcgaggaaucuaaacucaaucgcgagaagaucgacggcguuaagcuggaguccaugggaguguaccagauucuggcuaucuauagcaccgucgccuccucucucgugcugcuuguuagccugggcgccaucuccuucuggaugugcucuaacgggagccuccaguguagaauuugcaucuga

SEQ ID NO: 194966 - RNA, 1698 nt, Artificial Sequence; identical to SEQ ID NO: 193986
  derived and/or modified CDS sequence (opt5) from hemagglutinin__InfluenzaA__ACR61655

SEQ ID NO: 194967 - RNA, 1698 nt, Artificial Sequence; identical to SEQ ID NO: 194002
  derived and/or modified CDS sequence (opt5) from hemagglutinin__InfluenzaA__ACR61666

SEQ ID NO: 194968 - RNA, 1701 nt, Artificial Sequence; identical to SEQ ID NO: 194506
  derived and/or modified CDS sequence (opt5) from hemagglutinin__InfluenzaA__ACR61677

SEQ ID NO: 194969 - RNA, 1701 nt, Artificial Sequence; identical to SEQ ID NO: 194506
  derived and/or modified CDS sequence (opt5) from hemagglutinin__InfluenzaA__ACR61688

SEQ ID NO: 194970 - RNA, 1701 nt, Artificial Sequence; identical to SEQ ID NO: 194506
  derived and/or modified CDS sequence (opt5) from hemagglutinin__InfluenzaA__ACR61699

SEQ ID NO: 194971 - RNA, 1701 nt, Artificial Sequence; identical to SEQ ID NO: 194728
  derived and/or modified CDS sequence (opt5) from hemagglutinin__InfluenzaA__ACR67170

SEQ ID NO: 194972 - RNA, 1701 nt, Artificial Sequence; identical to SEQ ID NO: 194767
  derived and/or modified CDS sequence (opt5) from hemagglutinin__InfluenzaA__ACR67171

SEQ ID NO: 194973 - RNA, 1701 nt, Artificial Sequence; identical to SEQ ID NO: 194728
  derived and/or modified CDS sequence (opt5) from hemagglutinin__InfluenzaA__ACR67172

SEQ ID NO: 194974 - RNA, 1701 nt, Artificial Sequence; identical to SEQ ID NO: 194728
  derived and/or modified CDS sequence (opt5) from hemagglutinin__InfluenzaA__ACR67177

SEQ ID NO: 194975 - RNA, 1701 nt, Artificial Sequence; identical to SEQ ID NO: 194728
  derived and/or modified CDS sequence (opt5) from hemagglutinin__InfluenzaA__ACR67181

SEQ ID NO: 194976 - RNA, 1701 nt, Artificial Sequence
  derived and/or modified CDS sequence (opt5) from hemagglutinin__InfluenzaA__ACR67183
augaaggccauccuggugguccuccuguacaccuucgcuacagccaacgcggacacgcuuugcauuggcuaucacgcuaauaacagcaccgauacaguugacaccgugcuggagaagaaugugacagucacccauuccgugaaccuccuggaagauaagcacaaugggaaacuuuguaagcugagaggaguugcuccccuccaucugggcaaaugcaacaucgccggguggauucugggaaauccugagugugaaucucucagcacagccuccucuuggagcuacaucguggagaccuccucuagcgacaacggcacgugcuauccgggggauuuuauugacuacgaagaacugcgggagcagcuuuccagcgucucuuccuucgaacgcuuugagaucuuccccaagaccagcucuuggccuaaucacgauuccaacaagggagugacagccgcuuguccccaugccggcgcgaaaucuuuuuauaagaaucugaucuggcucguuaaaaagggcaacagcuacccuaaacuguccaagagcuauauuaaugacaaggggaaagaagugcuuguccuguggggaauccaccaccccuccaccucugccgaucaacagagccucuaccagaacgcugacgccuacguguucgugggcuccagcagauauucuaagaaauuuaagccugagauugcuauccggccgaaaguccgcgauagagaggggcggaugaauuacuauuggacacugguugaacccggagacaagauuaccuucgaggccacgggcaaccugguggugccucgcuacgcguuugccauggaaagaaacgcuggguccggaaucauuaucagcgauacacccguccaugacugcaauaccacaugucagaccccuaaaggcgccaucaacaccucucuccccuuccaaaauauucacccgaucacaauuggcaagugcccuaaguaugugaaaagcacgaagcugcggcuugcuaccgggcugcgcaacguucccuccauccagucuagaggacucuuuggcgccauugccggguucaucgagggaggcuggacagggaugguggacggaugguacggcuaucaucaccagaaugaacagggcagcggguacgcugcggaucugaaauccacccaaaacgccaucgacgagauuacaaauaaggucaacagcgugaucgagaaaaugaauacccaguuuacggcuguuggaaaggaguucaaccaccuugagaagcggauugaaaaucugaacaaaaagguggaugacggcuuccucgauaucuggacauacaaugccgagcugcugguccuccuggaaaacgagcgcacccuugacuaucaugauucuaaugugaaaaaccuguacgagaaggucagaucccagcucaaaaacaaugccaaggaaauugggaacggauguuuugaguucuaucacaagugcgacaauaccuguauggaaagcgugaaaaacggcacauacgauuauccuaaguacucugaggaagcuaaacugaaucgggaggagaucgacgggguuaaacuugaauccacccgcaucuaucagauucuggccaucuacagcacaguggcguccucucucguccuggugguuagccugggcgcuauuuccuuuuggaugugcucuaacggaagccuccaaugcagaaucuguauuuga

SEQ ID NO: 194977 - RNA, 1701 nt, Artificial Sequence; identical to SEQ ID NO: 194741
  derived and/or modified CDS sequence (opt5) from hemagglutinin__InfluenzaA__ACR67184

SEQ ID NO: 194978 - RNA, 1701 nt, Artificial Sequence; identical to SEQ ID NO: 194728
  derived and/or modified CDS sequence (opt5) from hemagglutinin__InfluenzaA__ACR67185

SEQ ID NO: 194979 - RNA, 1701 nt, Artificial Sequence; identical to SEQ ID NO: 194921
  derived and/or modified CDS sequence (opt5) from hemagglutinin__InfluenzaA__ACR67186

SEQ ID NO: 194980 - RNA, 1701 nt, Artificial Sequence; identical to SEQ ID NO: 194728
  derived and/or modified CDS sequence (opt5) from hemagglutinin__InfluenzaA__ACR67187

SEQ ID NO: 194981 - RNA, 1701 nt, Artificial Sequence; identical to SEQ ID NO: 194767
  derived and/or modified CDS sequence (opt5) from hemagglutinin__InfluenzaA__ACR67188

SEQ ID NO: 194982 - RNA, 1701 nt, Artificial Sequence; identical to SEQ ID NO: 194767
  derived and/or modified CDS sequence (opt5) from hemagglutinin__InfluenzaA__ACR67189

SEQ ID NO: 194983 - RNA, 1701 nt, Artificial Sequence
  derived and/or modified CDS sequence (opt5) from hemagglutinin__InfluenzaA__ACR67190
auggaggccauccuggugguccuccuguacaccuucgcuacagccaacgcggacacgcuuugcauuggcuaucacgcuaauaacagcaccgauacaguugacaccgugcuggaaaagaaugugacagucacccauuccgugaaccuccuggaggauaaacacaaugggaaacuuuguaagcugagaggaguugcgccccuccaucugggcaagugcaacaucgccggguggauucugggaaauccugaaugugagucucucagcacagcuuccucuuggagcuacaucguggaaaccuccucuagcgacaacggcacgugcuauccgggggauuuuauugacuacgaggagcugcgggaacagcuuuccagcgucucuuccuucgagcgcuuugaaaucuuccccaaaaccagcucuuggccuaaucacgauuccaacaagggagugacagccgcuuguccccaugccggcgccaagagcuuuuauaaaaaucugaucuggcucguuaagaaaggcaacucuuacccuaagcuguccaaaagcuauauuaaugacaaggggaaggaggugcuuguccuguggggaauccaccaccccuccaccucugccgaucaacagagccucuaccagaacgcugacgccuacguguucgugggcuccagcagauauucuaaaaaguuuaaaccugagauugcuauccggccgaagguccgcgaucaggaagggagaaugaauuacuauuggacacugguugagcccggagacaaaauuaccuucgaagccacgggcaaccugguggugccucgguacgcguuugccauggagcgcaacgcuggguccggaaucauuaucagcgauacacccguccaugacugcaauaccacaugucaaaccccuaagggcgccaucaacaccucucuccccuuccacaauauucauccgaucacaauuggcaaaugcccuaaguauguuaagagcacgaaacugagacuugcuaccgggcugcggaacgugcccuccauccagucucgcggacucuuuggcgccauugccggguucaucgaaggaggcuggacagggaugguggacggaugguacggcuaucaccaccagaaugagcagggcagcggguacgcugcggaucugaaguccacccaaaacgccaucgacgagauuacaaauaaagucaacagcgugaucgaaaagaugaauacccaguuuacggcuguuggaaaagaguucaaccaucuugaaaagagaauugagaaucugaacaagaaaguggaugacggcuuccucgauaucuggacauacaaugccgaacugcugguccuccuggagaacgagcggacccuugacuaucacgauucuaaugugaagaaccuguacgaaaaaguccgcucccagcucaagaacaaugccaaagagauugggaacggauguuuugaguucuaucauaagugcgacaauaccuguauggaaagcgugaagaacggcacauacgauuauccuaaauacucugaagaggcuaagcugaauagagaggaaaucgacgggguuaaacuugaguccacccggaucuaucagauucuggccaucuacagcacaguggcguccucucucguccuggugguuagccugggcgcuauuuccuuuuggaugugcucuaacggaagccuccaaugccgcaucuguauuuga

SEQ ID NO: 194984 - RNA, 1701 nt, Artificial Sequence; identical to SEQ ID NO: 194728
  derived and/or modified CDS sequence (opt5) from hemagglutinin__InfluenzaA__ACR67192

SEQ ID NO: 194985 - RNA, 1701 nt, Artificial Sequence
  derived and/or modified CDS sequence (opt5) from hemagglutinin__InfluenzaA__ACR67193
augaaggccauccuggugguccuccuguacaccuucgcuacagccaacgcggacacgcuuugcauuggcuaucacgcuaauaacagcaccgauacaguugacaccgugcuggagaaaaaugugacagucacccauuccgugaacauccucgaagauaagcacaaugggaaacuguguaaacuuagaggaguugcuccccugcaucucggcaaaugcaacauugccggguggauccugggaaauccugagugugaaucucugagcacagccuccucuuggagcuacauuguggagaccuccucuagcgacaacggcacgugcuauccgggggauuuuaucgacuacgaagaacuccgggagcagcuguccagcgucucuuccuucgaacgcuuugagaucuuccccaagaccagcucuuggccuaaucacgauuccaacaagggagugacagccgcuuguccccaugccggcgcgaaaucuuuuuauaagaaucuuauuuggcugguuaaaaagggcaacagcuacccuaaacucuccaagagcuauaucaaugacaaggggaaagaagugcugguccuuuggggcauucaccaccccuccaccucugccgaucaacagagccuguaccagaacgcugacgccuacguguucgugggauccagcagauauucuaagaaauuuaagccugagaucgcuauucggccgaaaguccgcgaucaggaggggagaaugaauuacuauuggacacucguugaacccggagacaagaucaccuucgaggccacgggcaaccugguggugccucgguacgcguuugccauggaacgcaacgcuggguccggaauuaucaucagcgauacacccguccaugagugcaauaccacaugucaaaccccuaaaggcgccauuaacaccucucugcccuuccagaauauccacccgauuacaaucggcaagugcccuaaguaugugaaaagcacgaagcucagacuggcuaccgggcuucggaacguucccuccauucagucucgcggacuguuuggcgccaucgccggguucaucgaaggaggcuggacagggaugguggacggaugguacggcuaucaucaccagaaugagcaaggcagcggguacgcugcggaccucaaauccacccagaacgccauugaugagaucacaaauaaggucaacagcgugauugaaaagaugaauacccaguuuacggcuguuggaaaggaguucaaccaccuggaaaagagaaucgagaaucuuaacaaaaagguggacgauggcuuccuggacauuuggacauacaaugccgaacuccugguccugcucgagaacgagcggacccuggauuaucaugacucuaaugugaaaaaccuuuacgaaaagguccgcucccagcugaaaaacaaugccaaggagaucgggaacggauguuuugaguucuaucacaagugcgauaauaccuguauggagagcgugaaaaacggcacauacgacuauccuaaguacucugaagaggcuaaacucaauagagaggaaaucgaugggguuaagcuggaguccacccggauuuaucaaauccuugccauuuacagcacaguggcguccucucugguccucgugguuagccugggcgcuaucuccuuuuggaugugcucuaacggaagccugcagugccgcauuuguaucuga

SEQ ID NO: 194986 - RNA, 1701 nt, Artificial Sequence; identical to SEQ ID NO: 194728
  derived and/or modified CDS sequence (opt5) from hemagglutinin__InfluenzaA__ACR67195

SEQ ID NO: 194987 - RNA, 1701 nt, Artificial Sequence; identical to SEQ ID NO: 194728
  derived and/or modified CDS sequence (opt5) from hemagglutinin__InfluenzaA__ACR67197

SEQ ID NO: 194988 - RNA, 1701 nt, Artificial Sequence; identical to SEQ ID NO: 194985
  derived and/or modified CDS sequence (opt5) from hemagglutinin__InfluenzaA__ACR67198

SEQ ID NO: 194989 - RNA, 1701 nt, Artificial Sequence; identical to SEQ ID NO: 194728
  derived and/or modified CDS sequence (opt5) from hemagglutinin__InfluenzaA__ACR67199

SEQ ID NO: 194990 - RNA, 1701 nt, Artificial Sequence; identical to SEQ ID NO: 194741
  derived and/or modified CDS sequence (opt5) from hemagglutinin__InfluenzaA__ACR67244

SEQ ID NO: 194991 - RNA, 1701 nt, Artificial Sequence
  derived and/or modified CDS sequence (opt5) from hemagglutinin__InfluenzaA__ACR67254
augaaggccauccuggugguccuccuguacaccuucgcuacagccaacgcggacacgcuuugcauuggcuaucacgcuaauaacagcaccgauacaguugacaccgugcuggagaagaaugugacagucacccauuccgugaaccuccuggaagauaagcacaaugggaaacuuuguaagcugagaggaguugcuccccuccaucugggcaaaugcaacaucgccggguggauucugggaaauccugagugugaaucucucagcacagccuccucuuggagcuacaucguggagaccuccucuagcgacaacggcacgugcuauccgggggauuuuauugacuacgaagaacugcgggagcagcuuuccagcgucucuuccuucgaacgcuuugagaucuuccccaagaccagcucuuggccuaaucacgauuccaacaagggagugacagccgcuuguccccaugccggcgcgaaaucuuuuuauaagaaucugaucuggcucguuaaaaagggcaacagcuacccuaaacuguccaagagcuauauuaaugacaaggggaaagaagugcuuguccuguggggaauccaccaccccuccaccucugccgaucaacagagccucuaccagaacgcugacgccuacguguucgugggcuccagcagauauucuaagaaauuuaagccugagauugcuauccggccgaaaguccgcgaucaggaggggagaaugaauuacuauuggacacugguugaacccggagacaagauuaccuucgaggccacgggcaaccugguggugccucgguacgcguuugccauggaacgcaacgucggguccggaaucauuaucagcgauacacccgugcaugacugcaauaccacaugucaaaccccuaaaggcgcuaucaacaccucucuccccuuccagaauauucacccgaucacaauuggcaagugcccuaaguauguuaaaagcacgaagcugagacuugccaccgggcugcggaacgugcccuccauccagucucgcggacucuuuggcgcuauugccggguucaucgagggaggcuggacagggauggucgacggaugguacggcuaucaucaccagaaugaacaaggcagcggguacgccgcugaucugaaauccacccagaacgcgaucgacgagauuacaaauaaggugaacagcguuaucgagaaaaugaauacccaguuuacggccgugggaaaggaguucaaccaccuugagaagagaauugaaaaucugaacaaaaaggucgaugacggcuuccucgauaucuggacauacaaugcugagcugcuggugcuccuggaaaacgagcggacccuugacuaucaugauucuaaugucaaaaaccuguacgagaaggugcgcucccagcucaaaaacaaugccaaggaaauugggaacggauguuuugaguucuaucacaagugcgacaauaccuguauggaaagcguuaaaaacggcacauacgauuauccuaaguacucugaggaagccaaacugaauagagaggagaucgacggggugaaacuugaauccacccggaucuaucaaauucuggcuaucuacagcacagucgccuccucucucgugcugguugugagccugggcgcgauuuccuuuuggaugugcucuaacggaagccuccagugccgcaucuguauuuga

SEQ ID NO: 194992 - RNA, 1701 nt, Artificial Sequence; identical to SEQ ID NO: 194741
  derived and/or modified CDS sequence (opt5) from hemagglutinin__InfluenzaA__ACR77438

SEQ ID NO: 194993 - RNA, 1701 nt, Artificial Sequence; identical to SEQ ID NO: 194741
  derived and/or modified CDS sequence (opt5) from hemagglutinin__InfluenzaA__ACR77448

SEQ ID NO: 194994 - RNA, 1701 nt, Artificial Sequence
  derived and/or modified CDS sequence (opt5) from hemagglutinin__InfluenzaA__ACR77458
augaaggccauccuggugguccuccuguacaccuucgcuacagccaacgcggacacgcuuugcauuggcuaucacgcuaauaacagcaccgauacaguugacaccgugcuggagaagaaugugacagucacccauuccgugaaccuccuggaagauaagcacaaugggaaacuuuguaagcugagaggaguugcuccccuccaucuggacaaaugcaacaucgccggcuggauucuggggaauccugagugugaaucucucagcacagccuccucuuggagcuacaucguggagaccuccucuagcgauaacggaacgugcuauccgggcgacuuuauugauuacgaggagcugcgggagcagcuuuccagcgucucuuccuucgaacgcuuugagaucuuccccaagaccagcucuuggccuaaucacgacuccaacaagggggugacagccgcuuguccccaugccggagcgaaaucuuuuuauaagaaucugaucuggcucguuaaaaagggcaacagcuacccuaaacuguccaagagcuauauuaaugauaagggcaaagaagugcuuguccugugggggauccaccaccccuccaccucugccgaccaacagagccucuaccagaacgcugaugccuacguguucgugggaacauccagauauagcaagaaauuuaagccugagauugcuauccggccgaaaguccgcgaccaggagggcagaaugaauuacuauuggacccugguugaacccggggauaagauuacguucgaggccacaggaaaccugguggugccucgguacgcguuugccauggaacgcaacgcuggcucugggaucauuaucuccgacacccccguccaugacugcaauacaaccugucaaaccccuaaaggagccaucaacacaagccuccccuuccagaauauucacccgaucacgauuggcaagugcccuaaguaugugaaaucuaccaagcugagacuugcuacaggccugcggaacguucccagcauccagucccgcgggcucuuuggagccauugccggcuucaucgaagggggauggaccggcaugguggaugggugguacggauaucaucaccagaaugaacaaggcucuggcuacgcugcggaccugaaaagcacacagaacgccaucgaugagauuaccaauaaggucaacuccgugaucgagaaaaugaauacgcaguuuacagcuguugggaaggaguucaaccaccuugaaaagagaauugaaaaucugaacaaaaagguggacgauggauuccucgacaucuggaccuacaaugccgagcugcugguccuccuggaaaacgagcggacccuugauuaucaugacagcaaugugaaaaaccuguacgagaagguccgcucucagcucaaaaacaaugccaaggaaauuggcaacggguguuuugaguucuaucacaagugcgauaauacauguauggaauccgugaaaaacggaaccuacgacuauccuaaguacagcgaggaagcuaaacugaauagagaggagaucgauggcguuaaacuugaaucuacacggaucuaucaaauucuggccaucuacuccacgguggcgagcucccucguccuggugguuucucugggggcuauuagcuuuuggaugugcuccaacggcucucuccagugccgcaucuguauuuga

SEQ ID NO: 194995 - RNA, 1701 nt, Artificial Sequence; identical to SEQ ID NO: 194741
  derived and/or modified CDS sequence (opt5) from hemagglutinin__InfluenzaA__ACR77468

SEQ ID NO: 194996 - RNA, 1701 nt, Artificial Sequence; identical to SEQ ID NO: 194741
  derived and/or modified CDS sequence (opt5) from hemagglutinin__InfluenzaA__ACR77478

SEQ ID NO: 194997 - RNA, 1701 nt, Artificial Sequence; identical to SEQ ID NO: 194741
  derived and/or modified CDS sequence (opt5) from hemagglutinin__InfluenzaA__ACR77488

SEQ ID NO: 194998 - RNA, 1701 nt, Artificial Sequence; identical to SEQ ID NO: 194741
  derived and/or modified CDS sequence (opt5) from hemagglutinin__InfluenzaA__ACR77498

SEQ ID NO: 194999 - RNA, 1701 nt, Artificial Sequence; identical to SEQ ID NO: 194728
  derived and/or modified CDS sequence (opt5) from hemagglutinin__InfluenzaA__ACR83525

SEQ ID NO: 195000 - RNA, 1701 nt, Artificial Sequence
  derived and/or modified CDS sequence (opt5) from hemagglutinin__InfluenzaA__ACR83538
augaaggccauccuggugguccuccuguacaccuucgcuacagccaacgcggacacgcuuugcauuggcuaucacgcuaauaacagcaccgauacaguugacaccgugcuggagaaaaaugugacagucacccauuccgugaaccuccuggaagauaagcacaaugggaaacuuuguaagcugagaggaguugcuccccuccaucugggcaaaugcaacaucgccggguggauucugggaaauccugagugugaaucucucagcacagccuccucuuggagcuacaucguggagaccuccucuagcgacaacggcacgugcuauccgggggauuuuauugacuacgaagaacugcgggagcagcuuuccagcgucucuuccuucgaacgcuuugagaucuuccccaagaccagcucuuggccuaaucacgauuccaacaagggagugacagccgcuuguccccaugccggcgcgaaaucuuuuuauaagaaucugaucuggcucguuaaaaagggcaacagcuacccuaaacuguccaagagcuauauuaaugacaaggggaaagaagugcuuguccuguggggaauccaccaccccuccaccucugccgaucaacagagccucuaccagaacgcugacgccuacguguucgugggcacauccagauauagcaagaaauuuaagccugagauugcuauccggccgaaaguccgcgaucaggaggggagaaugaauuacuauuggacccugguugaacccggagacaagauuacguucgaggccacaggcaaccugguggugccucgguacgcguuugccauggaacgcaacgcugggucuggaaucauuaucuccgauacccccguccaugacugcaauacaaccugucaaaccccuaaaggcgccaucaacacaagccuccccuuccagaauauucacccgaucacgauuggcaagugcccuaaguaugugaaaucuaccaagcugagacuugcuacagggcugcggaacguucccagcauccucucccgcggacuguuuggcgccauugccggguucaucgagggaggcuggaccgggaugguggacggaugguacggcuaucaucaccagaaugaacagggcucuggguacgcugcggaucuuaaaagcacacaaaacgccaucgacgagauuaccaauaaggucaacuccgugaucgagaaaaugaauacgcaguuuacagcuguuggaaaggaguucaaccaccuggagaagagaauugaaaaucucaacaaaaagguggaugacggcuuccuggauaucuggaccuacaaugccgagcugcucguccugcuugaaaacgagcggacccuggacuaucaugauagcaaugugaaaaaccucuacgagaagguccgcucucagcugaaaaacaaugccaaggaaauugggaacggauguuuugaguucuaucacaagugcgacaauacauguauggaauccgugaaaaacggcaccuacgauuauccuaaguacagcgaggaagcuaaacuuaauagagaggagaucgacgggguuaagcuggaaucuacacggaucuaucagauucucgccaucuacuccacgguggcgagcucccugguccuggugguuucucucggcgcuauuagcuuuuggaugugcuccaacggaucucugcaaugccgcaucuguauuuga

SEQ ID NO: 195001 - RNA, 1701 nt, Artificial Sequence; identical to SEQ ID NO: 194741
  derived and/or modified CDS sequence (opt5) from hemagglutinin__InfluenzaA__ACS14666

SEQ ID NO: 195002 - RNA, 1701 nt, Artificial Sequence; identical to SEQ ID NO: 194741
  derived and/or modified CDS sequence (opt5) from hemagglutinin__InfluenzaA__ACS14676

SEQ ID NO: 195003 - RNA, 1701 nt, Artificial Sequence; identical to SEQ ID NO: 194741
  derived and/or modified CDS sequence (opt5) from hemagglutinin__InfluenzaA__ACS14686

SEQ ID NO: 195004 - RNA, 1701 nt, Artificial Sequence; identical to SEQ ID NO: 194741
  derived and/or modified CDS sequence (opt5) from hemagglutinin__InfluenzaA__ACS14696

SEQ ID NO: 195005 - RNA, 1701 nt, Artificial Sequence; identical to SEQ ID NO: 194741
  derived and/or modified CDS sequence (opt5) from hemagglutinin__InfluenzaA__ACS14706

SEQ ID NO: 195006 - RNA, 1701 nt, Artificial Sequence; identical to SEQ ID NO: 194741
  derived and/or modified CDS sequence (opt5) from hemagglutinin__InfluenzaA__ACS14716

SEQ ID NO: 195007 - RNA, 1701 nt, Artificial Sequence; identical to SEQ ID NO: 194741
  derived and/or modified CDS sequence (opt5) from hemagglutinin__InfluenzaA__ACS14726

SEQ ID NO: 195008 - RNA, 1701 nt, Artificial Sequence; identical to SEQ ID NO: 194741
  derived and/or modified CDS sequence (opt5) from hemagglutinin__InfluenzaA__ACS14736

SEQ ID NO: 195009 - RNA, 1701 nt, Artificial Sequence; identical to SEQ ID NO: 194921
  derived and/or modified CDS sequence (opt5) from hemagglutinin__InfluenzaA__ACS27189

SEQ ID NO: 195010 - RNA, 1701 nt, Artificial Sequence; identical to SEQ ID NO: 194741
  derived and/or modified CDS sequence (opt5) from hemagglutinin__InfluenzaA__ACS27199

SEQ ID NO: 195011 - RNA, 1701 nt, Artificial Sequence; identical to SEQ ID NO: 194741
  derived and/or modified CDS sequence (opt5) from hemagglutinin__InfluenzaA__ACS27209

SEQ ID NO: 195012 - RNA, 1701 nt, Artificial Sequence; identical to SEQ ID NO: 194794
  derived and/or modified CDS sequence (opt5) from hemagglutinin__InfluenzaA__ACS27219

SEQ ID NO: 195013 - RNA, 1701 nt, Artificial Sequence; identical to SEQ ID NO: 194741
  derived and/or modified CDS sequence (opt5) from hemagglutinin__InfluenzaA__ACS27229

SEQ ID NO: 195014 - RNA, 1701 nt, Artificial Sequence
  derived and/or modified CDS sequence (opt5) from hemagglutinin__InfluenzaA__ACS27239
augaaggccauccuggugguccuccuguacaccuucgcuacagccaacgcggacacgcuuugcauuggcuaucacgcuaauaacagcaccgauacaguugacaccgugcuggagaagaaugugacagucacccauuccgugaaccuccuggaagauaagcacaaugggaaacuuuguaagcugagaggaguugcuccccuccaucugggcaaaugcaacaucgccggguggauucugggaaauccugagugugaaucucucagcacagccuccucuuggagcuacaucguggagaccuccucuagcgacaacggcacgugcuauccgggggauuuuauugacuacgaagaacugcgggagcagcuuuccagcaugucuuccuucgaacgcuuugagaucuuccccaagaccagcucuuggccuaaucacgauuccaacaagggagucacagccgcuuguccccaugccggcgcgaaaucuuuuuauaagaaucugaucuggcucgugaaaaagggcaacagcuacccuaaacuguccaagagcuauauuaaugacaaggggaaagaaguucuugugcuguggggaauccaccaccccuccaccucugccgaucaacagagccucuaccagaacgcugacgccuacgucuucgugggcuccagcagauauucuaagaaauuuaagccugagauugcuauccggccgaaagugcgcgaucaggaggggagaaugaauuacuauuggacacuggucgaacccggagacaagauuaccuucgaggccacgggcaaccugguugugccucgguacgcguuugccauggaacgcaacgcuggguccggaaucauuaucagcgauacacccgugcaugacugcaauaccacaugucaaaccccuaaaggcgccaucaacaccucucuccccuuccagaauauucacccgaucacaauuggcaagugcccuaaguaugucaaaagcacgaagcugagacuugcuaccgggcugcggaacgugcccuccauccagucucgcggacucuuuggcgccauugccggguucaucgagggaggcuggacagggaugguugacggaugguacggcuaucaucaccagaaugaacaaggcagcggguacgcugcggaucugaaauccacccagaacgccaucgacgagauuacaaauaaggugaacagcgucaucgagaaaaugaauacccaguuuacggcugugggaaaggaguucaaccaccuugagaagagaauugaaaaucugaacaaaaagguugaugacggcuuccucgauaucuggacauacaaugccgagcugcuggugcuccuggaaaacgagcggacccuugacuaucaugauucuaaugucaaaaaccuguacgagaaggugcgcucccagcucaaaaacaaugccaaggaaauugggaacggauguuuugaguucuaucacaagugcgacaauaccuguauggaaagcgucaaaaacggcacauacgauuauccuaaguacucugaggaagcuaaacugaauagagaggagaucgacggggugaaacuugaauccacccggaucuaucaaauucuggccaucuacagcacaguugcguccucucucgugcuggucgugagccugggcgcuauuuccuuuuggaugugcucuaacggaagccuccagugccgcaucuguauuuga

SEQ ID NO: 195015 - RNA, 1701 nt, Artificial Sequence; identical to SEQ ID NO: 194741
  derived and/or modified CDS sequence (opt5) from hemagglutinin__InfluenzaA__ACS27249

SEQ ID NO: 195016 - RNA, 1701 nt, Artificial Sequence; identical to SEQ ID NO: 194741
  derived and/or modified CDS sequence (opt5) from hemagglutinin__InfluenzaA__ACS27775

SEQ ID NO: 195017 - RNA, 1701 nt, Artificial Sequence; identical to SEQ ID NO: 194728
  derived and/or modified CDS sequence (opt5) from hemagglutinin__InfluenzaA__ACS34705

SEQ ID NO: 195018 - RNA, 1701 nt, Artificial Sequence; identical to SEQ ID NO: 194728
  derived and/or modified CDS sequence (opt5) from hemagglutinin__InfluenzaA__ACS34966

SEQ ID NO: 195019 - RNA, 1701 nt, Artificial Sequence
  derived and/or modified CDS sequence (opt5) from hemagglutinin__InfluenzaA__ACS34967
augaaggccauccuggugguccuccuguacaccuucgcuacagccaacgcggacacgcuuugcauuggcuaucacgcuaauaacagcaccgauacaguugacaccgugcuggagaaaaaugugacagucacccauuccgugaaccuccuggaagauaagcacaaugggaaacuuuguaagcugagaggaguugcuccccuccaucugggcaaaugcaacaucgccggguggauucugggaaauccugagugugaaucucucagcacagccuccucuuggagcuacaucguggagaccuccucuagcgacaacggcacgugcuauccgggggauuuuauugacuacgaagaacugcgggagcagcuuuccagcgucucuuccuucgaacgcuuugagaucuuccccaagaccagcucuuggccuaaucacgauuccaacaagggagugacagccgcuuguccccaugccggcgcgaaaucuuuuuauaagaaucugaucuggcucguuaaaaagggcaacagcuacccuaaacuguccaagagcuauauuaaugacaaggggaaagaagugcuuguccuguggggaauccaccaccccuccaccucugccgaucaacagagccucuaccagaacgcugacgccuacguguucgugggcuccagcagauauucuaagaaauuuaagccugagauugcuauccggccgaaaguccgcgaucaggaggggagaaugaauuacuauuggacacugguugaacccggagacaagauuaccuucgaggccacgggcaaccugguggugccucgguacgcguuugccauggaacgcaacgcuggguccggaaucauuaucagcgauacacccguccaugacugcaauaccacaugucaaaccccuaaaggcgccaucaacaccucucuccccuuccagaauauucacccgaucacaauuggcaagugcccuaaguaugugaaaagcacgaaguccagacuggcuaccgggcuucggaacguucccucuauccagagccgcggacuguuuggcgccauugccggguucaucgagggaggcuggacagggaugguggacggaugguacggcuaucaucaccagaaugaacaaggcuccggguacgcugcggaucucaaaagcacccagaaggccaucgacgagauuacaaacaaagucaauucugugaucgagaagaugaacacccaguuuacggcuguuggaaaggaguucaaucaccuggagaaaagaauugaaaaccuuaauaagaaaguggaugacggcuuccuggauaucuggacauacaacgccgagcuccugguccugcucgaaaaugagcggacccuggacuaucaugauuccaacgugaagaaucuuuacgagaaaguccgcagccagcugaagaacaacgccaaggaaauugggaauggauguuuugaguucuaucacaaaugcgacaacaccuguauggaaucugugaagaauggcacauacgauuauccuaaauacuccgaggaagcuaagcucaacagagaggagaucgacgggguuaaacuggaaagcacccggaucuaucaaauucuugccaucuacuccacaguggcgucuagccugguccucgugguuucccugggcgcuauuucuuuuuggaugugcagcaauggaucccugcagugccgcaucuguauuuga

SEQ ID NO: 195020 - RNA, 1701 nt, Artificial Sequence
  derived and/or modified CDS sequence (opt5) from hemagglutinin__InfluenzaA__ACS34968
augaaggccauccuggugguccuccuguacaccuucgcuacagccaacgcggacacgcuuugcauuggcuaucacgcuaauaacagcaccgauacaguugacaccgugcuggagaagaaugugacagucacccauuccgugaaccuccuggaagauaagcacaaugggaaacuuuguaagcugagaggaguugcuccccuccaucugggcaaaugcaacaucgccggguggauucugggaaauccugagugugaaucucucagcacagccuccucuuggagcuacaucguggaguccucuagcuccgacaacgggaccugcuauccgggcgauuuuauugacuacgaagaacugcgggagcagcuuagcucugucuccagcuucgaacgcuuugagaucuuccccaagacgucuuccuggccuaaucacgauagcaacaagggagugaccgccgcuuguccccaugccggcgcgaaaucuuuuuauaagaaucugaucuggcucguuaaaaagggcaacuccuacccuaaacugagcaaguccuauauuaaugacaaggggaaagaagugcuuguccuguggggaauccaccaccccucuacaagcgccgaucaacagucccucuaccagaacgcugacgccuacguguucgugggcagcucuagauauuccaagaaauuuaagccugagauugcuauccggccgaaaguccgcgaucaggaggggagaaugaauuacuauuggacccugguugaacccggagacaagauuaucuucgaggccacaggcaaccugguggugccucgguacgcguuugccauggaacgcaacgcugggagcggaauuaucaucucugauacccccguccaugacugcaauacgacaugucaaaccccuaaaggcgccauuaacacaagccuccccuuccagaauauccacccgauuaccaucggcaagugcccuaaguaugugaaauccaccaagcugagacuugcuacagggcugcggaacguucccucuauucagagccgcggacucuuuggcgccaucgccggguucaucgagggaggcuggacggggaugguggacggaugguacggcuaucaucaccagaaugaacaaggcuccggguacgcugcggaucugaaaagcacccagaacgccauugacgagaucacaaauaaggucaacucugugauugagaaaaugaauacccaguuuacagcuguuggaaaggaguucaaccaccuugagaagagaaucgaaaaucugaacaaaaagguggaugacggcuuccucgauauuuggaccuacaaugccgagcugcugguccuccuggaaaacgagcggacgcuugacuaucaugauuccaaugugaaaaaccuguacgagaagguccgcagccagcucaaaaacaaugccaaggaaaucgggaacggauguuuugaguucuaucacaagugcgacaauacauguauggaaucugugaaaaacggcaccuacgauuauccuaaguacuccgaggaagcuaaacugaauagagaggagaucgacgggguuaaacuugaaagcacccggauuuaucaaauccuggccauuuacuccacaguggcgucuagccucguccuggugguuucccugggcgcuaucucuuuuuggaugugcagcaacggaucccuccagugccgcauuuguaucuga

SEQ ID NO: 195021 - RNA, 1701 nt, Artificial Sequence
  derived and/or modified CDS sequence (opt5) from hemagglutinin__InfluenzaA__ACS36632
augaaggccauccuggugguccuccuguacaccuucgcuacagccaacgcggacacgcuuugcauuggcuaucacgcuaauaacagcaccgauacaguugacaccgugcuggagaaaaaugugacagucacccauuccgugaaccuccuggaagauaagcacaaugggaaacuuuguaagcugagaggaguugcuccccuccaucugggcaaaugcaacaucgccggguggauucugggaaauccugagugugaaucucucagcacagccuccucuuggagcuacaucguggagaccuccucuagcgacaacggcacgugcuauccgggggauuuuauugacuacgaagaacugcgggagcagcuuuccagcgucucuuccuucgaacgcuuugagaucuuccccaagaccagcucuuggccuaaucacgauuccaacaagggagugacagccgcuuguccccaugccggcgcgaaaucuuuuuauaagaaucugaucuggcucguuaaaaagggcaacagcuacccuaaacuguccaagagcuauauuaaugacaaggggaaagaagugcuuguccuguggggaauccaccaccccuccaccucugccgaucaacagagccucuaccagaacgcugacgccuacguguucgugggcuccagcagauauucuaagaaauuuaagccugagauugcuauccggccgaaaguccgcgaucaggaggggagaaugaauuacuauuggacacugguugaacccggagacaagauuaccuucgaggccacgggcaaccugguggugccucgguacgcguuugccauggaacgcaacgcuggguccggaaucauuaucagcgauacacccguccaugacugcaauaccacaugucaaaccccuaaaggcgccaucaacaccucucuccccuuccagaauauucacccgaucacaauuggcaagugcccuaaguaugugaaaagcacgaagcugagacuugcuaccgggcugcggaacguucccuccauccagucucgcggacucuuuggcgccauugccggguucaucgagggaggcuggacagggaugguggacggaugguacggcuaucaucaccagaaugaacaaggcagcggguacgcugcggaucugaaauccacccagaaggccaucgacgagauuacaaacaaagucaauagcgugaucgagaagaugaacacccaguuuacggcuguuggaaaggaguucaaucaccuugagaaaagaauugaaaaccugaauaagaaaguggaugacggcuuccucgauaucuggacauacaacgccgagcugcugguccuccuggaaaaugagcggacccuugacuaucaugauucuaacgugaagaaucuguacgagaaaguccgcucccagcucaagaacaacgccaaggaaauugggaauggauguuuugaguucuaucacaaaugcgacaacaccuguauggaaagcgugaagaauggcacauacgauuauccuaaauacucugaggaagcuaagcugaacagagaggagaucgacgggguuaaacuugaauccacccggaucuaucaaauucuggccaucuacagcacaguggcguccucucucguccuggugguuagccugggcgcuauuuccuuuuggaugugcucuaauggaagccuccagugccgcaucuguauuuga

SEQ ID NO: 195022 - RNA, 1701 nt, Artificial Sequence
  derived and/or modified CDS sequence (opt5) from hemagglutinin__InfluenzaA__ACS36645
augaaggccauccuggugguccuccuguacaccuucgcuacagccaacgcggacacgcuuugcauuggcuaucacgcuaauaacagcaccgauacaguugacaccgugcuggagaaaaaugugacagucacccauuccgugaaccuccuggaagauaagcacaaugggaaacuuuguaagcugagaggaguugcuccccuccaucugggcaaaugcaacaucgccggguggauucugggaaauccugagugugaaucucucagcacagccuccucuuggagcuacaucguggagaccuccucuagcgacaacggcacgugcuauccgggggauuuuauugacuacgaagaacugcgggagcagcuuuccagcgucucuuccuucgaacgcuuugagaucuuccccaagaccagcucuuggccuaaucacgauuccaacaagggagugacagccgcuuguccccaugccggcaccaagagcuuuuauaagaaucugaucuggcucguuaaaaagggcaacucuuacccuaaacuguccaagagcuauauuaaugacaaggggaaagaagugcuuguccuguggggaauccaccaccccuccacaucugcggaucaacagagccucuaccagaacgccgacgcuuacguguucgugggcuccagcagauauucuaagaaauuuaagccugagauugccauccggccgaaaguccgcgaucaggaggggagaaugaauuacuauuggacccugguugaacccggagacaagauuacguucgaggcuacaggcaaccugguggugccucgguacgccuuugcgauggaacgcaacgccggguccggaaucauuaucagcgauacccccguccaugacugcaauacaaccugucaaaccccuaaaggcgcuaucaacacaucucuccccuuccagaauauucacccgaucacgauuggcaagugcccuaaguaugugaaaagcaccaagcugagacuugccacagggcugcggaacguucccuccauccagucucgcggacucuuuggcgcuauugccggguucaucgagggaggcuggaccgggaugguggacggaugguacggcuaucaucaccagaaugaacaaggcagcggguacgccgcugaucugaaauccacacagaacgcgaucgacgagauuaccaauaaggucaacagcgugaucgagaaaaugaauacgcaguuuacagccguuggaaaggaguucaaccaccuugagaagagaauugaaaaucugaacaaaaagguggaugacggcuuccucgauaucuggaccuacaaugcugagcugcugguccuccuggaaaacgagcggacccuugacuaucaugauucuaaugugaaaaaccuguacgagaagguccgcucccagcucaaaagcaacgccaaggaaauugggaauggauguuuugaguucuaucacaagugcgacaacacauguauggaaucugugaaaaauggcaccuacgauuauccuaaguacuccgaggaagccaaacugaacagagaggagaucgacgggaucaaacuugaaagcacacggauuuaucaaauccuggcuauuuacuccacgguugccucuagccucgugcuggucgugucccugggcgcgaucucuuuuuggaugugcagcaauggaucccuccagugccgcauuuguaucuga

SEQ ID NO: 195023 - RNA, 1701 nt, Artificial Sequence
  derived and/or modified CDS sequence (opt5) from hemagglutinin__InfluenzaA__ACS45035
augaaggccauccuggugguccuccuguacaccuucgcuacagccaacgcggacacgcuuugcauuggcuaucacgcuaauaacagcaccgauacaguugacaccgugcuggagaaaaaugugacagucacccauuccgugaaccuccuggaagauaagcacaaugggaaacuuuguaagcugagaggaguugcuccccuccaucugggcaaaugcaacaucgccggguggauucugggaaauccugagugugaaucucucagcacagccuccucuuggagcuacaucguggagaccccguccucugacaacggcacgugcuaucccggggauuuuauugacuacgaagaacugcgggagcagcuuagcuccgucagcucuuucgaacgcuuugagaucuucccuaagaccuccagcuggcccaaucacgauucuaacaagggagugacagccgcuuguccucaugccggcgcgaaauccuuuuauaagaaucugaucuggcucguuaaaaagggcaacagcuaccccaaacugucuaaguccuauauuaaugacaaggggaaagaagugcuuguccuguggggaauccaccacccuagcaccuccgccgaucaacagucuauuuaccagaacgcugacacauacguguucgugggcagcuccagauauagcaagaaauuuaagccggagaucgccauucggcccaaaguccgcgaucaggaggggagaaugaauuacuauuggacccucguugaaccuggagacaagaucacguucgaggcuacaggcaaccugguggugccccgguacgccuuugcgauggaacgcaacgccgggucuggaauuaucaucuccgauaccccuguccaugacugcaauacaaccugucaaacccccaaaggcgcuauuaacacaagccugccguuccagaauauccacccuauuacgaucggcaagugccccaaguaugugaaaucuaccaagcucagacuggccacagggcuucggaacauuccuagcauccagucccgcggacuguuuggcgcuaucgccggguucauugagggaggcuggaccgggaugguugacggaugguacggcuaucaucaccagaaugaacaaggcucuggguacgccgcugaucucaaaagcacacagaacgcgaucgacgagauuaccaauaaggugaacuccgucaucgagaaaaugaauacgcaguuuacagccgugggaaaggaguucaaccaccuggagaagagaauugaaaaucuuaacaaaaagguugaugacggcuuccuggauaucuggaccuacaaugcugagcuccuggugcugcucgaaaacgagcggacccuggacuaucaugauagcaaugucaaaaaccuuuacgagaaggugcgcucucagcugaaaaacaaugccaaggaaaucgggaacggauguuuugaguucuaucacaagugcgacaauacauguauggaauccgucaaaaacggcaccuacgauuaucccaaguacagcgaggaagccaaacucaauagagaggagauugacggggugaagcuggaaucuacacggaucuaucaaauucuugcuaucuacuccacgguugccagcucccuggugcucgucgugucucugggcgcgauuagcuuuuggaugugcuccaacggaucucugcagugccgcaucuguauuuga

SEQ ID NO: 195024 - RNA, 1701 nt, Artificial Sequence; identical to SEQ ID NO: 194741
  derived and/or modified CDS sequence (opt5) from hemagglutinin__InfluenzaA__ACS50084

SEQ ID NO: 195025 - RNA, 1701 nt, Artificial Sequence; identical to SEQ ID NO: 194983
  derived and/or modified CDS sequence (opt5) from hemagglutinin__InfluenzaA__ACS50095

SEQ ID NO: 195026 - RNA, 1701 nt, Artificial Sequence
  derived and/or modified CDS sequence (opt5) from hemagglutinin__InfluenzaA__ACS54258
augaaggccauccuggugguccuccuguacaccuucgcuacagccaacgcggacacgcuuugcauuggcuaucacgcuaauaacagcaccgauacaguugacaccgugcuggagaagaaugugacagucacccauuccgugaaccuccuggaagauaagcacaaugggaaacuuuguaagcugagaggaguugcuccccuccaucugggcaaaugcaacaucgccggguggauucugggaaauccugagugugaaucucucagcacagccuccucuuggagcuacaucguggagaccuccucuagcgacaacggcacgugcuauccgggggauuuuauugacuacgaagaacugcgggagcagcuuuccagcgucucuuccuucgaacgcuuugagaucuuccccaagaccagcucuuggccuaaucacgauuccaacaagggagugacagccgcuuguccccaugccggcgcgaaaucuuuuuauaagaaucugaucuggcucguuaaaaagggcaacagcuacccuaaacuguccaagagcuauauuaaugacaaggggaaagaagugcuuguccuguggggaauccaccaccccuccaccucugccgaucaacagagccucuaccagaacgcugacgccuacguguucgugggcacauccagauauagcaagaaauuuaagccugagauugcuauccggccgaaaguccgcgaucaggaggggagaaugaauuacuauuggacccugguugaacccggagacaagauuacguucgaggccacaggcaaccugguggugccucgguacgcguuugccauggaacgcaacgcugggucuggaaucauuaucuccgauacccccguccaugacugcaauacaaccugucaaaccccuaaaggcgccaucaacacaagccuccccuuccagaauauucacccgaucacgauuggcaagugcccuaaguaugugaaaucuaccaagcugagacuugcuacagggcugcggaacguucccagcauccagucccgcggacucuuuggcgccauugccggguucaucgagggaggcuggaccgggaugguggacggaugguacggcuaucaucaccagaaugaacaaggcucuggguacgcugcggaucugaaaagcacacagaacgccaucgacgagauuaccaauaaggucaacuccgugaucgagaaaaugaauacgcaguuuacagcuguuggaaaggaguucaaccaccuugagaagagaauugaaaaucugaacaaaaagguggaugacggcuuccucgauaucuggaccuacaaugccgagcugcugguccuccuggaaaacgagcggacccuugacuaucaugauagcaaugugaaaaaccuguacgagaagguccgcucucagcucaaaaacaaugccaaggaaauugggaacggauguuuugaguucuaucacaagugcgacaauacauguauggaauccgugaaaaacggcaccuacuauuacccuaaguauagcgaggaagcuaaacugaauagagaggagaucgaugggguuaaacuugaaucuacacggaucuaccaaauucuggccaucuacuccacgguggcgagcucccucguccuggugguuucucugggcgcuauuagcuuuuggaugugcuccaacggaucucuccagugccgcaucuguauuuga

SEQ ID NO: 195027 - RNA, 1701 nt, Artificial Sequence; identical to SEQ ID NO: 194756
  derived and/or modified CDS sequence (opt5) from hemagglutinin__InfluenzaA__ACS54259

SEQ ID NO: 195028 - RNA, 1701 nt, Artificial Sequence; identical to SEQ ID NO: 194728
  derived and/or modified CDS sequence (opt5) from hemagglutinin__InfluenzaA__ACS54260

SEQ ID NO: 195029 - RNA, 1701 nt, Artificial Sequence; identical to SEQ ID NO: 194741
  derived and/or modified CDS sequence (opt5) from hemagglutinin__InfluenzaA__ACS54261

SEQ ID NO: 195030 - RNA, 1701 nt, Artificial Sequence; identical to SEQ ID NO: 194741
  derived and/or modified CDS sequence (opt5) from hemagglutinin__InfluenzaA__ACS54263

SEQ ID NO: 195031 - RNA, 1701 nt, Artificial Sequence; identical to SEQ ID NO: 194741
  derived and/or modified CDS sequence (opt5) from hemagglutinin__InfluenzaA__ACS54301

SEQ ID NO: 195032 - RNA, 1701 nt, Artificial Sequence; identical to SEQ ID NO: 194728
  derived and/or modified CDS sequence (opt5) from hemagglutinin__InfluenzaA__ACS66821

SEQ ID NO: 195033 - RNA, 1701 nt, Artificial Sequence
  derived and/or modified CDS sequence (opt5) from hemagglutinin__InfluenzaA__ACS68822
augaaggccauccuggugguccuccuguacaccuucgcuacagccaacgcggacacgcuuugcauuggcuaucacgcuaauaacagcaccgauacaguugacaccgugcuggagaagaaugugacagucacccauuccgugaaccuccuggaagauaagcacaaugggaaacuuuguaagcugagaggaguugcuccccuccaucugggcaaaugcaacaucgccggguggauucugggaaauccugagugugaaucucucagcacagccuccucuuggagcuacaucguggagaccuccucuagcgacaacggcacgugcuauccgggggauuuuauugacuacgaaggacugcgggagcagcuuuccagcgucucuuccuucgagcgcuuugaaaucuuccccaagaccagcucuuggccuaaucacgauuccaacaagggcgugacagccgcuuguccccaugccggcgcgaaaucuuuuuauaagaaucugaucuggcucguuaaaaaggggaacagcuacccuaaacuguccaagagcuauauuaaugacaagggaaaagaggugcuuguccuguggggcauccaccaccccuccaccucugccgaucaacagagccucuaccagaacgcugacgccuacguguucguggggacauccagauauagcaagaaauuuaagccugaaauugcuauccggccgaaaguccgcgaucaggagggaagaaugaauuacuauuggacccugguugagcccggcgacaagauuacguucgaagccacagggaaccugguggugccucgguacgcguuugccauggagcgcaacgcuggaucuggcaucauuaucuccgauacccccguccaugacugcaauacaaccugucaaaccccuaaaggcgccaucaacacaagccuccccuuccagaauauucacccgaucacgauugggaagugcccuaaguaugugaaaucuaccaagcugagacuugcuacaggacugcggaacguucccagcauccagucccgcggccucuuuggggccauugccggauucaucgaaggcggguggaccggaaugguggacggcugguacggcuaucaucaccagaaugagcaagggucuggauacgcugcggaucugaaaagcacacagaacgccaucgacgaaauuaccaauaaggucaacuccgugaucgagaaaaugaauacgcaguuuacagcuguuggcaaggaguucaaccaccuugaaaagagaauugagaaucugaacaaaaagaucgaugacggguuccucgauauuuggaccuacaaugccgaacugcuggugcuccuggagaacgaacggacccuugacuaucaugauagcaaugucaaaaaccuguacgagaaggugcgcucucagcucaaaaacaaugccaaggagaucggaaacggcuguuuugaguucuaucacaagugcgacaauacauguauggaauccgucaaaaacgggaccuacgauuauccuaaguacagcgaagaggcuaaacugaauagagaagagaucgacggcgugaaacuugagucuacacggauuuaucaaauccuggccauuuacuccacgguugcgagcucccucgugcuggucgugucucugggagcuaucagcuuuuggaugugcuccaacggcucucuccagugccgcauuuguaucuga

SEQ ID NO: 195034 - RNA, 1701 nt, Artificial Sequence; identical to SEQ ID NO: 194741
  derived and/or modified CDS sequence (opt5) from hemagglutinin__InfluenzaA__ACS75821

SEQ ID NO: 195035 - RNA, 1701 nt, Artificial Sequence; identical to SEQ ID NO: 194741
  derived and/or modified CDS sequence (opt5) from hemagglutinin__InfluenzaA__ACS77926

SEQ ID NO: 195036 - RNA, 1701 nt, Artificial Sequence; identical to SEQ ID NO: 194741
  derived and/or modified CDS sequence (opt5) from hemagglutinin__InfluenzaA__ACS77936

SEQ ID NO: 195037 - RNA, 1701 nt, Artificial Sequence; identical to SEQ ID NO: 194834
  derived and/or modified CDS sequence (opt5) from hemagglutinin__InfluenzaA__ACS77946

SEQ ID NO: 195038 - RNA, 1701 nt, Artificial Sequence; identical to SEQ ID NO: 194741
  derived and/or modified CDS sequence (opt5) from hemagglutinin__InfluenzaA__ACS77956

SEQ ID NO: 195039 - RNA, 1701 nt, Artificial Sequence; identical to SEQ ID NO: 194741
  derived and/or modified CDS sequence (opt5) from hemagglutinin__InfluenzaA__ACS77966

SEQ ID NO: 195040 - RNA, 1701 nt, Artificial Sequence; identical to SEQ ID NO: 194741
  derived and/or modified CDS sequence (opt5) from hemagglutinin__InfluenzaA__ACS77976

SEQ ID NO: 195041 - RNA, 1701 nt, Artificial Sequence; identical to SEQ ID NO: 194983
  derived and/or modified CDS sequence (opt5) from hemagglutinin__InfluenzaA__ACS77986

SEQ ID NO: 195042 - RNA, 1701 nt, Artificial Sequence
  derived and/or modified CDS sequence (opt5) from hemagglutinin__InfluenzaA__ACS77996
augaaggccacccuggugguccuccuguacacauucgcuacggccaacgcggacacccuuugcaucggcuaucacgcuaauaacagcacagauaccguugacacagugcuggagaagaaugugaccgucacacauuccgugaaccuccuggaagauaagcacaaugggaaacuuuguaagcugagaggaguugcuccccuccaucugggcaaaugcaacauugccggguggauccugggaaauccugagugugaaucucucagcaccgccuccucuuggagcuacauuguggagacguccucuagcgacaacggaaccugcuauccgggggauuuuaucgacuacgaagaacugcgggagcagcuuuccagcgucucuuccuucgaacgcuuugagauuuuccccaagacaagcucuuggccuaaucacgauuccaacaagggagugaccgccgcuuguccccaugccggcgcgaaaucuuuuuauaagaaucugaucuggcucguuaaaaagggcaacagcuacccuaaacuguccaagagcuauaucaaugacaaggggaaagaagugcuuguccuguggggcauucaccaccccuccacaucugccgaucaacagagccucuaccagaacgcugacgccuacguguucgugggcaccuccagauauagcaagaaauuuaagccugagaucgcuauucggccgaaaguccgcgaucaggaggggagaaugaauuacuauuggacgcugguugaacccggagacaagaucacauucgaggccaccggcaaccugguggugccucgguacgcguuugccauggaacgcaacgcugggucuggaauuaucauuuccgauacacccguccaugacugcaauaccaccugucaaacaccuaaaggcgccaucaacacgagccuccccuuccagaauauccacccgauuaccaucggcaagugcccuaaguaugugaaaucuacaaagcugagacuugcuaccgggcugcggaacguucccagcauucagucccgcggacucuuuggcgccaucgccggguucauugagggaggcuggacagggaugguggacggaugguacggcuaucaucaccagaaugaacaaggcucuggguacgcugcggaucugaaaagcacccagaacgccaucgacgagaucacgaauaaggucaacuccgugauugagaaaaugaauacacaguuuaccgcuguuggaaaggaguucaaccaccuugagaagagaaucgaaaaucugaacaaaaagguggaugacggcuuccucgauauuuggaccuacaaugccgagcugcugguccuccuggaaaacgagcggacacuugacuaucaugauagcaaugugaaaaaccuguacgagaagguccgcucucagcucaaaaacaaugccaaggaaaucgggaacggauguuuugaguucuaucacaagugcgacaauaccuguauggaauccgugaaaaacggcacauacgauuauccuaaguacagcgaggaagcuaaacugaauagagaggagauugacgggguuaaacuugaaucuacgcggaucuaucaaauccuggccauuuacuccaccguggcgagcucccucguccuggugguuucucugggcgcuaucagcuuuuggaugugcuccaacggaucucuccagugccgcauuuguaucuga

SEQ ID NO: 195043 - RNA, 1701 nt, Artificial Sequence; identical to SEQ ID NO: 194741
  derived and/or modified CDS sequence (opt5) from hemagglutinin__InfluenzaA__ACS78006

SEQ ID NO: 195044 - RNA, 1701 nt, Artificial Sequence; identical to SEQ ID NO: 194741
  derived and/or modified CDS sequence (opt5) from hemagglutinin__InfluenzaA__ACS78016

SEQ ID NO: 195045 - RNA, 1701 nt, Artificial Sequence
  derived and/or modified CDS sequence (opt5) from hemagglutinin__InfluenzaA__ACS78026
augaaggccauccuggugguccuccuguacaccuucgcuacagccaacgcggacacgcuuugcauuggcuaucacgcuaauaacagcaccgauacaguugacaccgugcuggagaaaaaugugacagucacccauuccgugaaccuccuggaagauaagcacaaugggaaacuuuguaagcugagaggaguugcgccccuccaucugggcaaaugcaacaucgccggguggauucugggaaauccugagugugaaucucucagcacagcuuccucuuggagcuacaucguggagaccuccucuagcgacaacggcacgugcuauccgggggauuuuauugacuacgaagaacugcgggagcagcuuuccagcgucucuuccuucgaacgcuuugagaucuuccccaagaucagcucuuggccuaaucacgauuccaacagaggagugaccgccgcuuguccccaugccggcgccaagagcuuuuauaaaaaucugauuuggcucguuaagaaaggcaacucuuacccuaagcugaucaaauccuauauuaaugacaaggggaaggaagugcuuguccuguggggaauccaccaccccagcacauccgccgaucaacagucucucuaccagaacgcugacgccuacguguucgugggcagcucccgguauagcaaaaaguuuaaaccugagauugcuauccgcccgaaggucagagaucaggaggggcggaugaauuacuauuggacccugguugaacccggagacaaaauuacauucgaggccaccggcaaccugguggugccucgcuacgcguuugccauggaaagaaacgcugggucuggaaucaucauuuccgauacgcccguccaugacugcaauacaaccugucaaacaccuaagggcgccaucaacaccagccuccccuuccagaauauucacccgaucaccauuggcaaaugcccuaaguaugugaagucuacaaaacugcggcuugcuacggggcugcgcaacguucccagcauccaguccagaggacucuuuggcgccaucgccggguucauugagggaggcuggaccgggaugguggacggaugguacggcuaucaucaccagaaugaacaaggcucuggguacgcugcggaucuuaagagcacacagaacgccaucgacgagauuaccaauaaagucaacuccgugaucgagaagaugaauacacaguuuaccgcuguuggaaaagaguucaaccaccuggagaagcggauugaaaaucugaacaagaaaguggaugacggcuuccucgauaucuggacguacaaugccgagcugcugguccuccuggaaaacgagcgcacacuugacuaucaugauagcaaugugaagaaccuguacgagaaagucagaucucagcucaagaacaaugccaaagaaaucgggaacggauguuuugaguucuaucacaagugcgacaauaccuguauggaauccgugaagaacggcaccuacgauuauccuaaauacagcgaggaagcuaagcugaaucgggaggagauugacgggguuaaacuugaaucuacacgcaucuaucaaauucuggccaucuacuccaccguggcgagcucccucguccuggugguuucucugggcgcuauuagcuuuuggaugugcuccaacggaucucuccagugcagaaucuguauuuga

SEQ ID NO: 195046 - RNA, 1701 nt, Artificial Sequence; identical to SEQ ID NO: 194983
  derived and/or modified CDS sequence (opt5) from hemagglutinin__InfluenzaA__ACS78036

SEQ ID NO: 195047 - RNA, 1701 nt, Artificial Sequence; identical to SEQ ID NO: 194983
  derived and/or modified CDS sequence (opt5) from hemagglutinin__InfluenzaA__ACS78046

SEQ ID NO: 195048 - RNA, 1701 nt, Artificial Sequence; identical to SEQ ID NO: 194756
  derived and/or modified CDS sequence (opt5) from hemagglutinin__InfluenzaA__ACS92569

SEQ ID NO: 195049 - RNA, 1701 nt, Artificial Sequence; identical to SEQ ID NO: 194756
  derived and/or modified CDS sequence (opt5) from hemagglutinin__InfluenzaA__ACS92579

SEQ ID NO: 195050 - RNA, 1701 nt, Artificial Sequence; identical to SEQ ID NO: 194741
  derived and/or modified CDS sequence (opt5) from hemagglutinin__InfluenzaA__ACS92589

SEQ ID NO: 195051 - RNA, 1701 nt, Artificial Sequence
  derived and/or modified CDS sequence (opt5) from hemagglutinin__InfluenzaA__ACS92612
augaaggccauccuggugguccuccuguacaccuucgcuacagccaacgcggacacgcuuugcauuggcuaucacgcuaauaacagcaccgauacaguugacaccgugcuggagaagaaugugacagucacccauuccgugaaccuccuggaagauaagcacaaugggaaacuuuguaagcugagaggaguugcuccccuccaucugggcaaaugcaacaucgccggguggauucugggaaauccugagugugaaucucucagcacagccuccucuuggagcuacaucguggagaccuccucuagcgacaacggcacgugcuauccgggggauuuuauugacuacgaagaacugcgggagcagcuuuccagcgucucuuccuucgaacgcuuugagaucuuccccaagaccagcucuuggccuauccacgauuccaauaagggagugacagccgcuuguccccaugccggcgcgaaaucuuuuuauaagaaccugauuuggcucguuaaaaagggcaauagcuacccuaaacuguccaagagcuauaucaacgacaaggggaaagaagugcuuguccuguggggcauucaccaccccuccaccucugccgaucaacagagccucuaccagaaugcugacgccuacguguucgugggauccagcagauauucuaagaaauuuaagccugagaucgcuauucggccgaaaguccgcgaucaggaggggagaaugaacuacuauuggacacugguugaacccggagacaagaucaccuucgaggccacgggcaaucugguggugccucgguacgcguuugccauggaacgcaacgcuggguccggaauuaucaucagcgauacacccguccaugacugcgacaccacaugucaaaccccuaaaggcgccauuaacaccucucuccccuuccagaauauccacccgauuacaaucggcaagugcccuaaguaugugaaaagcacgaagcugagacuugcuaccgggcugcggaacauucccuccauccagucucgcggacucuuuggcgccaucgccggguucauugagggaggcuggacagggaugguugauggaugguacggcuaucaucaccagaaugaacaaggcagcggguacgcugcggaccugaaauccacccagaacgccaucgaugagauuacaaauaaggugaacagcgucaucgagaaaaugaauacccaguuuacggcugugggaaaggaguucaaccaccuugagaagagaauugaaaaucugaacaaaaagguugacgauggcuuccucgacaucuggacauacaaugccgagcugcuggugcuccuggaaaacgagcggacccuugauuaucaugacucuaaugucaaaaaccuguacgagaaggugcgcucccagcucaaaaauaacgccaaggaaaucgggaacggauguuuugaguucuaucacaagugcgauaauaccuguauggaaagcgucaaaaacggcacauacgacuauccuaaguacucugaggaagcuaaacugaauagagaggagauugauggggugaaacuugaauccacccggaucuaucaaauucuggccaucuacagcacaguugcguccucucucgugcuggucgugagccugggcgcuauuuccuuuuggaugugcucuaacggaagccuccagugccgcaucuguauuuga

SEQ ID NO: 195052 - RNA, 1701 nt, Artificial Sequence; identical to SEQ ID NO: 194741
  derived and/or modified CDS sequence (opt5) from hemagglutinin__InfluenzaA__ACT10307

SEQ ID NO: 195053 - RNA, 1701 nt, Artificial Sequence; identical to SEQ ID NO: 194741
  derived and/or modified CDS sequence (opt5) from hemagglutinin__InfluenzaA__ACT10314

SEQ ID NO: 195054 - RNA, 1701 nt, Artificial Sequence
  derived and/or modified CDS sequence (opt5) from hemagglutinin__InfluenzaA__ACT11057
augaaggccauccuggugguccuccuguacaccuucgcuacagccaacgcggacacgcuuugcauuggcuaucacgcuaauaacagcaccgauacaguugacaccgugcuggagaaaaaugugacagucacccauuccgugaacauccucgaagauaagcacaaugggaaacuguguaaacuuagaggaguugcuccccugcaucucggcaagugcaacauugccggguggauccugggaaauccugagugugaaucucugagcacagccuccucuuggagcuacauuguggagaccuccucuagcgacaacggcacgugcuauccgggggauuuuaucgacuacgaagaacuccgggagcagcuguccagcgucucuuccuucgaacgcuuugagaucuuccccaagaccagcucuuggccuaaucacgauuccaacaagggagugacagccgcuuguccccaugccggcgcgaaaucuuuuuauaagaaucuuauuuggcugguuaaaaagggcaacagcuacccuaaacucuccaagagcuauaucaaugacaaggggaaagaagugcugguccuuuggggcauucaccaccccuccaccucugccgaucaacagagccuguaccagaacgcugacgccuacguguucgugggauccagcagauauucuaagaaauuuaagccugagaucgcuauucggccgaaaguccgcgaucaggaggggagaaugaauuacuauuggacacucguugaacccggagacaagaucaccuucgaggccacgggcaaccugguggugccucgguacgcguuugccauggaacgcaacgcuggguccggaauuaucaucagcgauacacccguccaugacugcaauaccacaugucaaaccccuaaaggcgccauuaacaccucucugcccuuccagaauauccacccgauuacaaucggcaagugcccuaaguaugugaaaagcacgaagcucagacuggcuaccgggcuucggaacguucccuccauucagucucgcggacuguuuggcgccaucgccggguucaucgagggaggcuggacagggaugguggacggaugguacggcuaucaucaccagaaugaacaaggcagcggguacgcugcggaucucaaauccacccagaacgccauugacgagaucacaaauaaggucaacagcgugauugagaaaaugaauacccaguuuacggcuguuggaaaggaguucaaccaccuggagaagagaaucgaaaaucuuaacaaaaagguggaugacggcuuccuggauauuuggacauacaaugccgagcuccugguccugcucgaaaacgagcggacccuggacuaucaugauucuaaugugaaaaaccuuuacgagaagguccgcucccagcugaaaaacaaugccaaggaaguggggaacggauguuuugaguucuaucacaagugcgacaauaccuguauggaaagcguuaaaaacggcacauacgauuauccuaaguacucugaggaagcuaaacucaauagagaggagaucgacggggugaagcuggaauccacccggaucuaucaaauucuugccaucuacagcacagucgcguccucucuggugcucguugugagccugggcgcuauuuccuuuuggaugugcucuaacggaagccugcagugccgcaucuguauuuga

SEQ ID NO: 195055 - RNA, 1704 nt, Artificial Sequence
  derived and/or modified CDS sequence (opt5) from hemagglutinin__InfluenzaA__ACT15312
auggagaagaucgugcugcuccuggccauugucagcaucguuaaauccgaccagauuugcaucggcuaccacgcuaacaauucuaccgaacaaguggauacaauuauggagaagaacgugacggucacccaugcccaggacauccuugaaaagacacacaaugggaaacuguguaaccucgauggagugaaaccccugauccuuagagacugcagcguugcgggcuggcugcucgggaauccuaugugugaugaguuccugaacgugccggaaugguccuauauugucgagaagaucaaucccgcuaacgaccugugcuacccuggaaauuuuaacgauuaugaggaacucaagcaucugcuuucucggauuaaucacuucgagaaaauccagauuauccccaagaacagcugguccgaccaugaagccucuggcgugagcuccgccuguccuuaccaggggcgcagcuccuuuuucagaaauguuguguggcugaccaaaaagaacaaugcuuaucccacaauuaaacggucuuacaacaacaccaaucaagaggaucuccugguccuuuggggaauccaccacccuaacgacgccgcugagcagacacgccuguaucagaauccgaccacguacaucagcgugggcaccucuacacucaaccagagacuggugcccaagauugccacccgguccaaggucaauggccaaagcgggcgcauggaauuuuucuggacaauccugaaaucuaacgaugcgauuaauuuugaguccaacggaaauuucaucgccccugaaaacgcuuacaagauuguuaaaaagggcgacagcaccaucaugaaauccgagcucgaauaugggaauugcaacacgaagugucagacacccaucggagccauuaauucuagcaugccuuuucauaacauccacccccugaccauuggcgagugcccgaaauacgugaaguccaauagacuugugcuggcuacagggcuccggaacagcccucagggagagcgcagacggaagaaacgcggccuguucggcgccaucgcgggguuuauugaaggaggcuggcaggggauggucgauggaugguauggcuaccaucacucuaacgagcaaggguccggauaugccgcugacaaggaaagcacccagaaagccaucgacggcgugaccaauaagguuaacucuaucauugauaaaaugaauacacaguucgaggcugugggcagagaauuuaacaaucuugagcggcgcaucgagaaccugaauaagaagauggaagacggguuccucgaugucuggacguacaacgccgagcugcuggugcucauggaaaaugagagaacccuggacuuccacgauagcaacguuaaaaaucuuuaugacaaggugcggcugcaacucagagauaacgccaaagaacugggaaauggcuguuuugaguucuaccaucgcugcgacaacgaguguauggaauccguccggaaugggacauacgauuauccccaguacucugaggaagcuagacuuaagcgcgaggagauuagcggagugaaacuggaauccaucggcaccuaucagauucucagcaucuacucuacagucgcguccagccuggcccuggcuauuaugguggccgggcucuuucuguggaugugcucuaacggcucccuucagugccggaucuguaucuga

SEQ ID NO: 195056 - RNA, 1704 nt, Artificial Sequence
  derived and/or modified CDS sequence (opt5) from hemagglutinin__InfluenzaA__ACT15314
auggagaagaucgugcugcuccuggccauugucagccuuguuaaauccgaccagaucugcauuggcuaccacgcuaacaauucuaccgaacaaguggauacaaucauggagaagaacgugacggucacccaugcccaggacauucuggaaaagacacacaaugggaaacucuguaaccuggauggagugaaaccccuuauccugagagacugcagcguugcgggcuggcuccuggggaauccuaugugugaugaguuccugaacgugccggaaugguccuauaucgucgagaagauuaaucccgcuaacgaccucugcuacccuggaaauuuuaacgauuaugaggaacugaagcaucuucugucucggaucaaucacuucgagaaaauucagaucauucccaagaacagcugguccgaccaugaagccucuggcgugagcuccgccuguccuuaccaggggcgcagcuccuuuuucagaaauguuguguggcucaccaaaaagaacaaugcuuaucccacaaucaaacggucuuacaacaacaccaaucaagaggaucugcuuguccuguggggcauucaccacccuaacgacgccgcugagcagacacgccucuaucagaauccgaccacguacaucagcgugggaaccucuacacugaaccagagacuggugcccaagaucaccacacgguccaaggucaauggccaaagcgggcgcauggaauuuuucuggaccauucucaaaucuaacgaugccaucaauuuugaguccaacggaaauuucauugcgccugaaaacgccuacaagaucguuaaaaagggcgacagcacgauuaugaaauccgagcuggaauaugggaauugcaacacaaagugucagacccccaucggagcuaucaauucuagcaugccuuuucauaacauucacccccuuacaaucggcgagugcccgaaauacgugaaguccaauagacuggugcucgccaccgggcugcggaacagcccucagggagagcgcagacggaagaaacgcggccuuuucggcgcuauugccggguuuaucgaaggaggcuggcaggggauggucgauggaugguauggcuaccaucacucuaacgagcaaggguccggauaugcggccgacaaggaaagcacccagaaagcuauugacggcgugacaaauaagguuaacucuaucaucgauaaaaugaauacgcaguucgaggccgugggcagagaauuuaacaaucuggagcggcgcauugagaaccucaauaagaagauggaagacggguuccuggaugucuggaccuacaacgcugagcugcucgugcugauggaaaaugagagaacacuugacuuccacgauagcaacguuaaaaaucuguaugacaaggugcggcuccaacugagagauaacgccaaagaacuuggaaauggcuguuuugaguucuaccaucgcugcgacaacgaguguauggaauccguccggaaugggaccuacgauuauccccaguacucugaggaagccagacugaagcgcgaggagaucagcggagugaaacucgaauccauuggcacauaucagauccugagcauuuacucuaccgucgcuuccagccuggcgcucgccaucaugguggcugggcuguuucuuuggaugugcucuaacggcucccugcagugccggauuuguaucuga

SEQ ID NO: 195057 - RNA, 1704 nt, Artificial Sequence
  derived and/or modified CDS sequence (opt5) from hemagglutinin__InfluenzaA__ACT15316
auggagaagaucgugcugcuccuggccauugucagccuuguuaaauccgaccagaucugcauuggcuaccacgcuaacaauucuaccgaacaaguggauacaaucauggagaagaacgugacggucacccaugcccaggacauucuggaaaagacacacaaugggaaacucuguaaccuggauggagugaaaccccuuauccugagagacugcagcguugcgggcuggcuccuggggaauccuaugugugaugaguuccugaacgugccggaaugguccuauaucgucgagaagauuaaucccgcuaacgaccucugcuacccuggaaauuuuaacgauuaugaggaacugaagcaucuucugucucggaucaaucacuucgagaaaauucagaucauucccaagaacagcugguccgaccaugaagccucuggcgugagcuccgccuguccuuaccaggggcgcagcuccuuuuucagaaauguuguguggcucaccaaaaaggauaacgcuuaucccacaaucaaacggucuuacaauaacaccaaccaagaggaccugcuuguccuguggggcauucaccacccuaaugaugccgcugagcagacacgccucuaucagaacccgaccacguacaucagcgugggaaccucuacacugaaucagagacugauccccaagauugccacccgguccaaggugaacggccaaagcgggcgcauggaauuuuucuggacaauccucaaaucuaaugacgcgauuaacuuugaguccaauggaaacuucaucgccccugaaaaugcuuacaagauugucaaaaagggcgauagcaccaucaugaaauccgagcuggaauaugggaacugcaauacgaagugucagacacccaucggagccauuaacucuagcaugccuuuucauaauauccacccccuuaccauuggcgagugcccgaaauacguuaaguccaacagacuggugcucgcuacagggcugcggaauagcccucagggagagcgcagacggaagaaacgcggccuuuucggcgccaucgcgggguuuauugaaggaggcuggcaggggaugguggacggaugguauggcuaccaucacucuaacgagcaaggguccggauaugccgcugacaaggaaagcacccagaaagccaucgauggcgucaccaacaagguuaauucuaucauugacaaaaugaacacacaguucgaggcugugggcagagaauuuaauaaccuggagcggcgcaucgagaaucucaacaagaagauggaagauggguuccuggacguguggacguacaaugccgagcugcucguccugauggaaaacgagagaacccuugauuuccacgacagcaaugugaaaaaccuguaugauaagguucggcuccaacugagagacaaugccaaagaacuuggaaacggcuguuuugaguucuaccaucgcugcgauaaugaguguauggaauccgugcggaacgggacauacgacuauccccaguacucugaggaagcuagacugaagcgcgaggagauuagcggagucaaacucgaauccaucggcaccuaucagauucugagcaucuacucuacaguggcguccagccuggcccucgcuauuauggucgccgggcuguuucuuuggaugugcucuaauggcucccugcagugccggaucuguaucuga

SEQ ID NO: 195058 - RNA, 1704 nt, Artificial Sequence
  derived and/or modified CDS sequence (opt5) from hemagglutinin__InfluenzaA__ACT15320
auggagaagaucgugcugcuccuggccauugucagccuuguuaaauccgaccagaucugcauuggcuaccacgcuaacaauucuaccgaacaaguggauacaaucauggagaagaacgugacggucacccaugcccaggacauucuggaaaagacacacaaugggaaacucuguaaccuggauggagugaaaccccuuauccugagagacugcagcguugcgggcuggcuccuggggaauccuaugugugaugaguuccugaacgugccggaaugguccuauaucgucgagaagauuaaucccgcuaacgaccucugcuacccuggaaauuuuaacgauuaugaggaacugaagcaucuucugucucggaucaaucacuucgagaaaauucagaucauucccaagaacagcugguccgaccaugaagccucuggcaugagcuccgccuguccuuaccaggggcgcagcuccuuuuucagaaaugugguuuggcucaccaaaaaggauaacgcuuaucccacaaucaaacggucuuacaauaacaccaaccaagaggaccugcuugugcuguggggcauucaccacccuaaugaugccgcugagcagacacgccucuaucagaacccgaccacguacaucagcgucggaaccucuacacugaaucagagacuggugcccaagaucgccacccgguccaaggugaacggccaaagcgggcgcauggaauuuuucuggacaauucucaaaucuaaugacgcgaucaacuuugaguccaauggaaacuucauugccccugaaaaugcuuacaagaucgucaaaaagggcgauagcaccauuaugaaauccgagcuggaauaugggaacugcaauacgaagugucagacacccaucggagccaucaacucuagcaugccuuuucauaauauucacccccuuaccaucggcgagugcccgaaauacguuaaguccaacagacuggugcucgcuacagggcugcggaauagcccucagggagagcgcagacggaagaaacgcggccuuuucggcgccauugcgggguuuaucgaaggaggcuggcaggggaugguggacggaugguauggcuaccaucacucuaacgagcaaggguccggauaugccgcugacaaggaaagcacccagaaagccauugauggcgucaccaacaagguuaauucuaucaucgacaaaaugaacacacaguucgaggcugugggcagagaauuuaauaaccuggagcggcgcauugagaaucucaacaagaagauggaagauggguuccuggacguguggacguacaaugccgagcugcucguccugauggaaaacgagagaacccuugauuuccacgacagcaaugugaaaaaccuguaugauaagguucggcuccaacugagagacaaugccaaagaacuuggaaacggcuguuuugaguucuaccaucgcugcgauaaugaguguauggaauccgugcggaacgggacauacgacuauccccaguacucugaggaagcuagacugaagcgcgaggagaucagcggagucaaacucgaauccauuggcaccuaucagauccugagcauuuacucuacaguggcguccagccuggcccucgcuaucauggucgccgggcuguuucuuuggaugugcucuaauggcucccugcagugccggauuuguaucuga

SEQ ID NO: 195059 - RNA, 1704 nt, Artificial Sequence
  derived and/or modified CDS sequence (opt5) from hemagglutinin__InfluenzaA__ACT15322
auggagaagaucgugcugcuccuggccauugucagccuuguuaaauccgaccagaucugcauuggcuaccacgcuaacaauucuaccgaacaaguggauacaaucauggagaagaacgugacggucacccaugcccaggacauucuggaaaagacacacaaugggaaacucuguaaccuggauggagugaaaccccuuauccugagagacugcagcguugcgggcuggcuccuggggaauccuaugugugaugaguuccugaacgugccggaaugguccuauaucgucgagaagauuaaucccgcuaacgaccucugcuacccuggaaauuuuaacgauuaugaggaacugaagcaucuucugucucggaucaaucacuucgagaaaauucagaucauucccaagaacagcugguccgaccaugaagccucuggcgugagcuccgccuguccuuaccaggggcgcagcuccuuuuucagaaauguuguguggcucaccaaaaaggauaacgcuuaucccacaaucaaacggucuuacaauaacaccaaccaagaggaccugcuuguccuguggggcauucaccacccuaaugaugccgcugagcagacacgccucuaucagaacccgaccacguacaucagcgugggaaccucuacacugaaucagagacuggugcccaagaucgccacccgguccaaggucaacggccaaagcgggcgcauggaauuuuucuggacaauucucaaaucuaaugacgcgaucaacuuugaguccaauggaaacuucauugccccugaaaaugcuuacaagaucguuaaaaagggcgauagcaccauuaugaaauccgagcuggaauaugggaacugcaauacgaagugucagacacccaucggagccaucaacucuagcaugccuuuucauaauauucacccccuuaccaucggcgagugcccgaaauacgugaaguccaacagacuggugcucgcuacagggcugcggaauagcccucagggagagcgcagacggaagaaacgcggccuuuucggcgccauugcgggguuuaucgaaggaggcuggcaggggauggucgacggaugguauggcuaccaucacucuaacgagcaaggguccggauaugccgcugacaaggaaagcacccagaaagccauugauggcgugaccaacaagguuaauucuaucaucgacaaaaugaacacacaguucgaggcugugggcagagaauuuaauaaccuggagagccggauugagaaucucaacaagaagauggaagauggguuccuggacgucuggacguacaaugccgagcugcucgugcugauggaaaacgagcgcacccuugauuuccacgacuccaauguuaaaaaccuguaugauaaggugagacuccaacugcgggacaaugccaaagaacuuggaaacggcuguuuugaguucuaccauagaugcgauaaugaguguauggaaucuguccgcaacgggacauacgacuauccccaguacagcgaggaagcucggcugaagagagaggagaucuccggagugaaacucgaaagcauuggcaccuaucagauccugucuauuuacuccacagucgcgagcucucuggcccucgcuaucaugguggccgggcuguuucuuuggaugugcuccaauggcagccugcagugccgcauuuguaucuga

SEQ ID NO: 195060 - RNA, 1704 nt, Artificial Sequence
  derived and/or modified CDS sequence (opt5) from hemagglutinin__InfluenzaA__ACT15326
auggagaagaucgugcugcuccuggccauugucagccuuguuaaauccgaccagaucugcauuggcuaccacgcuaacaauucuaccgaacaaguggauacaaucauggagaagaacgugacggucacccaugcccaggacauucuggaaaagacacacaaugggaaacucuguaaccuggauggagugaaaccccuuauccugagagacugcagcguugcgggcuggcuccuggggaauccuaugugugaugaguuccugaacgugccggaaugguccuauaucgucgagaagauuaaucccgcuaacgaccucugcuacccuggaaauuuuaacgauuaugaggaacugaagcaucuucugucucggaucaaucacuucgagaaaauucagaucauucccaagaacagcugguccgaccaugaagccucuggcgugagcuccgccuguccuuaccaggggcgcagcucuuucuuuagaaauguuguguggcucaccaaaaaggauaacgcuuaucccacaaucaaacgguccuacaauaacaccaaccaagaggaccugcuuguccuguggggcauucaccacccuaaugaugccgcugagcagacacgccucuaucagaacccgaccacguacaucagcgugggaaccucuacacugaaucagagacugauccccaagauugccacccgguccaaggugaacggccaaagcgggcgcauggaauuuuucuggacaauccucaaaccuaaugacgcgauuaacuuugagucuaauggaaacuucaucgcccccgaaaaugcuuacaagauugucaaaaagggcgauuccaccaucaugaaaagcgagcuggaauaugggaacugcaauacgaagugucagacaccuaucggagccauuaacuccucuaugcccuuucauaauauccacccgcuuaccauuggcgagugcccuaaauacguuaagagcaacagacuggugcucgcuacagggcugcggaauagcccccagggagagcgcagacggaagaaacgcggccuuuucggcgccaucgcgggguuuauugaaggaggcuggcaggggaugguggacggaugguauggcuaccaucacuccaacgagcaagggucuggauaugccgcugacaaggaauccacccagaaagccaucgauggcgucaccaacaaggugaauagcaucauugacaaaaugaacacacaguucgaggcuguuggcagagaauuuaauaaccuggagcggcgcaucgagaaucucaacaagaagauggaagauggguuccuggacguguggacguacaaugccgagcugcucguccugauggaaaacgagagaacccuugauuuccacgacucuaaugugaaaaaccuguaugauaagguucggcuccaacugagagacaaugccaaagaacuuggaaacggcuguuuugaguucuaccaucgcugcgauaaugaguguauggaaagcgugcggaacgggacauacgacuauccucaguacuccgaggaagcuagacugaagcgcgaggagauuucuggagucaaacucgaaagcaucggcaccuaucagauucuguccaucuacagcacaguggcgucuucccuggcccucgcuauuauggucgccgggcuguuucuuuggaugugcagcaauggcucucugcagugccggaucuguaucuga

SEQ ID NO: 195061 - RNA, 1704 nt, Artificial Sequence
  derived and/or modified CDS sequence (opt5) from hemagglutinin__InfluenzaA__ACT15328
auggagaagaucgugcugcuccuggccauugucagccuuguuaaauccgaccagaucugcauuggcuaccacgcuaacaauucuaccgaacaaguggauacaaucauggagaagaacgugacggucacccaugcccaggacauucuggaaaagacacacaaugggaagcucuguaaccuggauggagugaaaccccuuauccugagagacugcagcguugcgggcuggcuccuggggaauccuaugugugaugaguuccugaacgugccggaaugguccuauaucgucgagaagauuaaucccgcuaacgaccucugcuacccuggaaauuuuaacgauuaugaggaacugaagcaucuucugucucggaucaaucacuucgagaaaauucagaucauucccaagaacagcugguccgaccaugaagccucuggcgugagcuccgccuguccuuaccaggggcgcagcuccuuuuucagaaauguuguguggcucaccaaaaaggauaacgcuuaucccacaaucaaacggucuuacaauaacaccaaccaagaggaccugcuuguccuguggggcauucaccacccuaaugaugccgcugagcagacacgccucuaucagaacccgaccacguacaucagcgugggaaccucuacacugaaucagagacuggugcccaagaucgccacccgguccaaggucaacggccaaaaugggcgcauggaauuuuucuggacaauucucaaaagcaacgacgcgaucaauuuugagucuaacggaaauuucauugccccugaaaacgcuuacaagaucguuaaaaagggcgauuccaccauuaugaaaagcgagcuggaauaugggaauugcaacacgaagugucagacacccaucggagccaucaauuccucuaugccuuuucauaacauucacccccuuaccaucggcgagugcccgaaauacgugaaaagcaauagacuggugcucgcuacagggcugcggaacuccccucagggagagcgcagacggaagaaacgcggccuuuucggcgccauugcgggguuuaucgaaggaggcuggcaggggauggucgacggaugguauggcuaccaucacagcaacgagcaagggucuggauaugccgcugacaaggaauccacccagaaagccauugauggcgugaccaauaagguuaacagcaucaucgacaaaaugaauacacaguucgaggcugugggcagagaauuuaacaaucuggagcggcgcauugagaaccucaauaagaagauggaagauggguuccuggacgucuggacguacaacgccgagcugcucgugcugauggaaaaugagagaacccuugauuuccacgacucuaacguuaaaaaucuguaugauaaggugcggcuccaacugagagacaacgccaaagaacuuggaaauggcuguuuugaguucuaccaucgcugcgauaacgaguguauggaaagcguccggaaugggacauacgacuauccccacuacuccgaggaagcuagacugaagcgcgaggagaucucuggagugaaacucgaaagcauuggcaccuaucagauccuguccauuuacagcacagucgcgucuucccuggcccucgcuaucaugguggccgggcuguuucuuuggaugugcagcaacggcucucugcagugccggauuuguaucuga

SEQ ID NO: 195062 - RNA, 1704 nt, Artificial Sequence
  derived and/or modified CDS sequence (opt5) from hemagglutinin__InfluenzaA__ACT15330
auggagaagaucgugcugcuccuggccauugucagccuuguuaaauccgaccagaucugcauuggcuaccacgcuaacaauucuaccgaacaaguggauacaaucauggagaagaacgugacggucacccaugcccaggacauucuggaaaagacacacaaugggaaacucuguaaccuggauggagugaaaccccuuauccugagagacugcagcguugcgggcuggcuccuggggaauccuaugugugaugaguuccugaacgugccggaaugguccuauaucgucgagaagauuaaucccgcuaacgaccucugcuacccuggaaauuuuaacgauuaugaggaacugaagcaucuucugucucggaucaaucacuucgagaaaauucagaucauucccaagaacagcugguccgaccaugaagccucuggcgugagcuccgccuguccuuaccaggggcgcagcuccuuuuucagaaauguuguguggcucaccaaaaaggauaacgcuuaucccacaaucaaacggucuuacaauaacaccaaccaagaggaccugcuuguccuguggggcauucaccacccuaaugaugccgcugagcagacacgccucuaucagaacccgaccacguacaucagcgugggaaccucuacacugaaucagagacuggugcccaagaucgccacccgguccaaggucaacggccaaagcgggcgcauggaauuuuucuggacaauucucaaaucuaaugacgcgaucaacuuugaguccaauggaaacuucauugccccugaaaaugcuuacaagaucguuaaaaagggcgauagcaccauuaugaaauccgagcuggaauaugggaacugcaauacgaagugucagacacccaucggagccaucaacucuagcaugccuuuucauaauauucacccccuuaccaucggcgagugcccgaaauacgugaaguccaacagacuggugcucgcuacagggcugcggaauagcccucagggagagcgcagacggaagaaacgcggccuuuucggcgccauugcgggguuuaucgaaggaggcuggcaggggauggucgacggaugguauggcuaccaucacucuaacgagcaaggguccggauaugccgcugacaaggaaagcacccagaaagccauugauggcgugaccaacaagguuaauucuaucaucgacaaaaugaacacacaguucgaggcugugggcagagaauuuaauaaccuggagcggcgcauugagaaucucaacaagaagauggaagauggguuccuggacgucuggacguacaaugccgagcugcucgugcugauggaaaacgagagaacccuugauuuccacgacagcaauguuaaaaaccuguaugauaaggugcggcuccaacugagagacaaugccaaagaacuuggaaacggcuguuuugaguucuaccaucgcugcgauaaugaguguauggaauccguccggaacgggacauacgacuauccccacuacucugaggaagcuagacugaagcgcgaggagaucagcggagugaaacucgaauccauuggcaccuaucagauccugagcauuuacucuacagucgcguccagccuggcccucgcuaucaugguggccgggcuguuucuuuggaugugcucuaauggcucccugcagugccggauuuguaucuga

SEQ ID NO: 195063 - RNA, 1707 nt, Artificial Sequence
  derived and/or modified CDS sequence (opt5) from hemagglutinin__InfluenzaA__ACT15332
auggagaagaucgugcugcuccuggccauugucagccuuguuaaauccgaccagaucugcauuggcuaccacgcuaacaauucuaccgaacaaguggauacaaucauggagaagaacgugacggucacccaugcccaggacauucuggaaaagacacacaaugggaaacucugugaucuggacggagugaaaccccuuauccugagagauugcagcguugcgggcuggcuccuggggaacccuaugugugacgaguuccugaaugugccggaaugguccuauaucgucgagaagauuaaccccgcuaaugaucucugcuacccuggagacuuuaacgauuaugaggaacugaagcaucuucugucucggaucaaucacuucgagaaaauucagaucauucccaagagcuccuggucugaccaugaagccagcuccggcgugagcucugccuguccuuaccaggggcgcuccagcuuuuucagaaacguuguguggcucaucaaaaaggauaaugcuuaucccaccauuaaacggucuuacaacaauacaaaccaagaggaccugcuuguccuguggggaauccaccacccuaaugaugccgcugagcagacccgccucuaucauaacccgacaaccuacaucuccgugggcacgagcacccugaaccagagacuggugcccaagauugccacacggucuaagaucaauggccaguccgggcgcauggaauuuuucuggaccauucucaaaccuaacgacgcgaucaauuuugagagcaacggaaauuucauugcccccgaaaacgcuuacaagaucgucaaaaagggcgacuccacaaucaugaaaucugagcuggaauaugggaauugcaacaccaagugucaaacgccuauuggagccaucaauagcuccaugcccuuucacaacauucauccgcuuacaaucggcgagugcccuaaauacguuaagagcucuagacuggugcucgcuaccgggcugcggaauagcccccagggaaagucccgccggaaaaagagaggccuuuucggcgccauugcgggguuuaucgagggaggcuggcaggggaugguggauggaugguauggcuaccaccacucuaacgaacaggggagcggauaugccgcugacaaagaguccacacaacgcgccaucgauggcgucaccaauaaggugaacucuauuaucgacaaaaugaauacccaguucgaagcuguuggcagagaguuuaacaaccuggaacggcgcauugagaaucucaacaagaagauggaggauggguuccuggacguguggacauacaaugccgaacugcucguccugauggagaacgaaagaacgcuugauuuccaugacagcaaugugaaaaaccuguaugauaagguucggcuccagcugagagacaaugccaaagagcuuggaaacggcuguuuugaguucuaccaccgcugcgauaaugaauguauggaguccgugcggaacgggaccuacgacuauccucaauacagcgaagaggcuagacugaagcgcgaagagaucucuggagucaaacucgaguccauuggcaucuaucagauucugagcaucuacucuacaguggcguccagccuggcccucgcuaucauggucgccgggcuguuucuuuggaugugcuccaauggcucucugcagugccggauuuguaucuga

SEQ ID NO: 195064 - RNA, 1704 nt, Artificial Sequence
  derived and/or modified CDS sequence (opt5) from hemagglutinin__InfluenzaA__ACT15336
auggagaagaucgugcugcuccuggccauugucagccuuguuaaauccgaccagaucugcauuggcuaccacgcuaacaauucuaccgaacaaguggauacaaucauggagaagaacgugacggucacccaugcccaggacauucuggaaaagacacacaaugggaaacucuguaaccuggauggagugaaaccccuuauccugagagacugcagcguugcgggcuggcuccuggggaauccuaugugugaugaguuccugaacgugccggaaugguccuauaucgucgagaagauuaaucccgcuaacgaccucugcuacccuggaaauuuuaacgauuaugaggaacugaagcaucuucugucucggaucaaucacuucgagaaaauucagaucauucccaagaacagcugguccgaccaugaagccucuggcgugagcuccgccuguccuuaccaggggcgcagcuccuuuuucagaaauguuguguggcucaccaaaaaggauaacgcuuaucccacaaucaaacggucuuacaauaacaccaaccaagaggaccugcuuguccuguggggcauucaccacccuaaugaugccgcugagcagacacgccucuaucagaacccgaccacguacaucagcgugggaaccucuacacugaaucagagacuggugcccaagaucgccacccgguccaaggucaacggccaaagcgggcgcauggaauuuuucuggacaauucucaaaucuaaugacgcgaucaacuuugaguccaauggaaacuucauugccccugaaaaugcuuacaagaucguuaaaaagggcgauagcaccauuaugaaauccgagcuggaauaugggaacugcaauacgaagugucagacacccaucggagccaucaacucuagcaugccuuuucauaauauucacccccuuaccaucggcgagugcccgaaauacgugaaguccaacagacuggugcucgcuacagggcugcggaauagcccucagggagagcgcagacggaagaaacgcggccuuuucggcgccauugcgggguuuaucgaaggaggcuggcaggggauggucgacggaugguauggcuaccaucacucuaacgagcaaggguccggauaugccgcugacaaggaaagcacccagaaagccauugauggcgugaccaacaagguuaauucuaucaucgacaaaaugaacacacaguucgaggcugugggcagagaauuuaauaaccuggagcggcgcauugagaaucucaacaagaagauggaagauggguuccuggacgucuggacguacaaugccgagcugcucgugcugauggaaaacgagagaacccuugauuuccacgacagcaauguuaaaaaccuguaugauaaggugcggcuccaacugagagacaaugccaaagaacuuggaaacggcuguuuugaguucuaccaucgcugcgauaaugaguguauggaauccguccggaacgggacauacgacuauccccaguacucugaggaagcuagacugaagcgcgaggagaucagcggagugaaacucgaauccauuggcaccuaucagauccugagcauuuacucuacagucgcguccagccuggcccucgcuaucaugguggccgggcuguuucuuuggaugugcucuaauggcucccugcagugccggauuuguaucuga

SEQ ID NO: 195065 - RNA, 1704 nt, Artificial Sequence
  derived and/or modified CDS sequence (opt5) from hemagglutinin__InfluenzaA__ACT15338
auggagaagaucgugcugcuccuggccauugucagccuuguuaaauccgaccagaucugcauuggcuaccacgcuaacaauucuaccgaacaaguggauacaaucauggagaagaacgugacggucacccaugcccaggacauucuggaaaagacacacaaugggaaacucuguaaccuggauggagugaaaccccuuauccugagagacugcagcguugcgggcuggcuccuggggaauccuaugugugaugaguuccugaacgugccggaaugguccuauaucgucgagaagauuaaucccgcuaacgaccucugcuacccuggaaauuuuaacgauuaugaggaacugaagcaucuucugucucggaucaaucacuucgagaaaauucagaucauucccaagaacagcugguccgaccaugaagccucuggcgugagcuccgccuguccuuaccaggggcgcagcuccuuuuucagaaauguuguguggcucaccaaaaagaacaaugcuuaucccacaaucaaacggucuuacaacaacaccaaucaagaggaucugcuuguccuguggggcauucaccacccuaacgacgccacagagcagacccgccucuaucagaauccgacgaccuacaucagcgugggaacaucuacccugaaccagagacugauccccaagauugcuacacgguccaaggugaauggccaaagcgggcgcauggaauuuuucuggaccauccucaaaucuaacgaugccauuaauuuugaguccaacggaaauuucaucgcgccugaaaacgccuacaagauugucaaaaagggcgacagcacgaucaugaaauccgagcuggaauaugggaauugcaacacaaagugucagacccccaucggagcuauuaauucuagcaugccuuuucauaacauccacccccuuacaauuggcgagugcccgaaauacguuaaguccaauagacuggugcucgccaccgggcugcggaacagcccucaggagggacgcagacggaagaaacgcggccuuuucggcgcuaucgccggguuuauugaaggaggcuggcaggggaugguggauggaugguauggcuaccaucacucuaacgagcaaggguccggauaugcggccgacaaggaaagcacccagaaagcuaucgacggcgucacaaauaaggugaacucuaucauugauaaaaugaauacgcaguucgaggccguuggcagagaauuuaacaaucuggagcggcgcaucgagaaccucaauaagaagauggaagacggguuccuggauguguggaccuacaacgcugagcugcucguccugauggaaaaugagagaacacuugacuuccacgauagcaacgugaaaaaucuguaugacaagguucggcuccaacugagagauaacgccaaagaacuuggaaauggcuguuuugaguucuaccaucgcugcgacaacgaguguauggaauccgugcggaaugggaccuacgauuauccccaguacucugaggaagccagacugaagcgcgaggagauuagcggagucaaacucgaauccaucggcacauaucagauucugagcaucuacucuaccguggcuuccagccuggcgcucgccauuauggucgcugggcuguuucuuuggaugugcucuaacggcucccugcagugccggaucuguaucuga

SEQ ID NO: 195066 - RNA, 1704 nt, Artificial Sequence
  derived and/or modified CDS sequence (opt5) from hemagglutinin__InfluenzaA__ACT15340
auggagaagaucgugcugcuccuggccauugucagccuuguuaaauccgaccagaucugcauuggcuaccacgcuaacaauucuaccgaacaaguggauacaaucauggagaagaacgugacggucacccaugcccaggacauucuggaaaagacacacaaugggaaacucuguaaccuggauggagugaaaccccuuauccugagagacugcagcguugcgggcuggcuccuggggaauccuaugugugaugaguuccugaacgugccggaaugguccuauaucgucgagaagauuaaucccgcuaacgaccucugcuacccuggaaauuuuaacgauuaugaggaacugaagcaucuucugucucggaucaaucacuucgagaaaauucagaucauucccaagaacagcugguccgaccaugaagccucuggcgugagcuccgccuguccuuaccaggggcgcagcuccuuuuucagaaauguuguguggcucaccaaaaagaacaaugcuuaucccacaaucaaacggucuuacaacaacaccaaucaagaggaucugcuuguccuguggggcauucaccacccuaacgacgccgaggaacagacacgccucuaucagaauccgaccacguacaucagcgugggaaccucuacacugaaccagagacuggugcccaagaucgcuacccgguccaaggucaauggccaaagcgggcgcauggaguuuuucuggacaauucucaaaucuaacgaugccaucaauuuugaauccaacggaaauuucauugcgccugagaacgccuacaagaucguuaaaaagggcgacagcaccauuaugaaauccgaacuggaguaugggaauugcaacacgaagugucagacacccaucggagcuaucaauucuagcaugccuuuucauaacauucacccccuuaccaucggcgagugcccgaaauacgugaaguccaauagacuggugcucgccacagggcugcggaacagcccucagggagaacgcagacggaagaaacgcggccuuuucggcgcuauugccggguuuaucgagggaggcuggcaggggauggucgauggaugguauggcuaccaucacucuaacgaacaaggguccggauaugcggccgacaaggagagcacccagaaagcuauugacggcgugaccaauaagguuaacucuaucaucgauaaaaugaauacacaguucgaagccgugggcagagaguuuaacgcucuggagcggcgcauugaaaaucucaacaagaagauggaggacggguuccuggaugucuggacguacaaugccgaacugcucgugcugauggagaacgaaagaacccuugacuuccacgauagcaauguuaaaaaccuguaugacaaggugcggcuccaacugagagauaaugccaaagagcuuggaaacggcuguuuugaguucuaccaucgcugcgacaaugaauguauggaguccguccggaacgggacauacgauuauccccaguacucugaagaggcuagacugaagcgcgaggaaaucagcggagugaaacucgaguccauuggcaccuaucagauccugagcauuuacucuacagucgcguccagccuggcccucgcuaucaugguggccgggcuguuucuuuggaugugcucuaauggcucccugcagugccggauuuguaucuga

SEQ ID NO: 195067 - RNA, 1704 nt, Artificial Sequence
  derived and/or modified CDS sequence (opt5) from hemagglutinin__InfluenzaA__ACT15342
auggagaagaucgugcugcuccuggccauugucagccuuguuaaauccgaccagaucugcauuggcuaccacgcuaacaauucuaccgaacaaguggauacaaucauggagaagaacgugacggucacccaugcccaggacauucuggaaaagacacacaaugggaagcucuguaaccuggauggagugaaaccccuuauccugagagacugcagcguugcgggcuggcuccuggggaauccuaugugugaugaguuccugaacgugccggaaugguccuauaucgucgagaagauuaaucccgcuaacgaccucugcuacccuggaucuuuuaaugauuaugaggaacugaagcaucuucugagccggaucaaccacuucgagaaaauucagaucauucccaaaaauuccuggucugaccaugaagccagcggcguguccagcgccuguccuuaccaggggagaucuuccuuuuuccgcaacguuguguggcucaccaaaaaggauaaugcuuaucccacaaucaaacggagcuacaacaauaccaaccaagaggaccugcuuguccuguggggcauucaccacccuaacgaugccgcugagcagacacgccucuaucagaauccgaccacguacaucucugugggaaccuccacacugaaccagagacuggugcccaagaucgccacccggagcaaggucaauggccaaucugggcgcauggaauuuuucuggacaauucucaaaccuaacgacgcgaucaauuuugaguccaacggaaauuucauugcccccgaaaacgcuuacaagaucguuaaaaagggcgauagcaccauuaugaaauccgagcuggaauaugggaauugcaacacgaagugucagacaccuaucggagccaucaauucuagcaugcccuuucauaacauucacccgcuuaccaucggcgagugcccuaaauacgugaaguccaauagacugauucucgcuacagggcugcggaacagcccccagggagagcgcagacggaagaaacgcggccuuuucggcgccaucgcgggguuuauugaaggaggcuggcaggggaugguggacggaugguauggcuaccaucacucuaaugagcaaggguccggauaugccgcugacaaggaaagcacccagaaagccaucgauggcgucaccaacaaggugaacucuaucauugacaaaaugaauacacaguucgaggcuguuggcagagaauuuaacaaucuggagcggcgcaucgagaaccucaauaagaagauggaagauggguuccuggacguguggacguacaacgccgagcugcucguccugauggaaaaugagagaacccuugauuuccacgacagcaacgugaaaaaucuguaugauaagguucggcuccaacugagagacaacgccaaagaacuuggaaauggcuguuuugaguucuaccaucgcugcgauaacgaguguauggaauccgugcggaaugggacauacgacuauccucaguacucugaggaagcuagacugaagcgcgaggagauuagcggagucaaacucgaauccaucggcaccuaucagauucugagcaucuacucuacaguggcguccagccuggcccucgcuauuauggucgccgggcuguuucuuuggaugugcucuaacggcucccugcagugccggaucuguaucuga

SEQ ID NO: 195068 - RNA, 1704 nt, Artificial Sequence; identical to SEQ ID NO: 195064
  derived and/or modified CDS sequence (opt5) from hemagglutinin__InfluenzaA__ACT15343

SEQ ID NO: 195069 - RNA, 1704 nt, Artificial Sequence
  derived and/or modified CDS sequence (opt5) from hemagglutinin__InfluenzaA__ACT15345
auggagaagaucgugcugcuccuggccauugucagccuuguuaaauccgaccagaucugcauuggcuaccacgcuaacaauucuaccgaacaaguggauacaaucauggagaagaacgugacggucacccaugcccaggacauucuggaaaagacacacaaugggaagcucuguaaccuggauggagugaaaccccuuauccugagagacugcagcguugcgggcuggcuccuggggaauccuaugugugaugaguuccugaacgugccggaaugguccuauaucgucgagaagauuaaucccgcuaacgaccucugcuacccuggaaauuuuaacgauuaugaggaacugaagcaucuucugucucggaucaaucacuucgagaaaauucagaucauucccaagaacagcugguccgaccaugaagccucuggcgugagcuccagcuguccuuaccaggggcggucuuccuuuuucagaaauguuguguggcucaccaaaaaggauaacgccuaucccacaaucaaacggagcuacaauaacaccaaccaagaggaccugcuuguccuguggggcauucaccacccuaaugaugcugccgagcagacacgccucuaucagaacccgaccacguacaucucugugggaaccuccacacugaaucagagacuggugcccaagaucgcuacccggagcaaggucaacggccaaucugggcgcauggaauuuuucuggacaauucucaaauccaaugacgccaucaacuuuggaagcaauggcaacuucauugcgccugagaaugccuacaagaucguuaaaaagggggauuccaccauuaugaaaucugaacuggaguauggaaacugcaauacgaagugucagacacccaucggcgcuaucaacagcuccaugccuuuucauaauauucacccccuuaccaucggggaaugcccgaaauacgugaaaagcaacagacuggugcucgccacaggacugcgcaauucuccucagggcgagcgcagacggaagaaacgcggccuuuucggggcuauugccggauuuaucgagggcggguggcagggaauggucgacggcugguauggguaccaucacuccaacgaacaaggaagcggcuaugcggccgacaaggagucuacccagaaagcuauugauggcgugaccaacaagguuaauagcaucaucgacaaaaugaacacacaguucgaagccguggggagagaguuuaauaaccuggaacggcgcauugagaaucucaacaagaagauggaggauggauuccuggacgucuggacguacaaugcugaacugcucgugcugauggagaacgaaagaacccuugauuuccacgacuccaauguuaaaaaccuguaugauaaggugcggcuccaacugagagacaaugccaaagagcuuggcaacggguguuuugaguucuaccaucgcugcgauaaugaauguauggagucuguccggaacggaacauacgacuauccccaguacagcgaagaggccagacugaagcgcgaagagaucuccggcgugaaacucgagagcauugggaccuaucagauccugucuauuuacuccacagucgcuagcucucuggcgcucgccaucaugguggcuggccuguuucuuuggaugugcuccaauggaagccugcagugccggauuuguaucuga

SEQ ID NO: 195070 - RNA, 1707 nt, Artificial Sequence
  derived and/or modified CDS sequence (opt5) from hemagglutinin__InfluenzaA__ACT15347
auggagaagaucgugcugcuccuggccauugucagccuuguuaaauccgaccagaucugcauuggcuaccacgcuaacaauucuaccgaacaaguggauacaaucauggagaagaacgugacggucacccaugcccaggacauucuggaaaagacacacaaugggaagcucugugaucuggacggagugaaaccccuuauccugagagauugcagcguugcgggcuggcuccuggggaacccuaugugugacgaguuccugaaugugccggaaugguccuauaucgucgagaagauuaaccccgcuaaugaucucugcuacccuggagacuuuaacgauuaugaggaacugaagcaucuucugucucggaucaaucacuucgagaaaauucagaucauucccaagagcuccuggucugaccaugaagccagcuccggcgugagcucugccuguccuuaccaggggcgcuccagcuuuuucagaaacguuguguggcucaucaaaaaggauaaugcuuaucccaccauuaaacggucuuacaacaauacaaaccaagaggaccugcuuguccuguggggaauccaccacccuaaugaugccgcugagcagacccgccucuaucauaacccgacaaccuacaucuccgugggcacgagcacccugaaccagagacuggugcccaagauugccacacggucuaaggucaauggccaguccgggcgcauggaauuuuucuggaccauccucaaaccuaacgacgcgauuaauuuugagagcaacggaaauuucaucgcccccgaaaacgcuuacaagauuguuaaaaagggcgacuccacaaucaugaaaucugagcuggaauaugggaauugcaacaccaagugucaaacgccuaucggagccauuaauagcuccaugcccuuucacaacauccauccgcuuacaauuggcgagugcccuaaauacgugaaaagcucuagacuggugcucgcuaccgggcugcggaauagcccccagggaaagaaccgccggaaaaagagaggccuuuucggcgccaucgcgggguuuauugagggaggcuggcaggggauggucgauggaugguauggcuaccaccacuccaaugaacaggggucuggauaugccgcugacaaagagagcacacaacgcgccaucgauggcgugaccaacaagguuaauuccaucauugacaaaaugaacacccaguucgaagcugugggcagagaguuuaacaaucuggaacggcgcaucgagaaccucaauaagaagauggaggauggguuccuggacgucuggacauacaacgccgaacugcucgugcugauggagaaugaaagaacgcuugauuuccaugacucuaacguuaaaaaucuguaugauaaggugcggcuccagcugagagacaacgccaaagagcuuggaaauggcuguuuugaguucuaccaccgcugcgauaacgaauguauggagagcguccggaaugggaccuacgacuauccucaauacuccgaagaggcuagacugaagcgcgaagagauuagcggagugaaacucgagucuaucggcauuuaucagauccuguccauuuacagcacagucgcgucuucccuggcccucgcuaucaugguggccgggcuguuucuuuggaugugcagcaacggcucccugcagugccggaucuguauuuga

SEQ ID NO: 195071 - RNA, 1704 nt, Artificial Sequence
  derived and/or modified CDS sequence (opt5) from hemagglutinin__InfluenzaA__ACT15349
auggagaagaucgugcugcuccuggccauugucagccuuguuaaauccgaccagaucugcauuggcuaccacgcuaacaauucuaccgaacaaguggauacaaucauggagaagaacgugacggucacccaugcccaggacauucuggagaaaacacacaaugggaagcucuguaaccuggauggagugaaaccccuuauccugagagacugcagcguugcgggcuggcuccuggggaauccuaugugugaugaguuccugaacgugccggaaugguccuauaucgucgagaagauuaaucccgcuaacgaccucugcuacccuggaaauuuuaacgauuaugaggaacugaagcaucuucugucucggaucaaucacuucgagaaaauucagaucauucccaagaacagcugguccgaccaugaagccucuggcgugagcuccgccuguccuuaccaggggcgcagcuccuuuuucagaaauguuguguggcucaccaaaaaggauaacgcuuaucccacaaucaaacggucuuacaauaacaccaaccaagaggaccugcuuguccuguggggcauucaccacccuaaugaugccacagagcagacccgccucuaucagaacccgacgaccuacaucagcgugggaacaucuacccugaaucagagacugauccccaagauugcuacacgguccaaggugaacggccaaagcgggcgcauggaauuuuucuggaccauccucaaaucuaaugacgccauuaacuuugaguccaauggaaacuucaucgcgccugaaaaugccuacaagauugucaaaaagggcgauagcacgaucaugaaauccgagcuggaauaugggaacugcaauacaaagugucagacccccaucggagcuauuaacucuagcaugccuuuucauaauauccacccccuuacaauuggcgagugcccgaaauacguuaaguccaacagacuggugcucgccaccgggcugcggaauagcccucaggaggaacgcagacggaagaaacgcggacuuuucggcgcuaucgccggcuuuauugaagggggauggcagggcaugguggacgggugguauggauaccaucacucuaacgaacaaggcuccggguaugcggccgacaaggagagcacccagaaagcuaucgauggagucacaaacaagguuaauucuaucauugacaaaaugaacacgcaguucgaagccgugggcagagaguuuaauaaccuggagcggcgcaucgaaaaucucaacaagaagauggaggauggcuuccuggacguguggaccuacaaugcugaacugcucguccugauggagaacgaaagaacacuugauuuccacgacagcaaugugaaaaaccuguaugauaagguucggcuccaacugagagacaaugccaaagagcuugggaacggauguuuugaguucuaccaucgcugcgauaaugaauguauggaguccgugcggaacggcaccuacgacuauccccaguacucugaagaggccagacugaagcgcgaggaaauuagcggggucaaacucgaguccaucggaacauaucagauucugagcaucuacucuaccguggcuuccagccuggcgcucgccauuauggucgcuggccuguuucuuuggaugugcucuaaugggucccugcagugccggaucuguaucuga

SEQ ID NO: 195072 - RNA, 1707 nt, Artificial Sequence
  derived and/or modified CDS sequence (opt5) from hemagglutinin__InfluenzaA__ACT15351
auggagaagaucgugcugcuccuggccauugucagccuuguuaaauccgaccagaucugcauuggcuaccacgcuaacaauucuaccgaacaaguggauacaaucauggagaagaacgugacggucacccaugcccaggacauucuggaaaagacacacaaugggaagcucugugaucuggacggagugaaaccccuuauccugagagauugcagcguugcgggcuggcuccuggggaacccuaugugugacgaguuccugaaugugccggaaugguccuauaucgucgagaagauuaaccccgcuaaugaucucugcuacccuggagacuuuaacgauuaugaggaacugaagcaucuucugucucggaucaaucacuucgagaaaauucagaucauucccaagagcuccuggucugaccaugaagccagcuccggcgugagcucugccuguccuuaccaagggggauccagcuuuuuccgcaacguuguguggcucaucaaaaaggauaaugcuuaucccaccauuaaaagaucuuacaacaauacaaaccaggaggaccugcuuguccuguggggcauccaccacccuaaugaugccgcugagcagacccggcucuaucauaacccgacaaccuacaucuccgugggcacgagcacccugaaccagcgccuggugcccaagauugccacaagaucuaaggucaaugggcaguccggacggauggaauuuuucuggaccauccucaaaccuaacgacgcgauuaauuuugagagcaacggcaauuucaucgcccccgaaaacgcuuacaagauuguuaaaaagggggacuccacaaucaugaaaucugagcuggaauauggaaauugcaacaccaagugucaaacgccuaucggcgccauuaauagcuccaugcccuuucacaacauccauccgcuuacaauuggggagugcccuaaauacgugaaaagcucucgccuggugcucgcuaccggacugagaaauagcccccagggcaagucccggcgcaaaaagagaggccuuuucggggccaucgcgggauuuauugagggcggguggcagggaauggucgauggcugguauggguaccaccacucuaacgaacagggaagcggcuaugccgcugacaaagaguccacacaacgggccaucgauggcgugaccaauaagguuaacucuaucauugacaaaaugaauacccaguucgaagcuguggggcgcgaguuuaacaagcuggaaagacggaucgagaaccucaauaagaaaauggaggauggauuccuggacgucuggacauacaacgccgaacugcucgugcugauggagaaugaacgcacgcuugauuuccaugacagcaacguuaagaaucuguaugauaaagugagacuccagcugcgggacaacgccaaggagcuuggcaauggguguuuugaguucuaccacagaugcgauaacgaauguauggaguccguccgcaauggaaccuacgacuauccucaauacagcgaagaggcucggcugaaaagagaagagauuucuggcgugaagcucgaguccaucgggauuuaucagauccugagcauuuacucuacagucgcguccagccuggcccucgcuaucaugguggccggccuguuucuuuggaugugcuccaacggaucucugcagugccgcaucuguauuuga

SEQ ID NO: 195073 - RNA, 1704 nt, Artificial Sequence
  derived and/or modified CDS sequence (opt5) from hemagglutinin__InfluenzaA__ACT15353
auggagaagaucgugcugcuccuggccauugucagccuuguuaaauccgaccagaucugcauuggcuaccacgcuaacaauucuaccgaacaaguggauacaaucauggagaagaacgugacggucacccaugcccaggacauucuggaaaagacacacaaugggaaacucuguaaccuggauggagugaaaccccuuauccugagagacugcagcguugcgggcuggcuccuggggaauccuaugugugaugaguuccugaacgugccggaaugguccuauaucgucgagaagauuaaucccgcuaacgaccucugcuacccuggaaauuuuaacgauuaugaggaacugaagcaucuucugucucggaucaaucacuucgagaaaauucagaucauucccaagaacagcugguccgaccaugaagccucuggcgugagcuccgccuguccuuaccaggggcgcagcuccuuuuucagaaauguuguguggcucaccaaaaagaacucugcuuaucccacaaucaaacggagcuacaauaacaccaaccaagaggaucugcuuguccuguggggcauucaccacccuaaugacgccgcugagcagacacgccucuaucagaacccgaccacguacaucucugugggaaccuccacacugaaucagagacuggugcccaagaucgccacccggagcaaggucaacggccaaucugggcgcauggaauuuuucuggacaauucucaaauccaaugaugcgaucaacuuugagagcaauggaaacuucauugccccugaaaaugcuuacaagaucguuaaaaagggcgacuccaccauuaugaaaucugagcuggaauauagcaacugcaauacgaagugucagacacccaucggggccaucaacuccagcaugccuuuucauaauauucacccccuuaccaucggagagugcccgaaauacgugaagucuaacagacuggugcucgcuacaggccugcgcaauuccccucagggggagcggagacggaagaaacgcggacuuuucggcgccauugcgggcuuuaucgaagggggauggcagggcauggucgaugggugguauggauaccaucacagcaacgagcaaggcucuggguaugccgcugacaaggaaagcacccagaaagccauugacggagugaccaacaagguuaauuccaucaucgauaaaaugaacacacaguucgaggcugugggcagagaauuuaauaaccuggagcggcgcauugagaaucucaacaagaagauggaagacggcuuccuggaugucuggacguacaaugccgagcugcucgugcugauggaaaacgagagaacccuugacuuccacgauucuaauguuaaaaaccuguaugacaaggugcggcuccaacugagagauaaugccaaagaacuugggaacggauguuuugaguucuaccaucgcugcgacaaugaguguauggaaagcguccggaacggcacauacgauuauccccaguacuccgaggaagcuagacugaagcgcgaggagaucagcggggugaaacucgaaucuauuggaaccuaucagauccuguccauuuacagcacagucgcgucuucccuggcccucgcuaucaugguggccggccuguuucuuuggaugugcagcaaugggucccugcagugccggauuuguaucuga

SEQ ID NO: 195074 - RNA, 1707 nt, Artificial Sequence
  derived and/or modified CDS sequence (opt5) from hemagglutinin__InfluenzaA__ACT15355
auggagaagaucgugcugcuccuggccauugucagccuuguuaaauccgaccagaucugcauuggcuaccacgcuaacaauucuaccgaacaaguggauacaaucauggagaagaacgugacggucacccaugcccaggacauucuggaaaagacacacaaugggaagcucugugaucuggacggagugaaaccccuuauccugagagauugcagcguugcgggcuggcuccuggggaacccuaugugugacgaguuccugaaugugccggaaugguccuauaucgucgagaagauuaaccccgcuaaugaucucugcuacccuggagacuuuaacgauuaugaggaacugaagcaucuucugucucggaucaaucacuucgagaaaauucagaucauucccaagagcuccuggucugaccaugaagccagcuccggcgugagcucugccuguccuuaccaggggcgcuccagcuuuuucagaaacguuguguggcucaucaaaaaggauaaugcuuaucccaccauuaaacggucuuacaacaauacaaaccaagaggaccugcuuguccuguggggaauccaccacccuaaugaugccgcugagcagacccgccucuaucauaacccgacaaccuacaucuccgugggcacgagcacccugaaccagagacuggugcccaagauugccacacggucuaaggucaauggccaguccgggcgcauggaauuuuucuggaccauccucaaaccuaacgacgcgauuaauuuugagagcaacggaaauuucaucgcccccgaaaacgcuuacaagauuguuaaaaagggcgacuccacaaucaugaaaucugagcuggaauaugggaauugcaacaccaagugucaaacgccuaucggagccauuaauagcuccaugcccuuucacaacauccauccgcuuacaauuggcgagugcccuaaauacgugaaaagcucuagacuggugcucgcuaccgggcugcggaauagcccccagggaaagucccgccggaaaaagagaggccuuuucggcgccaucgcgggguuuauugagggaggcuggcaggggauggucgauggaugguauggcuaccaccacucuaacgaacaggggagcggauaugccgcugacaaagaguccacacaacgcgccaucgauggcgugaccaauaagguuaacucuaucauugacaaaaugaauacccaguucgaagcugugggcagagaguuuaacaaccuggaacggcgcaucgagaaucucaacaagaagauggaggauggguuccuggacgucuggacauacaaugccgaacugcucgugcugauggagaacgaaagaacgcuugauuuccaugacagcaauguuaaaaaccuguaugauaaggugcggcuccagcugagagacaaugccaaagagcuuggaaacggcuguuuugaguucuaccaccgcugcgauaaugaauguauggaguccguccggaacgggaccuacgacuauccucaauacagcgaagaggcuagacugaagcgcgaagagauuucuggagugaaacucgaguccaucggcauuuaucagauccugagcauuuacucuacagucgcguccagccuggcccucgcuaucaugguggccgggcuguuucuuuggaugugcuccaauggcucucugcagugccggaucuguauuuga

SEQ ID NO: 195075 - RNA, 1704 nt, Artificial Sequence
  derived and/or modified CDS sequence (opt5) from hemagglutinin__InfluenzaA__ACT15357
auggagaagaucgugcugcuccuggccauugucagccuuguuaaauccgaccagaucugcauuggcuaccacgcuaacaauucuaccgaacaaguggauacaaucauggagagaaacgugacggucacccaugcccaggacauucuggaaaagacacacaaugggaaacucuguaaccuggauggagugaagccccuuauccugcgggacugcagcguugcgggcuggcuccuggggaauccuaugugugaugaguuccugaacgugccggaaugguccuauaucgucgagaaaauuaaucccgcuaacgaccucugcuacccuggaaauuuuaacgauuaugaggaacugaagcaucuucugucucgcaucaaucacuucgagaagauucagaucauucccaaaaacagcugguccgaccaugaagccucuggcgugagcuccgccuguccuuaccaggggagaagcuccuuuuuccggaauguuguguggcucacccaaaaggauaacgcuuaucccacaaucaaacgcucuuacaauaacaccaaccaggaggaccugcuuguccuguggggcauucaccacccuaaugaugccgcugagcagacaagacucuaucagaacccgaccacguacaucagcgugggaaccucuacacugaaucaacggcugauccccaagauugccacccgcuccaaagugaacggccagagcgggagaauggaauuuuucuggacaauccucaagucuaaugacgcgauuaacuuugaguccaauggaaacuucaucgccccugaaaaugcuuacaagauugucaaaaagggcgauagcaccaucaugaaauccgagcuggaauaugggaacugcaauacgaagugucagacacccaucggagccauuaacucuagcaugccuuuucauaauauccacccccuuaccauuggcgagugcccgaaauacguuaaguccaaccggcuggugcucgcuacagggcugcgcaauagcccucagggagagagacggcgcaaaaagagaggccuuuucggcgccaucgcgggguuuauugaaggaggcuggcaagggaugguggacggaugguauggcuaccaucacucuaacgagcagggguccggauaugccgcugacaaggaaagcacccagaaagccaucgauggcgucaccaacaagguuaauucuaucauugacaaaaugaacacacaauucgaggcugugggccgggaauuuaauaaccuggagcgcagaaucgagaaucucaacaagaaaauggaagauggguuccuggacguguggacguacaaugccgagcugcucguccugauggaaaacgagcggacccuugauuuccacgacagcaaugugaagaaccuguaugauaagguuagacuccagcugcgcgacaaugccaaagaacuuggaaacggcuguuuugaguucuaccaucggugcgauaaugaguguauggaauccgugagaaacgggacauacgacuauccccaguacucugaggaagcucgccugaagcgggaggagauuagcggagucaaacucgaauccaucggcaccuaucagauucugagcaucuacucuacaguggcguccagccuggcccucgcuauuauggucgccgggcuguuucuuuggaugugcucuaauggcucccugcaaugcagaaucuguaucuga

SEQ ID NO: 195076 - RNA, 1701 nt, Artificial Sequence
  derived and/or modified CDS sequence (opt5) from hemagglutinin__InfluenzaA__ACT20200
augaaggccauccuggugguccuccuguacaccuucgcuacagccaacgcggacacgcuuugcauuggcuaucacgcuaauaacagcaccgauacaguugacaccgugcuggagaagaaugugacagucacccauuccgugaaccuccuggaagauaagcacaaugggaaacuuuguaagcugagaggaguugcuccccuccaucugggcaaaugcaacaucgccggguggauucugggaaauccugagugugaaucucucagcacagccuccucuuggagcuacaucguggagaccuccucuagcgacaacggcacgugcuauccgggggauuuuauugacuacgaagaacugcgggagcagcuuuccagcgucucuuccuucgaacgcuuugagaucuuccccaagaccagcucuuggccuaaucacgauuccaacaagggagugacagccgcuuguccccaugccggcgcgaaaucuuuuuauaagaaucugaucuggcucguuaaaaagggcaacagcuacccuaaacuguccaagagcuauauuaaugacaaggggaaagaagugcuuguccuguggggaauccaccaccccuccaccucugccgaucaacagagccucuaccagaacgcugacgccuacguguucgugggcuccagcagauauucuaagaaauuuaagccugagauugcuauccggccgaaaguccgcgaucaggaggggagaaugaauuacuauuggacacugguugaacccggagacaagauuaccuucgaggccacgggcaaccugguggugccucgguacgcguuugccauggaacgcaacgcuggguccggaaucauuaucagcgauacacccguccaugacugcaauaccacaugucaaaccccuaaaggcgccaucaacaccucucuccccuuccagaauauucacccgaucacaauuggcaagugcccuaaguaugugaaaagcacgaagcugagacuugcuaccgggcugcggaacguucccuccauccagucucgcggacucuuuggcgccauugccggguucaucgagggaggcuggacagggaugguggacggaugguacggcuaucaucaccagaaugaacaaggcagcggguacgcugcggaucugaaauccacccagaacgccaucgacgagauuacaaauaaggucaacagcgugaucgagaaaaugaauacccaguuuacggcuguuggaaaggaguucaaccaccuugagaagagaauugaaaaucugaacaaaaagguggaugacggcuuccucgauaucuggacauacaaugccgagcugcugguccuccuggaaaacgagcggacccuugacuaucaugauucuaaugugaaaaaccuguacgagaagguccgcaaccagcucaaaaauaacgccaaggaaauugggaauggauguuuugaguucuaucacaagugcgacaacaccuguauggaauccgugaaaaauggcacauacgauuauccuaaguacagcgaggaagcuaaacugaacagagaggagaucgacgggguuaaacuugaaucuacccggaucuaucaaauucuggccaucuacuccacaguggcgagcucccucguccuggugguuucucugggcgcuauuagcuuuuggaugugcuccaauggaucucuccagugccgcaucuguauuuga

SEQ ID NO: 195077 - RNA, 1701 nt, Artificial Sequence
  derived and/or modified CDS sequence (opt5) from hemagglutinin__InfluenzaA__ACT21466
augaagaccaucauugcccugagcuacauccucugccugguguucgcucagaaacuucccggcaacgacaauuccacagccacgccuugucuggggcaccaugcggucccgaacggaacccucguuaagacaauuaccaaugaucaaaucgaggugacaaacgcuaccgaacuggugcagucuagcuccacaggcaaaauuugcgacucuccccacagaauccuugaugggaagaauuguacccugaucgacgcccuccugggagauccucauugcgacggcuuuaaaaacaaggagugggaucuguucgucgaacggagcacggccuauuccaauuguuaccccuaugacgugccugauuacgcuucucuccgcagccugguugccuccagcgggacccuugaguuuacaaacgaaggauucaauuggaccggcguggcucaggacggcacaucuuaugccugcaagagaggguccgucaagagcuuuuucucucggcugaacuggcuccacaaacuggaguacaaauaucccgcgcuuaaugugaccaugccuaacaaugauaaguuugacaaacuguacauuuggggaguucaucacccguccacggauagcgaccagacaucucucuacgugcaagccuccggccgcgucaccgugagcacaaagagaucccagcagaccgugauccccaacauugggucucggccuuggguccgcggaaucagcuccagaauuagcaucuauuggaccauuguuaagcccggcgacauccugcugaucaauucuacagggaaccucauugcuccucggggauacuucaaaauccgcuccggcaagagcucuauuaugagaagcgaugcccccaucgacaacuguaauuccgagugcauuacgccgaacggcucuaucccuaaugauaaacccuuucagaacgugaaucggaucaccuauggggcuuguccucgcuacgugaagcaaaacacacugaaacuugccaccggaaugagaaauguccccgaaaagcagacacggggcauuuucggggcgaucgccggauuuauugagaacggcugggaagggaugguggacggaugguauggcuuccgccaccagaauagcgagggcaccgggcaggcugccgaucugaaauccacgcaagcugccaucaaccagauuaauggaaagcucaacagacugaucgagaagacaaaugaaaaauuucaucagaucgagaaggaguucagcgaaguugaaggccggauucaagaccuugagaaauacguggaggauaccaagaucgaccuguggucuuauaacgccgaacuccuggucgcucuggagaaucagcacaccauugaucucacagacuccgaaaugaacaaacuguucgagaagaccagaaagcagcuucgcgaaaacgcggaggauauggggaauggaugcuuuaaaaucuaccauaagugugacaacgccugcauuggcagcauccggaaugggacauacgaccacgauguguauagagacgaggcucugaacaaucgcuuccagauuaaaggcguugaacucaagucuggauacaaagauuggauccuguggaucuccuuugccauuagcugcuuccuucugugugugguccuccugggcuuuaucaugugggccugccaaaaggggaacauucgguguaauaucugcauuuga

SEQ ID NO: 195078 - RNA, 1701 nt, Artificial Sequence
  derived and/or modified CDS sequence (opt5) from hemagglutinin__InfluenzaA__ACT21467
augaagaccaucauugcccugagcuacauccucugccugguguucgcucagaaacuucccggcuccgacaacucuacagccacgcugugucucgggcaccaugcggucccuaauggaacccugguuaagacaauuaccaacgaucaaaucgaggugacaaaugcuaccgaacuugugcagagcuccucuacaggcaaaauuugcgacagcccgcacagaauccuggaugggaagaacuguacccucaucgacgcccugcugggagauccccauugcgacggcuuuaaaaauaaggagugggaucucuucgucgaacgguccacggccuauucuaacuguuacccuuaugacgugcccgauuacgcuagccugcgcucccuuguugccagcucugggacccuggaguuuacaaaugaaggauucaacuggaccggcguggcucaggacggcacauccuaugccugcaagagagggagcgucaaaucuuucuucucccggcucaauuggcugcacaaacuugaguacaaguauccugcgcugaacgugaccaugcccaauaacgauaaguuugacaaacucuacauuuggggaguucaucacccuagcacggauucugaccagacaucccuguacgugcaagccagcggccgcgucaccguguccacaaagagaucucagcagaccgugaucccgaauauugggagccggcccuggguccgcggaaucuccagcagaauuucuguuuauuggaccaucgugaagccucgggacauucugcucaucaacuccacaggcaaucugaucgcuccccgcggguacuucaaaauuagaagcggaaagucuagcaucaugcgguccgaugccccuauugacaacuguaacucugagugcaucacgcccaauggcagcauuccgaacgauaaaccuuuucagaaugugaaccgcaucaccuauggcgcuugucccagauacgucaagcaaaauacacuuaaacuggccaccgggaugcggaacgugccugaaaagcagacacgcggaaucuucggcgcgauugccggguuuaucgagaauggaugggaaggcaugguugacgggugguauggauucagacaccagaacuccgagggcaccggccaggcugccgaucucaaaagcacgcaagcugccauuaaucggaucaacgggaagcugaauagacuuauugagaagacaaacgaaaaauuucaucagaucgagaaggaauuuucugagguggaaggacgcauccaggaccuggagaaauacgucgaggauaccaagauugaccucugguccuauaaugccgaacugcugguggcucucgagaaccaacacaccaucgaucugacagacagcgaaaugaauaaacuuuucgagaagacccggaagcagcugagagaaaacgcggaggauaugggcaacgggugcuuuaaaauuuaccauaagugugacaaugccugcaucggaucuauucgcaacggcacauacgaccacgauguuuaucgggacgaggcucucaauaacagauuccagaucaaagggguggaacugaaguccggcuacaaagauuggauucuuuggaucagcuuugccaucuccugcuuccugcucugugucgugcugcugggauuuauuaugugggccugccagaagggcaauauccgcuguaacauuugcaucuga

SEQ ID NO: 195079 - RNA, 1701 nt, Artificial Sequence
  derived and/or modified CDS sequence (opt5) from hemagglutinin__InfluenzaA__ACT21468
augaagaccaucauugcccugagcuacauccucugccugguguucgcucagaaacuucccggcaacgacaauuccacagccacgcugugucucgggcaccaugcggucccuaacggaacccugguuaagacaauuaccaaugaucaaaucgaggugacaaacgcuaccgaacuugugcagucuagcuccacaggcaaaauuugcgacucuccgcacagaauccuggaugggaagaauuguacccucaucgacgcccugcugggagauccccauugcgacggcuuuaaaaacaaggagugggaucucuucgucgaacggagcacggccuauuccaauuguuacccuuaugacgugcccgauuacgcuucucugcgcagccuuguugccuccagcgggacccuggaguuuacaaacgaaggauucaauuggaccggcguggcucaggacggcacaucuuaugccugcaagagaggguccgucaagagcuuuuucucucggcucaacuggcugcacaaacuugaguacaaauauccugcgcugaaugugaccaugcccaacaaugauaaguuugacaaacucuacauuuggggaguucaucacccuuccacggauagcgaccagacaucucuguacgugcaagccuccggccgcgucaccgugagcacaaagagaucccagcagaccgugaucccgaacauugggucucggcccuggguccgcggaaucagcuccagaauuagcaucuauuggaccauuguuaagccuggcgacauccugcucaucaauucuacagggaaccugauugcuccccggggauacuucaaaauccgcuccggcaagagcucuauuaugagaagcgaugccccuaucgacaacuguaauuccgagugcauuacgcccaacggcucuaucccgaaugauaaaccuuuucagaacgugaaucggaucaccuauggggcuuguccccgcuacgugaagcaaaacacacuuaaacuggccaccggaaugagaaaugucccugaaaagcagacacggggcauuuucggggcgaucgccggauuuauugagaacggcugggaagggaugguggacggaugguauggcuuccgccaccagaauagcgagggcaccgggcaggcugccgaucucaaauccacgcaagcugccaucaaccagauuaauggaaagcugaacagacuuaucgagaagacaaaugaaaaauuucaucagaucgagaaggaguucagcgaaguugaaggccggauucaagaccuggagaaauacguggaggauaccaagaucgaccucuggucuuauaacgccgaacugcuggucgcucucgagaaucagcacaccauugaucugacagacuccgaaaugaacaaacuuuucgagaagaccagaaagcagcugcgcgaaaacguggaggauauggggaauggaugcuuuaaaaucuaccauaagugugacaacgcgugcauuggcagcauccggaaugggacauacgaccacgauguuuauagagacgaggcccucaacaaucgcuuccagauuaaaggcguggaacugaagucuggauacaaagauuggauccuuuggaucuccuuugcuauuagcugcuuccugcucugugucgugcugcugggcuuuaucaugugggccugccaaaaggggaacauucgguguaauaucugcauuuga

SEQ ID NO: 195080 - RNA, 1701 nt, Artificial Sequence
  derived and/or modified CDS sequence (opt5) from hemagglutinin__InfluenzaA__ACT21469
augaagaccaucauugcccugagcuacaucuccagacucguguucgcucagaaacugcccggcaacgacaauucuacagccacgcuuugccuggggcaccaugcggucccuaacggaacccucguuaagacaauuaccaaugaucaaaucgaggugacaaacgcuaccgaacuggugcagagcuccucuacaggccggauuugugacagcccgcaccgcauccuugauggggagaauugcacccugaucgacgcccuccugggagauccccauugugacggcuuucagaacaaagaaugggaucuguucgucgagagauccaaggccuauucuaauugcuacccuuaugacgugcccgauuacgcuagccuccggucccugguugccagcucugggacgcuugaauuuaacaaugaguccuucaacuggaccggaguggcucaggacggcacaagcuaugccuguaaacgcagaucuauuaaguccuuuuucagccggcugaauuggcuccaccaacugaaguacaaauauccugcgcuuaacgucaccaugcccaauaacgauaaguuugacaaacuguacaucuggggcgugcaucacccuucuacagauuccgaccagaccagccucuacgcccaggcuuccgggcgcguuacggugucuacaaagagaagccagcaaaccgucauuccgaauaucggaucccggcccugggugcgcggcgugagcucuagaauuuccaucuauuggacaauugucaaaccuggggacauccugcugaucaacagcaccggaaaccucauugcuccccggggcuacuucaagauccgcucuggaaagagcuccauuaugagaucugaugccccuaucgggaaaugcaauagcgaguguauuacccccaacggcuccaucccgaaugacaagccuuuucagaacguuaaucggaucacauauggcgccugcccccgcuacgugaaacagaacacgcugaaacuugcgaccgggaugagaaaugugccugaaaagcagacacggggaauuuucggcgccaucgcuggguuuauugagaacggaugggaaggcauggucgaugggugguauggauucagacaccaaaauagcgagggcaccggccaggccgcugaccugaagucuacacaggccgccaucaaccaaauuaaugggaaacucaaccgccugaucgagaagaccaaugaaaaguuucaucagaucgagaaagaguucuccgaaguggaaggacggauucaggaucuugagaaguacguugaggacacgaaaaucgaucuguggagcuauaacgcugaacuccugguggcgcuggagaaucagcacacaauugaccucaccgauucugaaaugaacaagcuguucgagagaacccgcaaacaacuucgggaaaacgccgaggacaugggcaauggguguuuuaagaucuaccauaagugcgauaacgcuuguauuggauccaucagaaauggcacauacgaccacgacgucuaucgcgaugaggcccugaacaaucgguuccagauuaaagggguggaacucaagagcggcuacaaagacuggauccuguggaucuccuuugccauuucuugcuuccuucugugcguugugcuccugggauuuaucaugugggcuugucagaagggcaacauuagaugcaauaucuguauuuga

SEQ ID NO: 195081 - RNA, 1701 nt, Artificial Sequence
  derived and/or modified CDS sequence (opt5) from hemagglutinin__InfluenzaA__ACT21471
augaagaccaucauugcccugagcuacaucuccugccucguguucgcucagaaacugcccggcaacgacaauucuacagccacgcuuugucuggggcaccaugcggucccuaacggaacccucguuaagacaauuaccaaugaucaaaucgaggugacaaacgcuaccgaacuggugcagagcuccucuacaggcagaauuugcgacagcccgcaccggauccuugauggggagaauuguacccugaucgacgcccuccugggagauccccauugcgacggcuuucagaacaaagaaugggaucuguucgucgagcgcuccaaggccuauucuaauuguuacccuuaugacgugcccgauuacgcuagccucagaucccugguugccagcucugggacgcuugaauuuaacaaugaguccuucaacuggaccggaguggcucaggacggcacaagcuaugccugcaaacggcgcucuauuaaguccuuuuucagcagacugaauuggcuccaccaacugaaguacaaauauccugcgcuuaacgucaccaugcccaauaacgauaaguuugacaaacuguacaucuggggcgugcaucacccuucuacagauuccgaccagaccagccucuacgcccaggcuuccgggcggguuacggugucuacaaagcgcagccagcaaaccgucauuccgaauaucggauccagacccugggugcggggcgugagcucucgcauuuccaucuauuggacaauugucaaaccuggggacauccugcugaucaacagcaccggaaaccucauugcccccagaggcuacuucaagauccggucuggaaagagcuccauuaugcgcucugaugcuccuaucgggaaauguaauagcgagugcauuacccccaacggcuccaucccgaaugacaagccuuuucagaacguuaauagaaucacauauggcgccuguccccgguacgugaaacagaacacgcugaaacuugcgaccgggaugcgcaaugugccugaaaagcagacaagaggaauuuucggcgccaucgcuggguuuauugagaacggaugggaaggcauggucgaugggugguauggauuccggcaccaaaauagcgagggcaccggccaggccgcugaccugaagucuacacaggccgccaucaaccaaauuaaugggaaacucaacagacugaucgagaagaccaaugaaaaguuucaucagaucgagaaagaguucuccgaaguggaaggacgcauucaggaucuugagaaguacguugaggacacgaaaaucgaucuguggagcuauaacgcugaacuccugguggcgcuggagaaucagcacacaauugaccucaccgauucugaaaugaacaagcuguucgagcggaccagaaaacaacuucgcgaaaacgccgaggacaugggcaaugggugcuuuaagaucuaccauaagugugauaacgcuugcauuggauccauccggaauggcacauacgaccacgacgucuauagagaugaggcccugaacaaucgcuuccagauuaaagggguggaacucaagagcggcuacaaagacuggauccuguggaucuccuuugccauuucuugcuuccuucuguguguugugcuccugggauuuaucaugugggcuugccagaagggcaacauucgguguaauaucugcauuuga

SEQ ID NO: 195082 - RNA, 1701 nt, Artificial Sequence
  derived and/or modified CDS sequence (opt5) from hemagglutinin__InfluenzaA__ACT21472
augaagaccaucauugcccugagcuacaucuccugccucguguucgcucagaaacugcccggcaacgacaauucuacagccacgcuuugucuggggcaccaugcggucccuaacggaacccucguuaagacaauuaccaaugaucaaaucgaggugacaaacgcuaccgaacuggugcagagcuccucuacaggcagaauuugcgacagcccgcaccggauccuugauggggagaauuguacccugaucgacgcccuccugggagauccccauugcgacggcuuucagaacaaagaaugggaucuguucgucgagcgcuccaaggccuauucuaauuguuacccuuaugacgugcccgauuacgcuagccucagaucccugguugccagcucugggacgcuugaauuuaacaaugaguccuucaacuggaccggaguggcucaggacggcacaagcuaugccugcaaacggcgcucuauuaaguccuuuuucagcacccugaauuggcuccaccaacugaaguacaaauauccugcgcuuaacgucacaaugcccaauaacgauaaguuugacaaacuguacaucuggggcgugcaucacccuucuaccgauuccgaccagacgagccucuacgcccaggcuuccgggagaguuacagugucuaccaagcggagccagcaaacagucauuccgaauaucggaucccgccccugggugagaggcgugagcucucggauuuccaucuauuggaccauugucaaaccuggggacauccugcugaucaacagcaccggaaaccucauugcccccagaggcuacuucaagaucagaucuggaaagagcuccauuaugcggucugaugcuccuaucgggaaauguaauagcgagugcauuacacccaacggcuccaucccgaaugacaagccuuuucagaacguuaaucgcaucacguauggcgccugucccagauacgugaaacagaacacccugaaacuugcgacagggaugcggaaugugccugaaaagcagacccgcggaauuuucggcgccaucgcuggguuuauugagaacggaugggaaggcauggucgaugggugguauggauucagacaccaaaauagcgagggcacaggccaggccgcugaccugaagucuacccaggccgccaucaaccaaauuaaugggaaacucaaccggcugaucgagaagacgaaugaaaaguuucaucagaucgagaaagaguucuccgaaguggaaggacgcauucaggaucuugagaaguacguugaggacacaaaaaucgaucuguggagcuauaacgcugaacuccugguggcgcuggagaaucagcacaccauugaccucaccgauucugaaaugaacaagcuguucgagcgcacacggaaacaacuuagagaaaacgccgaggacaugggcaaugggugcuuuaagaucuaccauaagugugauaacgcuugcauuggauccauccgcaauggcaccuacgaccacgacgucuaucgggaugaggcccugaacaauagauuccagauuaaagggguggaacucaagagcggcuacaaagacuggauccuguggaucuccuuugccauuucuugcuuccuucuguguguugugcuccugggauuuaucaugugggcuugccagaagggcaacauucgcuguaauaucugcauuuga

SEQ ID NO: 195083 - RNA, 1701 nt, Artificial Sequence
  derived and/or modified CDS sequence (opt5) from hemagglutinin__InfluenzaA__ACT21507
augaagaccaucauugcccugagcuacauccucugccugguguucgcucagaaacuucccggcaacgacaauuccacagccacgcugugucucgggcaccaugcggucccuaacggaaccauuguuaagacaaucaccaaugaucaaauugaggugacaaacgcuaccgaacuggugcagucuagcuccacaggcgggaucugcgacucuccgcaccagauccuugauggagagaauagaacccugauugacgcccuccugggcgauccccagugugacggguuucaaaacaaaaagugggaucuguucgucgaacggagcaaagccuauuccaauugcuacccuuaugacgugcccgauuacgcuucucuccgcagccugguugccuccagcggaacgcuugaguuuaacaaugaaucuuucaacuggaccggcgugacacagaauggcaccuccagcgcuuguaaggggagaucuaacaauuccuuuuucagccggcugaacuggcucacacaucugaaguuuaaauauccugcccuuaaugucaccaugcccaacaacgagaaguucgacaaacuguacaucuggggagugcaccauccuggcacggauaaugaccagauuucucucuaugcgcaggccuccgggcgcaucacaguuagcaccaagagaucccaacagacagugauuccgaacaucggaucucggccccgcgucagagauauuccuagccggaucuccaucuacuggaccauugugaaacccggcgacauccugcugauuaauagcaccgggaaccucaucgcuccucgcggauacuuuaagauuagaucuggcaaguccagcaucaugcggucugacgcccccaucggcaaaugcaauagcgaguguauuacaccgaacggguccaucccuaaugauaagcccuuccagaacgugaaucgcauuacguauggagcuugcccuagauacgucaaacagaacacccugaagcuggccacaggcaugcggaauguucccgaaaaacaaacccgcgggaucuuuggagcgauugccggcuucaucgagaacgggugggaaggaaugguggacggcugguauggcuuuagacaccaaaauucugaggggaucggacaggcugccgaucuuaagagcacacaggcugccauuaaccagaucaauggcaaacucaaccggcugauugggaagaccaacgagaaguuccaccagaucgaaaaagaguucuccgaaguggagggacgcauucaggaccuugaaaaguacgucgaggauacgagaaucgaccuguggagcuauaaugccgagcuccugguggcucuggaaucucaacauacaauugaucucaccgacuccgagaugaacaaacuguuugaacggaccaagaaacagcuuagagagaaugcggaagauaugggcaacggguguuucaagaucuaccacaagugcgacaaugccuguaucggcagcauucgcaacggaacauaugaucaugacguuuaccgggacgaggcucugaauaaaagauuucagaucaagggcguggagcucaaaucuggguacaaggauuggauucuguggaucuccuucgccauuagcugcuuucuucugugcgucgcccuccugggauucaucaugugggcuugucagaaaggcaacauccgcugcaauauuuguaucuga

SEQ ID NO: 195084 - RNA, 1701 nt, Artificial Sequence
  derived and/or modified CDS sequence (opt5) from hemagglutinin__InfluenzaA__ACT21508
augaagaccaucauugcccugagcuacauccucugccugguguucgcucagaaacuucccggcaacgacaauuccacagccacgcugugucucgggcaccaugcggucccuaacggaaccauuguuaagacaaucaccaaugaucaaauugaggugacaaacgcuaccgaacuggugcagucuagcuccacaggcgggaucugcgacucuccgcaccagauccuugauggagagaauuguacccugauugacgcccuccugggcgauccccagugcgacggguuucaaaacaaaaagugggaucuguucgucgaaagaagcaaagccuauuccaauuguuacccuuaugacgugcccgauuacgcuucucuccggagccugguugccuccagcggaacgcuugaguuuaacaaugaaucuuucaacuggaccggcgugacacagaauggcaccuccagcgcuugcaagcgcagaucuaacaauuccuuuuucagccggcugaacuggcucacacaucugaaguuuaaauauccugcccuuaaugucaccaugcccaacaacgagaaguucgacaaacuguacaucuggggagugcaccauccugggacggauaaugaccagauuucucucuaugcgcaggccuccggccgcaucacaguuagcaccaagagaucccaacagacagugauuccgaacaucgggucucggccccgcgucagagauauuccuagccggaucuccaucuacuggaccauugugaaacccggagacauccugcugauuaauagcaccggcaaccucaucgcuccucgcggguacuuuaagauuagaucuggaaaguccagcaucaugcggucugacgcccccaucggcaaauguaauagcgagugcauuacaccgaacggcuccaucccuaaugauaagcccuuccagaacgugaaucgcauuacguauggggcuuguccuagauacgucaaacaggacacccugaagcuggccacaggaaugcggaacguucccgaaaaacaaacccgcggcaucuuuggggcgauugccggauucaucgagaauggcugggaagggaugguggauggaugguauggcuuuagacaccagaacucugagggcaucgggcaggcugccgaccuuaagagcacacaagcugccauuaaucagaucaacggaaaacucaaucggcugauuggcaagaccaacgagaaguuccaccagaucgaaaaagaguucuccgaaguggaggggcgcauucaggaucuugaaaaguacgucgaggacacgaaaaucgaucuguggagcuauaacgccgagcuccugguggcucuggaaaaucaacauacaauugaccucaccgauucugagaugaacaagcuguuugaaagaaccaaaaagcagcuucgggagaaugcggaagacaugggaaacggcugcuucaagaucuaccacaaaugugauaaugccugcaucggguccauuagaaacggcacauaugaccaugacguuuaccgcgaugaggcucugaauaaccgguuucagaucaagggaguggagcucaaaagcggcuacaaggacuggauucuguggaucucuuucgccauuuccugcuuucuucugugugucgcccuccugggguucaucaugugggcuugccagaaaggaaauaucagauguaacauuugcaucuga

SEQ ID NO: 195085 - RNA, 1701 nt, Artificial Sequence
  derived and/or modified CDS sequence (opt5) from hemagglutinin__InfluenzaA__ACT21509
augaagaccaucauugcccugagcuacauccucugccugguguucgcucagaaacuucccggcaacgacaauuccacagccacgcugugucucgggcaccaugcggucccuaacggaaccauuguuaagacaaucaccaaugaucaaauugaggugacaaacgcuaccgaacuggugcagucuagcuccacaggcgggaucugcgacucuccgcaccagauccuugauggagagaauuguacccugauugacgcccuccugggcgauccccagugcgacggguuucaaaacaaaaagugggaucuguucgucgaaagaagcaaagccuauuccaauuguuacccuuaugacgugcccgauuacgcuucucuccggagccugguugccuccagcggaacgcuugaguuuaacaaugaaucuuucaacuggaccggcgugacacagaauggcaccuccagcgcuugcaagcgcagaucuaacaauuccuuuuucagccggcugaacuggcucacacaucugaaguuuaaauauccugcccuuaaugucaccaugcccaacaacgagaaguucgacaaacuguacaucuggggagugcaccauccugggacggauaaugaccagauuucucucuaugcgcaggccuccggccgcaucacaguuagcaccaagagaucccaacagacagugauuccgaacaucgggucucggccccgcgucagagauauuccuagccggaucuccaucuacuggaccauugugaaacccggagacauccugcugauuaauagcaccggcaaccucaucgcuccucgcggguacuuuaagauuagaucuggaaaguccagcaucaugcggucugacgcccccaucggcaaauguaauagcgagugcauuacaccgaacggcuccaucccuaaugauaagcccuuccagaacgugaaucgcauuacguauggggcuuguccuagauacgucaaacagaacacccugaagcuggccacaggaaugcggaauguucccgaaacccaaacacgcggcaucuuuggggcgauugccggauucaucgagaacggcugggaagggaugguggacggaugguauggcuuuagacaccaaaauucugagggcaccgggcaggcugccgaucuuaaaagcacgcaggcugccaucaaccagauuaauggaaagcccaaccggcucaucggcaaaacaaacgagaaguuccaccagauugaaaaggaguucuccgaaguggaggggagaauccaggaccuggaaaaauacgucgaggauaccaagauugaccuuuggagcuauaaugccgagcugcucguggcucuggaaaaccaacauaccaucgaucugacagacucugagaugaauaaacucuuugaaaagaccaaaaagcagcugcgcgagaacgcggaagauaugggaaauggcugcuucaagauuuaccacaaaugugacaacgccugcaucggguccauccggaaugagacauaugaucaugacguuuacagagacgaggcucuuaacaaucgcuuucagauuaagggcguggaacugaaaagcggauacaaggauuggauccucuggauuucuuucgccaucuccugcuuucugcuuugugucgcccugcucggcuucauuaugugggcuugccagaaagggaacauccgguguaauaucugcauuuga

SEQ ID NO: 195086 - RNA, 1701 nt, Artificial Sequence
  derived and/or modified CDS sequence (opt5) from hemagglutinin__InfluenzaA__ACT21510
augaagaccaucauugcccugagcuacauccucugccccguguucgcucagaaacugccuggcaacgacaauuccacagccacgcuuugucuggggcaccaugcggucccgaacggaaccauuguuaagacaaucaccaaugaucaaauugaggugacaaacgcuaccgaacucgugcagucuagcuccacaggcgggaucugcgacucuccccaccagauccuggauggagagaauuguacccuuauugacgcccugcucggcgauccucagugcgacggguuucaaaacaaaaagugggaucuguucgucgaaagaagcaaagccuauuccaauuguuaccccuaugacgugccugauuacgcuucucugcggagccucguugccuccagcggaacgcuggaguuuaacaaugaaucuuucaacuggaccggcgugacacagaauggcaccuccagcgcuugcaagcgcagaucuaacaauuccuuuuucagccggcuuaacuggcugacacaucucaaguuuaaauaucccgcccugaaugucaccaugccuaacaacgagaaguucgacaaacuuuacaucuggggagugcaccauccggggacggauaaugaccagauuucucuguaugcgcaggccuccggccgcaucacaguuagcaccaagagaucccaacagacagugauucccaacaucgggucucggccucgcgucagagauauucccagccggaucuccaucuacuggaccauugugaaaccuggagacauccuccugauuaauagcaccggcaaccugaucgcuccccgcggguacuuuaagauuagaucuggaaaguccagcaucaugcggucugacgccccgaucggcaaauguaauagcgagugcauuacaccuaacggcuccauccccaaugauaagccuuuccaggacgugaaccgcauuacguauggggcuugucccagauacgucaaacagaauacccucaagcuggccacaggaaugcggaacguucccgaaaaacaaacccgcggcaucuuuggggcgauugccggauucaucgagaauggcugggaagggaugguggauggaugguauggcuuuagacaccagaacucugagggcaucgggcaggcugccgaccuuaagagcacacaagcugccauuaaucagaucaacggaaaacugaaucggcucauuggcaagaccaacgagaaguuccaccagaucgaaaaagaguucuccgaaguggaggggcgcauucaggaucuggaaaaguacgucgaggacacgaaaaucgaucuuuggagcuauaacgccgagcugcucguggcucuggaaaaucaacauacaauugaccugaccgauucugagaugaacaagcucuuugaaagaaccgagaaacagcugcgggaaaaugcggaggacaugggaaacggcugcuucaagaucuaccacaagugugauaaugccgggaucggcuccauuagaaacggaacauaugaccaugacguuuaccgcgaugaggcucuuaauaaccgguuucagaucaaaggcguggaacucaagagcggguacaaagacuggauucuguggaucucuuucgccauuuccugcuuucugcuuugcgucgcccugcucggauucaucaugugggcuugucagaagggcaauaucagaugcaacauuuguaucuga

SEQ ID NO: 195087 - RNA, 1701 nt, Artificial Sequence; identical to SEQ ID NO: 194985
  derived and/or modified CDS sequence (opt5) from hemagglutinin__InfluenzaA__ACT21572

SEQ ID NO: 195088 - RNA, 1701 nt, Artificial Sequence; identical to SEQ ID NO: 194741
  derived and/or modified CDS sequence (opt5) from hemagglutinin__InfluenzaA__ACT22031

SEQ ID NO: 195089 - RNA, 1701 nt, Artificial Sequence; identical to SEQ ID NO: 194741
  derived and/or modified CDS sequence (opt5) from hemagglutinin__InfluenzaA__ACT22032

SEQ ID NO: 195090 - RNA, 1701 nt, Artificial Sequence; identical to SEQ ID NO: 194741
  derived and/or modified CDS sequence (opt5) from hemagglutinin__InfluenzaA__ACT22033

SEQ ID NO: 195091 - RNA, 1701 nt, Artificial Sequence; identical to SEQ ID NO: 194741
  derived and/or modified CDS sequence (opt5) from hemagglutinin__InfluenzaA__ACT22034

SEQ ID NO: 195092 - RNA, 1701 nt, Artificial Sequence; identical to SEQ ID NO: 194756
  derived and/or modified CDS sequence (opt5) from hemagglutinin__InfluenzaA__ACT22035

SEQ ID NO: 195093 - RNA, 1701 nt, Artificial Sequence
  derived and/or modified CDS sequence (opt5) from hemagglutinin__InfluenzaA__ACT22036
augaaggccauccuggugguccuccuguacaccuucgcuacagccaacgcggacacgcuuugcauuggcuaucacgcuaauaacagcaccgauacaguugacaccgugcuggagaagaaugugacagucacccauuccgugaaccuccuggaagauaagcacaaugggaaacuuuguaagcugagaggaguugcuccccuccaucugggcaaaugcaacaucgccggguggauucugggaaauccugagugugaaucucucagcacagccuccucuuggagcuacaucguggagaccuccucuagcgacaacggcacgugcuauccgggggauuuuauugacuacgaagaacugcgggagcagcuuuccagcgucucuuccuucgaacgcuuugagaucuuccccaagaccagcucuuggccuaaucacgauuccaacaagggagugacagccgcuuguccccaugccggcgcgaaaucuuuuuauaagaaucugaucuggcucauuaaaaagggcaacagcuacccuaaacuguccaagagcuauaucaaugacaaggggaaagaaguucuugugcuguggggcauucaccaccccuccaccucugccgaucaacagagccucuaccagaacgcugacgccuacgucuucgugggauccagcagauauucuaagaaauuuaagccugagaucgcuauucggccgaaagugcgcgaucaggaggggagaaugaauuacuauuggacacuggucgaacccggagacaagaucaccuucgaggccacgggcaaccugguugugccucgguacgcguuugccauggaacgcaacgcuggguccggaauuaucaucagcgauacacccgugcaugacugcaauaccacaugucaaaccccuaaaggcgccauuaacaccucucuccccuuccagaauauccacccgauuacaaucggcaagugcccuaaguaugucaaaagcacgaagcugagacuugcuaccgggcugcggaacgugcccuccauucagucucgcggacucuuuggcgccaucgccggguucaucgagggaggcuggacagggaugguugacggaugguacggcuaucaucaccagaaugaacaaggcagcggguacgcugcggaucugaaauccacccagaacgccauugacgagaucacaaauaaggugaacagcgucauugagaaaaugaauacccaguuuacggcugugggaaaggaguucaaccaccuugagaagagaaucgaaaaucugaacaaaaagguugaugacggcuuccucgauauuuggacauacaaugccgagcugcuggugcuccuggaaaacgagcggacccuugacuaucaugauucuaaugucaaaaaccuguacgagaaggugcgcucccagcucaaaaacaaugccaaggaaaucgggaacggauguuuugaguucuaucacaagugcgacaauaccuguauggaaagcgucaaaaacggcacauacgauuauccuaaguacucugaggaagcuaaacugaauagagaggagaucgacggggugaaacuugaauccacccggauuuaucaaauccuggccauuuacagcacaguugcguccucucucgugcuggucgugagccugggcgcuaucuccuuuuggaugugcucuaacggaagccuccagugccgcauuuguaucuga

SEQ ID NO: 195094 - RNA, 1701 nt, Artificial Sequence
  derived and/or modified CDS sequence (opt5) from hemagglutinin__InfluenzaA__ACT22037
augaaggccauccuggugguccuccuguacaccuucgcuacagccaacgcggacacgcuuugcauuggcuaucacgcuaauaacagcaccgauacaguugacaccgugcuggagaaaaaugugacagucacccauuccgugaaccuccuggaagauaagcacaaugggaaacuuuguaagcugagaggaguugcuccccuccaucugggcaaaugcaacaucgccggguggauucugggaaauccugagugugaaucucucagcacagccuccucuuggagcuacaucguggagaccuccucuagcgacaacggcacgugcuauccgggggauuuuauugacuacgaagaacugcgggagcagcuuuccagcgucucuuccuucgaacgcuuugagaucuuccccaagaccagcucuuggccuaaucacgauuccaacaagggagugacagccgcuuguccccaugccggcgcgaaaucuuuuuauaagaaucugaucuggcucguuaaaaagggcaacagcuacccuaaacuguccaagagcuauauuaaugacaaggggaaagaagugcuuguccuguggggaauccaccaccccuccaccucugccgaucaacagagccucuaccagaacgcugacgccuacguguucgugggcacauccagauauagcaagaaauuuaagccugagauugcuauccggccgaaaguccgcgagcaggaagggagaaugaauuacuauuggacccugguugagcccggagauaagauuacguucgaagccacaggcaaccugguggugccucgguacgcguuugccauggagcgcaacgcugggucuggaaucauuaucuccgacacccccguccaugauugcaauacaaccugucaaaccccuaaaggcgccaucaacacaagccuccccuuccagaauauucacccgaucacgauuggcaagugcccuaaguaugugaaaucuaccaagcugagacuugcuacagggcugcggaacguucccagcauccagucccgcggacucuuuggcgccauugccggguucaucgaaggaggcuggaccgggaugguggacggaugguacggcuaucaucaccagaaugagcaaggcucuggguacgcugcggaccugaaaagcacacagaacgccaucgaugagauuaccaauaaggucaacuccgugaucgaaaagaugaauacgcaguuuacagcuguuggaaaggaguucaaccaccuugaaaagagaauugagaaucugaacaaaaagguggacgauggcuuccucgacaucuggaccuacaaugccgaacugcugguccuccuggagaacgagcggacccuugauuaucaugacagcaaugugaaaaaccuguacgaaaagguccgcucucagcucaaaaacaaugccaaggagauugggaacggauguuuugaguucuaucacaagugcgauaauacauguauggaguccgugaaaaacggcaccuacgacuauccuaaguacagcgaagaggcuaaacugaauagagaggaaaucgaugggguuaaacuugagucuacacggaucuaucaaauucuggccaucuacuccacgguggcgagcucccucguccuggugguuucucugggcgcuauuagcuuuuggaugugcuccaacggaucucuccagugccgcaucuguauuuga

SEQ ID NO: 195095 - RNA, 1701 nt, Artificial Sequence
  derived and/or modified CDS sequence (opt5) from hemagglutinin__InfluenzaA__ACT22038
augaaggccauccuggugguccuccuguacaccuucgcuacagccaacgcggacacgcuuugcauuggcuaucacgcuaauaacagcaccgauacaguugacaccgugcuggagaagaaugugacagucacccauuccgugaaccuccuggaagauaagcacaaugggaaacuuuguaagcugagaggaguugcuccccuccaucugggcaaaugcaacaucgccggguggauucugggaaauccugagugugaaucucucagcacagccuccucuuggagcuacaucguggagaccuccucuagcgacaacggcacgugcuauccgggggauuuuauugacuacgaagaacugcgggagcagcuuuccagcgucucuuccuucgaacgcuuugagaucuuccccaagaccagcucuuggccuaaucacgauuccaacaagggagugacagccgcuuguccccaugccggcgcgaaaucuuuuuauaagaaucugaucuggcucguuaaaaagggcaacagcuacccuaaacuguccaagagcuauauuaaugacaaggggaaagaagugcuuguccuguggggaauccaccaccccuccaccaacgccgaucaacagucucucuaccagaaugcugacgccuacguguucgugggcagcuccagauauagcaagaaauuuaagccugagauugcuauccggccgaaaguccgcgaucaggaggggagaaugaacuacuauuggacacugguugaacccggagacaagauuaccuucgaggccacgggcaaccugguggugccucgguacgcguuugccauggaacgcaaugcugggucuggaaucauuaucuccgauacacccguccaugacugcaacaccacaugucaaaccccuaaaggcgccaucaauaccagccuccccuuccagaacauucacccgaucacaauuggcaagugcccuaaguaugugaaaucuacgaagcugagacuugcuaccgggcugcggaauguucccagcauccagucccgcggacucuuuggcgccauugccggguucaucgagggaggcuggacagggaugguggacggaugguacggcuaucaucaccagaacgaacaaggcucuggguacgcugcggaucugaaaagcacccagaaugccaucgacgagauuacaaacaaggucaauuccgugaucgagaaaaugaacacccaguuuacggcuguuggaaaggaguucaaucaccuugagaagagaauugaaaaccugaauaaaaagguggaugacggcuuccucgauaucuggacauacaacgccgagcugcugguccuccuggaaaaugagcggacccuugacuaucaugauagcaacgugaaaaaccuguacgagaagguccgcucucagcucaaaaauaacgccaaggaaauugggaauggauguuuugaguucuaucacaagugcgacaacaccuguauggaauccgugaaaaauggcacauacgauuauccuaaguacagcgaggaagcuaaacugaacagagaggagaucgacgggguuaaacuugaaucuacccggaucuaucaaauucuggccaucuacuccacaguggcgagcucccucguccuggugguuucucugggcgcuauuagcuuuuggaugugcuccaauggaucucuccagugccgcaucuguauuuga

SEQ ID NO: 195096 - RNA, 1701 nt, Artificial Sequence
  derived and/or modified CDS sequence (opt5) from hemagglutinin__InfluenzaA__ACT22055
augaaggccauccuggugguccuccuguacaccuucgcuacagccaacgcggacacgcuuugcauuggcuaucacgcuaauaacagcaccgauacaguugacaccgugcuggagaagaaugugacagucacccauuccgugaaccuccuggaagauaagcacaaugggaaacuuuguaagcugagaggaguugcuccccuccaucugggcaaaugcaacaucgccggguggauucugggaaauccugagugugaaucucucagcacagccuccucuuggagcuacaucguggagaccuccucuagcgacaacggcacgugcuauccgggggauuuuauugacuacgaagaacugcgggagcagcuuuccagcgucucuuccuucgaacgcuuugagaucuuccccaagaccagcucuuggccuaaucacgauuccaacaagggagugacagccgcuuguccccaugccggcgcgaaaucuuuuuauaagaaucugaucuggcucguuaaaaagggcaacagcuacccuaaacugagaaaguccuauauuaaugacaaggggaaagaagugcuuguccuguggggaauccaccaccccagcaccuccgccgaucaacagucucucuaccagaacgcugacgccuacguguucgugggcacaagccgguauuccaagaaauuuaagccugagauugcuauccgcccgaaagucagagaucaggaggggcggaugaauuacuauuggacccugguugaacccggagacaagauuacguucgaggccacaggcaaccugguggugccucgcuacgcguuugccauggaaagaaacgcugggagcggaaucauuaucucugauacccccguccaugacugcaauacaaccugucaaaccccuaaaggcgccaucaacacaucccuccccuuccagaauauucacccgaucacgauuggcaagugcccuaaguaugugaaaagcaccaagcugcggcuugcuacagggcugcgcaacguucccucuauccagagcagaggacucuuuggcgccauugccggguucaucgagggaggcuggaccgggaugguggacggaugguacggcuaucaucaccagaaugaacaaggcuccggguacgcugcggaucugaaaucuacacagaacgccaucgacgagauuaccaauaaggucaacagcgugaucgagaaaaugaauacgcaguuuacagcuguuggaaaggaguucaaccaccuugagaagcggauugaaaaucugaacaaaaagguggaugacggcuuccucgauaucuggaccuacaaugccgagcugcugguccuccuggaaaacgagcgcacccuugacuaucaugauuccaaugugaaaaaccuguacgagaaggucagaagccagcucaaaaacaaugccaaggaaauugggaacggauguuuugaguucuaucacaagugcgacaauacauguauggaaucugugaaaaacggcaccuacgauuauccuaaguacuccgaggaagcuaaacugaaucgggaggagaucgacgggguuaaacuugaaagcacacgcaucuaucaaauucuggccaucuacucuacgguggcguccagccucguccuggugguuucccugggcgcuauuucuuuuuggaugugcagcaacggaucccuccagugcagaaucuguauuuga

SEQ ID NO: 195097 - RNA, 1701 nt, Artificial Sequence; identical to SEQ ID NO: 195054
  derived and/or modified CDS sequence (opt5) from hemagglutinin__InfluenzaA__ACT22504

SEQ ID NO: 195098 - RNA, 1701 nt, Artificial Sequence; identical to SEQ ID NO: 194983
  derived and/or modified CDS sequence (opt5) from hemagglutinin__InfluenzaA__ACT33122

SEQ ID NO: 195099 - RNA, 1701 nt, Artificial Sequence
  derived and/or modified CDS sequence (opt5) from hemagglutinin__InfluenzaA__ACT33123
augaaggccauccuggugguccuccuguacaccuucgcuacagccaacgcggacacgcuuugcauuggcuaucacgcuaauaacagcaccgauacaguugacaccgugcuggagaagaaugugacagucacccauuccgugaaccuccuggaagauaagcacaaugggaaacuuuguaagcugagaggaguugcuccccuccaucugggcaaaugcaacaucgccggguggauucugggaaauccugagugugaaucucucagcacagccuccucuuggagcuacaucguggagaccuccucuagcgacaacggcacgugcuauccgggggauuuuauugacuacgaagaacugcgggagcagcuuuccagcgucucuuccuucgaacgcuuugagaucuuccccaagaccagcucuuggccuaaucacgauuccaacaagggagugacagccgcuuguccccaugccggcgcgaaaucuuuuuauaagaaucugaucuggcucguuaaaaagggcaacagcuacccuaaacuguccaagagcuauauuaaugacaaggggaaagaagugcuuguccuguggggaauccaccaccccuccaccucugccgaucaacagagccucuaccagaacgcugacgccuacguguucgugggcacauccagauauagcaagaaauuuaagccugagauugcuauccggccgaaaguccgcgaucaggaggggagaaugaauuacuauuggacccugguugaacccggagacaagauuacguucgaggccacaggcaaccugguggugccucgguacgcguuugccauggaacgcaacgcugggucuggaaucauuaucuccgauacccccguccaugacugcaauacaaccugucaaaccccuaaaggcgccaucaacacaagccuccccuuccagaauauucacccgaucacgauuggcaagugcccuaaguaugugaaaucuaccaagcugagacuugcuacagggcugcggaacguucccagcauccagucccgcggacucuuuggcgccauugccggguucaucgagggaggcuggaccgggaugguggacggaugguacggcuaucaucaccagaaugaacaaggcucuggguacgcugcggaucugaaaagcacacagaacgccaucgacgagauuaccaauaaggucaacuccgugaucgagaaaaugaauacgcaguuuacagcuguuggaaaggaguucaaccaccuugagaagagaauugaaaaucugaacaaaaagguggaugacggcuuccucgauaucuggaccuacaaugccgagcugcugguccuccuggaaaacgagcggacccuugacuaucaugauagcaaugugaaaaaccuguacgagaagguccgcucucagcucaaaaacaaugccaaggaaauugggaacggauguuuugaguucuaucacaagugcgacaauacauguauggaauccgugaaaaacggcaccuacgauuauccuaaguacagcgaggaagcuaaacugaauagagaggagaucgacgggguuaaacuugaaucuacacggaucuaucaaauucuggccaucuacuccacgguggcgagcucccucguccuggugguuucucugggcgcuauuagcuuuuggaugugcuccaacggaucucuccaguuccgcaucugcauuuga

SEQ ID NO: 195100 - RNA, 1701 nt, Artificial Sequence; identical to SEQ ID NO: 194741
  derived and/or modified CDS sequence (opt5) from hemagglutinin__InfluenzaA__ACT33125

SEQ ID NO: 195101 - RNA, 1701 nt, Artificial Sequence
  derived and/or modified CDS sequence (opt5) from hemagglutinin__InfluenzaA__ACT36505
augaaggccauccuggugguccuccuguacaccuucgcuacagccaacgcggacacgcuuugcauuggcuaucacgcuaauaacagcaccgauacaguugacaccgugcuggagaagaaugugacagucacccauuccgugaaccuccuggaagauaagcacaaugggaaacuuuguaagcugagaggaguugcuccccuccaucugggcaaaugcaacaucgccggguggauucugggaaauccugagugugaaucucucagcacagccuccucuuggagcuacaucguggagaccuccucuagcgacaacggcacgugcuauccgggggauuuuauugacuacgaagaacugcgggagcagcuuuccagcgucucuuccuucgaacgcuuugagaucuuccccaagaccagcucuuggccuaaucacgauuccaacaagggagugacagccgcuuguccccaugccggcgcgaaaucuuuuuauaagaaucugaucuggcucguuaaaaagggcaacagcuacccuaaacuguccaagagcuauauuaaugacaaggggaaagaagugcuuguccuguggggaauccaccaccccuccaccucugccgaucaacagagccucuaccagaacgcugacgccuacguguucgugggcacauccagauauagcaagaaauuuaagccugagauugcuauccggccgaaaguccgcgaucaggaggggagaaugaauuacuauuggacccugauugaacccggagacaagaucacguucgaggccacaggcaaccugguugugccucgguacgcguuugccauggaacgcaacgcugggucuggaauuaucaucuccgauacccccgugcaugacugcaauacaaccugucaaaccccuaaaggcgccauuaacacaagccuccccuuccagaauauccacccgauuacgaucggcaagugcccuaaguaugucaaaucuaccaagcugagacuugcuacagggcugcggaacgugcccagcauucagucccgcggacucuuuggcgccaucgccggguucaucgagggaggcuggaccgggaugguugacggaugguacggcuaucaucaccagaaugaacaaggcucuggguacgcugcggaucugaaaagcacacagaacgccauugacgagaucaccaauaaggugaacuccgucauugagaaaaugaauacgcaguuuacagcugugggaaaggaguucaaccaccuugagaagagaaucgaaaaucugaacaaaaagguugaugacggcuuccucgauauuuggaccuacaaugccgagcugcuggugcuccuggaaaacgagcggacccuugacuaucaugauagcaaugucaaaaaccuguacgagaaggugcgcucucagcucaaaaacaaugccaaggaaaucgggaacggauguuuugaguucuaucacaagugcgacaauacauguauggaauccgucaaaaacggcaccuacgauuauccuaaguacagcgaggaagcuaaacugaauagagaggagaucgacggggugaaacuugaaucuacacggauuuaucaaauccuggccauuuacuccacgguugcgagcucccucgugcuggucgugucucugggcgcuaucagcuuuuggaugugcuccaacggaucucuccagugccgcauuuguaucuga

SEQ ID NO: 195102 - RNA, 1701 nt, Artificial Sequence
  derived and/or modified CDS sequence (opt5) from hemagglutinin__InfluenzaA__ACT36649
augaaggccauccuggugguccuccuguacaccuucgcuacagccaacgcggacacgcuuugcauuggcuaucacgcuaauaacagcaccgauacaguugacaccgugcuggagaagaaugugacagucacccauuccgugaaccuccuggaagauaagcacaaugggaaacuuuguaagcugagaggaguugcuccccuccaucugggcaaaugcaacaucgccggguggauucugggaaauccugagugugaaucucucagcacagcccgguccuggucuuacaucguggagaccagcuccucugacaacggcacgugcuauccgggggauuuuauugacuacgaagaacugcgcgagcagcuuaauagcgucuccagcuucgaaagauuugagaucuuccccaagaccucuuccuggccuaaccacgauagcaauaagggagugacagccgcuuguccccaugccggcgcgaaaucuuuuuauaagaaccugaucuggcucguuaaaaagggcaauuccuacccuaaacugagcaagucuuauauuaacgacaaggggaaagaagugcuuguccuguggggaauccaccaccccuccaccagcgccgaucaacagucccucuaccagaaugcugacgccuacguguucgugggcucuagccgguauuccaagaaauuuaagccugagauugcuauccgcccgaaagucagagaucaggaggggcggaugaacuacuauuggacacugguugaacccggagacaagauuaccuucgaggccacgggcaaccugguggugccucgcuacgcguuugccauggaaagaaaugcugggagcggaaucauuaucucugauacacccguccaugacugcaacaccacaugucaaaccccuaaaggcgccaucaauaccucccuccccuuccagaacauucacccgaucacaauuggcaagugcccuaaguaugugaaaagcacgaagcugcggcuugcuaccgggcugcgcaauguucccucuauccagagcagaggacucuuuggcgccauugccggguucaucgagggaggcuggacagggaugguggacggaugguacggcuaucaucaccagaacgaacaaggcuccggguacgcugcggaucugaaaucuacccagaaugccaucgacgagauuacaaacaaggucaauagcgugaucgagaaaaugaacacccaguuuacggcuguuggaaaggaguucaaucaccuugagaagcggauugaaaaccugaauaaaaagguggaugacggcuuccucgauaucuggacauacaacgccgagcugcugguccuccuggaaaaugagcgcacccuugacuaucaugauuccaacgugaaaagccuguacgagaaggucagaucucagcucaaaaacaaugccaaggaaauugggaacggauguuuugaguucuaucacaagugcgacaauaccuguauggaauccgugaaaaacggcacauacgauuauccuaaguacagcgaggaagcuaaacugaaucgggaggagaucgacgggguuaaacuugaaucuacccgcaucuaucaaauucuggccaucuacuccacaguggcgagcucccucguccuggugguuucucugggcgcuauuagcuuuuggaugugcuccaacggaucucuccagugcagaaucuguauuuga

SEQ ID NO: 195103 - RNA, 1701 nt, Artificial Sequence; identical to SEQ ID NO: 194741
  derived and/or modified CDS sequence (opt5) from hemagglutinin__InfluenzaA__ACT36650

SEQ ID NO: 195104 - RNA, 1701 nt, Artificial Sequence; identical to SEQ ID NO: 194741
  derived and/or modified CDS sequence (opt5) from hemagglutinin__InfluenzaA__ACT36652

SEQ ID NO: 195105 - RNA, 1701 nt, Artificial Sequence; identical to SEQ ID NO: 194739
  derived and/or modified CDS sequence (opt5) from hemagglutinin__InfluenzaA__ACT36653

SEQ ID NO: 195106 - RNA, 1701 nt, Artificial Sequence
  derived and/or modified CDS sequence (opt5) from hemagglutinin__InfluenzaA__ACT36655
augaaggccauccuggugguccuccuguacaccuucgcuacagccaacgcggacacgcuuugcauuggcuaucacgcuaauaacagcaccgauacaguugacaccgugcuggagaagaaugugacagucacccauuccgugaaccuccuggaagauaagcacaaugggaaacuuuguaagcugagaggaguugcuccccuccaucugggcaaaugcaacaucgccggguggauucugggaaauccugagugugaaucucucagcacagccuccucuuggagcuacaucguggagaccuccucuagcggcaacgggacgugcuauccgggagacuuuauugauuacgaagaacugcgggagcagcuuuccagcgucucuuccuucgaacgcuuugagaucuuccccaagaccagcucuuggccuaaucacgacuccaacaagggcgugacagccgcuuguccccaugccggcgcgaaaucuuuuuauaagaaucugaucuggcucguuaaaaaggggaacagcuacccuaaacuguccaagagcuauauuaaugauaagggaaaagaagugcuuguccuguggggcauccaccaccccuccaccucugccgaccaacagagccucuaccagaacgcugaugccuacguguucgugggguccagcagauauucuaagaaauuuaagccugagauugcuauccggccgaaaguccgcgaccaggagggaagaaugaauuacuauuggacacugguugaacccggcgauaagauuaccuucgaggccacggggaaccugguggugccucgguacgcguuugccauggaacgcaacgcuggauccggcaucauuaucagcgacacacccguccaugauugcaauaccacaugucaaaccccuaaaggcgccaucaacaccucucuccccuuccagaauauucacccgaucacaauugggaagugcccuaaguaugugaaaagcacgaagcugagacuugcuaccggacugcggaacguucccuccauccagucucgcggccucuuuggggccauugccggauucaucgagggcggguggacaggaaugguggacggcugguacggcuaucaucaccagaaugaacaagggagcggauacgcugcggaccugaaauccacccagaacgccaucgaugagauuacaaauaaggucaacagcgugaucgagaaaaugaauacccaguuuacggcuguuggcaaggaguucaaccaccuugagaagagaauugaaaaucugaacaaaaagguggacgauggguuccucgacaucuggacauacaaugccgagcugcugguccuccuggaaaacgagcggacccuugauuaucaugacucuaaugugaaaaaccuguacgagaagguccgcucccagcucaaaaacaaugccaaggaaauuggaaacggcuguuuugaguucuaucacaagugcgauaauaccuguauggaaagcgugaaaaacgggacauacgacuauccuaaguacucugaggaagcuaaacugaauagagaggagaucgauggcguuaaacuugaauccacccggaucuaucaaauucuggccaucuacagcacaguggcguccucucucguccuggugguuagccugggagcuauuuccuuuuggaugugcucuaacggcagccuccagugccgcaucuguauuuga

SEQ ID NO: 195107 - RNA, 1701 nt, Artificial Sequence; identical to SEQ ID NO: 194728
  derived and/or modified CDS sequence (opt5) from hemagglutinin__InfluenzaA__ACT36658

SEQ ID NO: 195108 - RNA, 1701 nt, Artificial Sequence; identical to SEQ ID NO: 194767
  derived and/or modified CDS sequence (opt5) from hemagglutinin__InfluenzaA__ACT36659

SEQ ID NO: 195109 - RNA, 1701 nt, Artificial Sequence; identical to SEQ ID NO: 194728
  derived and/or modified CDS sequence (opt5) from hemagglutinin__InfluenzaA__ACT36661

SEQ ID NO: 195110 - RNA, 1701 nt, Artificial Sequence; identical to SEQ ID NO: 194741
  derived and/or modified CDS sequence (opt5) from hemagglutinin__InfluenzaA__ACT36663

SEQ ID NO: 195111 - RNA, 1701 nt, Artificial Sequence; identical to SEQ ID NO: 194741
  derived and/or modified CDS sequence (opt5) from hemagglutinin__InfluenzaA__ACT36666

SEQ ID NO: 195112 - RNA, 1701 nt, Artificial Sequence
  derived and/or modified CDS sequence (opt5) from hemagglutinin__InfluenzaA__ACT52687
augaaggccauccuggugguccuccuguacaccuucgcuacagccaacgcggacacgcuuugcauuggcuaucacgcuaauaacagcaccgauacaguugacaccgugcuggagaagaaugugacagucacccauuccgugaaccuccuggaagauaagcacaaugggaaacuuuguaagcugagaggaguugcuccccuccaucugggcaaaugcaacaucgccggguggauucugggaaauccugagugugaaucucucagcacagccuccucuuggagcuacaucguggagaccuccucuagcgacaacggcacgugcuauccgggggauuuuauugacuacgaagaacugcgggagcagcuuuccagcgucucuuccuucgaacgcuuugagaucuuccccaagaccagcucuuggccuaaucacgauuccaacaagggagugacagccgcuuguccccaugccggcgcgaaaucuuuuuauaagaaucugaucuggcucguuaaaaagggcaacagcuacccuaaacuguccaagagcuauauuaaugacaaggggaaagaagugcuuguccuguggggaauccaccaccccuccaccucugccgaucaacagagccucuaccagaacgcugacgccuacguguucgugggcuccagcagauauucuaagaaauuuaagccugagauugcuauccggccgaaaguccgcgggcaggagggaagaaugaauuacuauuggacacugguugaacccggcgauaagauuaccuucgaggccacggggaaccugguggugccucgguacgcguuugccauggaacgcaacgcuggauccggcaucauuaucagcgacacacccguccaugauugcaauaccacaugucaaaccccuaaaggcgccaucaacaccucucuccccuuccagaauauucacccgaucacaauugggaagugcccuaaguaugugaaaagcacgaagcugagacuugcuaccggacugcggaacguucccuccauccagucucgcggccucuuuggggccauugccggauucaucgagggcggguggacaggaaugguggacggcugguacggcuaucaucaccagaaugaacaagggagcggauacgcugcggaccugaaauccacccagaacgccaucgaugagauuacaaauaaggucaacagcgugaucgagaaaaugaauacccaguuuacggcuguuggcaaggaguucaaccaccuugagaagagaauugaaaaucugaacaaaaagguggacgauggguuccucgacaucuggacauacaaugccgagcugcugguccuccuggaaaacgagcggacccuugauuaucaugacucuaaugugaaaaaccuguacgagaagguccgcucccagcucaaaaacaaugccaaggaaauuggaaacggcuguuuugaguucuaucacaagugcgauaauaccuguauggaaagcgugaaaaacgggacauacgacuauccuaaguacucugaggaagcuaaacugaauagagaggagaucgauggcguuaaacuugaauccacccgguuuuaucaaauccuggccauuuacagcacaguggcguccucucucguccuggugguuagccugggagcuaucuccuucuggaugugcucuaacggcagccuccagugccgcauuuguaucuga

SEQ ID NO: 195113 - RNA, 1701 nt, Artificial Sequence; identical to SEQ ID NO: 194728
  derived and/or modified CDS sequence (opt5) from hemagglutinin__InfluenzaA__ACT54606

SEQ ID NO: 195114 - RNA, 1701 nt, Artificial Sequence; identical to SEQ ID NO: 194741
  derived and/or modified CDS sequence (opt5) from hemagglutinin__InfluenzaA__ACT66146

SEQ ID NO: 195115 - RNA, 1701 nt, Artificial Sequence; identical to SEQ ID NO: 194983
  derived and/or modified CDS sequence (opt5) from hemagglutinin__InfluenzaA__ACT66155

SEQ ID NO: 195116 - RNA, 1701 nt, Artificial Sequence
  derived and/or modified CDS sequence (opt5) from hemagglutinin__InfluenzaA__ACT66162
auggaggccauccuggugguccuccuguacaccuucgcuacagccaacgcggacacgcuuugcauuggcuaucacgcuaauaacagcaccgauacaguugacaccgugcuggaaaagaaugugacagucacccauuccgugaaccuccuggaggauaaacacaaugggaaacuuuguaagcugagaggaguugcgccccuccaucugggcaagugcaacaucgccggguggauucugggaaauccugaaugugagucucucagcacagcuuccucuuggagcuacaucguggaaaccuccucuagcgacaacggcacgugcuauccgggggauuuuauugacuacgaggagcugcgggaacaccuuuccagcgucucuuccuucgagcgcuuugaaaucuuccccaaaaccagcucuuggccuaaucaugauuccaacaagggagugacagccgcuuguccccacgccggcgccaagagcuuuuauaaaaaucugaucuggcucguuaagaaaggcaacucuuacccuaagcuguccaaaagcuauauuaaugacaaggggaaggaggugcuuguccuguggggaauccaccaucccuccaccucugccgaucagcaaagccucuaccagaacgcugacgccuacguguucgugggcuccagcagauauucuaaaaaguuuaaaccugagauugcuauccggccgaagguccgcgaucaggaagggagaaugaauuacuauuggacacugguugagcccggagacaaaauuaccuucgaagccacgggcaaccugguggugccucgguacgcguuugccauggagcgcaacgcuggguccggaaucauuaucagcgauacacccguccacgacugcaauaccacaugucagaccccuaagggcgccaucaacaccucucuccccuuccaaaauauucauccgaucacaauuggcaaaugcccuaaguauguuaagagcacgaaacugagacuugcuaccgggcugcggaacgugcccuccauccagucucgcggacucuuuggcgccauugccggguucaucgaaggaggcuggacagggaugguggacggaugguacggcuaucaccaccagaaugagcagggcagcggguacgcugcggaucugaaguccacccaaaacgccaucgacgagauuacaaauaaagucaacagcgugaucgaaaagaugaauacccaguuuacggcuguuggaaaagaguucaaccaucuugaaaagagaauugagaaucugaacaagaaaguggaugacggcuuccucgauaucuggacauacaaugccgaacugcugguccuccuggagaacgagcggacccuugacuaucacgauucuaaugugaagaaccuguacgaaaaaguccgcucccagcucaagaacaaugccaaagagauugggaacggauguuuugaguucuaucauaagugcgacaauaccuguauggaaagcgugaagaacggcacauacgauuauccuaaauacucugaagaggcuaagcugaauagagaggaaaucgacgggguuaaacuugaguccacccggaucuaucagauucuggccaucuacagcacaguggcguccucucucguccuggugguuagccugggcgcuauuuccuuuuggaugugcucuaacggaagccuccaaugccgcaucuguauuuga

SEQ ID NO: 195117 - RNA, 1701 nt, Artificial Sequence; identical to SEQ ID NO: 194741
  derived and/or modified CDS sequence (opt5) from hemagglutinin__InfluenzaA__ACT67239

SEQ ID NO: 195118 - RNA, 1701 nt, Artificial Sequence; identical to SEQ ID NO: 194741
  derived and/or modified CDS sequence (opt5) from hemagglutinin__InfluenzaA__ACT67255

SEQ ID NO: 195119 - RNA, 1701 nt, Artificial Sequence; identical to SEQ ID NO: 194728
  derived and/or modified CDS sequence (opt5) from hemagglutinin__InfluenzaA__ACT68102

SEQ ID NO: 195120 - RNA, 1701 nt, Artificial Sequence
  derived and/or modified CDS sequence (opt5) from hemagglutinin__InfluenzaA__ACT68103
augaaggccauccuggugguccuccuguacaccuucgcuacagccaacgcggacacgcuuugcauuggcuaucacgcuaauaacagcaccgauacaguugacaccgugcuggagaaaaaugugacagucacccauuccgugaaccuccuggaagauaagcacaaugggaaacuuuguaagcugagaggaguugcuccccuccaucugggcaaaugcaacaucgccggguggauucugggaaauccugagugugaaucucucagcacagccuccucuuggagcuacaucguggagaccuccucuagcgacaacggcacgugcuauccgggggauuuuauugacuacgaagaacugcgggagcagcuuuccagcgucucuuccuucgaacgcuuugagaucuuccccaagaccagcucuuggccuaaucacgauuccaacaagggagugacagccgcuuguccccaugccggcgcgaaaucuuuuuauaagaaucugaucuggcucguuaaaaagggcaacagcuacccuaaacuguccaagagcuauauuaaugacaaggggaaagaagugcuuguccuguggggaauccaccaccccuccaccucugccgaucaacagagccucuaccagaacgcugacgccuacguguucgugggcuccagcagauauucuaagaaauuuaagccugagauugcuauccggccgaaaguccgcgaucaggaggggagaaugaauuacuauuggacacugguugaacccggagacaagauuaccuucgaggccacgggcaaccugguggugccucgguacgcguuugccauggaacgcaacgcuggguccggaaucauuaucagcgauacacccguccaugacugcaauaccacaugucaaacccucaaaggcgccaucaacaccucucugccuuuccagaauauucaccccaucacaauuggcaagugcccgaaguaugugaaaagcacgaaacuuagacuggcuaccgggcuccggaacguuccuuccauccagucucgcggacuguuuggcgccauugccggguucaucgagggaggcuggacagggaugguggacggaugguacggcuaucaucaccagaaugaacaaggcagcggguacgcugcggaucuuaaguccacccagaacgccaucgacgagauuacaaauaaggucaacagcgugaucgagaaaaugaauacccaguuuacggcuguuggaaaggaguucaaccaccuggagaagagaauugaaaaucucaacaaaaagguggaugacggcuuccuggauaucuggacauacaaugccgagcugcucguccugcuugaaaacgagcggacccuggacuaucaugauucuaaugugaaaaaccucuacgagaagguccgcucccagcugaaaaacaaugccaaggaaauugggaacggauguuuugaguucuaucacaagugcgacaauaccuguauggaaagcgugaaaaacggcacauacgauuaucccaaguacucugaggaagcuaaacuuaauagagaggagaucgacgggguuaagcuggaauccacccggaucuaucaaauucucgccaucuacagcacaguggcguccucucugguccuggugguuagccucggcgcuauuuccuuuuggaugugcucuaacggaagccugcagugccgcaucuguauuuga

SEQ ID NO: 195121 - RNA, 1701 nt, Artificial Sequence; identical to SEQ ID NO: 194728
  derived and/or modified CDS sequence (opt5) from hemagglutinin__InfluenzaA__ACT68104

SEQ ID NO: 195122 - RNA, 1701 nt, Artificial Sequence
  derived and/or modified CDS sequence (opt5) from hemagglutinin__InfluenzaA__ACT68105
augaaggccauccuggugguccuccuguacaccuucgcuacagccaacgcggacacgcuuugcauuggcuaucacgcuaauaacagcaccgauacaguugacaccgugcuggagaaaaaugugacagucacccauuccgugaaccuccuggaagauaagcacaaugggaaacuuuguaagcugagaggaguugcuccccuccaucugggcaaaugcaacaucgccggguggauucugggaaauccugagugugaaucucucagcacagccuccucuuggagcuacaucguggagaccuccucuagcgacaacggcacgugcuauccgggggauuuuauugacuacgaagaacugcgggagcagcuuuccagcgucucuuccuucgaacgcuuugagaucuuccccaagaccagcucuuggccuaaucacgauuccaacaagggagugacagccgcuuguccccaugccggcgcgaaaucuuuuuauaagaaucugaucuggcucguuaaaaagggcaacagcuacccuaaacuguccaagagcuauauuaaugacaaggggaaagaagugcuuguccuguggggaauccaccaccccuccaccucugccgaucaacagagccucuaccagaacgcugacgccuacguguucgugggcuccagcaaguauucuaaaaaguuuaaaccugagauugcuaucagaccgaagguccgggaucaggaggggcgcaugaauuacuauuggacacugguugaacccggagacaaaauuaccuucgaggccacgggcaaccugguggugccuagauacgcguuugccauggaacggaacgcuggguccggaaucauuaucagcgauacacccguccaugacugcaauaccacaugucaaaccccuaagggcgccaucaacaccucucuccccuuccagaauauucacccgaucacaauuggcaagugcccuaaauauguuaagagcacgaaacugcgccuugcuaccgggcugagaaacgugcccuccauccagucucggggacucuuuggcgccauugccggguucaucgagggaggcuggacagggaugguggacggaugguacggcuaucaucaccagaaugaacaaggcagcggguacgcugcggaucugaaguccacccagaacgccaucgacgagauuacaaauaaagucaacagcgugaucgagaagaugaauacccaguuuacggcuguuggaaaggaguucaaccaccuugagaaacgcauugaaaaucugaacaagaaaguggaugacggcuuccucgauaucuggacauacaaugccgagcugcugguccuccuggaaaacgagagaacccuugacuaucaugauucuaaugugaagaaccuguacgagaaaguccggucccagcucaagaacaaugccaaggaaauugggaacggauguuuugaguucuaucacaaaugcgacaauaccuguauggaaagcgugaagaacggcacauacgauuauccuaaauacucuggggaggcuaagcugaaucgcgaagagaucgacggcguuaaacuugaguccaccagaaucuaucaaauucuggccaucuacagcacaguggcguccucucucguccuggugguuagccugggagcuauuuccuuuuggaugugcucuaacggcagccuccagugccggaucuguauuuga

SEQ ID NO: 195123 - RNA, 1701 nt, Artificial Sequence; identical to SEQ ID NO: 194728
  derived and/or modified CDS sequence (opt5) from hemagglutinin__InfluenzaA__ACT68106

SEQ ID NO: 195124 - RNA, 1701 nt, Artificial Sequence; identical to SEQ ID NO: 194728
  derived and/or modified CDS sequence (opt5) from hemagglutinin__InfluenzaA__ACT68107

SEQ ID NO: 195125 - RNA, 1701 nt, Artificial Sequence; identical to SEQ ID NO: 194921
  derived and/or modified CDS sequence (opt5) from hemagglutinin__InfluenzaA__ACT68108

SEQ ID NO: 195126 - RNA, 1701 nt, Artificial Sequence
  derived and/or modified CDS sequence (opt5) from hemagglutinin__InfluenzaA__ACT68109
augaaggccauccuggugguccuccuguacaccuucgcuacagccaacacggacacccuuugcauuggcuaucacgcgaauaacagcacagauaccguugacacagugcuggagaaaaaugugaccgucacacauuccgugaaccuccuggaagauaagcacaaugggaaacuuuguaagcugagaggaguugcuccccuccaucugggcaaaugcaacaucgccggguggauucugggaaauccugagugugaaucucucagcaccgccuccucuuggagcuacaucguggagacguccucuagcgacaacgggaccugcuauccgggcgauuuuauugacuacgaagaacugcgggagcagcuuuccagcgucucuuccuucgaacgcuuugagaucuuccccaagacaagcucuuggccuaaucacgauuccaacaagggagugaccgcugccuguccccaugcuggcgccaagagcuuuuauaagaaucugaucuggcucguuaaaaagggcaacucuuacccuaaacuguccaagagcuauauuaaugacaaggggaaagaagugcuuguccuguggggaauccaccaccccuccacaucugcggaucaacagagccucuaccagaacgccgacgcuuacguguucgugggcaccuccagauauagcaagaaauuuaagccugagauugccauccggccgaaaguccgcgaucaggaggggagaaugaauuacuauuggacgcugguugaacccggagacaagauuacauucgaggcuaccggcaaccugguggugccucgguacgccuuugcgauggaacgcaacgccgggucuggaaucauuaucuccgauacacccguccaugacugcaauaccaccugucaaacaccuaaaggcgcuaucaacacgagccuccccuuccagaauauucacccgaucaccauuggcaagugcccuaaguaugugaaaucuacaaagcugagacuugccaccgggcugcggaacguucccagcauccagucccgcggacucuuuggcgcuauugccggguucaucgagggaggcuggacagggaugguggacggaugguacggcuaucaucaccagaaugaacaaggcucuggguacgccgcugaucugaaaagcacccagaacgcgaucgacgagauuacgaauaaggucaacuccgugaucgagaaaaugaauacacaguuuaccgccguuggaaaggaguucaaccaccuugagaagagaauugaaaaucugaacaaaaagguggaugacggcuuccucgauaucuggaccuacaaugcugagcugcugguccuccuggaaaacgagcggacacuugacuaucaugauagcaaugugaaaaaccuguacgagaagguccgcucucagcucaaaaacaaugccaaggaaauugggaacggauguuuugaguucuaucacaagugcgacaauaccuguauggaauccgugaaaaacggcacauacgauuauccuaaguacagcgaggaagccaaacugaauagagaggagaucgacgggguuaaacuugaaucuacgcggaucuaucaaauucuggcuaucuacuccaccguggccagcucccucguccuggugguuucucugggcgcgauuagcuuuuggaugugcuccaacggaucucuccagugccgcaucuguauuuga

SEQ ID NO: 195127 - RNA, 1701 nt, Artificial Sequence; identical to SEQ ID NO: 194728
  derived and/or modified CDS sequence (opt5) from hemagglutinin__InfluenzaA__ACT68110

SEQ ID NO: 195128 - RNA, 1701 nt, Artificial Sequence; identical to SEQ ID NO: 194728
  derived and/or modified CDS sequence (opt5) from hemagglutinin__InfluenzaA__ACT68112

SEQ ID NO: 195129 - RNA, 1701 nt, Artificial Sequence; identical to SEQ ID NO: 194728
  derived and/or modified CDS sequence (opt5) from hemagglutinin__InfluenzaA__ACT68113

SEQ ID NO: 195130 - RNA, 1701 nt, Artificial Sequence; identical to SEQ ID NO: 194728
  derived and/or modified CDS sequence (opt5) from hemagglutinin__InfluenzaA__ACT68115

SEQ ID NO: 195131 - RNA, 1701 nt, Artificial Sequence; identical to SEQ ID NO: 194728
  derived and/or modified CDS sequence (opt5) from hemagglutinin__InfluenzaA__ACT68119

SEQ ID NO: 195132 - RNA, 1701 nt, Artificial Sequence
  derived and/or modified CDS sequence (opt5) from hemagglutinin__InfluenzaA__ACT79133
augaaggccauccuggugguccuccuguacaccuucgcuacagccaacgcggacacgcuuugcauuggcuaucacgcuaauaacagcaccgauacaguugacaccgugcuggagaaaaaugugacagucacccauuccgugaaccuccuggaagauaagcacaaugggaaacuuuguaagcugagaggaguugcuccccuccaucugggcaaaugcaacaucgccggguggauucugggaaauccugagugugaaucucucagcacagccuccucuuggagcuacaucguggagaccuccucuagcgacaacggcacgugcuauccgggggauuuuauugacuacgaagaacugcgggagcagcuuuccagcgucucuuccuucgaacgcuuugagaucuuccccaagaccagcucuuggccuaaucacgauuccaacaagggagugacagccgcuuguccccaugccggcgcgaaaucuuuuuauaagaaucugaucuggcucguuaaaaagggcaacagcuacccuaaacuguccaagagcuauauuaaugacaaggggaaagaagugcuuguccuguggggaauccaccaccccuccaccucugccgaucaacagagccucuaccagaacgcugacgccuacguguucgugggcacauccagauauagcaagaaauuuaagccugagauugcuauccggccgaaaguccgcgaucaggaggggagaaugaauuacuauuggaagcugguugaacccggagacaaaauuaccuucgaggccacgggcaaccugguggugccucgguacgcguuugccauggaacgcaacgcugggucuggaaucauuaucuccgauacacccguccaugacugcaauaccacaugucaaaccccuaagggcgccaucaacaccagccuccccuuccagaauauucacccgaucacaauuggcaagugcccuaaauaugugaagucuacgaaacugagacuugcuaccgggcugcggaacguucccagcauccagucccgcggacucuuuggcgccauugccggguucaucgagggaggcuggacagggaugguggacggaugguacggcuaucaucaccagaaugaacaaggcucuggguacgcugcggaucuuaagagcacccagaacgccaucgacgagauuacaaauaaagucaacuccgugaucgagaagaugaauacccaguuuacggcuguuggaaaggaguucaaccaccuggagaaaagaauugaaaaucugaacaagaaaguggaugacggcuuccucgauaucuggacauacaaugccgagcugcugguccuccuggaaaacgagcggacccuugacuaucaugauagcaaugugaagaaccuguacgagaaaguccgcucucagcucaagaacaaugccaaggaaauugggaacggauguuuugaguucuaucacaaaugcgacaauaccuguauggaauccgugaagaacggcacauacgauuauccuaaauacagcgaggaagcuaagcugaauagagaggagaucgacgggguuaaacuugaaucuacccggaucuaucaaauucuggccaucuacuccacaguggcgagcucccucguccuggugguuucucugggcgcuauuagcuuuuggaugugcuccaacggaucucuccagugccgcaucuguauuuga

SEQ ID NO: 195133 - RNA, 1701 nt, Artificial Sequence; identical to SEQ ID NO: 194728
  derived and/or modified CDS sequence (opt5) from hemagglutinin__InfluenzaA__ACT79143

SEQ ID NO: 195134 - RNA, 1701 nt, Artificial Sequence; identical to SEQ ID NO: 194767
  derived and/or modified CDS sequence (opt5) from hemagglutinin__InfluenzaA__ACT79153

SEQ ID NO: 195135 - RNA, 1701 nt, Artificial Sequence; identical to SEQ ID NO: 195054
  derived and/or modified CDS sequence (opt5) from hemagglutinin__InfluenzaA__ACT79163

SEQ ID NO: 195136 - RNA, 1701 nt, Artificial Sequence; identical to SEQ ID NO: 195054
  derived and/or modified CDS sequence (opt5) from hemagglutinin__InfluenzaA__ACT79173

SEQ ID NO: 195137 - RNA, 1701 nt, Artificial Sequence
  derived and/or modified CDS sequence (opt5) from hemagglutinin__InfluenzaA__ACT79625
augaaggccauccuggugguccuccuguacaccuucgcuacagccaacgcggacacgcuuugcauuggcuaucacgcuaauaacagcaccgauacaguugacaccgugcuggagaaaaaugugacagucacccauuccgugaaccuccuggaagauaagcacaaugggaaacuuuguaagcugagaggaguugcuccccuccaucugggcaaaugcaacaucgccggguggauucugggaaauccugagugugaaucucucagcacagccuccucuuggagcuacaucguggagaccuccucuagcgacaacggcacgugcuauccgggggauuuuauugacuacgaagaacugcgggagcagcuuuccagcgucucuuccuucgaacgcuuugagaucuuccccaagaccagcucuuggccuaaucacgauuccaacaagggagugacaaccgccuguccccaugcuggcgccaagagcuuuuauaaaaaucugaucuggcucguuaaaaagggcaacucuuacccuaaacuguccaagagcuauauuaaugacaaggggaaagaagugcuuguccuguggggaauccaccaccccuccacaucugcggaucaacagagccucuaccagaacgccgacgcuuacguguucgugggcaccuccagauauagcaagaaauuuaagccugagauugccauccggccgaaaguccgcgaucaggaggggagaaugaauuacuauuggacgcugguugaacccggagacaagauuacauucgaggcuaccggcaaccugguggugccucgguacgccuuugcgauggaacgcaacgccgggucuggaaucauuaucuccgauacacccguccaugacugcaauaccaccugucaaacaccuaaaggcgcuaucaacacgagccuccccuuccagaauauucacccgaucaccauuggcaagugcccuaaguaugugaaaucuacaaagcugagacuugccaccgggcugcggaacguucccagcauccagucccgcggacucuuuggcgcuauugccggguucaucgagggaggcuggacagggaugguggacggaugguacggcuaucaucaccagaaugaacaaggcucuggguacgccgcugaucugaaaagcacccagaacgcgaucgacgagauuacgaauaaggucaacuccgugaucgagaaaaugaauacacaguuuaccgccguuggaaaggaguucaaccaccuugagaagagaauugaaaaucugaacaaaaagaucgaugacggcuuccucgauauuuggaccuacaaugcugagcugcuggugcuccugaaaaacgaacggacacuugacuaucaugauagcaaugucaagaaccuguacgagaaagugcgcucucagcucaagaacaaugccaaggagaucgggaacggauguuuugaguucuaucacaaaugcgacaauaccuguauggaauccgucaagaacggcacauacgauuauccuaaauacagcgaagaggccaagcugaauagagaagagaucgacggggugaaacuugagucuacgcggauuuaucaaauccuggcuauuuacuccaccguugccagcucccucgugcuggucgugucucugggcgcgaucagcuuuuggaugugcuccaacggaucucuccagugccgcauuuguaucuga

SEQ ID NO: 195138 - RNA, 1701 nt, Artificial Sequence; identical to SEQ ID NO: 194728
  derived and/or modified CDS sequence (opt5) from hemagglutinin__InfluenzaA__ACT79627

SEQ ID NO: 195139 - RNA, 1701 nt, Artificial Sequence
  derived and/or modified CDS sequence (opt5) from hemagglutinin__InfluenzaA__ACT82512
augaaggccauccuggugguccuccuguacaccuucgcuacagccaacgcggacacgcuuugcauuggcuaucacgcuaauaacagcaccgauacaguugacaccgugcuggagaaaaaugugacagucacccauuccgugaaccuccuggaagauaagcacaaugggaaacuuuguaagcugagaggaguugcuccccuccaucugggcaaaugcaacaucgccggguggauucugggaaauccugagugugaaucucucagcacagccuccucuuggagcuacaucguggagaccuccucuagcgacaacggcacgugcuauccgggggauuuuauugacuacgaagaacugcgggagcagcuuuccagcgucucuuccuucgaacgcuuugagaucuuccccaagaccagcucuuggccuaaucacgauuccaacaagggagugacagccgcuuguccccaugccggcgcgaaaucuuuuuauaagaaucugaucuggcucguuaaaaagggcaacagcuacccuaaacuguccaagagcuauauuaaugacaaggggaaagaagugcuuguccuguggggaauccaccaccccuccaccucugccgaucaacagagccucuaccagaacgcugacgccuacguguucgugggcacauccagauauagcaagaaauuuaagccugagauugcuauccggccgaaaguccgcgaucaggaggggagaaugaauuacuauuggacccugguugaacccggagacaagauuacguucgaggccacaggcaaccugguggugccucgguacgcguuugccauggaacgcaacgcugggucuggaaucauuaucuccgauacccccguccaugacugcaauacaaccugucaaaccccuaaaggcgccaucaacacaagccuccccuuccagaauauucacccgaucacgauuggcaagugcccuaaguaugugaaaucuaccaagcugagacuugcuacagggcugcggaacguucccagcauccagucccgcggacucuuuggcgccauugccggguucaucgagggaggcuggaccgggaugguggacggaugguacggcuaucaucaccagaaugaacaaggcucuggguacgcugcggaucugaaaagcacacagaacgccaucgacgagauuaccaauaaggucaacuccgugaucgagaaaaugaauacgcaguuuacagcuguuggaaaggaguucaaccaccuugagaagagaauugaaaaucugaacaaaaagguggaugacggcuuccucgauaucuggaccuacaaugccgagcugcugguccuccuggaaaacgagcggacccuugacuaucaugauagcaaugugaaaaaccuguacgagaagguccgcucucaguuuaaaaacaaugccaaggaaauugggaacggauguuucgaguuuuaucacaagugcgacaauacauguauggaauccgugaaaaacggcaccuacgauuauccuaaguacagcgaggaagcuaaacucaauagagaggagaucgacgggguuaagcuggaaucuacacggaucuaucaaauucuugccaucuacuccacgguggcgagcucccugguccucgugguuucucugggcgcuauuagcuucuggaugugcuccaacggaucucugcagugccgcaucuguauuuga

SEQ ID NO: 195140 - RNA, 1701 nt, Artificial Sequence; identical to SEQ ID NO: 194741
  derived and/or modified CDS sequence (opt5) from hemagglutinin__InfluenzaA__ACT82513

SEQ ID NO: 195141 - RNA, 1701 nt, Artificial Sequence
  derived and/or modified CDS sequence (opt5) from hemagglutinin__InfluenzaA__ACT82514
augaaggccauccuggugguccuccuguacaccuucgcuacagccaacgcggacacgcuuugcauuggcuaucacgcuaauaacagcaccgauacaguugacaccgugcuggagaagaaugugacagucacccauuccgugaaccuccuggaagauaagcacaaugggaaacuuuguaagcugagaggaguugcuccccuccaucugggcaaaugcaacaucgccggguggauucugggaaauccugagugugaaucucucagcacagccuccucuuggagcuacaucguggagaccuccucuagcgacaacggcacgugcuauccgggggauuuuauugacuacgaagaacugcgggagcagcuuuccagcgucucuuccuucgaacgcuuugagaucuuccccaagaccagcucuuggccuaaucacgauuccaacaagggagugacagccgcuuguccccaugccggcgcgaaaucuuuuuauaagaaucugaucuggcucguuaaaaagggcaacagcuacccuaaacuguccaagagcuauauuaaugacaaggggaaagaagugcuuguccuguggggaauccaccaccccuccaccucugccgaucaacagagccucuaccagaacgcugacgccuacguguucgugggcacauccagauauagcaagaaauuuaagccugagauugcuauccggccgaaaguccgcgaucaggaggggagaaugaauuacuauuggacccugguugaacccggagacaagauuacguucgaggccacaggcaaccugguggugccucgguacgcguuugccauggaacgcaacgcugggucuggaaucauuaucuccaauacccccguccaugauugcaacacaaccugucaaaccccuaaaggcagcaucaauacaucucuccccuuccagaacauucacccgaucacgauuggcaagugcccuaaguaugugaaaagcaccaagcugagacuugccacagggcugcggaauguucccuccauccagucucgcggacucuuuggcgcuauugccggguucaucgagggaggcuggaccgggaugguggacggaugguacggcuaucaucaccagaacgaacaaggcagcggguacgccgcugaccugaaauccacacagaaugcgaucgaugagauuaccaacaaggucaauagcgugaucgagaaaaugaacacgcaguuuacagccguuggaaaggaguucaaucaccuugagaagagaauugaaaaccugaauaaaaagguggacgauggcuuccucgacaucuggaccuacaacgcugagcugcugguccuccuggaaaaugagcggacccuugauuaucaugacucuaacgugaaaaaccuguacgagaagguccgcucccagcucaaaaauaacgccaaggaaauugggaauggauguuuugaguucuaucacaagugcgauaacacauguauggaaagcgugaaaaauggcaccuacgacuauccuaaguacucugaggaagccaaacugaacagagaggagaucgaugggguuaaacuugaauccacacggaucuaucaaauucuggcuaucuacagcacgguggccuccucucucguccuggugguuagccugggcgcgauuuccuuuuggaugugcucuaauggaagccuccagugccgcaucuguauuuga

SEQ ID NO: 195142 - RNA, 1701 nt, Artificial Sequence; identical to SEQ ID NO: 194741
  derived and/or modified CDS sequence (opt5) from hemagglutinin__InfluenzaA__ACT82515

SEQ ID NO: 195143 - RNA, 1701 nt, Artificial Sequence
  derived and/or modified CDS sequence (opt5) from hemagglutinin__InfluenzaA__ACT82516
augaaggccauccuggugguccuccuguacaccuucgcuacagccaacgcggacacgcuuugcauuggcuaucacgcuaauaacagcaccgauacaguugacaccgugcuggagaagaaugugacagucacccauuccgugaaccuccuggaagauaagcacaaugggaaacuuuguaagcugagaggaguugcuccccuccaucugggcaaaugcaacaucgccggguggauucugggaaauccugagugugaaucucucagcacagccuccucuuggagcuacaucguggagaccuccucuagcgacaacggcacgugcuauccgggggauuuuauugacuacgaagaacugcgggagcagcuuuccagcgucucuuccuucgaacgcuuugagaucuuccccaagaccagcucuuggccuaaucacgauuccaacaagggagugacagccgcuuguccccaugccggcgcgaaaucuuuuuauaagaaucugaucuggcucguuaaaaagggcaacagcuacccuaaacuguccaagagcuauauuaaugacaaggggaaagaagugcuuguccuguggggaauccaccaccccuccaccucugccgaucaacagagccucuaccagaacgcugacgccuacguguucgugggcuccagcagauauucuaagaaauuuaagccugagauugcuauccggccgaaaguccgcgaucaggaggggagaaugaauuacuauuggacacugguugaacccggagacaagauuaccuucgaggccacgggcaaccugauggugccucgguacgcguuugccauggaacgcaacgcuggguccggaaucauuaucagcgauacacccgugcaugacugcaauaccacaugucaaaccccuaaaggcgccaucaacaccucucuccccuuccacaauauucauccgaucacaauuggcaagugcccuaaguaugucaaaagcacgaagcugagacuugcuaccgggcugcggaacgugcccuccauccagucucgcggacucuuuggcgccauugccggguucaucgagggaggcuggacagggaugguugacggaugguacggcuaucaccaccagaaugaacagggcagcggguacgcugcggaucugaaauccacccaaaacgccaucgacgagauuacaaauaaggugaacagcgucaucgagaaaaugaauacccaguuuacggcugugggaaaggaguucaaccaucuugagaagagaauugaaaaucugaacaaaaagguugaugacggcuuccucgauaucuggacauacaaugccgagcugcuggugcuccuggaaaacgagcggacccuugacuaucacgauucuaaugucaaaaaccuguacgagaaggugcgcucccagcucaaaaacaaugccaaggaaauugggaacggauguuuugaguucuaucauaagugcgacaauaccuguauggaaagcgucaaaaacggcacauacgauuauccuaaguacucugaggaagcuaaacugaauagagaggagaucgacggggugaaacuugaauccacccggaucuaucagauucuggccaucuacagcacaguugcguccucucucgugcuggucgugagccugggcgcuauuuccuuuuggaugugcucuaacggaagccuccaaugccgcaucuguauuuga

SEQ ID NO: 195144 - RNA, 1701 nt, Artificial Sequence; identical to SEQ ID NO: 194983
  derived and/or modified CDS sequence (opt5) from hemagglutinin__InfluenzaA__ACT83795

SEQ ID NO: 195145 - RNA, 1701 nt, Artificial Sequence; identical to SEQ ID NO: 194983
  derived and/or modified CDS sequence (opt5) from hemagglutinin__InfluenzaA__ACT83805

SEQ ID NO: 195146 - RNA, 1701 nt, Artificial Sequence; identical to SEQ ID NO: 194741
  derived and/or modified CDS sequence (opt5) from hemagglutinin__InfluenzaA__ACT83815

SEQ ID NO: 195147 - RNA, 1701 nt, Artificial Sequence; identical to SEQ ID NO: 194741
  derived and/or modified CDS sequence (opt5) from hemagglutinin__InfluenzaA__ACT83825

SEQ ID NO: 195148 - RNA, 1701 nt, Artificial Sequence; identical to SEQ ID NO: 194741
  derived and/or modified CDS sequence (opt5) from hemagglutinin__InfluenzaA__ACT83835

SEQ ID NO: 195149 - RNA, 1701 nt, Artificial Sequence; identical to SEQ ID NO: 194834
  derived and/or modified CDS sequence (opt5) from hemagglutinin__InfluenzaA__ACT83845

SEQ ID NO: 195150 - RNA, 1701 nt, Artificial Sequence; identical to SEQ ID NO: 194728
  derived and/or modified CDS sequence (opt5) from hemagglutinin__InfluenzaA__ACT83855

SEQ ID NO: 195151 - RNA, 1701 nt, Artificial Sequence; identical to SEQ ID NO: 194741
  derived and/or modified CDS sequence (opt5) from hemagglutinin__InfluenzaA__ACT83865

SEQ ID NO: 195152 - RNA, 1701 nt, Artificial Sequence; identical to SEQ ID NO: 194983
  derived and/or modified CDS sequence (opt5) from hemagglutinin__InfluenzaA__ACT83875

SEQ ID NO: 195153 - RNA, 1701 nt, Artificial Sequence; identical to SEQ ID NO: 194983
  derived and/or modified CDS sequence (opt5) from hemagglutinin__InfluenzaA__ACT85999

SEQ ID NO: 195154 - RNA, 1701 nt, Artificial Sequence; identical to SEQ ID NO: 194983
  derived and/or modified CDS sequence (opt5) from hemagglutinin__InfluenzaA__ACT86009

SEQ ID NO: 195155 - RNA, 1701 nt, Artificial Sequence; identical to SEQ ID NO: 194741
  derived and/or modified CDS sequence (opt5) from hemagglutinin__InfluenzaA__ACT86019

SEQ ID NO: 195156 - RNA, 1701 nt, Artificial Sequence; identical to SEQ ID NO: 194834
  derived and/or modified CDS sequence (opt5) from hemagglutinin__InfluenzaA__ACT86029

SEQ ID NO: 195157 - RNA, 1701 nt, Artificial Sequence; identical to SEQ ID NO: 194741
  derived and/or modified CDS sequence (opt5) from hemagglutinin__InfluenzaA__ACT86039

SEQ ID NO: 195158 - RNA, 1701 nt, Artificial Sequence; identical to SEQ ID NO: 194741
  derived and/or modified CDS sequence (opt5) from hemagglutinin__InfluenzaA__ACT86059

SEQ ID NO: 195159 - RNA, 1701 nt, Artificial Sequence; identical to SEQ ID NO: 194741
  derived and/or modified CDS sequence (opt5) from hemagglutinin__InfluenzaA__ACT86069

SEQ ID NO: 195160 - RNA, 1701 nt, Artificial Sequence; identical to SEQ ID NO: 194741
  derived and/or modified CDS sequence (opt5) from hemagglutinin__InfluenzaA__ACT86079

SEQ ID NO: 195161 - RNA, 1701 nt, Artificial Sequence; identical to SEQ ID NO: 194741
  derived and/or modified CDS sequence (opt5) from hemagglutinin__InfluenzaA__ACT86089

SEQ ID NO: 195162 - RNA, 1701 nt, Artificial Sequence; identical to SEQ ID NO: 194741
  derived and/or modified CDS sequence (opt5) from hemagglutinin__InfluenzaA__ACT86099

SEQ ID NO: 195163 - RNA, 1701 nt, Artificial Sequence; identical to SEQ ID NO: 194983
  derived and/or modified CDS sequence (opt5) from hemagglutinin__InfluenzaA__ACT86109

SEQ ID NO: 195164 - RNA, 1701 nt, Artificial Sequence; identical to SEQ ID NO: 194741
  derived and/or modified CDS sequence (opt5) from hemagglutinin__InfluenzaA__ACT86119

SEQ ID NO: 195165 - RNA, 1701 nt, Artificial Sequence; identical to SEQ ID NO: 194983
  derived and/or modified CDS sequence (opt5) from hemagglutinin__InfluenzaA__ACT86129

SEQ ID NO: 195166 - RNA, 1701 nt, Artificial Sequence; identical to SEQ ID NO: 194741
  derived and/or modified CDS sequence (opt5) from hemagglutinin__InfluenzaA__ACT86139

SEQ ID NO: 195167 - RNA, 1701 nt, Artificial Sequence
  derived and/or modified CDS sequence (opt5) from hemagglutinin__InfluenzaA__ACU00932
augaaggccauccuggugguccuccuguacaccuucgcuacagccaacgcggacacgcuuugcauuggcuaucacgcuaauaacagcaccgauacaguugacaccgugcuggagaaaaaugugacagucacccauuccgugaaccuccuggaagauaagcacaaugggaaacuuuguaagcugagaggaguugcuccccuccaucugggcaaaugcaacaucgccggguggauucugggaaauccugagugugaaucucucagcacagccuccucuuggagcuacaucguggagaccuccucuagcgacaacggcacgugcuauccgggggauuuuauugacuacgaagaacugcgggagcagcuuuccagcgucucuuccuucgaacgcuuugagaucuuccccaagaccagcucuuggccuaaucacgauuccaacaagggagugacagccgcuuguccccaugccggcgcgaaaucuuuuuauaagaaucugaucuggcucguuaaaaagggcaacagcuacccuaaacuguccaagagcuauauuaaugacaaggggaaagaagugcuuguccuguggggaauccaccaccccuccaccucugccgaucaacagagccucuaccagaacgcugacgccuacguguucgugggcacauccagauauagcaagaauuuuaaaccugagauugcuauccggccgaagguccgcgaucaggaggggagaaugaacuacuauuggacccugguugaacccggagacaaaauuacguucgaggccacaggcaaccugguggugccucgguacgcguuugccauggaacgcaaugcugggucuggaaucauuaucuccgauacccccguccaugacugcaacacaaccugucaaaccccuaagggcgccaucaauacaagccuccccuuccagaacauucacccgaucacgauuggcaaaugcccuaaguaugugaagucuaccaaacugagacuugcuacagggcugcggaauguucccagcauccagucccgcggacucuuuggcgccauugccggguucaucgagggaggcuggaccgggaugguggacggaugguacggcuaucaucaccagaacgaacaaggcucuggguacgcugcggaucuuaagagcacacagaaugccaucgacgagauuaccaacaaagucaauuccgugaucgagaagaugaacacgcaguuuacagcuguuggaaaagaguucaaucaccuggagaagagaauugaaaaccugaauaagaaaguggaugacggcuuccucgauaucuggaccuacaacgccgagcugcugguccuccuggaaaaugagcggacccuugacuaucaugauagcaacgugaagaaccuguacgagaaaguccgcucucagcucaagaauaacgccaaagaaauugggaauggauguuuugaguucuaucacaagugcgacaacacauguauggaauccgugaagaauggcaccuacgauuauccuaaauacagcgaggaagcuaagcugaacagagaggagaucgacgggguuaaacuugaaucuacacggaucuaucaaauucuggccaucuacuccacgguggcgagcucccucguccuggugguuucucugggcgcuauuagcuuuuggaugugcuccaauggaucucuccagugccgcaucuguauuuga

SEQ ID NO: 195168 - RNA, 1701 nt, Artificial Sequence; identical to SEQ ID NO: 194741
  derived and/or modified CDS sequence (opt5) from hemagglutinin__InfluenzaA__ACU00942

SEQ ID NO: 195169 - RNA, 1701 nt, Artificial Sequence; identical to SEQ ID NO: 194741
  derived and/or modified CDS sequence (opt5) from hemagglutinin__InfluenzaA__ACU00952

SEQ ID NO: 195170 - RNA, 1701 nt, Artificial Sequence
  derived and/or modified CDS sequence (opt5) from hemagglutinin__InfluenzaA__ACU12494
augaagaccaucauugcccugagcuacauccucugccugguguucgcucagaaacuucccggcaacgacaauuccacagccacgcugugucucgggcaccaugcggucccuaacggaacccugguuaagacaauuaccaaugaucaaaucgaggugacaaacgcuaccgaacuugugcagucuagcuccacaggcagaauuugcgacucuccgcaccggauccuggaugggaaaaauuguacccucaucgacgcccugcugggagauccccauugcgacggcuuucagaacaaggagugggaucucuucgucgaacgcagcaaagccuauuccaauuguuacccuuaugacgugcccgauuacgcuucucugagaagccuuguugccuccagcgggacgcuggaguuuauuaacgaagacuucaauuggaccggaguggcucagucuggcgaguccuaugccugcaagcggggcagcgucaagucuuucuucucccgccucaacuggcugcacgagagcgauuacaaauauccugcgcuuaaugugacaaugcccaacaaugggaaguuugacaaacuguacaucuggggaguucaucacccuauuaccgauagagaacaaacaucucucuacgugcgggccuccggccgcgucaccgugagcacgaagagaucccagcagacagugaucccgaacauugggucucggcccuggguccgcggacugagcuccagaaucagcauuuauuggaccaucguuaaaccuggcgacauccugcucauuaauucuacagggaaccugaucgcuccccggggauacuucaagauucgcaccggcaaguccagcaucaugagaucugacgccccuauuggcaccuguagcuccgagugcaucacacccaacgggucuaucccgaaugauaaaccuuuucagaacgugaaucggauuacguauggagcuuguccccgcuacgugaagcaaaacacccuuaaacuggccacaggcaugagaaaugucccugaaaagcagacccgggggaucuucggagcgauugccggcuuuaucgagaacgggugggagggaaugguggacggcugguauggcuucagacaccagaauagcgaagggacaggacaggcugccgaucucaaauccacccaagcugccauugaccagaucaacggcaagcugaaucgccuuaucgagaaaacgaacgaaaaguuucaucagauugagaaggaauuuagcgagguugaggggcggauccaagaucuggaaaaauacguggaggacacaaagauugaucucuggucuuauaaugccgaacugcuggucgcucucgagaaccagcacaccaucgaccugaccgauuccgaaaugaauaaacuuuucgagaagacaagaaaacagcugcgcgagaacgcggaagacaugggaaauggcugcuuuaagauuuaccauaagugugauaacgccugcaucgggagcauucggaacggcaccuacgaccacgacguguauagagaugaggcucucaauaaccgcuuccagaucaaaggaguugaacugaagucuggcuacaaagacuggauccuuuggauuuccuuugccaucagcugcuuccugcucugugugguccugcugggguuuauuaugugggccugccaaaagggaaauauccgguguaacauuugcaucuga

SEQ ID NO: 195171 - RNA, 1698 nt, Artificial Sequence; identical to SEQ ID NO: 194853
  derived and/or modified CDS sequence (opt5) from hemagglutinin__InfluenzaA__ACU12505

SEQ ID NO: 195172 - RNA, 1701 nt, Artificial Sequence
  derived and/or modified CDS sequence (opt5) from hemagglutinin__InfluenzaA__ACU12516
augaagaccaucauugcccugagcuacauccucugccugguguucgcucagaaacuucccggcaacgacaauuccacagccacgcugugucucgggcaccaugcggucccuaacggaaccauuguuaagacaaucaccaaugaucaaauugaggugacaaacgcuaccgaacuggugcagucuagcuccacaggcgggaucugcgacucuccgcaccagauccuugauggagagaauuguacccuggucgacgcccuccugggcgauccccagugcgacggguuucaaaacaaaaagugggaucuguucguggaaagaagcaaagccuauuccaauuguuacccuuaugacguucccgauuacgcuucucuccggagccugguggccuccagcggaacgcuugaguuuaacaaugaaucuuucaacuggaccggcgucacacagaauggcaccuccagcgcuugcaagcgcagaucuaacaauuccuuuuucagccggcugaacuggcucacacaucugaaguuuaaauauccugcccuuaaugugaccaugcccaacaacgagaaguucgacaaacuguacauuuggggaguucaccauccugggacggauaaugaccagaucucucucuaugcgcaggccuccggccgcauuacagugagcaccaagagaucccaacagacagucaucccgaacauugggucucggccccgcgugagagauaucagcucccggauuagcaucuacuggaccaucgugaaaccuggagacauucugcugaucaauucuaccggcaaccucauugcuccccgcggguacuuuaagaucagauccggaaagagcucuauuaugcggagcgacgccccuaucggcaaauguaauuccgagugcaucacacccaacggcucuauuccgaaugauaagccuuuccagaacgucaaucgcaucacguauggggcuugucccagauacguuaaacagaacacccugaaacuugccacaggaaugcggaaugugccugaaacccaaacacgcggcauuuuuggggcgaucgccggauucauugagaacggcugggaagggaugguggacggaugguauggcuuuagacaccagaauagcgagggcaccgggcaggcugccgaucugaaguccacgcaagcugccaucaaccagaucaauggaaagcucaaccggcugauuggcaaaacaaacgagaaguuccaccagaucgaaaaggaguucagcgaagucgaggggcgcauucaggaccuugaaaaauacguggaggauaccaagaucgaccuguggucuuauaaugccgagcuccugguugcucuggaaaaccaacauaccauugaucucacagacuccgagaugaauaaacuguuugaaagaaccaagaaacagcuucgggagaacgcggaagauaugggaaauggcugcuucaagaucuaccacaagugugacaacgccugcauugggagcaucagaaauggcacauaugaucaugacguguaccgcgacgaggcucugaacaaucgguuucagaucaaaggagucgagcucaagucuggcuacaaagauuggauucuguggaucuccuucgccauuagcugcuuucuucuguguguggcccuccugggguucaucaugugggcuugccagaagggaaacauuagauguaauaucugcaucuga

SEQ ID NO: 195173 - RNA, 1701 nt, Artificial Sequence; identical to SEQ ID NO: 192702
  derived and/or modified CDS sequence (opt5) from hemagglutinin__InfluenzaA__ACU12527

SEQ ID NO: 195174 - RNA, 1701 nt, Artificial Sequence; identical to SEQ ID NO: 194444
  derived and/or modified CDS sequence (opt5) from hemagglutinin__InfluenzaA__ACU12538

SEQ ID NO: 195175 - RNA, 1701 nt, Artificial Sequence; identical to SEQ ID NO: 193640
  derived and/or modified CDS sequence (opt5) from hemagglutinin__InfluenzaA__ACU12549

SEQ ID NO: 195176 - RNA, 1698 nt, Artificial Sequence
  derived and/or modified CDS sequence (opt5) from hemagglutinin__InfluenzaA__ACU12560
augaaggugaaacugcucguccugcuuugcaccuucacagccacguacgcugacaccaucuguauuggcuaucacgccaacaauagcacagauaccguugacacagugcuggagaagaacgugaccgucacacauuccgugaaucuccuggaaaacucucacaaugggaaacuuugccugcucaagggaaucgcgccccugcagcugggcaacuguagcguugcuggguggauucucggaaauccugagugcgaacugcuuaucuccaaagagucuuggagcuacauuguggaaaagccgaaccccgagaauggcaccuguuauccugggcauuuugccgauuacgaggaacugagagagcaacucuccucugucagcuccuucgaacgguuugagaucuuccccaaggagagcucuuggccuaaccacacggugaccggaguuuccgccagcugcucucauaauggcgaauccagcuuuuaucgcaaccugcuuuggcugacaggcaaaaaugggcucuaccccaaccugucuaaguccuaugcuaauaacaaaggaaaggaggugcugguccucuggggcgugcaccacccuccgaacaucggggaccagaauacccuguaccauacagaaaacgccuacgugagcgucguuuccucucacuauagcagaaaauucacccccgagauugcuaagcggccuaaggugcgcgaucaggaaggaagaaucaauuacuauuggacgcuucuggagcccggcgacacaauuaucuuugaggccaacgggaaucucauugcgccucgguacgccuucgcucugucccgcggauuuggcagcggcaucauuaacucuaaugugcccauggauaaaugugacgccaagugccagaccccgcaaggggcuaucaacuccagccuuccuuuccagaauguccaucccgugacaaucggagaauguccuaaauauguuagaucugccaagcugcggauggugaccggccuccgcaacauucccagcauccaguccagagggcuguuuggagcgauugccggcuucaucgaagggggauggaccggcauggucgauggcugguacggguaucaccaccagaaugaacaaggaucuggcuacgcugccgaccagaaaagcacacagaacgcuauuaaugggaucacgaacaagguuaauuccgugaucgagaaaaugaacacccaguuuacagccgugggaaaggaguucaacaagcuggagcggcgcauggagaaucucaacaaaaaggucgaugacggcuucauugauaucuggaccuacaaugccgaacugcuugugcugcucgagaacgaaagaacacuggacuuucaugacagcaaugucaaaaaccuuuaugagaaggugaaaucucaacugaagaauaacgcuaaggaaauugggaauggcugcuucgaguuuuaccacaaauguaacgaugagugcauggaauccguuaagaauggaaccuaugacuaccccaaauauagcgaggaaucuaagcucaaccgggagaaaaucgauggcgugaagcuggaguccaugggggucuaccagauucuggcgaucuauagcacgguggccuccucucucguucugcuugugagccugggagcuaucuccuucuggaugugcucuaauggcagccuccagugucgcauuugcaucuga

SEQ ID NO: 195177 - RNA, 1698 nt, Artificial Sequence; identical to SEQ ID NO: 194560
  derived and/or modified CDS sequence (opt5) from hemagglutinin__InfluenzaA__ACU12571

SEQ ID NO: 195178 - RNA, 1698 nt, Artificial Sequence
  derived and/or modified CDS sequence (opt5) from hemagglutinin__InfluenzaA__ACU12582
augaaggugaaacugcucguccugcuuugcaccuucacagccacguacgcugacaccaucuguauuggcuaucacgccaacaauagcacagauaccguugacacagugcuggagaagaacgugaccgucacacauuccgugaaucuccuggaaaacucucacaaugggaaacuuugccugcucaagggaaucgcgccccugcagcugggcaacuguagcguugcuggguggauucucggaaauccugagugcgaacugcuuaucuccaaagagucuuggagcuacauuguggaaaagccgaaccccgagaauggcaccuguuauccugggagauuugccgauuacgaggaacugcgggagcaacucuccucugucagcuccuucgaacgcuuugagaucuuccccaaggagagcucuuggccuaaccauacggugaccggaguuuccgccagcugcucucacaauggcgaauccagcuuuuauagaaaccugcuuuggcugacaggcaaaaaugggcucuaccccaaccugucuaaguccuaugcuaauaacaaaggaaaggaggugcugguccucuggggcgugcaucacccuccgaacaucggggaccagaauacccuguaccacacagaaaacgccuacgugagcgucguuuccucucauuauagccggaaauucacccccgagauugcuaagcgcccuaaggugagagaucaggaaggacggaucaauuacuauuggacgcuucuggagcccggcgacacaauuaucuuugaggccaacgggaaucucauugcgccucgcuacgccuucgcucuguccagaggauuuggcagcggcaucauuaacucuaaugcccccauggauaaaugugacgcuaagugccagaccccgcaaggggccaucaacuccagccuuccuuuccagaaugugcaccccgucacaaucggagaauguccuaaauaugugcggucugcgaagcugcgcaugguuaccggccucagaaacauucccagcauccagucccgggggcuguuuggagccauugcuggcuucaucgaagggggauggaccggcaugguggauggcugguacggguaucaucaccagaaugaacaaggaucuggcuacgccgcugaccagaaaagcacacagaacgccauuaaugggaucacgaacaaggucaauuccgugaucgagaaaaugaacacccaguuuacagccguuggaaaggaguucaacaagcuggagcgcagaauggagaaucucaacaaaaagguggaugacggcuucauugauaucuggaccuacaaugcugaacugcuuguccugcucgagaacgaacggacacuggacuuucacgacagcaaugugaaaaaccuuuaugagaaggucaaaucucaacugaagaauaacgcgaaggaaauugggaauggcugcuucgaguuuuaccauaaauguaacgaugagugcauggaauccgugaagaauggaaccuaugacuaccccaaauauagcgaggaaucuaagcucaaccgcgagaaaaucgauggcguuaagcuggaguccauggggguguaccagauucuggccaucuauagcacggucgcuuccucucucgugcugcuuguuagccugggagccaucuccuucuggaugugcucuaauggcagccuccaguguagaauuugcaucuga

SEQ ID NO: 195179 - RNA, 1698 nt, Artificial Sequence
  derived and/or modified CDS sequence (opt5) from hemagglutinin__InfluenzaA__ACU12593
augaaggugaaacugcucguccugcuuugcaccuucacagccacguacgcugacaccaucuguauuggcuaucacgccaacaauagcacagauaccguugacacagugcuggagaagaacgugaccgucacacauuccgugaaucuccuggaaaacucucacaaugggaaacuuugccugcucaagggaaucgcgccccugcagcugggcaacuguagcguugcuggguggauucucggaaauccugagugcgaacugcuuaucuccaaagagucuuggagcuacauuguggaaaagccgaaccccgagaauggcaccuguuauccugggcauuuugccgauuacgaggaacugagagagcaacucuccucugucagcuccuucgaacgguuugagaucuuccccaaggagagcucuuggccuaaccacacggugaccggaguuuccgccagcugcucucauaauggcgaauccagcuuuuaucgcaaccugcuuuggcugacaggcaaaaaugggcucuaccccaaccugucuaaguccuaugcuaauaacaaagagaaggaagugcugguccucuggggagugcaccacccuccgaacaucguggaccagaaaacccuguacagaacagagaaugccuacgucagcguuguguccucucauuauagccggaaguucacccccgaaauugcuaagcgcccuaaagugagagaucaggagggccggaucaacuacuauuggacgcuucuggagcccggggacacaauuaucuuugaagccaauggaaaccucauugcgccucgcuacgccuucgcucuguccagaggcuuugggagcggaaucauuaauucuaacgcccccauggauaagugugacgcuaaaugccagaccccgcaaggcgccaucaauuccagccuuccuuuccagaacguccaccccgugacaaucggcgaguguccuaaguauguucggucugcgaaacugcgcauggugaccgggcucagaaauauucccagcauccagucccggggacuguuuggcgccauugcuggguucaucgaaggaggcuggaccgggauggucgauggaugguacggcuaucaucaccagaacgagcaaggcucuggguacgccgcugaccagaaguccacacagaaugccauugauggaaucacgaacaaagugaauagcguuaucgaaaagaugaacacccaguuuacagccgugggcaaggaguucaauaaacuggagcgcagaauggaaaaccucaacaagaaagucgacgauggguucauugacaucuggaccuacaaugcugagcugcuugugcugcucgaaaacgagcggacacuggacuuucacgauagcaaugucaagaaccuuuaugaaaaagugaagucucaacugaagaauaacgcgaaagagauuggaaauggcugcuucgaguuuuaccauaaguguaacgacgaaugcauggaguccguuaaaaaugggaccuaugauuaccccaaguauagcgaagagucuaaacucaaccgcgagaagaucgacggcauuaagcuggaauccaugggaguguaccagauccuggccaucuauagcacggucgcuuccucucucgugcugcuuguuagccugggcgccauuuccuucuggaugugcucuaaugggagccuccaguguagaaucugcauuuga

SEQ ID NO: 195180 - RNA, 1701 nt, Artificial Sequence; identical to SEQ ID NO: 194741
  derived and/or modified CDS sequence (opt5) from hemagglutinin__InfluenzaA__ACU13090

SEQ ID NO: 195181 - RNA, 1701 nt, Artificial Sequence; identical to SEQ ID NO: 194741
  derived and/or modified CDS sequence (opt5) from hemagglutinin__InfluenzaA__ACU13091

SEQ ID NO: 195182 - RNA, 1701 nt, Artificial Sequence; identical to SEQ ID NO: 194741
  derived and/or modified CDS sequence (opt5) from hemagglutinin__InfluenzaA__ACU13092

SEQ ID NO: 195183 - RNA, 1701 nt, Artificial Sequence; identical to SEQ ID NO: 194741
  derived and/or modified CDS sequence (opt5) from hemagglutinin__InfluenzaA__ACU13093

SEQ ID NO: 195184 - RNA, 1701 nt, Artificial Sequence
  derived and/or modified CDS sequence (opt5) from hemagglutinin__InfluenzaA__ACU13094
augaaggccauccuggugguccuccuguacaccuucgcuacagccaacgcggacacgcuuugcauuggcuaucacgcuaauaacagcaccgauacaguugacaccgugcuggagaagaaugugacagucacccauuccgugaaccuccuggaagauaagcacaaugggaaacuuuguaagcugagaggaguugcuccccuccaucugggcaaaugcaacaucgccggguggauucugggaaauccugagugugaaucucucagcacagccuccucuuggagcuacaucguggagaccuccucuagcgacaacggcacgugcuauccgggggauuuuauugacuacgaagaacugcgggagcagcuuuccagcgucucuuccuucgaacgcuuugagaucuuccccaagaccagcucuuggccuaaucacgauuccaacaagggagugacagccgcuuguccccaugccggcgcgaaaucuuuuuauaagaaucugaucuggcucguuaaaaagggcaacagcuacccuaaacuguccaagagcuauauuaaugacaaggggaaagaagugcuuguccuguggggaauccaccaccccuccaccucugccgaucaacagagccucuaccagaacgcugacgccuacguguucgugggcuccagcagauauucuaagaaauuuaagccugagauugcuauccggccgaaaguccgcgggcaggagggaagaaugaauuacuauuggacacugguugaacccggcgauaagauuaccuucgaggccacggggaaccugguggugccucgguacgcguuugccauggaacgcaacgcuggauccggcaucauuaucagcgacacacccguccaugauugcaauaccacaugucaaaccccuaaaggcgccaucaacaccucucuccccuuccagaauauucacccgaucacaauugggaagugcccuaaguaugugaaaagcacgaagcugagacuugcuaccggacugcggaacguucccuccauccagucucgcggccucuuuggggccauugccggauucaucgagggcggguggacaggaaugguggacggcugguacggcuaucaucaccagaaugaacaagggagcggauacgcugcggaccugaaauccacccagaacgccaucgaugagauuacaaauaaggucaacagcgugaucgagaaaaugaauacccaguuuacggcuguuggcaaggaguucaaccaccuugagaagagaauugaaaaucugaacaaaaagguggacgauggguuccucgacaucuggacauacaaugccgagcugcugguccuccuggaaaacgagcggacccuugauuaucaugacucuaaugugaaaaaccuguacgagaagguccgcucccagcucaaaaacaaugccaaggaaauuggaaacggcuguuuugaguucuaucacaagugcgauaauaccuguauggaaagcgugaaaaacgggacauacgacuauccuaaguacucugaggaagcuaaacugaauagagaggagaucgauggcguuaaacuugaauccacccggaucuaucaaauucuggccaucuacagcacaguggcguccucucucguccuggugguuagccugggagcuauuuccuuuuggaugugcucuaacggcagccuccagugccgcaucuguauuuga

SEQ ID NO: 195185 - RNA, 1701 nt, Artificial Sequence; identical to SEQ ID NO: 194741
  derived and/or modified CDS sequence (opt5) from hemagglutinin__InfluenzaA__ACU13095

SEQ ID NO: 195186 - RNA, 1701 nt, Artificial Sequence
  derived and/or modified CDS sequence (opt5) from hemagglutinin__InfluenzaA__ACU13096
augaaggccauccuggugguccuccugcacaccuucgcuacagccaacgcggacacgcuuugcauuggcuaccaugcuaauaacagcaccgauacaguugacaccgugcuggagaaaaaugugacagucacccacuccgugaaccuccuggaagauaagcauaaugggaaacuuuguaagcugagaggaguugcuccccuccaccugggcaaaugcaacaucgccggguggauucugggaaauccugagugugaaucucucagcacagccuccucuuggagcuauaucguggagaccuccucuagcgacaacggcacgugcuacccgggggauuuuauugacuaugaagaacugcgggagcagcuuuccagcgucucuuccuucgaacgcuuugagaucuuccccaagaccagcucuuggccuaaucaugauuccaacaagggagugacagccgcuuguccccacgccggcgcgaaaucuuuuuacaagaaucugaucuggcucguuaaaaagggcaacagcuauccuaaacuguccaagagcuacauuaaugacaaggggaaagaagugcuuguccuguggggaauccaccaucccuccaccucugccgaucaacagagccucuaucagaacgcugacgccuacguguucgugggcuccagcagauacucuaagaaauuuaagccugagauugcuauccggccgaaaguccgcgaucaggaggggagaaugaauuauuacuggacacugguugaacccggagacaagauuaccuucgaggccacgggcaaccugguggugccucgguaugcguuugccauggaacgcaacgcuggguccggaaucauuaucagcgauacacccguccacgacugcaauaccacaugucaaaccccuaaaggcgccaucaacaccucucuccccuuccagaauauucauccgaucacaauuggcaagugcccuaaguacgugaaaagcacgaagcugagacuugcuaccgggcugcggaacguucccuccauccagucucgcggacucuuuggcgccauugccggguucaucgagggaggcuggacagggaugguggacggaugguauggcuaccaccaccagaaugaacaaggcagcggguaugcugcggaucugaaauccacccagaacgccaucgacgagauuacaaauaaggucaacagcgugaucgagaaaaugaauacccaguuuacggcuguuggaaaggaguucaaccaucuugagaagagaauugaaaaucugaacaaaaagguggaugacggcuuccucgauaucuggacauacaaugccgagcugcugguccuccuggaaaacgagcggacccuugacuaccacgauucuaaugugaaaaaccuguaugagaagguccgcucccagcucaaaaacaaugccaaggaaauugggaacggauguuuugaguucuaccauaagugcgacaauaccuguauggaaagcgugaaaaacggcacauaugauuacccuaaguauucugaggaagcuaaacugaauagagaggagaucgacgggguuacccuugaauccacacggaucuaccaaauucuggccaucuauagcacgguggcguccucucucguccuggugguuagccugggcgcuauuuccuuuuggaugugcucuaacggaagccuccagugccgcaucuguauuuga

SEQ ID NO: 195187 - RNA, 1701 nt, Artificial Sequence; identical to SEQ ID NO: 194741
  derived and/or modified CDS sequence (opt5) from hemagglutinin__InfluenzaA__ACU13098

SEQ ID NO: 195188 - RNA, 1701 nt, Artificial Sequence
  derived and/or modified CDS sequence (opt5) from hemagglutinin__InfluenzaA__ACU13099
augaaggccauccuggugguccuccuguacaccuucgcuacagccaacgcggacacgcuuugcauuggcuaucacgcuaauaacagcaccgauacaguugacaccgugcuggagaaaaaugugacagucacccauuccgugaaccuccuggaagauaagcacaaugggaaacuuuguaagcugagaggaguugcuccccuccaucugggcaaaugcaacaucgccggguggauucugggaaauccugagugugaaucucucagcacagccuccucuuggagcuacaucguggagaccuccucuagcgacaacggcacgugcuauccgggggauuuuauugacuacgaagaacugcgggagcagcuuuccagcgucucuuccuucgaacgcuuugagaucuuccccaagaccagcucuuggccuaaucacgauuccaacaagggagugacagccgcuuguccccaugccggcgcgaaaucuuuuuauaagaaucugaucuggcucguuaaaaagggcaacagcuacccuaaacuguccaagagcuauauuaaugacaaggggaaagaagugcuuguccuguggggaauccaccaccccuccaccucugccgaucaacagagccucuaccagaacgcugacgccuacguguucgugggcacauccagauauagcaagaaauuuaagccugagauugcuauccggccgaaaguccgcgagcaggaagggagaaugaauuacuauuggacccugguugagcccggagauaagauuacguucgaagccacaggcaaccugguggugccucgguacgcguuugccauggagcgcaacgcugggucuggaaucauuaucuccgacacccccguccaugauugcaauacaaccugucaaaccccuaaaggcgccaucaacacaagccuccccuuccagaauauucacucuaucacgauuggcaagugcccgaaguaugugaaaagcaccaagcugagacuugcuacagggcugcggaacguuccuuccauccagucucgcggacucuuuggcgccauugccggguucaucgaaggaggcuggaccgggaugguggacggaugguacggcuaucaucaccagaaugagcaaggcagcggguacgcugcggaccugaaauccacacagaacgccaucgaugagauuaccaauaaggucaacagcgugaucgaaaagaugaauacgcaguuuacagcuguuggaaaggaguucaaccaccuugaaaagagaauugagaaucugaacaaaaagguggacgauggcuuccucgacaucuggaccuacaaugccgaacugcugguccuccuggagaacgagcggacccuugauuaucaugacucuaaugugaaaaaccuguacgaaaagguccgcucccagcucaaaaacaaugccaaggagauugggaacggauguuuugaguucuaucacaagugcgauaauacauguauggagagcgugaaaaacggcaccuacgacuaucccaaguacucugaagaggcuaaacugaauagagaggaaaucgaugggguuaaacuugaguccacacggaucuaucaaauucuggccaucuacagcacgguggcguccucucucguccuggugguuagccugggcgcuauuuccuuuuggaugugcucuaacggaagccuccagugccgcaucuguauuuga

SEQ ID NO: 195189 - RNA, 1701 nt, Artificial Sequence
  derived and/or modified CDS sequence (opt5) from hemagglutinin__InfluenzaA__ACU13129
augaaggccauccuggugguccuccuguacaccuucgcuacagccaacgcggacacgcuuugcauuggcuaucacgcuaauaacagcaccgauacaguugacaccgugcuggagaaaaaugugacagucacccauuccgugaaccuccuggaagauaagcacaaugggaaacuuuguaagcugagaggaguugcuccccuccaucugggcaaaugcaacaucgccggguggauucugggaaauccugagugugaaucucucagcacagccuccucuuggagcuacaucguggagaccuccucuagcgacaacggcacgugcuauccgggggauuuuauugacuacgaagaacugcgggagcagcuuuccagcgucucuuccuucgaacgcuuugagaucuuccccaagaccagcucuuggccuaaucacgauuccaacaagggagugacagccgcuuguccccaugccggcgcgaaaucuuuuuauaagaaucugaucuggcucguuaaaaagggcaacagcuacccuaaacuguccaagagcuauauuaaugacaaggggaaagaagugcuuguccuguggggaauccaccaccccuccaccucugccgaucaacagagccucuaccagaacgcugacgccuacguguucgugggcacauccagauauagcaagaaauuuaagccugagauugcuauccggccgaaaguccgcgagcaggaagggagaaugaauuacuauuggacccugguugagcccggagauaagauuacguucgaagccacaggcaaccugguggugccucgguacgcguuugccauggagcgcaacgcugggucuggaaucauuaucuccgacacccccguccaugauugcaauacaaccugucaaaccccuaaaggcgccaucaacacaagccuccccuuccagaauauucacccgaucacgauuggcaagugcccuaaguaugugaaaucuaccaagcugagacuugcuacagggcugcggaacguucccagcauccagucccgcggacucuuuggcgccauugccggguucaucgaaggaggcuggaccgggaugguggacggaugguacggcuaucaucaccagaaugagcaaggcucuggguacgcugcggaccugaaaagcacacagaacgccaucgaugagauuaccaauaaggucaacuccgugaucgagaaaaugaauacgcaguuuacagcuguuggagaggaguucaaccaccuugaaaagagaauugaaaaucugaacaagaaaguggacgauggcuuccucgacaucuggaccuacaaugccgagcugcugguccuccuggagaacgaacggacccuugauuaucaugacagcaaugugaagaaccuguacgagaaaguccgcucucagcucaagaacaaugccaaagaaauugggaacggauguuuugaguucuaucacaagugcgauaauacauguauggaauccgugaagaacggcaccuacgacuauccuaaauacagcgaggaggcuaagcugaauagagaagagaucgaugggguuaaacuugaaucuacacggaucuaucaaauucuggccaucuacuccacgguggcgagcucccucguccuggugguuucucugggcgcuauuagcuuuuggaugugcuccaacggaucucuccagugccgcaucuguauuuga

SEQ ID NO: 195190 - RNA, 1701 nt, Artificial Sequence; identical to SEQ ID NO: 194741
  derived and/or modified CDS sequence (opt5) from hemagglutinin__InfluenzaA__ACU16795

SEQ ID NO: 195191 - RNA, 1701 nt, Artificial Sequence; identical to SEQ ID NO: 194741
  derived and/or modified CDS sequence (opt5) from hemagglutinin__InfluenzaA__ACU16858

SEQ ID NO: 195192 - RNA, 1701 nt, Artificial Sequence; identical to SEQ ID NO: 194741
  derived and/or modified CDS sequence (opt5) from hemagglutinin__InfluenzaA__ACU16930

SEQ ID NO: 195193 - RNA, 1701 nt, Artificial Sequence; identical to SEQ ID NO: 194741
  derived and/or modified CDS sequence (opt5) from hemagglutinin__InfluenzaA__ACU16993

SEQ ID NO: 195194 - RNA, 1701 nt, Artificial Sequence; identical to SEQ ID NO: 194741
  derived and/or modified CDS sequence (opt5) from hemagglutinin__InfluenzaA__ACU17059

SEQ ID NO: 195195 - RNA, 1701 nt, Artificial Sequence; identical to SEQ ID NO: 194741
  derived and/or modified CDS sequence (opt5) from hemagglutinin__InfluenzaA__ACU17126

SEQ ID NO: 195196 - RNA, 1701 nt, Artificial Sequence; identical to SEQ ID NO: 194832
  derived and/or modified CDS sequence (opt5) from hemagglutinin__InfluenzaA__ACU17187

SEQ ID NO: 195197 - RNA, 1701 nt, Artificial Sequence; identical to SEQ ID NO: 194741
  derived and/or modified CDS sequence (opt5) from hemagglutinin__InfluenzaA__ACU17258

SEQ ID NO: 195198 - RNA, 1701 nt, Artificial Sequence
  derived and/or modified CDS sequence (opt5) from hemagglutinin__InfluenzaA__ACU17389
auggaggccauccuggugguccuccuguacaccuucgcuacagccaacgcggacacgcuuugcauuggcuaucacgcuaauaacagcaccgauacaguugacaccgugcuggaaaagaaugugacagucacccauuccgugaaccuccuggaggauaaacacaaugggaaacuuuguaagcugagaggaguugcgccccuccaucugggcaagugcaacaucgccggguggauucugggaaauccugaaugugagucucucagcacagcuuccucuuggagcuacaucguggaaaccuccucuagcgacaacggcacgugcuauccgggggauuuuauugacuacgaggagcugcgggaacagcuuuccagcgucucuuccuucgagcgcuuugaaaucuuccccaaaaccagcucuuggccuaaucacgauuccaacaagggagugacagccgcuuguccccaugccggcgccaagagcuuuuauaaaaaucugaucuggcucguuaagaaaggcaacucuuacccuaagcuguccaaaagcuauauuaaugacaaggggaaggaggugcuuguccuguggggaauccaccaccccuccaccucugccgaucaacagagccucuaccagaacgcugacgccuacguguucgugggcuccagcagauauucuaaaaaguuuaaaccugagauugcuauccggccgaagguccgcgaucaggaagggagaaugaauuacuauuggacacugguugagcccggagacaaaauuaccuucgaagccacgggcaaccugguggugccucgguacgcguuugccauggagcgcaacgcuggguccggaaucauuaucagcgauacacccguccaugacugcaauaccgccugucaaacaccuaagggcgcuaucaacaccucucuccccuuccacaauauucauccgaucaccauuggcaaaugcccuaaguauguuaagagcacaaaacugagacuugccacggggcugcggaacgugcccuccauccagucucgcggacucuuuggcgccauugcuggguucaucgaaggaggcuggaccgggaugguggacggaugguacggcuaucaccaccagaaugagcagggcagcggguacgcggccgaucugaaguccacacaaaacgcuaucgacgagauuaccaauaaagucaacagcgugaucgaaaagaugaauacacaguuuaccgccguuggaaaagaguucaaccaucuugaaaagagaauugagaaucugaacaagaaaguggaugacggcuuccucgauaucuggacguacaaugccgaacugcugguccuccuggagaacgagcggacacuugacuaucacgauucuaaugugaagaaccuguacgaaaaaguccgcucccagcucaagaacaaugcuaaagagauugggaacggauguuuugaguucuaucauaagugcgacaauaccuguauggaaagcgugaagaacggcaccuacgauuauccuaaauacucugaagaggccaagcugaauagagaggaaaucgacgggguuaaacuugaguccacacggaucuaucagauucuggcgaucuacagcaccguggcuuccucucucguccuggugguuagccugggcgccauuuccuuuuggaugugcucuaacggaagccuccaaugccgcaucuguauuuga

SEQ ID NO: 195199 - RNA, 1701 nt, Artificial Sequence; identical to SEQ ID NO: 194741
  derived and/or modified CDS sequence (opt5) from hemagglutinin__InfluenzaA__ACU17450

SEQ ID NO: 195200 - RNA, 1701 nt, Artificial Sequence; identical to SEQ ID NO: 194741
  derived and/or modified CDS sequence (opt5) from hemagglutinin__InfluenzaA__ACU17521

SEQ ID NO: 195201 - RNA, 1701 nt, Artificial Sequence; identical to SEQ ID NO: 194728
  derived and/or modified CDS sequence (opt5) from hemagglutinin__InfluenzaA__ACU27041

SEQ ID NO: 195202 - RNA, 1698 nt, Artificial Sequence
  derived and/or modified CDS sequence (opt5) from hemagglutinin__InfluenzaA__ACU27406
augaaggugaaacugcucguccugcuuugcaccuucacagccacguacgcugacaccaucuguauuggcuaucacgccaacaauagcacagauaccguugacacagugcuggagaagaacgugaccgucacacauuccgugaaucuccuggaaaacucucacaaugggaaacuuugccugcucaagggaaucgcgccccugcagcugggcaacuguagcguugcuggguggauucucggaaauccugagugcgaacugcuuaucuccaaagagucuuggagcuacauuguggaaaagccgaaccccgagaauggcaccuguuauccugggcauuuugccgauuacgaggaacugagagagcaacucuccucugucagcuccuucgaacgguuugagaucuuccccaaggagagcucuuggccuaaccacacggugaccggaguuuccgccagcugcucucauaauggcgaauccagcuuuuaucgcaaccugcuuuggcugacaggcaaaaaugggcucuaccccaaccugucuaaguccuaugcuaauaacaaagagaaggaagugcugguccucuggggagugcaccacccuccgaacaucguggaccagaaaacccuguacagaacagagaaugccuacgucagcguuguguccucucauuauagccggaaguucacccccgaaauugcuaagcgcccuaaaaucagagaucaggagggccggauuaacuacuauuggacgcuucuggagcccggggacacaaucauuuuugaagccaauggaaaccucaucgcgccucgcuacgccuucgcucuguccagaggcuuugggagcggaauuaucaauucuaacgcccccauggauaagugugacgcuaaaugccagaccccgcaaggcgccaucaauuccagccuuccuuuccagaacgugcaccccgucacaauuggcgaguguccuaaguaugugcggucugcgaaacugcgcaugguuaccgggcucagaaauauccccagcauucagucccggggacuguuuggcgccaucgcuggguucauugaaggaggcuggaccgggaugguggauggaugguacggcuaucaucaccagaacgagcaaggcucuggguacgccgcugaccaaaagagcacacagaaugccaucaacggaaucacgaauaaagucaacuccgugauugaacgcaugaauacccaguuuacagccguuggcaaggaguucaacaagcuggagagacggauggaaaaccucaauaaaaagguggaugacggguucaucgauauuuggaccuacaacgcugagcugcuuguccugcucgaaaaugagcgcacacuggacuuucacgacagcaacgugaaaaaucuuuaugaaaaggucaaaucucagcugaagaacaaugcgaaggagaucggaaacggcugcuucgaguuuuaccauaaauguaaugaugaaugcauggaguccgugaagaacgggaccuaugacuaccccaaauauagcgaagagucuaagcucaauagagagaaaauugauggcguuaagcuggaauccaugggaguguaccagauccuggccaucuauagcacggucgcuuccucucucgugcugcuuguuagccugggcgccauuuccuucuggaugugcucuaacgggagccuccagugucggaucugcauuuga

SEQ ID NO: 195203 - RNA, 1698 nt, Artificial Sequence
  derived and/or modified CDS sequence (opt5) from hemagglutinin__InfluenzaA__ACU27407
augaaggugaaacugcucguccugcuuugcaccuucacagccacguacgcugacaccaucuguauuggcuaucacgccaacaauagcacagauaccguugacacagugcuggagaagaacgugaccgucacacauuccgugaaucuccuggaaaacucucacaaugggaaacuuugccugcucaagggaaucgcgccccugcagcugggcaacuguagcguugcuggguggauucucggaaauccugagugcgaacugcuuaucuccaaagagucuuggagcuacauuguggaaaagccgaaccccgagaauggcaccuguuauccugggcauuuugccgauuacgaggaacugagagagcaacucuccucugucagcuccuucgaacgguuugagaucuuccccaaggagagcucuuggccuaaccacacggugaccggaguuuccgccagcugcucucauaauggcgaauccagcuuuuaucgcaaccugcuuuggcugacaggcaaaaaugggcucuaccccaaccugucuaaguccuaugcuaauaacaaagagaaggaagugcugguccucuggggagugcaccacccuccgaacaucguggaccagaaaacccuguacagaacagagaaugccuacgucagcguuguguccucucauuauagccggaaguucacccccgaaauugcuaagcgcccuaaagugagagaucaggagggccggaucaacuacuauuggacgcuucuggagcccggggacacaauuaucuuugaagccaauggaaaccucauugcgccucgcuacgccuucgcucuguccagaggcuuugggagcggaaucauuaauucuaacgcccccauggauaagugugacgcuaaaugccagaccccgcaaggcgccaucaauuccagccuuccuuuccagaacguccaccccgugacaaucggcgaguguccuaaguauguucggucugcgaaacugcgcauggugaccgggcucagaaauauucccagcauccagucccggggacuguuuggcgccauugcuggguucaucgaaggaggcuggaccgggauggucgauggaugguacggcuaucaucaccagaacgagcaaggcucuggguacgccgcugaccaaaagagcacacagaaugccauuaacggaaucacgaauaaagugaacuccguuaucgaaaagaugaauacccaguuuacagccgugggcaaggaguucaacaaacuggagcgcagaauggaaaaccucaauaagaaagucgaugacggguucauugauaucuggaccuacaacgcugagcugcuugugcugcucgaaaaugagcggacacuggacuuucacgacagcaacgucaagaaucuuuaugaaaaagugaagucucagcugaagaacaaugcgaaagagauuggaaacggcugcuucgaguuuuaccauaaguguaaugaugaaugcauggaguccguuaaaaacgggaccuaugacuaccccaaguauagcgaagagucuaaacucaaucgcgagaagaucgauggcgugaagcuggaauccaugggagucuaccagauucuggccaucuauagcacgguggcuuccucucucguucugcuugugagccugggcgccaucuccuucuggaugugcucuaacgggagccuccaguguagaauuugcaucuga

SEQ ID NO: 195204 - RNA, 1701 nt, Artificial Sequence; identical to SEQ ID NO: 194728
  derived and/or modified CDS sequence (opt5) from hemagglutinin__InfluenzaA__ACU29949

SEQ ID NO: 195205 - RNA, 1701 nt, Artificial Sequence
  derived and/or modified CDS sequence (opt5) from hemagglutinin__InfluenzaA__ACU29979
augaaggccauccuggugguccuccuguacaccuucgcugccgcgaacgcugacacacuuugcauuggcuaucacgccaauaacagcacggauaccguugacacagugcuggagaaaaaugugaccgucacacauuccgugaaccuccuggaagauaagcacaaugggaaacuuuguaagcugagaggaguugcuccccuccaucugggcaaaugcaacaucgccggguggauucugggaaauccugagugugaaucucucagcaccgccuccucuuggagcuacaucguggagacauccucuagcgacaacgggaccugcuauccgggcgauuuuauugacuacgaagaacugcgggagcagcuuuccagcgucucuuccuucgaacgcuuugagaucuuccccaagacgagcucuuggccuaaucacgauuccaacaagggagugaccgcugccuguccccaugcgggcgccaagagcuuuuauaagaaucugaucuggcucguuaaaaagggcaacucuuacccuaaacuguccaagagcuauauuaaugacaaggggaaagaagugcuuguccuguggggaauccaccaccccuccacaucugcugaucaacagagccucuaccagaacgccgacgcuuacguguucgugggcaccuccagauauagcaagaaauuuaagccugagauugccauccggccgaaaguccgcgaucaggaggggagaaugaauuacuauuggacacugguugaacccggagacaagauuaccuucgaggcgacgggcaaccugguggugccucgguacgccuuugcuauggaacgcaacgccgggucuggaaucauuaucuccgauacacccguccaugacugcaauaccacaugucaaaccccuaaaggcgcuaucaacaccagccuccccuuccagaauauucacccgaucacaauuggcaagugcccuaaguaugugaaaucuacgaagcugagacuugccaccgggcugcggaacguucccagcauccagucccgcggacucuuuggcgccauugcuggguucaucgagggaggcuggacagggaugguggacggaugguacggcuaucaucaccagaaugaacaaggcucuggguacgcggccgaucugaaaagcacccagaacgcuaucgacgagauuacaaauaaggucaacuccgugaucgagaaaaugaauacccaguuuacggccguuggaaaggaguucaaccaccuugagaagagaauugaaaaucugaacaaaaagguggaugacggcuuccucgauaucuggacauacaaugccgagcugcugguccuccuggaaaacgagcggacccuugacuaucaugauagcaaugugaaaaaccuguacgagaagguccgcucucagcucaaaaacaaugcuaaggaaauugggaacggauguuuugaguucuaucacaagugcgacaauaccuguauggaauccgugaaaaacggcacauacgauuauccuaaguacagcgaggaagccaaacugaauagagaggagaucgacgggguuaaacuugaaucuacccggaucuaucaaauucuggcgaucuacuccacaguggcuagcucccucguccuggugguuucucugggcgccauuagcuuuuggaugugcuccaacggaucucuccagugccgcaucuguauuuga

SEQ ID NO: 195206 - RNA, 1701 nt, Artificial Sequence; identical to SEQ ID NO: 194741
  derived and/or modified CDS sequence (opt5) from hemagglutinin__InfluenzaA__ACU29989

SEQ ID NO: 195207 - RNA, 1704 nt, Artificial Sequence
  derived and/or modified CDS sequence (opt5) from hemagglutinin__InfluenzaA__ACU29999
augaaggccauccuggugguccuccuguacaccuucgcuacagccaacgcggacacgcuuugcauuggcuaucacgcuaauaacagcaccgauacaguugacaccgugcuggagaagaaugugacagucacccauuccgugaaccuccuggaagauaagcacaaugggaaacuuuguaagcugagaggaguugcuccccuccaucugggcaaaugcaacaucgccggguggauucugggaaauccugagugugaaucucucagcacagccuccucuuggagcuacaucguggagaccuccucuagcgacaacggcacgugcuauccgggggauuuuauugacuacgaagaacugcgggagcagcuuuccagcgucucuuccuucgaacgcuuugagaucuuccccaagaccagcucuuggccuaaucacgauuccaacaagggagugacagccgcuuguccccaugccggcgcgaaaucuuuuuauaagaaucugaucuggcucguuaaaaagggcaacagcuacccuaaacuguccaagagcuauauuaaugacaaggggaaagaagugcuuguccuguggggaauccaccaccccuccaccucugccgaucaacagagccucuaccagaacgcugacgccuacguguucgugggcacauccagauauagcaagaaauuuaagccugagauugcuauccggccgaaaguccgcgaucaggaggggagaaugaauuacuauuggacccugguugaacccggagacaagauuacguucgaggccacaggcaaccugguggugccucgguacgcguuugccauggaacgcaacgcugggucuggaaucauuaucuccgauacccccguccaugacugcaauacaaccugucaaaccccuaaaggcgccaucaacacaagccuccccuuccagaauauucacccgaucacgauuggcaagugcccuaaguaugugaaaucuaccaagcugagacuugcuacagggcugcggaacguucccagcauccagucccgcggacucuuuggcgccauugccggguucaucgagggaggcuggaccgggaugguggacggaugguacggcuaucaucaccagaaugaacaaggcucuggguacgcugcggaucugaaaagcacacagaacgccaucgacgagauuaccaauaaggucaacuccgugaucgagaaaaugaauacgcaguuuacagcuguuggaaaggaguucaaccaccuugagaagagaauugaaaaucugaacaaaaagguggaugacggcuuccucgauaucuggaccuacaaugccgagcugcugguccuccuggaaaacgagcggacccuugacuaucaugauagcaaugugaaaaaccuguacgagaagguccgcucucagcucaaaaacaaugccaaggaaauugggaacggauguuuugaguucuaucacaagugcgacaauacauguauggaauccgugaaaaacggcaccuacgauuauccuaaguacagcgaggaagcuaaacugaauagagaggagaucgacgggguuaaacuugaaucuacacggaucuaucaaauucuggccaucuacuccacgguggcgagcucccucguccuggugguuucucugggcgcuauuagcuuuuggaugugcuccaacggaucucuccugcagugccgcaucuguauuuga

SEQ ID NO: 195208 - RNA, 1704 nt, Artificial Sequence
  derived and/or modified CDS sequence (opt5) from hemagglutinin__InfluenzaA__ACU30009
auggaggccauccuggugguccuccuguacaccuucgcuacagccaacgcggacacgcuuugcauuggcuaucacgcuaauaacagcaccgauacaguugacaccgugcuggaaaagaaugugacagucacccauuccgugaaccuccuggaggauaaacacaaugggaaacuuuguaagcugagaggaguugcgccccuccaucugggcaagugcaacaucgccggguggauucugggaaauccugaaugugagucucucagcacagcuuccucuuggagcuacaucguggaaaccuccucuagcgacaacggcacgugcuauccgggggauuuuauugacuacgaggagcugcgggaacagcuuuccagcgucucuuccuucgagcgcuuugaaaucuuccccaaaaccagcucuuggccuaaucacgauuccaacaagggagugacagccgcuuguccccaugccggcgccaagagcuuuuauaaaaaucugaucuggcucguuaagaaaggcaacucuuacccuaagcuguccaaaagcuauauuaaugacaaggggaaggaggugcuuguccuguggggaauccaccaccccuccaccucugccgaucaacagagccucuaccagaacgcugacgccuacguguucgugggcuccagcagauauucuaaaaaguuuaaaccugagauugcuauccggccgaagguccgcgaucaggaagggagaaugaauuacuauuggacacugguugagcccggagacaaaauuaccuucgaagccacgggcaaccugguggugccucgguacgcguuugccauggagcgcaacgcuggguccggaaucauuaucagcgauacacccguccaugacugcaauaccacaugucaaaccccuaagggcgccaucaacaccucucuccccuuccacaauauucauccgaucacaauuggcaaaugcccuaaguauguuaagagcacgaaacugagacuugcuaccgggcugcggaacgugcccuccauccagucucgcggacucuuuggcgccauugccggguucaucgaaggaggcuggacagggaugguggacggaugguacggcuaucaccaccagaaugagcagggcagcggguacgcugcggaucugaaguccacccaaaacgccaucgacgagauuacaaauaaagucaacagcgugaucgaaaagaugaauacccaguuuacggcuguuggaaaagaguucaaccaucuugaaaagagaauugagaaucugaacaagaaaguggaugacggcuuccucgauaucuggacauacaaugccgaacugcugguccuccuggagaacgagcggacccuugacuaucacgauucuaaugugaagaaccuguacgaaaaaguccgcucccagcucaagaacaaugccaaagagauugggaacggauguuuugaguucuaucauaagugcgacaauaccuguauggaaagcgugaagaacggcacauacgauuauccuaaauacucugaagaggcuaagcugaauagagaggaaaucgacgggguuaaacuugaguccacccggaucuaucagauucuggccaucuacagcacaguggcguccucucucguccuggugguuagccugggcgcuauuuccuuuuggaugugcucuggauacggcagccuccaaugccgcaucuguauuuga

SEQ ID NO: 195209 - RNA, 1701 nt, Artificial Sequence; identical to SEQ ID NO: 195101
  derived and/or modified CDS sequence (opt5) from hemagglutinin__InfluenzaA__ACU30019

SEQ ID NO: 195210 - RNA, 1701 nt, Artificial Sequence; identical to SEQ ID NO: 194921
  derived and/or modified CDS sequence (opt5) from hemagglutinin__InfluenzaA__ACU30093

SEQ ID NO: 195211 - RNA, 1701 nt, Artificial Sequence
  derived and/or modified CDS sequence (opt5) from hemagglutinin__InfluenzaA__ACU30103
augaaggccauccuggugguccuccuguacaccuucgcuacagccaacgcggacacgcuuugcauuggcuaucacgcuaauaacagcaccgauacaguugacaccgugcuggagaagaaugugacagucacccauuccgugaaccuccuggaagauaagcacaaugggaaacuuuguaagcugagaggaguugcuccccuccaucugggcaaaugcaacaucgccggguggauucugggaaauccugagugugaaucucucagcacagccuccucuuggagcuacaucguggagaccuccucuagcgacaacggcacgugcuauccgggggauuuuauugacuacgaagaacugcgggagcagcuuuccagcgucucuuccuucgaacgcuuugagaucuuccccaagaccagcucuuggccuaaucacgauuccaacaagggagugacagccgcuuguccccaugccggcgcgaaaucuuuuuauaagaaucugaucuggcucguuaaaaagggcaacagcuacccuaaacuguccaagagcuauauuaaugacaaggggaaagaagugcuuguccuguggggaauccaccaccccuccaccucugccgaucaacagagccucuaccagaacgcugacgccuacguguucgugggcacauccagauauagcaagaaauuuaagccugagauugcuauccggccgaaaguccgcgaucaggaggggagaaugaauuaccauuggacccugguugaacccggagacaagauuacguucgaggccacaggcaaccugguggugccucgguaugcguuugccauggaacgcaacgcugggucuggaaucauuaucuccgauacccccguccacgacugcaauacaaccugucaaaccccuaaaggcgccaucaacacaagccuccccuuccagaauauucauccgaucacgauuggcaagugcccuaaguacgugaaaucuaccaagcugagacuugcuacagggcugcggaacguucccagcauccagucccgcggacucuuuggcgccauugccggguucaucgagggaggcuggaccgggaugguggacggaugguauggcuaccaccaccagaaugaacaaggcucuggguaugcugcggaucugaaaagcacacagaacgccaucgacgagauuaccaauaaggucaacuccgugaucgagaaaaugaauacgcaguuuacagcuguuggaaaggaguucaaccaucuugagaagagaauugaaaaucugaacaaaaagguggaugacggcuuccucgauaucuggaccuacaaugccgagcugcugguccuccuggaaaacgagcggacccuugacuaccacgauagcaaugugaaaaaccuguaugagaagguccgcucucagcucaaaaacaaugccaaggaaauugggaacggauguuuugaguucuaccauaagugcgacaauacauguauggaauccgugaaaaacggcaccuaugauuacccuaaguauagcgaggaagcuaaacugaauagagaggagaucgacgggguuaaacuugaaucuacacggaucuaccaaauucuggccaucuauuccacgguggcgagcucccucguccuggugguuucucugggcgcuauuagcuuuuggaugugcuccaacggaucucuccagugccgcaucuguauuuga

SEQ ID NO: 195212 - RNA, 1704 nt, Artificial Sequence
  derived and/or modified CDS sequence (opt5) from hemagglutinin__InfluenzaA__ACU30112
auggaggccauccuggugguccuccuguacaccuucgcuacagccaacgcggacacgcuuugcauuggcuaucacgcuaauaacagcaccgauacaguugacaccgugcuggaaaagaaugugacagucacccauuccgugaaccuccuggaggauaaacacaaugggaaacuuuguaagcugagaggaguugcgccccuccaucugggcaagugcaacaucgccggguggauucugggaaauccugaaugugagucucucagcacagcuuccucuuggagcuacaucguggaaaccuccucuagcgacaacggcacgugcuauccgggggauuuuauugacuacgaggagcugcgggaacagcuuuccagcgucucuuccuucgagcgcuuugaaaucuuccccaaaaccagcucuuggccuaaucacgauuccaacaagggagugacagccgcuuguccccaugccggcgccaagagcuuuuauaaaaaucugaucuggcucguuaagaaaggcaacucuuacccuaagcuguccaaaagcuauauuaaugacaaggggaaggaggugcuuguccuguggggaauccaccaccccuccaccucugccgaucaacagagccucuaccagaacgcugacgccuacguguucgugggcuccagcagauauucuaaaaaguuuaaaccugagauugcuauccggccgaagguccgcgaucaggaagggagaaugaauuacuauuggacacugguugagcccggagacaaaauuaccuucgaagccacgggcaaccugguggugccucgguacgcguuugccauggagcgcaacgcuggguccggaaucauuaucagcgauacacccguccaugacugcaauaccacaugucaaaccccuaagggcgccaucaacaccucucuccccuuccacaauauucauccgaucacaauuggcaaaugcccuaaguauguuaagagcacgaaacugagacuugcuaccgggcugcggaacgugcccuccauccagucucgcggacucuuuggcgccauugccggguucaucgaaggaggcuggacagggaugguggacggaugguacggcuaucaccaccagaaugagcagggcagcggguacgcugcggaucugaaguccacccaaaacgccaucgacgagauuacaaauaaagucaacagcgugaucgaaaagaugaauacccaguuuacggcuguuggaaaagaguucaaccaucuugaaaagagaauugagaaucugaacaagaaaguggaugacggcuuccucgauaucuggacauacaaugccgaacugcugguccuccuggagaacgagcggacccuugacuaucacgauucuaaugugaagaaccuguacgaaaaaguccgcucccagcucaagaacaaugccaaagagauugggaacggauguuuugaguucuaucauaagugcgacaauaccuguauggaaagcgugaagaacggcacauacgauuauccuaaauacucugaagaggcuaagcugaauagagaggaaaucgacgggguuaaacuugaguccacccggaucuaucagauucuggccaucuacagcacaguggcguccucucucguccuggugguuagccugggcgcuauuuccuuuuggaugugcucucacauggugcuccugcaaugccgcaucuguauuuga

SEQ ID NO: 195213 - RNA, 1701 nt, Artificial Sequence
  derived and/or modified CDS sequence (opt5) from hemagglutinin__InfluenzaA__ACU30121
auggaggccauccuggugguccuccuguacaccuucgcuacagccaacgcggacacgcuuugcauuggcuaucacgcuaauaacagcaccgauacaguugacaccgugcuggaaaagaaugugacagucacccauuccgugaaccuccuggaggauaaacacaaugggaaacuuuguaagcugagaggaguugcgccccuccaucugggcaagugcaacaucgccggguggauucugggaaauccugaaugugagucucucagcacagcuuccucuuggagcuacaucguggaaaccuccucuagcgacaacggcacgugcuauccgggggauuuuauugacuacgaggagcugcgggaacagcuuuccagcgucucuuccuucgagcgcuuugaaaucuuccccaaaaccagcucuuggccuaaucacgauuccaacaagggagugacagccgcuuguccccaugccggcgccaagagcuuuuauaaaaaucugaucuggcucguuaagaaaggcaacucuuacccuaagcuguccaaaagcuauauuaaugacaaggggaaggaggugcuuguccuguggggaauccaccaccccuccaccucugccgaucaacagagccucuaccagaacgcugacgccuacguguucgugggcuccagcagauauucuaaaaaguuuaaaccugagauugcuauccggccgaagguccgcgaucaggaagggagaaugaauuacuauuggacacugguugagcccggagacaaaauuaccuucgaagccacgggcaaccugguggugccucgguacgcguuugccauggagcgcaacgcuggguccggaaucauuaucagcgauacacccguccaugacugcaauaccacaugucaaaccccuaagggcgccaucaacaccucucuccccuuccacaauauucauccgaucacaauuggcaaaugcccuaaguauguuaagagcacgaaacugagacuugcuaccgggcugcggaacgugcccuccauccagucucgcggacucuuuggcgccauugccggguucaucgaaggaggcuggacagggaugguggacggaugguacggcuaucaccaccagaaugagcagggcagcggguacgcugcggaucugaaguccacccaaaacgccaucgacgagauuacaaauaaagucaacagcgugaucgaaaagaugaauacccaguuuacggcuguuggaaaagaguucaaccaucuugaaaagagaauugagaaucugaacaagaaaguggaugacggcuuccucgauaucuggacauacaaugccgaacugcugguccuccuggagaacgagcggacccuugacuaucacgauucuaaugugaagaaccuguacgaaaaaguccgcaaccagcucaagaauaacgccaaagagauugggaauggauguuuugaguucuaucauaagugcgacaacaccuguauggaauccgugaagaauggcacauacgauuauccuaaauacagcgaagaggcuaagcugaacagagaggaaaucgacgggguuaaacuugagucuacccggaucuaucagauucuggccaucuacuccacaguggcgagcucccucguccuggugguuucucugggcgcuauuagcuuuuggaugugcuccaauggaucucuccaaugccgcaucuguauuuga

SEQ ID NO: 195214 - RNA, 1701 nt, Artificial Sequence; identical to SEQ ID NO: 194834
  derived and/or modified CDS sequence (opt5) from hemagglutinin__InfluenzaA__ACU31124

SEQ ID NO: 195215 - RNA, 1701 nt, Artificial Sequence; identical to SEQ ID NO: 194773
  derived and/or modified CDS sequence (opt5) from hemagglutinin__InfluenzaA__ACU31143

SEQ ID NO: 195216 - RNA, 1701 nt, Artificial Sequence; identical to SEQ ID NO: 194773
  derived and/or modified CDS sequence (opt5) from hemagglutinin__InfluenzaA__ACU31144

SEQ ID NO: 195217 - RNA, 1701 nt, Artificial Sequence; identical to SEQ ID NO: 194773
  derived and/or modified CDS sequence (opt5) from hemagglutinin__InfluenzaA__ACU31145

SEQ ID NO: 195218 - RNA, 1701 nt, Artificial Sequence; identical to SEQ ID NO: 194921
  derived and/or modified CDS sequence (opt5) from hemagglutinin__InfluenzaA__ACU31146

SEQ ID NO: 195219 - RNA, 1701 nt, Artificial Sequence; identical to SEQ ID NO: 194741
  derived and/or modified CDS sequence (opt5) from hemagglutinin__InfluenzaA__ACU31147

SEQ ID NO: 195220 - RNA, 1701 nt, Artificial Sequence
  derived and/or modified CDS sequence (opt5) from hemagglutinin__InfluenzaA__ACU31148
augaaggccauccuggugauuaugcucuacaccuucgcuacagccaacgcggacacgcugugcaucggcuaucacgcuaauaacagcaccgauacagucgacaccguucuugagaaaaaugugacagugacccauuccgucaaccugcucgaagauaagcacaaugggaaacuguguaaacuuagaggaguggcuccccugcaucucggcaagugcaacauugccggguggauccugggaaauccugagugugaaucucugagcacagccuccucuuggagcuacauuguugagaccuccucuagcgacaacggcacgugcuauccgggggauuuuaucgacuacgaagaacuccgggagcagcuguccagcgugucuuccuucgaacgcuuugagaucuuccccaagaccagcucuuggccuaaucacgauuccaacaagggagucacagccgcuuguccccaugccggcgcgaaaucuuuuuauaagaaucuuauuuggcuggugaaaaagggcaacagcuacccuaaacucuccaagagcuauaucaaugacaaggggaaagaaguucuggugcuuuggggcauucaccaccccuccaccucugccgaucaacagagccuguaccagaacgcugacgccuacgucuucgugggauccagcagauauucuaagaaauuuaagccugagaucgcuauucggccgaaagugcgcgaucaggaggggagaaugaauuacuauuggacacucgucgaacccggagacaagaucaccuucgaggccacgggcaaccugguugugccucgguacgcguuugccauggaacgcaacgcuggguccggaauuaucaucagcgauacacccgugcaugacugcaauaccacaugucaaaccccuaaaggcgccauuaacaccucucugcccuuccagaauauccacccgauuacaaucggcaagugcccuaaguaugucaaaagcacgaagcucagacuggcuaccgggcuucggaacgugcccuccauucagucucgcggacuguuuggcgccaucgccggguucaucgagggaggcuggacagggaugguugacggaugguacggcuaucaucaccagaaugaacaaggcagcggguacgcugcggaucucaaauccacccagaacgccauugacgagaucacaaauaaggugaacagcgucauugagaaaaugaauacccaguuuacggcugugggaaaggaguucaaccaccuggagaagagaaucgaaaaucuuaacaaaaagguugaugacggcuuccuggauauuuggacauacaaugccgagcuccuggugcugcucgaaaacgagcggacccuggacuaucaugauucuaaugucaaaaaccuuuacgagaaggugcgcucccagcugaaaaacaaugccaaggaaaucgggaacggauguuuugaguucuaucacaagugcgacaauaccuguauggaaagcgucaaaaacggcacauacgauuauccuaaguacucugaggaagcuaaacucaauagagaggagaucgacggggugaagcuggaauccacccggauuuaucaaauccuugccauuuacagcacaguugcguccucucuggugcucgucgugagccugggcgcuaucuccuuuuggaugugcucuaacggaagccugcagugccgcauuuguaucuga

SEQ ID NO: 195221 - RNA, 1701 nt, Artificial Sequence; identical to SEQ ID NO: 194728
  derived and/or modified CDS sequence (opt5) from hemagglutinin__InfluenzaA__ACU31149

SEQ ID NO: 195222 - RNA, 1701 nt, Artificial Sequence; identical to SEQ ID NO: 194728
  derived and/or modified CDS sequence (opt5) from hemagglutinin__InfluenzaA__ACU31150

SEQ ID NO: 195223 - RNA, 1701 nt, Artificial Sequence; identical to SEQ ID NO: 194728
  derived and/or modified CDS sequence (opt5) from hemagglutinin__InfluenzaA__ACU31151

SEQ ID NO: 195224 - RNA, 1701 nt, Artificial Sequence; identical to SEQ ID NO: 194728
  derived and/or modified CDS sequence (opt5) from hemagglutinin__InfluenzaA__ACU31152

SEQ ID NO: 195225 - RNA, 1707 nt, Artificial Sequence
  derived and/or modified CDS sequence (opt5) from hemagglutinin__InfluenzaA__ACU46644
auggagaagaucgugcuccuguucgccauugucagccugguuaaauccgaccagaucugcauuggcuaccacgcuaacaauucuaccgaacaaguggauacaaucauggagaagaacgugacggucacccaugcccaggacauucuugaaaagacacacaaugggaagcugugugaucucgacggaggcaaaccccugauccuuagagauugccggguggcgggguggcugcucggaaacccuaugugugacgaguuuaucaauguuccggaauggagcuauauuguggagaaggcuaaccccgucaaugaucugugcuacccuggcgacuucaacgauuaugaggaacugaagcaucuccugucccgcaucaaucacuuugagaaaauucagaucauucccaagucuagcugguccucucaugaagccagccuugggguguccagcgccuguccuuaccagggaaaaucuuccuucuuuagaaacguuguguggcugaucaagaaaaauagcaccuaucccacaauuaagcggucuuacaacaauaccaaccaagaggaccuccugguccuuugguggauccaccacccuaaugaugcugccgagcagacaaagcuguaucagaacccgaccacguacaucuccgugggcaccagcacacucaaccagcgccuggugcccagaauugcuacccggucuaaagucaauggccaauccgggcgcauggaguucuuuuggacaauccugaagccuaacgacgccauuaauuucgaaagcaacggaaauuuuaucgcgcccgaauacgccuauaaaauuguuaagaaaggcgauuccaccaucaugaagucugagcucgaauacgggaacugcaauacgaaaugucagacaccuaugggagcuaucaacagcuccaugcccuuccaucacauucauccgcugaccaucggcgagugcccuaaguaugugaaaagcaauagacuugugcuggccacagggcuccggaacucuccccagcgcgagagacggcgcaaaaagagaggacuguuuggcgcuauugccggcuucaucgaagggggauggcagggcauggucgacgggugguacggauaucaccacuccaaugagcaaggcagcggguacgcggccgacaaagaaucuacccagaaggcuauugauggagugaccaacaaaguuaauagcaucaucgacaagaugaacacacaguuugaggccgugggccgggaguucaaucaucuugaacgcagaauugagaaccugaacaagaaaauggaagauggcuuccucgacgucuggacguauaaugcugagcugcuggugcucauggaaaacgagcggacccuggauuuucacgacuccaauguuaagaaccuuuacgauaaagugagacugcaacuccgcgacaaugccaaggaacuggggaacggauguuucgaguuuuaccauaaaugcgaugacgaguguauggaaucuguccggaauggcacauaugauuacccucaguauagcgaggaagccagacuuaagcgcgaggagaucuccggggugaagcuggaaagcauuggaaucuaccagauucucucuaucuauuccaccgucgcuagcucucuggcgcuggccauuaugguggcuggccucucccuguggaugugcagcaacgggucccuucagugccggaucuguaucuga

SEQ ID NO: 195226 - RNA, 1701 nt, Artificial Sequence
  derived and/or modified CDS sequence (opt5) from hemagglutinin__InfluenzaA__ACU56924
augaaggccauccuggugguccuccuguacaccuucgcuacagccaacgcggacacgcuuugcauuggcuaucacgcuaauaacagcaccgauacaguugacaccgugcuggagaagaaugugacagucacccauuccgugaaccuccuggaagauaagcacaaugggaaacuuuguaagcugagaggaguugcuccccuccaucugggcaaaugcaacaucgccggguggauucugggaaauccugagugugaaucucucagcacagccuccucuuggagcuacaucguggagaccuccucuagcgacaacggcacgugcuauccgggggauuuuauugacuacgaagaacugcgggagcagcuuuccagcgucucuuccuucgaacgcuuugagaucuuccccaagaccagcucuuggccuaaucacgauuccaacaagggagugacagccgcuuguccccaugccggcgcgaaaucuuuuuauaagaaucugaucuggcucguuaaaaagggcaacagcuacccuaaacuguccaagagcuauauuaaugacaaggggaaagaagugcuuguccuguggggaauccaccaccccuccaccucugccgaucaacagagccucuaccagaacgcugacgccuacguguucgugggcacauccagauauagcaagaaauuuaagccugagauugcuauccggccgaaaguccgcgauagagaggggcggaugaauuacuauuggacccugguugaacccggagacaagauuacguucgaggccacaggcaaccugguggugccucgcuacgcguuugccauggaaagaaacgcugggucuggaaucauuaucuccgauacccccguccaugacugcaauacaaccugucagaccccuaaaggcgccaucaacacaagccuccccuuccaaaauauucacccgaucacgauuggcaagugcccuaaguaugugaaaucuaccaagcugcggcuugcuacagggcugcgcaacguucccagcauccaguccagaggacucuuuggcgccauugccggguucaucgagggaggcuggaccgggaugguggacggaugguacggcuaucaucaccagaaugaacagggcucuggguacgcugcggaucugaaaagcacacaaaacgccaucgacgagauuaccaauaaggucaacuccgugaucgagaaaaugaauacgcaguuuacagcuguuggaaaggaguucaaccaccuugagaagcggauugaaaaucugaacaaaaagguggaugacggcuuccucgauaucuggaccuacaaugccgagcugcugguccuccuggaaaacgagcgcacccuugacuaucaugauagcaaugugaaaaaccuguacgagaaggucagaucucagcucaaaaacaaugccaaggaaauugggaacggauguuuugaguucuaucacaagugcgacaauacauguauggaauccgugaaaaacggcaccuacgauuauccuaaguacagcgaggaagcuaaacugaaucgggaggagaucgacgggguuaaacuugaaucuacacgcaucuaucagauucuggccaucuacuccacgguggcgagcucccucguccuggugguuucucugggcgcuauuagcuuuuggaugugcuccaacggaucucuccaaugcagaaucuguauuuga

SEQ ID NO: 195227 - RNA, 1701 nt, Artificial Sequence; identical to SEQ ID NO: 195094
  derived and/or modified CDS sequence (opt5) from hemagglutinin__InfluenzaA__ACU56931

SEQ ID NO: 195228 - RNA, 1701 nt, Artificial Sequence; identical to SEQ ID NO: 194741
  derived and/or modified CDS sequence (opt5) from hemagglutinin__InfluenzaA__ACU64792

SEQ ID NO: 195229 - RNA, 1701 nt, Artificial Sequence; identical to SEQ ID NO: 194921
  derived and/or modified CDS sequence (opt5) from hemagglutinin__InfluenzaA__ACU64801

SEQ ID NO: 195230 - RNA, 1701 nt, Artificial Sequence; identical to SEQ ID NO: 194921
  derived and/or modified CDS sequence (opt5) from hemagglutinin__InfluenzaA__ACU64812

SEQ ID NO: 195231 - RNA, 1701 nt, Artificial Sequence; identical to SEQ ID NO: 194390
  derived and/or modified CDS sequence (opt5) from hemagglutinin__InfluenzaA__ACU79871

SEQ ID NO: 195232 - RNA, 1701 nt, Artificial Sequence; identical to SEQ ID NO: 194388
  derived and/or modified CDS sequence (opt5) from hemagglutinin__InfluenzaA__ACU79882

SEQ ID NO: 195233 - RNA, 1701 nt, Artificial Sequence; identical to SEQ ID NO: 194401
  derived and/or modified CDS sequence (opt5) from hemagglutinin__InfluenzaA__ACU79893

SEQ ID NO: 195234 - RNA, 1701 nt, Artificial Sequence; identical to SEQ ID NO: 194401
  derived and/or modified CDS sequence (opt5) from hemagglutinin__InfluenzaA__ACU79904

SEQ ID NO: 195235 - RNA, 1698 nt, Artificial Sequence
  derived and/or modified CDS sequence (opt5) from hemagglutinin__InfluenzaA__ACU79937
augaaggccaaacugcucgugcugcuuugcaccuucacagcuacguacgccgacaccaucuguauuggcuaucacgcgaacaauagcacagauaccgucgacacaguucuggagaagaacgugaccgugacacauuccgucaaucuccuggaagauucucacaacgggaaacuuugccugcucaagggaaucgcuccccugcagcugggcaauuguagcguggccggguggauucucggaaacccugagugcgaaucccugaucucuaaagagagcugguccuacauuguugaaaccccgaaucccgagaacggcacguguuauccuggguacuuugccgacuaugaggaacuuagagagcaacugucuagcguguccagcuucgaacgguuugagaucuuccccaaggagucuuccuggccuaaucauaccgucacaggagugaccgcuagcugcucucacaacggcaaguccagcuuuuaccgcaaucuccuguggcuuacagagaaaaacggccuguaucccaaucucucuaacuccuacguuaauaacaaggaaaaagaagugcugguccuguggggagugcaucacccuagcaacaucggggugcagagagccauuuaccacaccgagaaugcuuaugucuccguugugucuagccauuacucccggcgcuucacgccggaaaucgccaagagacccaaagugcggggccaggaggggcgcauuaacuauuacuggacacuccuggagccuggagauaccaucauuuuugaagcgaauggcaaccuuaucgcccccugguaugcuuucgcccugagcagaggguuuggaucuggcauuaucacauccaaugcuccuaugaacgagugugacgccaagugccagacaccccaaggcgcgaucaauagcucucucccguuccagaacguccacccugugaccauuggggaaugucccaaguacguucggagcaccaaacugcgcauggugacgggacuuagaaauaucccuuccauucagucucggggccuguuuggggccaucgcuggauucauugagggcggguggaccggaaugauggauggcugguauggcuaccaucaccagaacgaacaagggagcggauacgccgcugaccagaaguccacacagaaugccaucaacggcaucaccaauaaagucaacagcgugauugagaagaugaauacacaguuuaccgccguugggaaagaguucaacaagcucgaacgcagaauggagaaccugaauaaaaagguggaugacggauuccuggauaucuggacguauaacgcugaacuccugguccuucuggagaaugaacggacacucgacuuucacgauucuaacgugaagaaucuguacgagaaagucaagucccaacuuaaaaacaaugcgaaggagauuggcaacgggugcuucgaauuuuaucauaaauguaauaacgagugcauggaaagcgugaagaauggcaccuacgacuaucccaaguacucugaggaguccaaacugaaccgcgaaaagaucgacggaguuaaacucgagagcaugggcguguaucagauucuggccaucuacuccaccgucgcuucuagccuggugcuccugguuucccuuggggccaucucuuucuggaugugcagcaauggaucccugcaguguagaauuugcaucuga

SEQ ID NO: 195236 - RNA, 1689 nt, Artificial Sequence
  derived and/or modified CDS sequence (opt5) from hemagglutinin__InfluenzaA__ACU79948
auggccaucauuuaccugauccuccuguucaccgcugugagaggcgaccagauuugcaucggguaucacgccaacaauagcacagagaaggucgauacgauucuugaacggaacguuaccgugacacaugcgaaagacauccuggagaagacccacaauggaaaacucuguaagcugaacggcauucccccucuugaacugggggauugcuccaucgcuggauggcuccugggcaauccggagugugaccgccugcucucugugcccgaauggagcuacaucauggagaaagagaacccuagagaugggcugugcuaucccggauccuuuaaugacuacgaagaacuuaagcaucugcucucuagcgucaagcacuucgaaaaagugaagauucugccuaaagaucgguggacacaacauaccacaaccggcggcucccgcgccugugccguuucugggaaccccagcuuuuucagaaauaugguguggcuuacgaagaaaggauccgacuauccugucgcuaagggcagcuacaacaauaccucuggggagcagaugcugaucauuuggggagugcaccacccgaacgaugagacagaacagcggacccucuaucagaauguuggcacauacguguccgucgggaccagcacgcugaacaagcgcucuacacccgagaucgccaccagaccuaaagugaauggacaaggcggccggauggaauuuuccuggacacugcucgacaugugggauaccauuaacuucgagagcaccgggaaccugaucgcucccgaauacggauuuaagaucucuaaacgcggcuccagcgggauuaugaagacagagggaacgcuugagaauugcgaaaccaaaugucagacaccucugggcgccaucaacaccacacuccccuuccauaaugugcacccgcugaccauuggggagugcccuaaguaugucaaauccgaaaaacuuguucuggcgacgggacucagaaacgugccccagaucgagucucggggccuguuuggcgccauugcuggguucaucgaaggaggcuggcaggggaugguggacggaugguacggcuaucaucacagcaaugaucaaggguccggcuacgccgcugacaaggagagcacacagaaggccuuugacggaaucaccaacaaugucaacucugugauugagaagaugaauacccaguucgaagcgguuggcaaagaguuuuccaaccuggaacgcagacucgagaaucugaacaagaaaauggaagauggguuccuugacguguggacauauaaugccgagcugcucguccugauggagaacgaacggacccuugauuuccacgacagcaaugugaagaaccuguacgauaagguucgcaugcagcucagagacaacgugaaagagcugggaaauggcuguuuugaguucuaucauaagugcgaugacgaguguaugaacucugucaaaaaugggacauacgauuacccuaaguaugaggaagagagcaaacugaaccggaaugaaaucaagggagugaagcucuccucuaugggcgucuaccaaauucuggcuaucuaugccacgguggcugggagccuuucccuggccauuaugauggccggcaucagcuuuuggaugugcucuaacggaucccuccagugcagaaucuguauuuga

SEQ ID NO: 195237 - RNA, 1689 nt, Artificial Sequence
  derived and/or modified CDS sequence (opt5) from hemagglutinin__InfluenzaA__ACU79959
auggccaucauuuaccugauccuccuguucaccgcugugagaggcgaccagauuugcaucggguaucacgccaacaauagcacagagaaggucgauacgauucuugaacggaacguuaccgugacacaugcgaaagacauccuggagaagacccacaauggaaaacucuguaagcugaacggcauucccccucuugaacugggggauugcuccaucgcuggauggcuccugggcaauccggagugugaccgccugcucucugugcccgaauggagcuacaucauggagaaagagaacccuagagaugggcugugcuaucccggauccuuuaaugacuacgaagaacuuaagcaucugcucucuagcgucaagcacuucgaaaaagugaagauucugccuaaagaucgguggacacaacauaccacaaccggcggcucccgcgccugugccguuucugggaaccccagcuuuuucagaaauaugguguggcuuacgaagaaaggauccgacuauccugucgcuaagggcagcuacaacaauaccucuggggagcagaugcugaucauuuggggagugcaccacccgaacgaugagacagaacagcggacccucuaucagaauguuggcacauacguguccgucgggaccagcacgcugaacaagcgcucuacacccgagaucgccaccagaccuaaagugaauggacaaggcggccggauggaauuuuccuggacacugcucgacaugugggauaccauuaacuucgagagcaccgggaaccugaucgcucccgaauacggauuuaagaucucuaaacgcggcuccagcgggauuaugaagacagagggaacgcuugagaauugcgaaaccaaaugucagacaccucugggcgccaucaacaccacacuccccuuccauaaugugcacccgcugaccauuggggagugcccuaaguaugucaaauccgaaaaacuuguucuggcgacgggacucagaaacgugccccagaucgagucucggggccuguuuggcgccauugcuggguucaucgaaggaggcuggcaggggaugguggacggaugguacggcuaucaucacagcaaugaucaaggguccggcuacgccgcugacaaggagagcacacagaaggccuuugacggaaucaccaacaaggucaauucugugauugagaaaaugaacacccaguucgaagcgguuggcaaggaguuuuccaaucuggaacgcagacucgagaaccugaauaaaaagauggaagauggguuccuugacguguggacauauaacgccgagcugcucguccugauggagaaugaacggacccuugauuuccacgacagcaacgugaagaaucuguacgauaaaguucgcaugcagcucagagacaacgugaaggagcugggaaacggcuguuuugaguucuaucauaaaugcgaugacgaguguaugaacucugucaagaaugggacauacgauuacccuaaauaugaggaagagagcaagcugaaucggaacgaaaucaagggagugaaacucuccucuaugggcgucuaccaaauucuggcuaucuaugccacgguggcugggagccuuucccuggccauuaugauggccggcaucagcuuuuggaugugcucuaauggaucccuccagugcagaaucuguauuuga

SEQ ID NO: 195238 - RNA, 1701 nt, Artificial Sequence
  derived and/or modified CDS sequence (opt5) from hemagglutinin__InfluenzaA__ACU79970
augaagaccaucauugcccugagcuacauccagugccucguguucgcucaaaaauuucccggcaacgacaauuccacagccacgcugugucuugggcaccaugcggucccuaacggaaccauuguuaagacaaucaccaaugaucagauugaggugacaaacgcuaccgaacuggugcagucuagcuccacaggcgagaucugcgacucuccgcaccagauccucgauggggaaaauuguacccugauugacgcccuucugggagauccccaaugcgacggcuuccagaacaaaaauugggaucucuuugucgagagaagcaaggccuauuccaacuguuacccuuaugacgugcccgauuacgcuucucugcggagccugguugccuccagcgggacgcucgaguucaauaacgaaucuuuuaauuggaccggagugacacagaacggcaccuccagcgcuugcauccgcagaucuaauaacuccuucuuuagcaaacugaauuggcuuacacauucuaaguucaaguauccugcccugaacgucaccaugcccaacaaugagaacuuugacaaacucuacauuuggggcgugcaccauccugggacggauaaugaccagaucuuccuguaugcgcaagccuccggacggauuacaguuagcaccaagcgcucccagcagacagugaucccgaacauuggcucuagaccccggguccgcaauaucccuagcagaaucuccauuuacuggaccaucgugaaacccggggauauucuucugaucaacagcaccggaaaucucauugcuccucggggcuacuuuaagauccgcucugggaaauccagcaucaugagaucugacgcccccauuggaaaguguaacagcgaaugcaucacaccgaauggcuccauuccuaacgacaagcccuuccagaaugugaaccggaucacguauggcgcuuguccucgcuacgucaaacaaaauacccugaagcuggccacagggaugagaaacguucccgagaaacagacccggggaauuuuuggcgcgaucgccggguucaucgaaaauggaugggagggcaugguggaugggugguauggauuccgccaccagaacucugagggcauuggccaagcugccgaccucaagagcacacaggcugccaucgaucagauuaacgggaaacugaauagacuuaucggaaagaccaacgaaaaauuucaccagauugagaaggaguucuccgaaguggaaggccggauccaagaccuggagaaguacgucgaggauacgaaaauugaccucuggagcuauaaugccgaacugcuuguggcucuggagaaccagcauacaaucgaucucaccgacucugaaaugaauaagcuguuugagaaaaccaagaaacagcugagagaaaacgcggaggauauggggaauggaugcuucaagaucuaccacaagugugacaacgccugcauuggcuccauccgcaaugggacauaugaucaugacguuuaccgggacgaggcucucaacaauagauuucagauuaaaggcguggaacuuaagagcggauacaaagauuggauccuguggauuucuuucgccaucuccugcuuucugcucuguaucgcccugcuuggcuucauuaugugggcuugccaaaaggggaacauccgcuguaauauuugcaucuga

SEQ ID NO: 195239 - RNA, 1698 nt, Artificial Sequence
  derived and/or modified CDS sequence (opt5) from hemagglutinin__InfluenzaA__ACU79981
augaaggugaaacugcucguccugcuuugcaccuucacagccacguacgcugacaccaucuguauuggcuaucacgccaacaauagcacagauaccguugacacagugcuggagagaaacgugaccgucacacauuccgugaaucuccuggaaaacucucacaaugggaaacuuugccugcucaagggaaucgcgccccugcagcugggcaacuguagcguugcuggguggauucucggaaauccugagugcgaacugcuuaucuccaaggagucuuggagcuacauuguggaaaaaccgaaccccgagaauggcaccuguuauccugggcauuuugccgauuacgaggaacugcgggagcaacucuccucugucagcuccuucgaacgcuuugagaucuuccccaaggagagcucuuggccuaaccacacggugaccggaguuuccgccagcugcucucauaauggcgaauccagcuuuuauagaaaccugcuuuggcugacaggcaagaaugggcucuaccccaaccugucuaaauccuaugcuaauaacaaggagaaagaagugcugguccucuggggagugcaccacccuccgaacaucggcgaccagaaggcccuguaccauaccgagaaugcuuacgugagcgucguuuccucucacuauagccggaaauucacacccgaaauugccaagcgcccuaaggugagagaucaggaggggcggaucaacuacuauuggacccuucugaaacccggagacacgauuaucuuugaggcgaauggcaaccucauugccccucgcuacgcuuucgcccuguccagaggguuuggaagcggcaucauuaauucuaacgcucccauggauaagugugacgccaaaugccagacaccgcaaggcgcgaucaauuccagccuuccuuuccagaacgugcaucccgucaccaucggggaauguccuaaguaugugcggucugccaaacugcgcaugguuacaggacucagaaauauucccagcauccagucccggggccuguuuggggcuauugccggauucaucgagggcggguggaccggaaugguggauggcugguacggcuaucaccaccagaacgaacaagggucuggauacgcugccgaccaaaagagcacccagaaugccauuaacggcaucacaaauaaagucaacuccgugaucgagaagaugaauacgcaguuuaccgcuguugggaaggaguucaacaaacuggaacgcagaauggagaaccucaauaagaaaguggaugacggauucauugauaucuggacauacaacgcggaacugcuuguccugcucgagaaugaacggacccuggacuuucaugacagcaacgugaagaaucuuuaugagaaagucaagucucagcugaagaacaaugccaaagaaauuggcaacgggugcuucgaguuuuaccacaaguguaaugaugagugcauggaauccgugaaaaacggcacauaugacuaccccaaguauagcgaggaaucuaaacucaaucgcgagaagaucgauggaguuaagcuggaguccaugggcguguaccagauucuggcuaucuauagcaccgucgccuccucucucgugcugcuuguuagccugggggccaucuccuucuggaugugcucuaacggaagccuccaguguagaauuugcaucuga

SEQ ID NO: 195240 - RNA, 1698 nt, Artificial Sequence
  derived and/or modified CDS sequence (opt5) from hemagglutinin__InfluenzaA__ACU79992
augaaggugaaacugcucguccugcuuugcaccuucacagccacguacgcugacaccaucuguauuggcuaucacgccaacaauagcacagauaccguugacacagugcuggagaagaacgugaccgucacacauuccgugaaucuccuggaagauaaccacaaugggaaacuuugccugcucaagggaaaagcgccccugcagcugggcaacuguucuguugcuggguggauccucggaaauccugagugcggccugcuuauuagcaaggaauccuggucuuacaucguggagagaccgaaccccgaaaaugggaccuguuauccuggacauuuugccgacuacgaggagcugcgggaacaacucagcuccgucucuagcuucgagcgcuuugaaauuuuccccaaggaguccagcuggccuaaccacacggugaccggcguuucugccuccugcagccauaauggcgagucuuccuuuuauaaaaaccugcuuuggcugacagggaagaauggacucuaccccaaccugagcaaaucuuaugcuaauaacaaggaaaaagaggugcugguccucuggggcgugcaccacccuccgaacaucggggaucagaugacccuguaccauaaggaaaaugccuacguguccgucguuagcucccacuauucuagaaaguucacacccgagaucgcuaaacggccuaaggugcgcgaccaggaaggaagaauuaacuacuauuggacccuucuggagcccggcgauacgaucauuuuugaggccaaugggaaccucaucgcgccucgguacgccuucgcucugagccgcggauuuggcuccggcauuaucaauagcaacgcccccauggacgaaugugaugcuaaaugccagacaccgcaaggggccauuaauucuucccuuccuuuccagaacgugcaucccgucaccaucggagaguguccuaaguaugugagaagcgcgaaacugcggaugguuacaggccuccgcaauauccccucuauucagagcagagggcuguuuggagccaucgcuggcuucauugaagggggauggaccggcaugguggacggcugguacggguaucaccaccagaacgagcaaggauccggcuacgccgcugaucagaagucuacccagaaugccaucaacgggauuacaaauaaagucaacagcgugaucgaaaagaugaauacgcaguuuaccgccguuggaaaggaguucaacaaacuggagcggcgcauggaaaaccucaauaagaaaguggacgauggcuucaucgacgucuggacauacaacgcugagcugcuugugcugcucgaaaaugagagaacccuggacuuucaugauuccaacgucaagaaucuuuaugaaaaagugaagaaccaacugaagaauaacgcgaaagagauugggaauggcugcuucgaguuuuaccacaaguguaacgacgaaugcauggagagcguuaaaaauggaacauaugauuaccccaaguauucugaagaguccaaacucagccgggagaagaucgacggcgugaagcuggaaucuaugggggucuaccagauucuggccaucuauuccaccguggcuagcucccucguucugcuugugucucugggagccauuagcuucuggaugugcuccaacggcucucuccagugucgcaucugcaucuga

SEQ ID NO: 195241 - RNA, 1701 nt, Artificial Sequence; identical to SEQ ID NO: 194506
  derived and/or modified CDS sequence (opt5) from hemagglutinin__InfluenzaA__ACU80003

SEQ ID NO: 195242 - RNA, 1698 nt, Artificial Sequence
  derived and/or modified CDS sequence (opt5) from hemagglutinin__InfluenzaA__ACU80025
augaaggugaaacugcucguccugcuuugcaccuucgccgcuacauacgccgacacgaucuguauuggcuaucacgcgaacaauagcaccgauacaguugacaccgugcuggagaagaacgugacagucacccauuccgugaaucuccuggaaaacucucacaaugggaaacuuugccugcucaagggaaucgcuccccugcagcugggcaacuguagcguugccggguggauucucggaaauccugagugcgaacugcuuaucuccaaagagucuuggagcuacauuguggaaaagccgaaccccgagaauggcacauguuauccugggcauuuugccgauuacgaggaacugagagagcaacucuccucugucagcuccuucgaacgguuugagaucuuccccaaggagagcucuuggccuaaccacaccgugacgggaguuuccgcuagcugcucucauaauggcgaauccagcuuuuaucgcaaccugcuuuggcugaccggcaaaaaugggcucuaccccaaccugucuaaguccuaugccaauaacaaagagaaggaagugcugguccucuggggagugcaccacccuccgaacaucggcgaccagaaagcucuguaccauacagagaaugccuacgugagcgucguuuccucucacuauagcagaaaguucacccccgaaauugcgaagcggccuaaagugcgcgaucaggaggggagaaucaacuacuauuggacacuucuggagcccggagacaccauuaucuuugaagccaauggcaaccucauugcuccucgguacgccuucgcucugucccgcggguuuggaagcggcaucauuaauucuaacgcccccauggauaagugugacgcgaaaugccagacgccgcaaggcgccaucaauuccagccuuccuuuccagaacgugcaucccgucacaaucggggaguguccuaaguaugugagaucugcuaaacugcggaugguuaccggacuccgcaauauucccagcauccaguccagaggccuguuuggggccauugcuggauucaucgaaggcggguggacaggaaugguggauggcugguacggcuaucaccaccagaacgagcaagggucuggauacgccgccgaccaaaagagcacccagaaugcuauuaacggcaucaccaauaaagucaacuccgugaucgaaaagaugaauacacaguuuacggcgguugggaaggaguucaacaaacuggagcggcgcauggaaaaccucaauaagaaaguggaugacggauucauugauaucuggaccuacaacgccgagcugcuuguccugcucgaaaaugagagaacacuggacuuucaugacagcaacgugaagaaucuuuaugaaaaagucaagucucagcugaagaacaaugcuaaagagauuggcaacgggugcuucgaguuuuaccacaaguguaaugaugaaugcauggaguccgugaaaaacggcaccuaugacuaccccaaguauagcgaagagucuaaacucaaucgggagaagaucgauggaguuaagcuggaauccaugggcguguaccagauucuggccaucuauagcacagucgccuccucucucgugcugcuuguuagccugggggcuaucuccuucuggaugugcucuaacggaagccuccagugucgcauuugcaucuga

SEQ ID NO: 195243 - RNA, 1701 nt, Artificial Sequence
  derived and/or modified CDS sequence (opt5) from hemagglutinin__InfluenzaA__ACU80036
augaagaccaucauugcccugagcuacauccucugccugguguucgcucagaaacuucccggcaacgacaauuccacagccacgcugugucucgggcaccaugcggucccuaacggaaccauuguuaagacaaucaccaaugaucaaauugaggugacaaacgcuaccgaacuggugcagucuagcuccacaggcgagaucugcgacucuccgcaccagauccuugauggggaaaauuguacccugauugacgcccuccugggagauccccagugcgacggcuuucaaaacaaaaagugggaucuguucgucgagagaagcaaagccuauuccaauuguuacccuuaugacgugcccgauuacgcuucucuccggagccugguugccuccagcgggacgcuugaauuuaacaaugagucuuucaacuggaccggagugacacagaauggcaccuccagcgcuugcauccgcagaucuaacaauuccuuuuucagccggcugaacuggcucacacaucugaaguuuaaguauccugcccuuaaugucaccaugcccaacaacgagcaguucgacaaacuguacauuuggggcgugcaccauccugggacggauaaugaccagaucuuucucuaugcgcaagccucuggacgcauuacaguuuccaccaagagaagccagcagacagugaucccgaacauuggcucccggccccgcgucagaaauaucccuucucggaucagcauuuacuggaccaucgugaaacccggggauauucugcugaucaacuccaccggaaaucucauugcuccucgcggcuacuucaagaucagaagcgggaaaucuuccaucaugcggagcgacgcccccauuggaaaguguucuagcgaaugcaucacaccgaacggcuccauuccuaaugacaagcccuuucagaacgugaaucgcaucacguauggcgcuuguccuagauacgucaaacaaaacacccugaagcuggccacagggaugcggaauguucccgagaaacagacccgcggaauuuucggcgcgaucgccggguuuaucgaaaacggaugggagggcaugguggaugggugguauggauucagacaccaaaauucugagggccggggccaggcugccgaccuuaagagcacacaggcugccauugaucagaucaacgggaaacucaauagacugauuggaaagaccaacgaaaaauuccaccagaucgagaaggaauuuuccgagguggaaggccgcauucaagaccuugagaaguacgucgaggauacgaaaaucgaccuguggagcuauaacgccgaacuccugguggcucuggagaaucagcauacaauugaucucaccgacucugaaaugaacaagcuguucgagaaaaccaagaaacagcuucgggaaaaugcggaggauaucgggaacggaugcuuuaagaucuaccacaagugugacaaugccugcauuggcuccaucagaaacgggacauaugaucaugacguuuaccgcgacgaggcucugaauaaccgguuccagauuaaaggcguggaacucaagagcggauacaaagauuggauccuguggauuucuuuugccaucuccugcuuccuucugugugucgcccuccugggcuuuaucaugugggcuugccaaaaggggaauauuagauguaacaucugcauuuga

SEQ ID NO: 195244 - RNA, 1698 nt, Artificial Sequence; identical to SEQ ID NO: 194715
  derived and/or modified CDS sequence (opt5) from hemagglutinin__InfluenzaA__ACU80047

SEQ ID NO: 195245 - RNA, 1701 nt, Artificial Sequence
  derived and/or modified CDS sequence (opt5) from hemagglutinin__InfluenzaA__ACU80058
augaagaccaucauugcccugagcuacauccucugccugguguucgcucagaaacuucccggcaacgacaauuccacagccacgcugugucucgggcaccaugcggucccuaacggaaccauuguuaagacaaucaccaaugaucaaauugaggugacaaacgcuaccgaacuggugcagucuagcuccacaggcgggaucugcgacucuccgcaccagauccuugauggagagaauuguacccugauugacgcccuccugggcgauccccagugcgacggguuucaaaacaaaaagugggaucuguucgucgaaagaagcaaagccuguuccaauugcuauccuuacgacgugcccgauuaugcuucucuccggagccugguugccuccagcggaacgcuugaguuuaacaaugaaucuuucaacuggaccggcgugacacagaauggcaccuccagcgcuuguaagcgcagaucuaacaauuccuuuuucagccggcugaacuggcucacacaucugaaguuuaaauacccugcccuuaaugucaccaugcccaacaacgagaaguucgacaaacuguauaucuggggagugcaccauccugggacggauaaugaccagauuuuucucuacgcgcaggccucuggccgcaucacaguuuccaccaagagaagccaacagacagugauuccgaacaucgggucccggccccgcgucagaaauauuccuucucggaucagcaucuauuggaccauugugaaacccggagauauccugcugauuaacuccaccggcaaucucaucgcuccucgcggguacuucaagauuagaagcggaaagucuuccaucaugcggagcgacgcccccaucggcaaaugcaacucugaguguauuacaccgaauggcagcaucccuaacgacaagcccuuucagaaugugaaccgcauuacguacggggcuugcccuagauaugucaaacagaauacccugaaacuugccacaggaaugcggaacguucccgaaaagcaaacccgcggcaucuucggggcgauugccggauuuaucgagaauggcugggaagggaugguggauggaugguacggcuucagacaccagaacuccgagggcaucgggcaggcugccgaccugaagucuacacaagcugccauuaaucagaucaacggaaaacucaaccggcugauuggcaagaccaaugagaaguuccaccagaucgaaaaagaguuuagcgaaguggaggggcgcauucaggaucuugaaaaguaugucgaggacacgaaaaucgaucugugguccuacaacgccgagcuccugguggcucuggaaaaucaacauacaauugaccucaccgauagcgagaugaacaagcuguucgaaagaaccaaaaagcagcuucgggagaaugcggaagacaugggaaacggcuguuuuaagaucuaucacaaaugcgauaaugccugcaucgggucuauuagaaacggcacauacgaccaugauguuuaucgcgacgaggcucugaauaaccgguuccagaucaagggaguggagcucaaauccggcuacaaggacuggauucuguggaucagcuuugccauuucuuguuuccuucugugcgucgcccuccugggguuuaucaugugggcuugucagaaaggaaauaucagaugcaacauuuguaucuga

SEQ ID NO: 195246 - RNA, 1698 nt, Artificial Sequence; identical to SEQ ID NO: 194560
  derived and/or modified CDS sequence (opt5) from hemagglutinin__InfluenzaA__ACU80069

SEQ ID NO: 195247 - RNA, 1698 nt, Artificial Sequence
  derived and/or modified CDS sequence (opt5) from hemagglutinin__InfluenzaA__ACU80080
augaaggugaaacugcucguccugcuuugcaccuucacagccacguacgcugacaccaucuguauuggcuaucacgccaacaauagcacagauaccguugacacagugcuggagaagaacgugaccgucacacauuccgugaaucuccuggaaaacucucacaaugggaaacuuugccugcucaagggaaucgcgccccugcagcugggcaacuguagcguugcuggguggauucucggaaauccugagugcgaacugcuuaucuccaaagagucuuggagcuacauuguggaaaagccgaaccccgagaauggcaccuguuauccugggcauuuugccgauuacgaggaacugagagagcaacucuccucugucagcuccuucgaacgguuugagaucuuccccaaggagagcucuuggccuaaccacacggugaccggaguuuccgccagcugcucucauaauggcgaauccagcuuuuaucgcaaccugcuuuggcugacaggcaaaaaugggcucuaccccaaccugucuaaguccuaugcuaauaacaaagagaaggaagugcugguccucuggggagugcaccacccuccgaacaucguggaccagaaaacccuguacagaacagagaaugccuacgucagcguuguguccucucauuauagccggaaguucacccccgaaauugcuaagcgcccuaaagugagagaucaggagggccggaucaacuacuauuggacgcuucuggagcccggggacacaauuaucuuugaagccaauggaaaccucauugcgccucgcuacgccuucgcucuguccagaggcuuugggagcggaaucauuaauucuaacgcccccauggauaagugugacgcuaaaugccagaccccgcaaggcgccaucaauuccagccuuccuuuccagaacguccaccccgugacaaucggcgaguguccuaaguauguucggucugcgaaacugcgcauggugaccgggcucagaaauauucccagcauccagucccggggacuguuuggcgccauugcuggguucaucgaaggaggcuggaccgggauggucgauggaugguacggcuaucaucaccagaacgagcaaggcucuggguacgccgcugaccaaaagagcacacagaaugccauuaacggaaucacgaauaaagugaacuccguuaucgaaaagaugaauacccaguuuacagccgugggcaaggaguucaacaaacuggagcgcagaauggaaaaccucaauaagaaagucgaugacggguucauugauaucuggaccuacaacgcugagcugcuugugcugcucgaaaaugagcggacacuggacuuucacgacagcaacgucaagaaucuuuaugaaaaagugaagucucagcugaagaacaaugcgaaagagauuggaaacggcugcuucgaguuuuaccauaaguguaaugaugaaugcauggaguccguuaaaaacgggaccuaugacuaccccaaguauagcgaagagucuaaacucaaucgcgagaagaucgauggcauuaagcuggaauccaugggaguguaccagauccuggccaucuauagcacggucgcuuccucucucgugcugcuuguuagccugggcgccauuuccuucuggaugugcucuaacgggagccuccaguguagaaucugcauuuga

SEQ ID NO: 195248 - RNA, 1698 nt, Artificial Sequence; identical to SEQ ID NO: 194846
  derived and/or modified CDS sequence (opt5) from hemagglutinin__InfluenzaA__ACU80091

SEQ ID NO: 195249 - RNA, 1701 nt, Artificial Sequence; identical to SEQ ID NO: 194609
  derived and/or modified CDS sequence (opt5) from hemagglutinin__InfluenzaA__ACU80102

SEQ ID NO: 195250 - RNA, 1701 nt, Artificial Sequence
  derived and/or modified CDS sequence (opt5) from hemagglutinin__InfluenzaA__ACU80113
augaagaccaucauugcccugagcuacauccucugccugguguucgcucagaaauuucccggcaacgacaauuccacagccacgcuuugucuggggcaccaugcggucccuaacggaaccauuguuaagacaaucaccaaugaucaaauugaggugacaaacgcuaccgaacucgugcagucuagcuccacaggcgagaucugcgacucuccgcaccagauccuggauggggaaaauuguacccuuauugacgcccugcucggagauccccagugcgacggcuuccaaaacaaaaauugggaucuguuugucgagagaagcaaggccuauuccaacuguuacccuuaugacgugcccgauuacgcuucucugcggagccucguugccuccagcgggacgcuggaguucaauaacgaaucuuuuaauuggaccggagugacacagaacggcaccuccagcgcuugcauccgcagaucuaauaacuccuucuuuagccggcuuaauuggcugacacauucuaaauucaaguauccugcccucaacgucaccaugcccaacaaugagaacuuugacaagcuguacauuuggggcgugcaccauccugggacggauaaugaccagaucuuccuuuaugcgcaggccuccggacgcauuacaguuagcaccaaaagaucccaacagacagugaucccgaacauuggcucucggccccgcgucagaaauaucccuagccggaucuccauuuacuggaccaucgugaagcccggggauauucugcucaucaacagcaccggaaaucugauugcuccucgcggcuacuuuaaaaucagaucugggaaguccagcaucaugcggucugacgcccccauuggaaaauguaacagcgaaugcaucacaccgaauggcuccauuccuaacgacaagcccuuccagaaugugaaccgcaucacguauggcgcuuguccuagauacgucaagcagaauacccugaaacucgccacagggaugcggaacguucccgagaagcaaacccgcggaauuuuuggcgcgaucgccggguucaucgaaaauggaugggagggcaugguggaugggugguauggauucagacaccagaacucugagggcauuggccaggcugccgaccugaaaagcacacaagcugccaucgaucagauuaacgggaaacuuaaucggcugaucggaaagaccaacgaaaaguuucaccagauugagaaagaguucuccgaaaucgaaggccgcauucaggaccucgagaaguacguggaggauacgaagaucgaccuguggagcuauaaugccgaacuucuggucgcucucgagaaccaacauacaaucgaucugaccgacucugaaaugaauaaacuguuugagaagaccaaaaagcagcucagagaaaacgcggaggauauggggaauggaugcuucaaaauuuaccacaagugugacaacgccugcaucggcuccauucggaaugggacauaugaucaugacguguacagagacgaggcucugaacaaucgcuuucagaucaagggcguugaacuuaaaagcggauacaagaacuggauucuguggaucucuuucgccaucuccugcuuucuccuguguauugcccuucugggcuucaucaugugggcuugccagaaagggaauauucgguguaacaucugcauuuga

SEQ ID NO: 195251 - RNA, 1701 nt, Artificial Sequence
  derived and/or modified CDS sequence (opt5) from hemagglutinin__InfluenzaA__ACU80135
augaagaccaucauugcccugagcuacauccucugccugguguucgcucagaaauuucccggcaacgacaauuccacagccacgcuuugucuggggcaccaugcggucccuaacggaaccaugguuaagacaauuaccaaugaucaaaucgaggugacaaacgcuaccgaacucgugcagucuagcuccacaggcgagauuugcgacucuccgcaccagauccuggauggggaaaauuguacccuuaucgacgcccugcucggagauccccagugcgacggcuuccaaaacaaaaauugggaucuguuugucgagagaagcaaggccuauuccaacuguuacccuuaugacgugcccgauuacgcuucucugcggagccucguugccuccagcgggacgcuggaguucaauaacgaaucuuuuaauuggaccggagugacacagaacggcaccuccagcgcuugcauucgcagaucuaauaacuccuucuuuagccggcuuaauuggcugacacauucuaaauucaaguauccugcccucaacgucaccaugcccaacaaugagaacuuugacaagcuguacaucuggggcgugcaccauccugggacggauaaugaccagauuuuccuuuaugcgcaggccuccggacgcaucacaguuagcaccaaaagaucccaacagacagugauuccgaacaucggcucucggccccgcgucagaaauauuccuagccggaucuccaucuacuggaccauugugaagcccggggauauccugcucauuaacagcaccggaaaucugaucgcuccucgcggcuacuuuaaaauuagaucugggaaguccagcaucaugcggucugacgcccccaucggaaaauguaacagcgaaugcauuacaccgaauggcuccaucccuaacgacaagcccuuccagaaugugaaccgcauuacguauggcgcuuguccuagauacgucaagcagaauacccugaaacucgccacagggaugcggaacguucccgagaagcaaacccgcggaaucuuuggcgcgauugccggguucaucgaaaauggaugggagggcaugguggaugggugguauggauucagacaccagaacucugagggcaucggccaggcugccgaccugaaaagcacacaagcugccauugaucagaucaacgggaaacuuaaucggcugauuggaaagaccaacgaaaaguuucaccagaucgagaaagaguucuccgaaguggaaggccgcauucaggaccucgagaaguacgucgaggauacgaagaucgaccuguggagcuauaaugccgaacuucugguggcucucgagaaccaacauacaauugaucugaccgacucugaaaugaauaaacuguuugagaagaccaaaaagcagcucagagaaaacgcggaggauauggggaauggaugcuucaaaaucuaccacaagugugacaacgccugcaucggcuccauucggaaugggacauaugaucaugacguuuacagagacgaggcucugaacaaucgcuuucagaucaagggcguggaacuuaaaagcggauacaaggauuggauucuguggaucucuuucgccauuuccugcuuucuccuguguaucgcccuucugggcuucaucaugugggcuugccagaaagggaacauucgguguaauaucugcauuuga

SEQ ID NO: 195252 - RNA, 1701 nt, Artificial Sequence
  derived and/or modified CDS sequence (opt5) from hemagglutinin__InfluenzaA__ACU80146
augaagaccaucauugcccugagcuacauccucugccugguguucgcucagaaacuucccggcaacgacaauuccacagccacgcugugucucgggcaccaugcggucccuaacggaaccauuguuaagacaaucaccaaugaucaaauugaggugacaaacgcuaccgaacuggugcagucuagcuccacaggcgagaucugcgacucuccgcaccagauccuugauggggaaaauuguacccugauugacgcccuccugggagauccccagugcgacggcuuucaaaacaaaaagugggaucuguucgucgagagaagcaaagccuauuccaauuguuacccuuaugacgugcccgauuacgcuucucuccggagccugguugccuccagcgggacgcuugaauuuaacaaugagucuuucaacuggaccggagugacacagaauggcaccuccagcgcuugcauccgcagaucuaacaauuccuuuuucagccggcugaacuggcucacacauucuaaguuuaaguauccugcccugaaugucaccaugcccaacaacgaggaguucgacaaacuuuacauuuggggcgugcaccauccugggacggauaaugaccagaucuuucuguaugcgcaggccuccggacgcauuacaguuagcaccaagagaucccaacagacagugaucccgaacauuggcucucggccccgcgucagaaauaucccuagccggaucuccauuuacuggaccaucgugaaacccggggauauucuccugaucaacagcaccggaaaucugauugcuccucgcggcuacuucaagaucagaucugggaaauccagcaucaugcggucugacgcccccauuggaaaguguaacagcgaaugcaucacaccgaauggcuccauuccuaacgacaagcccuuucagaaugugaaccgcaucacguauggcgcuuguccuagauacgucaaacagaauacccucaagcuggccacagggaugcggaacguucccgaaaaacaaacccgcggaauuuucggcgcgaucgccggguuuaucgagaauggaugggagggcaugguggaugggugguauggauucagacaccagaacucugaaggcauuggccaggcugccgaccuuaagagcacacaagcugccaucgaucagauuaaugggaaacugaaccggcucaucggaaagaccaacgagaaauuccaccagauugaaaaggaguuuuccgaaguggagggcagaauccaggaccuggagaaguacgucgaagauacgaaaauugaccuuuggagcuauaaugccgagcugcucguggcucuggaaaaccaacauacaaucgaucugaccgacucugagaugaauaaacucuucgaaaagaccaagaaacagcugcgcgagaacgcggaggauauggggaauggaugcuuuaagaucuaccacaagugugacaacgccugcauuggcuccauccggaaugggacauaugaucaugacguuuacagagacgaagcucuuaacaaucgcuuccagauuaaaggcguggagcucaagagcggauacaaagauuggauccuguggauuucuuuugccaucuccugcuuccugcuuugugucgcccugcucggccugaucaugugggcuugccagaaggggaacauucgguguaauaucugcauuuga

SEQ ID NO: 195253 - RNA, 1701 nt, Artificial Sequence; identical to SEQ ID NO: 194506
  derived and/or modified CDS sequence (opt5) from hemagglutinin__InfluenzaA__ACU80157

SEQ ID NO: 195254 - RNA, 1698 nt, Artificial Sequence; identical to SEQ ID NO: 195242
  derived and/or modified CDS sequence (opt5) from hemagglutinin__InfluenzaA__ACU80168

SEQ ID NO: 195255 - RNA, 1701 nt, Artificial Sequence; identical to SEQ ID NO: 194506
  derived and/or modified CDS sequence (opt5) from hemagglutinin__InfluenzaA__ACU80179

SEQ ID NO: 195256 - RNA, 1701 nt, Artificial Sequence
  derived and/or modified CDS sequence (opt5) from hemagglutinin__InfluenzaA__ACU80190
augaagaccaucauugcccugagcuacauccucugccugguguucgcucagaaacuucccggcaacgacaauuccacagccacgcugugucucgggcaccaugcggucccuaacggaaccauuguuaagacaaucaccaaugaucaaauugaggugacaaacgcuaccgaacuggugcagucuagcuccacaggcgagaucugcgacucuccgcaccagauccuugauggggaaaauuguacccugauugacgcccuccugggagauccccagugcgacggcuuucaaaacaaaaagugggaucuguucgucgagagaagcaaagccuauuccaauuguuacccuuaugacgugcccgauuacgcuucucuccggagccugguugccuccagcgggacgcuugaauuuaacaaugagucuuucaacuggaccggagugacacagaauggcaccuccagcgcuugcauccgcagaucuaacaauuccuuuuucagccggcugaacuggcucacacauucuaaguuuaaguauccugcccugaaugucaccaugcccaacaacgaggaguucgacaaacuuuacauuuggggcgugcaccauccugggacggauaaugaccagaucuuucuguaugcgcaggccuccggacgcauuacaguuagcaccaagagaucccaacagacagugaucccgaacauuggcucucggccccgcgucagaaauaucccuagccggaucuccauuuacuggaccaucgugaaacccggggauauucuccugaucaacagcaccggaaaucugauugcuccucgcggcuacuucaagaucagaucugggaaauccagcaucaugcggucugacgcccccauuggaaaguguaacagcgaaugcaucacaccgaauggcuccauuccuaacgacaagcccuuucagaaugugaaccgcaucacguauggcgcuuguccuagauacgucaaacagaauacccucaagcuggccacagggaugcggaacguucccgaaaaacaaacccgcggaauuuucggcgcgaucgccggguuuaucgagaauggaugggagggcaugguggaugggugguauggauucagacaccagaacucugaaggcauuggccaggcugccgaccuuaagagcacacaagcugccaucgaucagauuaaugggaaacugaaccggcucaucggaaagaccaacgagaaauuccaccagauugaaaaggaguuuuccgaaguggagggcagaauccaggaccuggagaaguacgucgaagauacgaaaauugaccuuuggagcuauaaugccgagcugcucguggcucuggaaaaccaacauacaaucgaucugaccgacucugagaugaauaaacucuucgaaaagaccaagaaacagcugcgcgagaacgcggaggauauggggaauggaugcuuuaagaucuaccacaagugugacaacgccugcauuggcuccauccggaaugggacauaugaucaugacguuuacagagacgaagcucuuaacaaucgcuuccagauuaaaggcaucgagcucaagagcggauacaaagauuggauucuguggaucucuuuugccaucuccugcuuccugcuuuguguggcccugcucggcuuuauuaugugggcuugccagaaggggaacauccgguguaauauuugcaucuga

SEQ ID NO: 195257 - RNA, 1701 nt, Artificial Sequence
  derived and/or modified CDS sequence (opt5) from hemagglutinin__InfluenzaA__ACU80201
augaagaccaucauugcccugagcuacauccucugccugguguucgcucagaaacuucccggcaacgacaauuccacagccacgcugugucucgggcaccaugcggucccuaacggaaccauuguuaagacaaucaccaaugaucaaauugaggugacaaacgcuaccgaacuggugcagucuagcuccacaggcgagaucugcgacucuccgcaccagauccuugauggggaaaauuguacccugauugacgcccuccugggagauccccagugcgacggcuuucaaaacaaaaagugggaucuguucgucgagagaagcaaagccuauuccaauuguuacccuuaugacgugcccgauuacgcuucucuccggagccugguugccuccagcgggacgcuugaauuuaacaaugagucuuucaacuggaccggagugacacagaauggcaccuccagcgcuugcauccgcagaucuaacaauuccuuuuucagccggcugaacuggcucacacaucugaaguuuaaguauccugcccuuaaugucaccaugcccaacaacgagcaguucgacaaacuguacauuuggggcgugcaccauccugggacggauaaugaccagaucuuucucuaugcgcaagccucuggacgcauuacaguuuccaccaagagaagccagcagacagugaucccgaacauuggcucccggccccgcgucagaaauaucccuucucggaucagcauuuacuggaccaucgugaaacccggggauauucugcugaucaacuccaccggaaaucucauugcuccucgcggcuacuucaagaucagaagcgggaaaucuuccaucaugcggagcgacgcccccauuggaaaguguaacucugaaugcaucacaccgaauggcagcauuccuaacgacaagcccuuucagaaugugaaccgcaucacguauggcgcuuguccuagauacgucaaacaaaauacccugaaacuugccacagggaugcggaacguucccgagaagcagacccgcggaauuuucggcgcgaucgccggguuuaucgaaaauggaugggagggcaugguggaugggugguauggauucagacaccagaacuccgagggccggggccaagcugccgaccugaagucuacacaggcugccauugaucagaucaaugggaaacucaacagacugauuggaaagaccaacgaaaaauuccaccagaucgagaaggaauuuagcgagguggaaggccgcauucaagaccuugagaaguacgucgaggauacgaaaaucgaccugugguccuauaaugccgaacuccugguggcucuggagaaccagcauacaauugaucucaccgacagcgaaaugaauaagcuguucgagaaaaccaagaaacagcuucgggaaaacgcggaggauauggggaauggaugcuuuaagaucuaccacaagugugacaacgccugcaucggcucuauuagaaaugggacauaugaucaugacguuuaccgcgacgaggcucugaacaaucgguuccagaucaaaggcguggaacucaaguccggauacaaagauuggauucuguggaucagcuuugccauuucuugcuuccuucugugugucgcccuccugggcuuuaucaugugggcuugccaaaaggggaacaucaaauguaauauuugcaucuga

SEQ ID NO: 195258 - RNA, 1701 nt, Artificial Sequence; identical to SEQ ID NO: 194506
  derived and/or modified CDS sequence (opt5) from hemagglutinin__InfluenzaA__ACU80212

SEQ ID NO: 195259 - RNA, 1698 nt, Artificial Sequence
  derived and/or modified CDS sequence (opt5) from hemagglutinin__InfluenzaA__ACU80234
augaaggugaaacugcucguccugcuuugcaccuucgccgcuacauacgccgacacgaucuguauuggcuaucacgcgaacaauagcaccgauacaguugacaccgugcuggagaagaacgugacagucacccauuccgugaaucuccuggaaaacucucacaaugggaaacuuugccugcucaagggaaucgcuccccugcagcugggcaacuguagcguugccggguggauucucggaaauccugagugcgaacugcuuaucuccaaagagucuuggagcuacauuguggaaaagccgaaccccgagaauggcacauguuauccugggcauuuugccgauuacgaggaacugagagagcaacucuccucugucagcuccuucgaacgguuugagaucuuccccaaggagagcucuuggccuaaccacaccgugacgggaguuuccgcuagcugcucucauaauggcgaauccagcuuuuauaaaaaccugcuuuggcugaccggcaagaaugggcucuaccccaaccugucuaaauccuaugccaauaacaaggagaaagaagugcugguccucuggggagugcaccacccuccgaacaucggcgaccagaaggcucuguaccauacagagaaugccuacgugagcgucguuuccucucacuauagccgcaaguucacccccgaaauugcgaaaagaccuaaggugcgggaucaggaggggcgcaucaacuacuauuggacacuucuggagcccggagacaccauuaucuuugaagccaauggcaaccucauugcuccuagauacgccuucgcucugucccggggguuuggaagcggcaucauuaauucuaacgcccccauggauaaaugugacgcgaagugccagacgccgcaaggcgccaucaauuccagccuuccuuuccagaacgugcaucccgucacaaucggggaguguccuaaauaugugcgcucugcuaagcugagaaugguuaccggacuccggaauauucccagcauccagucccgcggccuguuuggggccauugcuggauucaucgaaggcggguggacaggaaugguggauggcugguacggcuaucaccaccagaacgagcaagggucuggauacgccgccgaccagaaaagcacccagaaugcuauuaacggcaucaccaauaaggucaacuccgugaucgaaaagaugaauacacaguuuacggcgguugggaaagaguucaacaagcuggagagacggauggaaaaccucaauaaaaagguggaugacggauucauugauaucuggaccuacaacgccgagcugcuuguccugcucgaaaaugagcgcacacuggacuuucaugacagcaacgugaaaaaucuuuaugaaaaggucaagucucaacugaaaaacaaugcuaaggagauuggcaacgggugcuucgaguuuuaccacaaauguaaugaugaaugcauggaguccgugaagaacggcaccuaugacuaccccaaauauagcgaagagucuaagcucaauagagagaagaucgauggaguuaaacuggaauccaugggcguguaccagauucuggccaucuauagcacagucgccuccucucucgugcugcuuguuagccugggggcuaucuccuucuggaugugcucuaacggaagccuccagugucggauuugcaucuga

SEQ ID NO: 195260 - RNA, 1701 nt, Artificial Sequence
  derived and/or modified CDS sequence (opt5) from hemagglutinin__InfluenzaA__ACU80245
augaagaccaucauugcccugagcuacauccucugccugguguucgcucagaaauuucccggcaacgacaauuccacagccacgcuuugucuggggcaccaugcggucccuaacggaaccauuguuaagacaaucaccaaugaucaaauugaggugacaaacgcuaccgaacucgugcagucuagcuccacaggcgagaucugcgacucuccgcaccagauccuggauggggaaaauuguacccuuauugacgcccugcucggagauccccagugcgacggcuuccaaaacaaaaauugggaucuguuugucgagagaagcaaggccuauuccaacuguuacccuuaugacgugcccgauuacgcuucucugcggagccucguugccuccagcgggacgcuggaguucaauaacgaaucuuuuaauuggaccggagugacacagaacggcaccuccagcgcuugcauccgcagaucuaauaacuccuucuuuagccggcuuaauuggcugacacauucuaaauucaaguauccugcccucaacgucaccaugcccaacaaugagaacuuugacaagcuguacauuuggggcgugcaccauccugggacggauaaugaccagaucuuccuuuaugcgcaggccuccggacgcauuacaguuagcaccaaaagaucccaacagacagugaucccgaacauuggcucucggccccgcgucagaaauaucccuagccggaucuccauuuacuggaccaucgugaagcccggggauauucugcucaucaacagcaccggaaaucugauugcuccucgcggcuacuuuaaaaucagaucugggaaguccagcaucaugcggucugacgcccccauuggacgcuguaacagcgaaugcaucacaccgaauggcuccauuccuaacgacaaacccuuccagaaugugaacagaaucacguauggcgcuuguccucgguacgucaagcagaauacccugaagcucgccacagggaugcgcaacguucccgagaaacaaaccagaggaauuuuuggcgcgaucgccggguucaucgaaaauggaugggagggcaugguggaugggugguauggauuccggcaccagaacucugagggcauuggccaggcugccgaccuuaagagcacacaagcugccaucgaucagauuaacgggaaacugaauagacugaucggaaagaccaacgaaaaauuucaccagauugagaaggaguucuccgaaguggaaggccgcauccaggaccucgagaaauacgucgaggauacgaagauugaccuguggagcuauaaugccgaacuucugguggcucucgagaaccaacauacaaucgaucugaccgacucugaaaugaauaagcuguuugagaaaaccaagaaacagcuccgggaaaacgcggaggauauggggaauggaugcuucaagaucuaccacaaaugugacaacgccugcauuggcuccaucagaaaugggacauaugaucaugacguuuaccgcgacgaggcucugaacaaucgguuucagauuaagggcguggaacuuaagagcggauacaaagauuggauccuguggauuucuuucgccaucuccugcuuucuccuguguaucgcccuucugggcuucauuaugugggcuugccagaaggggaacaucagauguaauauuugcaucuga

SEQ ID NO: 195261 - RNA, 1701 nt, Artificial Sequence; identical to SEQ ID NO: 194609
  derived and/or modified CDS sequence (opt5) from hemagglutinin__InfluenzaA__ACU80256

SEQ ID NO: 195262 - RNA, 1698 nt, Artificial Sequence; identical to SEQ ID NO: 194560
  derived and/or modified CDS sequence (opt5) from hemagglutinin__InfluenzaA__ACU80267

SEQ ID NO: 195263 - RNA, 1698 nt, Artificial Sequence; identical to SEQ ID NO: 195242
  derived and/or modified CDS sequence (opt5) from hemagglutinin__InfluenzaA__ACU80278

SEQ ID NO: 195264 - RNA, 1701 nt, Artificial Sequence; identical to SEQ ID NO: 194506
  derived and/or modified CDS sequence (opt5) from hemagglutinin__InfluenzaA__ACU80289

SEQ ID NO: 195265 - RNA, 1701 nt, Artificial Sequence; identical to SEQ ID NO: 194609
  derived and/or modified CDS sequence (opt5) from hemagglutinin__InfluenzaA__ACU80300

SEQ ID NO: 195266 - RNA, 1701 nt, Artificial Sequence
  derived and/or modified CDS sequence (opt5) from hemagglutinin__InfluenzaA__ACU80311
augagaaccaucauugcccugagcuacauccucugccugguguucgcucagaaguuucccggcaacgacaauuccacagccacgcuuugucuggggcaccaugcggucccuaacggaaccauuguuaaaacaaucaccaaugaucaaauugaggugacaaacgcuaccgaacucgugcagucuagcuccacaggcgagaucugcgacucuccgcaccagauccuggauggggaaaauuguacccuuauugacgcccugcucggagauccccagugcgacggcuuccaaaacaagaauugggaucuguuugucgagcggagcaaagccuauuccaacuguuacccuuaugacgugcccgauuacgcuucucugcgcagccucguugccuccagcgggacgcuggaguucaauaacgaaucuuuuaauuggaccggagugacacagaacggcaccuccagcgcuugcaucagacggucuaauaacuccuucuuuagccgccuuaauuggcugacacauucuaaguucaaauauccugcccucaacgucaccaugcccaacaaugagaacuuugacaagcuguacauuuggggcgugcaccauccugggacggauaaugaccagaucuuccuuuaugcgcaggccuccggaagaauuacaguuagcaccaagcggucccaacagacagugaucccgaacauuggcucucgccccagaguccggaauaucccuagccgcaucuccauuuacuggaccaucgugaaacccggggauauucugcucaucaacagcaccggaaaucugauugcuccuagaggcuacuuuaagauccggucugggaaauccagcaucaugcgcucugacgcccccauuggaaaguguaacagcgaaugcaucacaccgaauggcuccauuccuaacgacaaacccuuccagaaugugaacagaaucacguauggcgcuuguccucgguacgucaagcagaauacccugaagcucgccacagggaugcgcaacguucccgagaaacaaaccagaggaauuuuuggcgcgaucgccggguucaucgaaaauggaugggagggcaugguggaugggugguauggauuccggcaccagaacucugagggcauuggccaggcugccgaccuuaagagcacacaagcugccaucgaucagauuaacgggaaacugaauagacugaucggaaagaccaacgaaaaauuucaccagauugagaaggaguucuccgaaguggaaggccgcauccaggaccucgagaaauacgucgaggauacgaagauugaccuguggagcuauaaugccgaacuucugguggcucucgagaaccaacauacaaucgaucugaccgacucugaaaugaauaagcuguuugagaaaaccaagaaacagcuccgggaaaacgcggaggauauggggaauggaugcuucaagaucuaccacaaaugugacaacgccugcauuggcuccaucagaaaugggacauaugaucaugacguuuaccgcgacgaggcucugaacaaucgguuucagauuaagggcguggaacuuaagagcggauacaaagauuggauccuguggauuucuuucgccaucuccugcuuucuccuguguaucgcccuucugggcuucauuaugugggcuugccagaaggggaacaucagauguaauauuugcaucuga

SEQ ID NO: 195267 - RNA, 1701 nt, Artificial Sequence; identical to SEQ ID NO: 194609
  derived and/or modified CDS sequence (opt5) from hemagglutinin__InfluenzaA__ACU80322

SEQ ID NO: 195268 - RNA, 1701 nt, Artificial Sequence; identical to SEQ ID NO: 194506
  derived and/or modified CDS sequence (opt5) from hemagglutinin__InfluenzaA__ACU80333

SEQ ID NO: 195269 - RNA, 1701 nt, Artificial Sequence; identical to SEQ ID NO: 194609
  derived and/or modified CDS sequence (opt5) from hemagglutinin__InfluenzaA__ACU80344

SEQ ID NO: 195270 - RNA, 1701 nt, Artificial Sequence; identical to SEQ ID NO: 194609
  derived and/or modified CDS sequence (opt5) from hemagglutinin__InfluenzaA__ACU80355

SEQ ID NO: 195271 - RNA, 1701 nt, Artificial Sequence; identical to SEQ ID NO: 194609
  derived and/or modified CDS sequence (opt5) from hemagglutinin__InfluenzaA__ACU80366

SEQ ID NO: 195272 - RNA, 1701 nt, Artificial Sequence
  derived and/or modified CDS sequence (opt5) from hemagglutinin__InfluenzaA__ACU80377
augaagaccaucauugcccugagcuacauccucugccugguguucgcucagaaauuucccggcaacgacaauuccacagccacgcuuugucuggggcaccaugcggucccuaacggaaccauuguuaagacaaucaccaaugaucaaauugaggugacaaacgcuaccgaacucgugcagucuagcuccacaggcgagaucugcgacucuccgcaccagauccuggauggggaaaauuguacccuuauugacgcccugcucggagauccccagugcgacggcuuccaaaacaaaaauugggaucuguuugucgagagaagcaaggccuauuccaacuguuacccuuaugacgugcccgauuacgcuucucugcggagccucguugccuccagcgggacgcuggaguucaauaacgaaucuuuuaauuggaccggagugacacagaacggcaccuccagcgcuugcauccgcagaucuaauaacuccuucuuuagccggcuuaauuggcugacacauucuaaauucaaguauccugcccucaacgucaccaugcccaacaaugagaacuuugacaagcuguacauuuggggcgugcaccauccugggacggauaaugaccagaucuuccuuuaugcgcaggccuccggacgcauuacaguuagcaccaaaagaucccaacagacagugaucccgaacauuggcucucggccccgcgucagaaauaucccuagccggaucuccauuuacuggaccaucgugaagcccggggauauucugcucaucaacagcaccggaaaucugauugcuccucgcggcuacuuuaaaaucagaucugggaaguccagcaucaugcggucugacgcccccauuggaaaauguaacuucgaaugcaucacaccgaauggcagcauuccuaacgacaagcccuuucagaaugugaaccgcaucacguauggcgcuuguccuagauacgucaagcagaauacccugaaacucgccacagggaugcggaacguucccgagaagcaaacccgcggaauuuucggcgcgaucgccggguucaucgaaaauggaugggagggcaugguggaugggugguauggauuuagacaccagaacuccgagggcauuggccaggcugccgaccugaaaucuacacaagcugccaucgaucagauuaacgggaaacuuaaucggcugaucggaaagaccaacgaaaaguuccaccagauugagaaagaauuuagcgagguggaaggcagaauccaggaccucgagaaguacgucgaggauacgaagauugaccugugguccuauaaugccgaacuucugguggcucucgagaaccaacauacaaucgaucugaccgacagcgaaaugaauaaacuguucgagaagacccgcaaacagcuccgggaaaacgcggaggauauggggaauggaugcuuuaagaucuaccacaaaugugacaacgccugcauuggcucuaucagaaaugggacauaugaucaugacguuuaccgcgacgaggcucugaacaaucgguuccagauuaagggcguggaacuuaaguccggauacaaagauuggauccuguggauuagcuuugccaugucuugcuuccuccuguguaucgcccuucugggcuuuaucaugugggcuugccagaaggggaacauuagauguaauaucugcauuuga

SEQ ID NO: 195273 - RNA, 1701 nt, Artificial Sequence; identical to SEQ ID NO: 194609
  derived and/or modified CDS sequence (opt5) from hemagglutinin__InfluenzaA__ACU80388

SEQ ID NO: 195274 - RNA, 1701 nt, Artificial Sequence; identical to SEQ ID NO: 194506
  derived and/or modified CDS sequence (opt5) from hemagglutinin__InfluenzaA__ACU80399

SEQ ID NO: 195275 - RNA, 1698 nt, Artificial Sequence
  derived and/or modified CDS sequence (opt5) from hemagglutinin__InfluenzaA__ACU80410
augaaggugaaacugcucguccugcuuugcaccuucacagccacguacgcugacaccaucuguauuggcuaucacgccaacaauagcacagauaccguugacacagugcuggagaagaacgugaccgucacacauuccgugaaucuccuggaaaacucucacaaugggaaacuuugccugcucaagggaaucgcgccccugcagcugggcaacuguagcguugcuggguggauucucggaaauccugagugcgaacugcuuaucuccaaagagucuuggagcuacauuguggaaaagccgaaccccgagaauggcaccuguuauccugggcauuuugccgauuacgaggaacugagagagcaacucuccucugucagcuccuucgaacgguuugagaucuuccccaaggagagcucuuggccuaaccacacggugaccggaguuuccgccagcugcucucauaauggcgaauccagcuuuuaucgcaaccugcuuuggcugacaggcaaaaaugggcucuaccccaaccugucuaaguccuaugcuaauaacaaagagaaggaagugcugguccucuggggagugcaccacccuccgaacaucggcgaccagaaagcccuguaccauaccgagaaugcuuacgugagcgucguuuccucucacuauagcagaaaguucacacccgaaauugccaagcggccuaaagugcgcgaucaggaggggagaaucaacuacuauuggacccuucuggagcccggagacacgauuaucuuugaagcgaauggcaaccucauugccccucgguacgcuuucgcccugucccgcggguuuggaagcggcaucauuaauucuaacgcucccauggauaagugugacgccaaaugccagacaccgcaaggcgcgaucaauuccagccuuccuuuccagaacgugcaucccgucaccaucggggaguguccuaaguaugugagaucugccaaacugcggaugguuacaggacuccgcaauauucccagcauccaguccagaggccuguuuggggcuauugccggauucaucgaaggcggguggaccggaaugguggauggcugguacggcuaucaccaccagaacgagcaagggucuggauacgcugccgaccaaaagagcacccagaaugccauuaacggcaucacaaauaaagucaacuccgugaucgaaaagaugaauacgcaguuuaccgcuguugggaaggaguucaacaaacuggagcggcgcauggaaaaccucaauaagaaaguggaugacggauucauugauaucuggacauacaacgcggagcugcuuguccugcucgaaaaugagagaacccuggacuuucaugacagcaacgugaagaaucuuuaugaaaaagucaagaaccagcugaagaauaacgccaaagagauuggcaaugggugcuucgaguuuuaccacaaguguaacgaugaaugcauggagucugugaaaaauggcacauaugacuaccccaaguauuccgaagagagcaaacucaaccgggagaagaucgauggaguuaagcuggaaucuaugggcguguaccagauucuggcuaucuauuccaccgucgccagcucccucgugcugcuuguuucucugggggccaucagcuucuggaugugcuccaauggaucucuccagugucgcauuugcaucuga

SEQ ID NO: 195276 - RNA, 1701 nt, Artificial Sequence
  derived and/or modified CDS sequence (opt5) from hemagglutinin__InfluenzaA__ACU80424
augaagaccaucauugcccugagcuacauccucugccugguguucgcucagaaauuucccggcaacgacaauuccacagccacgcuuugucuggggcaccaugcggucccuaacggaaccauuguuaagacaaucaccaaugaucaaauugaggugacaaacgcuaccgaacucgugcagucuagcuccacaggcgagaucugcgacucuccgcaccagauccuggauggggaaaauuguacccuuauugacgcccugcucggagauccccagugcgacggcuuccaaaacaaaaauugggaucuguuugucgagagaagcaaggccuauuccaacuguuacccuuaugacgugcccgauuacgcuucucugcggagccucguugccuccagcgggacgcuggaguucaauaacgaaucuuuuaauuggaccggagugacacagaacggcaccuccagcgcuugcauccgcagaucuaauaacuccuucuuuagccggcuuaauuggcugacacauucuaaauucaaguauccugcccucaacgucaccaugcccaacaaugagaacuuugacaagcuguacauuuggggcgugcaccauccugggacggauaaugaccagaucuuccuuuaugcgcaggccuccggacgcauuacaguuagcaccaaaagaucccaacagacagugaucccgaacauuggcucucggccccgcgucagaaauaucccuagccggaucuccauuuacuggaccaucgugaagcccggggauauucugcucaucaacagcaccggaaaucugauugcuccucgcggcuacuuuaaaaucagaucugggaaguccagcaucaugcggucugacgcccccauuggaaaauguaacuucgaaugcaucacaccgaauggcagcauuccuaacgacaagcccuuucagaaugugaaccgcaucacguauggcgcuuguccuagauacgucaagcagaauacccugaaacucgccacagggaugcggaacguucccgagaagcaaacccgcggaauuuucggcgcgaucgccggguucaucgaaaauggaugggagggcaugguggaugggugguauggauuuagacaccagaacuccgagggcauuggccaggcugccgaccugaaaucuacacaagcugccaucgaucagauuaacgggaaacuuaaucggcugaucggaaagaccaacgaaaaguuccaccagauugagaaagaauuuagcgagguggaaggcagaauccaggaccucgagaaguacgucgaggauacgaagauugaccugugguccuauaaugccgaacuucugguggcucucgagaaccaacauacaaucgaucugaccgacagcgaaaugaauaaacuguucgagaagacccgcaaacagcuccgggaaaacgcggaggauauggggaauggaugcuuuaagaucuaccacaaaugugacaacgccugcauuggcucuaucagaaaugggacauaugaucaugacguuuaccgcgacgaggcucugaacaaucgguuccagauuaagggcguggaacuuaaguccggauacaaagauuggauccuguggauuagcuuugccaucucuugcuuccuccuguguaucgcccuucugggcuuuauuaugugggcuugccagaaggggaacaucagauguaauauuugcaucuga

SEQ ID NO: 195277 - RNA, 1701 nt, Artificial Sequence; identical to SEQ ID NO: 195276
  derived and/or modified CDS sequence (opt5) from hemagglutinin__InfluenzaA__ACU80435

SEQ ID NO: 195278 - RNA, 1698 nt, Artificial Sequence
  derived and/or modified CDS sequence (opt5) from hemagglutinin__InfluenzaA__ACU80446
augaaggugaaacugcucguccugcuuugcaccuucacagccacguacgcugacaccaucuguauuggcuaucacgccaacaauagcacagauaccguugacacagugcuggagaagaacgugaccgucacacauuccgugaaucuccuggaaaacucucacaaugggaaacuuugccugcucaagggaaucgcgccccugcagcugggcaacuguagcguugcuggguggauucucggaaauccugagugcgaacugcuuaucuccaaagagucuuggagcuacauuguggaaaagccgaaccccgagaauggcaccuguuauccugggcauuuugccgauuacgaggaacugagagagcaacucuccucugucagcuccuucgaacgguuugagaucuuccccaaggagagcucuuggccuaaccacacggugaccggaguuuccgccagcugcucucauaauggcgaauccagcuuuuaucgcaaccugcuuuggcugacaggcaaaaaugggcucuaccccaaccugucuaaguccuaugcuaauaacaaagagaaggaagugcugguccucuggggagugcaccacccuccgaacaucggcgaccagaaaacccuguaccauacagagaaugccuacgugagcgucguuuccucucacuauagcagaaaguucacccccgaaauugcuaagcggccuaaagugcgcgaucaggaggggagaaucaacuacuauuggacgcuucuggagcccggagacacaauuaucuuugaagccaauggcaaccucauugcgccucgguacgccuucgcucugucccgcggguuuggaagcggcaucauuaauucuaacgcccccauggauaagugugacgcuaaaugccagaccccgcaaggcgccaucaauuccagccuuccuuuccagaacgugcaucccgucacaaucggggaguguccuaaguaugugagaucugcgaaacugcggaugguuaccggacuccgcaauauucccagcauccaguccagaggccuguuuggggccauugcuggauucaucgaaggcggguggaccggaaugguggauggcugguacggcuaucaccaccagaacgagcaagggucuggauacgccgcugaccaaaagagcacacagaaugccauuaacggcaucacgaauaaagucaacuccgugaucgaaaagaugaauacccaguuuacagccguugggaaggaguucaacaaacuggagcggcgcauggaaaaccucaauaagaaaguggaugacggauucauugauaucuggaccuacaacgcugagcugcuuguccugcucgaaaaugagagaacacuggacuuucaugacagcaacgugaagaaucuuuaugaaaaagucaagucucagcugaagaacaaugcgaaagagauuggcaacgggugcuucgaguuuuaccacaaguguaaugaugaaugcauggaguccgugaaaaacggcaccuaugacuaccccaaguauagcgaagagucuaaacucaaucgggagaagaucgauggaguuaagcuggaauccauggagguguaccagauucuggccaucuauagcacggucgcuuccucucucgugcugcuuguuagccugggcgccaucuccuucuggaugugcucuaacgggagccuccagugucgcauuugcaucuga

SEQ ID NO: 195279 - RNA, 1701 nt, Artificial Sequence; identical to SEQ ID NO: 194506
  derived and/or modified CDS sequence (opt5) from hemagglutinin__InfluenzaA__ACU80458

SEQ ID NO: 195280 - RNA, 1701 nt, Artificial Sequence; identical to SEQ ID NO: 194506
  derived and/or modified CDS sequence (opt5) from hemagglutinin__InfluenzaA__ACU80470

SEQ ID NO: 195281 - RNA, 1701 nt, Artificial Sequence; identical to SEQ ID NO: 194609
  derived and/or modified CDS sequence (opt5) from hemagglutinin__InfluenzaA__ACU80600

SEQ ID NO: 195282 - RNA, 1701 nt, Artificial Sequence; identical to SEQ ID NO: 195276
  derived and/or modified CDS sequence (opt5) from hemagglutinin__InfluenzaA__ACU80611

SEQ ID NO: 195283 - RNA, 1701 nt, Artificial Sequence; identical to SEQ ID NO: 194609
  derived and/or modified CDS sequence (opt5) from hemagglutinin__InfluenzaA__ACU80622

SEQ ID NO: 195284 - RNA, 1701 nt, Artificial Sequence; identical to SEQ ID NO: 194506
  derived and/or modified CDS sequence (opt5) from hemagglutinin__InfluenzaA__ACU80633

SEQ ID NO: 195285 - RNA, 1701 nt, Artificial Sequence
  derived and/or modified CDS sequence (opt5) from hemagglutinin__InfluenzaA__ACU80644
augaagaccaucauugcccugagcuacauccucugccugguguucgcucagaaacuucccggcaacgacaauuccacagccacgcugugucucgggcaccaugcggucccuaacggaaccauuguuaagacaaucaccaaugaucaaauugaggugacaaacgcuaccgaacuggugcagucuagcuccacaggcgagaucugcgacucuccgcaccagauccuugauggggaaaauuguacccugauugacgcccuccugggagauccccagugcgacggcuuucaaaacaaaaagugggaucuguucgucgagagaagcaaagccuauuccaauuguuacccuuaugacgugcccgauuacgcuucucuccggagccugguugccuccagcgggacgcuugaauuuaacaaugagucuuucaacuggaccggagugacacagaauggcaccuccagcgcuugcauccgcagaucuaacaauuccuuuuucagccggcugaacuggcucacacauucuaaguuuaaguauccugcccugaaugucaccaugcccaacaacgaggaguucgacaaacuuuacauuuggggcgugcaccauccugggacggauaaugaccagaucuuucuguaugcgcaggccuccggacgcauuacaguuagcaccaagagaucccaacagacagugaucccgaacauuggcucucggccccgcgucagaaauaucccuagccggaucuccauuuacuggaccaucgugaaacccggggauauucuccugaucaacagcaccggaaaucugauugcuccucgcggcuacuucaagaucagaucugggaaauccagcaucaugcggucugacgcccccauuggaaaguguaacagcgaaugcaucacaccgaauggcuccauuccuaacgacaagcccuuucagaaugugaaccgcaucacguauggcgcuuguccuagauacgucaaacagaauacccucaagcuggccacagggaugcggaacguucccgaaaaacaaacccgcggaauuuucggcgcgaucgccggguuuaucgagaauggaugggagggcaugguggaugggugguauggauucagacaccagaacucugaaggcauuggccaggcugccgaccuuaagagcacacaagcugccaucgaucagauuaaugggaaacugaaccggcucaucggaaagaccaacgagaaauuccaccagauugaaaaggaguuuuccgaaguggagggcagaauccaggaccuggagaaguacgucgaagauacgaaaauugaccuuuggagcuauaaugccgagcugcucguggcucuggaaaaccaacauacaaucgaucugaccgacucugagaugaauaaacucuucgaaaagaccaagaaacagcugcgcgagaacgcggaggauauggggaauggaugcuuuaagaucuaccacaagugugacaacgccugcauuggcuccauccggaaugggacauaugaucaugacguuuacagagacgaagcucuuaacaaucgcuuccagauuaaaggcguggagcucaagagcggauacaaagauuggauccuguggauuucuuuugccaucuccugcuuccugcuuugugucgcccugcucggcuuuaucaugugggcuugccagaaggggaacauucgguguaauaucugcauuuga

SEQ ID NO: 195286 - RNA, 1701 nt, Artificial Sequence; identical to SEQ ID NO: 194506
  derived and/or modified CDS sequence (opt5) from hemagglutinin__InfluenzaA__ACU80655

SEQ ID NO: 195287 - RNA, 1701 nt, Artificial Sequence; identical to SEQ ID NO: 194506
  derived and/or modified CDS sequence (opt5) from hemagglutinin__InfluenzaA__ACU80666

SEQ ID NO: 195288 - RNA, 1701 nt, Artificial Sequence; identical to SEQ ID NO: 194000
  derived and/or modified CDS sequence (opt5) from hemagglutinin__InfluenzaA__ACU80677

SEQ ID NO: 195289 - RNA, 1701 nt, Artificial Sequence; identical to SEQ ID NO: 194506
  derived and/or modified CDS sequence (opt5) from hemagglutinin__InfluenzaA__ACU80688

SEQ ID NO: 195290 - RNA, 1701 nt, Artificial Sequence; identical to SEQ ID NO: 194609
  derived and/or modified CDS sequence (opt5) from hemagglutinin__InfluenzaA__ACU80699

SEQ ID NO: 195291 - RNA, 1701 nt, Artificial Sequence; identical to SEQ ID NO: 194609
  derived and/or modified CDS sequence (opt5) from hemagglutinin__InfluenzaA__ACU80710

SEQ ID NO: 195292 - RNA, 1701 nt, Artificial Sequence
  derived and/or modified CDS sequence (opt5) from hemagglutinin__InfluenzaA__ACU80721
augaagaccaucauugcccugagcuacauccucugccugguguucgcucagaaacuucccggcaacgacaauuccacagccacgcugugucucgggcaccaugcggucccuaacggaaccauuguuaagacaaucaccaaugaucaaacagaggugaccaacgcuacagaacuggugcagucuagcuccaccggcgagauuugcgacucuccgcaccagauccuugauggggaaaauuguacgcugaucgacgcccuccugggagauccccagugcgacggcuuucaaaacaaaaagugggaucuguucgucgagagaagcaaagccuauuccaauuguuacccuuaugacgugcccgauuacgcuucucuccggagccugguugccuccagcgggacccuugaauuuaacaaugagucuuucaacuggacaggagugacccagaauggcacauccagcgcuugcauucgcagaucuaacaauuccuuuuucagccggcugaacuggcucacccaucugaaguuuaaguauccugcccuuaaugucacgaugcccaacaacgagcaguucgacaaacuguacaucuggggcgugcaccauccugggacagauaaugaccagauuuuucucuaugcgcaagccucuggacgcaucaccguuuccacaaagagaagccagcagaccgugauuccgaacaucggcucccggccccgcgucagaaauauuccuucucggaucagcaucuacuggaccauugugaaacccggggauauccugcugauuaacuccacaggaaaucucaucgcuccucgcggcuacuucaagauuagaagcgggaaaucuuccaucaugcggagcgacgcccccaucggaaaguguaacucugaaugcauuacgccgaauggcagcaucccuaacgacaagcccuuucagaaugugaaccgcauuaccuauggcgcuuguccuagauacgucaaacaaaauacacugaaacuugccaccgggaugcggaacguucccgagaagcagacacgcggaaucuucggcgcgauugccggguuuaucgaaaauggaugggagggcaugguggaugggugguauggauucagacaccagaacuccgagggccggggccaagcugccgaccugaagucuacccaggcugccaucgaucagauuaaugggaaacucaacagacugaucggaaagacgaacgaaaaauuccaccagauugagaaggaauuuagcgagguggaaggccgcauccaagaccuugagaaguacgucgaggauacaaaaauugaccugugguccuauaaugccgaacuccugguggcucuggagaaccagcauaccaucgaucucaccgacagcgaaaugaauaagcuguucgagaaaacaaagaaacagcuucgggaaaacgcggaggauauggggaauggaugcuuuaagauuuaccacaagugugacaacgccugcaucggcucuaucagaaaugggaccuaugaucaugacguuuaccgcgacgaggcucugaacaaucgguuccagauuaaaggcguggaacucaaguccggauacaaagauuggauccuguggauuagcuuugccaucucuugcuuccuucugugugucgcccuccugggcuuuauuaugugggcuugccaaaaggggaacaucagauguaauaucugcauuuga

SEQ ID NO: 195293 - RNA, 1701 nt, Artificial Sequence; identical to SEQ ID NO: 194506
  derived and/or modified CDS sequence (opt5) from hemagglutinin__InfluenzaA__ACU80732

SEQ ID NO: 195294 - RNA, 1701 nt, Artificial Sequence; identical to SEQ ID NO: 194506
  derived and/or modified CDS sequence (opt5) from hemagglutinin__InfluenzaA__ACU80743

SEQ ID NO: 195295 - RNA, 1701 nt, Artificial Sequence
  derived and/or modified CDS sequence (opt5) from hemagglutinin__InfluenzaA__ACU80754
augaagaccaucauugcccugagcuacauccucugccugguguucgcucagaaacuucccggcaacgacaauuccacagccacgcugugucucgggcaccaugcggucccuaacggaaccauuguuaagacaaucaccaaugaucaaauugaggugacaaacgcuaccgaacuggugcagucuagcuccacaggcgagaucugcgacucuccgcaccagauccuugauggggaaaauuguacccugauugacgcccuccugggagauccccagugcgacggcuuucaaaacaaaaagugggaucuguucgucgagagaagcaaagccuauuccaauuguuacccuuaugacgugcccgauuacgcuucucuccggagccugguugccuccagcgggacgcuugaauuuaacaaugagucuuucaacuggaccggagugacacagaauggcaccuccagcgcuugcauccgcagaucuaacaauuccuuuuucagccggcugaacuggcucacacaucugaaguuuaaguauccugcccuuaaugucaccaugcccaacaacgagcaguucgacaaacuguacauuuggggcgugcaccauccugggacggauaaugaccagaucuuucucuaugcgcaagccucuggacgcauuacaguuuccaccaagagaagccagcagacagugaucccgaacauuggcucccggccccgcgucagaaauaucccuucucggaucagcauuuacuggaccaucgugaaacccggggauauucugcugaucaacuccaccggaaaucucauugcuccucgcggcuacuucaagaucagaagcgggaaaucuuccaucaugcggagcgacgcccccauuggaaaguguaacucugaaugcaucacaccgaauggcagcauuccuaacgacaagcccuuucagaaugugaaccgcaucacguauggcgcuuguccuagauacgucaaacaaaauacccugaaacuugccacagggaugcggaacguucccgagaagcagacccgcggaauuuucggcgcgaucgccggguuuaucgaaaauggaugggagggcaugguggaugggugguauggauucagacaccagaacuccgagggccggggccaagcugccgaccugaagucuacacaggcugccauugaucagaucaaugggaaacucaacagacugauuggaaagaccaacgaaaaauuccaccagaucgagaaggaauuuagcgagguggaaggccgcauucaagaccuugagaaguacgucgaggauacgaaaaucgaccugugguccuauaaugccgaacuccugguggcucuggagaaccagcauacaauugaucucaccgacagcgaaaugaauaagcuguucgagaaaaccaagaaacagcuucgggaaaacgcggaggauauggggaauggaugcuuuaagaucuaccacaagugugacaacgccugcaucggcucuauuagaaaugggacauaugaucaugacguuuaccgcgacgaggcucugaacaaucgguuccagaucaaaggcguggaacucaaguccggauacaaagauuggauucuguggaucagcuuugccauuucuugcuuccuucugugugucgugcuccugggcuuuaucaugugggccugccaaaaggggaacaucagauguaauauuugcaucuga

SEQ ID NO: 195296 - RNA, 1701 nt, Artificial Sequence
  derived and/or modified CDS sequence (opt5) from hemagglutinin__InfluenzaA__ACU80765
augaagaccaucauugcccugagcuacauccucugccugguguucgcucagaaacuucccggcaacgacaauuccacagccacgcugugucucgggcaccaugcggucccuaacggaaccauuguuaagacaaucaccaaugaucaaauugaggugacaaacgcuaccgaacuggugcagucuagcuccacaggcgagaucugcgacucuccgcaccagauccuugauggggaaaauuguacccugauugacgcccuccugggagauccccagugcgacggcuuucaaaacaaaaagugggaucuguucgucgagagaagcaaagccuauuccaauuguuacccuuaugacgugcccgauuacgcuucucuccggagccugguugccuccagcgggacgcuugaauuuaacaaugagucuuucaacuggaccggagugacacagaauggcaccuccagcgcuugcauccgcagaucuaacaauuccuuuuucagccggcugaacuggcucacacauucuaaguuuaaguauccugcccugaaugucaccaugcccaacaacgaggaguucgacaaacuuuacauuuggggcgugcaccauccugggacggauaaugaccagaucuuucuguaugcgcaggccuccggacgcauuacaguuagcaccaagagaucccaacagacagugaucccgaacauuggcucucggccccgcgucagaaauaucccuagccggaucuccauuuacuggaccaucgugaaacccggggauauucuccugaucaacagcaccggaaaucugauugcuccucgcggcuacuucaagaucagaucugggaaauccagcaucaugcggucugacgcccccauuggaaaguguaacagcgaaugcaucacaccgaauggcuccauuccuaacgacaagcccuuucagaaugugaaccgcaucacguauggcgcuuguccuagauacgucaaacagaauacccucaagcuggccacagggaugcggaacguucccgaaaaacaaacccgcggaauuuucggcgcgaucgccggguuuaucgagaauggaugggagggcaugguggaugggugguauggauucagacaccagaacucugaaggcauuggccaggcugccgaccuuaagagcacacaagcugccaucgaucagauuaaugggaaacugaaccggcucaucggaaagaccaacgagaaauuccaccagauugaaaaggaguuuuccgaaguggagggcagaauccaggaccuggagaaguacgucgaagauacgaaaauugaccuuuggagcuauaaugccgagcugcucguggcucuggaaaaccaacauacaaucgaucugaccgacucugagaugaauaaacucuucgaaaagaccaagaaacagcugcgcgagaacgcggaggauauggggaauggaugcuuuaagaucuaccacaagugugacaacgccugcauuggcuccauccggaaugggacauaugaucaugacguuuacagagacgaagcucuuaacaaucgcuuccagauuaaaggcguggagcucaagagcggauacaaagauuggauccuguggauuucuuuugccaucuccugcuuccugcuuuguaucgcccugcucggcuuuauuaugugggcuugccagaaggggaacauccgguguaauauuugcaucuga

SEQ ID NO: 195297 - RNA, 1701 nt, Artificial Sequence
  derived and/or modified CDS sequence (opt5) from hemagglutinin__InfluenzaA__ACU80787
augaagaccaucauugcccugagcuacauccucugccugguguucgcucagaaacuucccggcaacgacaauuccacagccacgcugugucucgggcaccaugcggucccuaacggaaccauuguuaagacaaucaccaaugaucaaauugaggugacaaacgcuaccgaacuggugcagucuagcuccacaggcgagaucugcgacucuccgcaccagauccuugauggggaaaauuguacccugauugacgcccuccugggagauccccagugcgacggcuuucaaaacaaaaagugggaucuguucgucgagagaagcaaagccuauuccaauuguuacccuuaugacgugcccgauuacgcuucucuccggagccugguugccuccagcgggacgcuugaauuuaacaaugagucuuucaacuggaccggagugacacagaauggcaccuccagcgcuugcauccgcagaucuaacaauuccuuuuucagccggcugaacuggcucacacaucugaaguuuaaguauccugcccuuaaugucaccaugcccaacaacgagcaguucgacaaacuguacauuuggggcgugcaccauccugggacggauaaugaccagaucuuucucuaugcgcaagccucuggacgcauuacaguuuccaccaagagaagccagcagacagugaucccgaacauuggcucccggccccgcgucagaaauaucccuucucggaucagcauuuacuggaccaucgugaaacccggggauauucugcugaucaacuccaccggaaaucucauugcuccucgcggcuacuucaagaucagaagcgggaaaucuuccaucaugcggagcgacgcccccauuggaaaguguaacucugaaugcaucacaccgaauggcagcauuccuaacgacaagcccuuucagaaugugaaccgcaucacguauggcgcuuguccuagauacgucaaacaaaauacccugaaacuugccacagggaugcggaacguucccgagaagcagacccgcggaauuuucggcgcgaucgccggguuuaucgaaaauggaugggagggcaugauggaugggugguauggauucagacaccagaacuccgagggccggggccaagcugccgaccugaagucuacacaggcugccauugaucagaucaaugggaaacucaacagacugauuggaaagaccaacgaaaaauuccaccagaucgagaaggaauuuagcgagguggaaggccgcauucaagaccuugagaaguacguggaggauacgaaaaucgaccugugguccuauaaugccgaacuccuggucgcucuggagaaccagcauacaauugaucucaccgacagcgaaaugaauaagcuguucgagaaaaccaagaaacagcuucgggaaaacgcggaggauauggggaauggaugcuuuaagaucuaccacaagugugacaacgccugcaucggcucuauuagaaaugggacauaugaucaugacguguaccgcgacgaggcucugaacaaucgguuccagaucaaaggcguugaacucaaguccggauacaaagauuggauucuguggaucagcuuugccauuucuugcuuccuucuguguguggcccuccugggcuuuaucaugugggcuugccaaaaggggaacaucagauguaauauuugcaucuga

SEQ ID NO: 195298 - RNA, 1701 nt, Artificial Sequence; identical to SEQ ID NO: 194506
  derived and/or modified CDS sequence (opt5) from hemagglutinin__InfluenzaA__ACU80798

SEQ ID NO: 195299 - RNA, 1701 nt, Artificial Sequence; identical to SEQ ID NO: 194506
  derived and/or modified CDS sequence (opt5) from hemagglutinin__InfluenzaA__ACU81103

SEQ ID NO: 195300 - RNA, 1701 nt, Artificial Sequence
  derived and/or modified CDS sequence (opt5) from hemagglutinin__InfluenzaA__ACU87270
augaaggccauccuggugguccuccuguacaccuucgcuacagccaacgcggacacgcuuugcauuggcuaucacgcuaauaacagcaccgauacaguugacaccgugcuggagaagaaugugacagucacccauuccgugaaccuccuggaagauaagcacaaugggaaacuuuguaagcugagaggaguugcuccccuccaucugggcaaaugcaacaucgccggguggauucugggaaauccugagugugaaucucucagcacagccuccucuuggagcuacaucguggagaccuccucuagcgacaacggcacgugcuauccgggggauuuuauugacuacgaagaacugcgggagcagcuuuccagcgucucuuccuucgaacgcuuugagaucuuccccaagaccagcucuuggccuaaucacgauuccaacaagggagugacagccgcuuguccccaugccggcgcgaaaucuuuuuauaagaaucugaucuggcucguuaaaaagggcaacagcuacccuaaacuguccaagagcuauauuaaugacaaggggaaagaagugcuuguccuguggggaauccaccaccccuccaccucugccgaucaacagagccucuaccagaacgcugacgccuacguguucgugggcacauccagauauagcaagaaauuuaagccugagauugcuauccggccgaaaguccgcgauagagaggggcggaugaauuacuauuggacccugauugaacccggagacaagaucacguucgaggccacaggcaaccugguugugccucgcuacgcguuugccauggaaagaaacgcugggucuggaauuaucaucuccgauacccccgugcaugacugcaauacaaccugucagaccccuaaaggcgccauuaacacaagccuccccuuccaaaauauccacccgauuacgaucggcaagugcccuaaguaugucaaaucuaccaagcugcggcuugcuacagggcugcgcaacgugcccagcauucaguccagaggacucuuuggcgccaucgccggguucaucgagggaggcuggaccgggaugguugacggaugguacggcuaucaucaccagaaugaacagggcucuggguacgcugcggaucugaaaagcacacaaaacgccauugacgagaucaccaauaaggugaacuccgucauugagaaaaugaauacgcaguuuacagcugugggaaaggaguucaaccaccuugagaagcggaucgaaaaucugaacaaaaagguugaugacggcuuccucgauauuuggaccuacaaugccgagcugcuggugcuccuggaaaacgagcgcacccuugacuaucaugauagcaaugucaaaaaccuguacgagaaggugagaucucagcucaaaaacaaugccaaggaaaucgggaacggauguuuugaguucuaucacaagugcgacaauacauguauggaauccgucaaaaacggcaccuacgauuauccuaaguacagcgaggaagcuaaacugaaucgggaggagaucgacggggugaaacuugaaucuacacgcauuuaucagauccuggccauuuacuccacgguugcgagcucccucgugcuggucgugucucugggcgcuaucagcuuuuggaugugcuccaacggaucucuccaaugcagaauuuguaucuga

SEQ ID NO: 195301 - RNA, 1701 nt, Artificial Sequence; identical to SEQ ID NO: 194741
  derived and/or modified CDS sequence (opt5) from hemagglutinin__InfluenzaA__ACV04228

SEQ ID NO: 195302 - RNA, 1701 nt, Artificial Sequence; identical to SEQ ID NO: 194741
  derived and/or modified CDS sequence (opt5) from hemagglutinin__InfluenzaA__ACV04238

SEQ ID NO: 195303 - RNA, 1701 nt, Artificial Sequence
  derived and/or modified CDS sequence (opt5) from hemagglutinin__InfluenzaA__ACV04248
auggaggccauccuggugguccuccuguacaccuucgcuacagccaacgcggacacgcuuugcauuggcuaucacgcuaauaacagcaccgauacaguugacaccgugcuggaaaagaaugugacagucacccauuccgugaaccuccuggaggauaaacacaaugggaaacuuuguaagcugagaggaguugcgccccuccaucugggcaagugcaacaucgccggguggauucugggaaauccugaaugugagucucucagcacagcuuccucuuggagcuacaucguggaaaccuccucuagcgacaacggcacgugcuauccgggggauuuuauugacuacgaggagcugcgggaacagcuuuccagcgucucuuccuucgagcgcuuugaaaucuuccccaaaaccagcucuuggccuaaucacgauuccaacaagggaaucacagccgcuuguccccaugccggcgccaagagcuuuuauaaaaaucugauuuggcucgugaagaaaggcaacucuuacccuaagcuguccaaaagcuauaucaaugacaaggggaaggagguucuugugcuguggggcauucaccaccccuccaccucugccgaucaacagagccucuaccagaacgcugacgccuacgucuucgugggauccagcagauauucuaaaaaguuuaaaccugagaucgcuauucggccgaaggugcgcgaucaggaagggagaaugaauuacuauuggacacuggucgagcccggagacaaaaucaccuucgaagccacgggcaaccugguugugccucgguacgcguuugccauggagcgcaacgcuggguccggaauuaucaucagcgauacacccgugcaugacugcaauaccacaugucaaaccccuaagggcgccauuaacaccucucuccccuuccacaauauccauccgauuacaaucggcaaaugcccuaaguaugucaagagcacgaaacugagacuugcuaccgggcugcggaacgugcccuccauucagucucgcggacucuuuggcgccaucgccggguucaucgaaggaggcuggacagggaugguugacggaugguacggcuaucaccaccagaaugagcagggcagcggguacgcugcggaucugaaguccacccaaaacgccauugacgagaucacaaauaaagugaacagcgucauugaaaagaugaauacccaguuuacggcugugggaaaagaguucaaccaucuugaaaagagaaucgagaaucugaacaagaaaguugaugacggcuuccucgauauuuggacauacaaugccgaacugcuggugcuccuggagaacgagcggacccuugacuaucacgauucuaaugucaagaaccuguacgaaaaagugcgcucccagcucaagaacaaugccaaagagaucgggaacggauguuuugaguucuaucauaagugcgacaauaccuguauggaaagcgucaagaacggcacauacgauuauccuaaauacucugaagaggcuaagcugaauagagaggaaaucgacggggugaaacuugaguccacccggauuuaucagauccuggccauuuacagcacaguugcguccucucucgugcuggucgugagccugggcgcuaucuccuuuuggaugugcucuaacggaagccuccaaugccgcauuuguaucuga

SEQ ID NO: 195304 - RNA, 1701 nt, Artificial Sequence; identical to SEQ ID NO: 194741
  derived and/or modified CDS sequence (opt5) from hemagglutinin__InfluenzaA__ACV04258

SEQ ID NO: 195305 - RNA, 1701 nt, Artificial Sequence; identical to SEQ ID NO: 194741
  derived and/or modified CDS sequence (opt5) from hemagglutinin__InfluenzaA__ACV04268

SEQ ID NO: 195306 - RNA, 1701 nt, Artificial Sequence; identical to SEQ ID NO: 194741
  derived and/or modified CDS sequence (opt5) from hemagglutinin__InfluenzaA__ACV04278

SEQ ID NO: 195307 - RNA, 1701 nt, Artificial Sequence; identical to SEQ ID NO: 194741
  derived and/or modified CDS sequence (opt5) from hemagglutinin__InfluenzaA__ACV04288

SEQ ID NO: 195308 - RNA, 1701 nt, Artificial Sequence
  derived and/or modified CDS sequence (opt5) from hemagglutinin__InfluenzaA__ACV04298
augaaggccauccuggugguccuccuguacaccuucgcuacagccaacgcggacacgcuuugcauuggcuaucacgcuaauaacagcaccgauacaguugacaccgugcuggagaagaaugugacagucacccauuccgugaaccuccuggaagauaagcacaaugggaaacuuuguaagcugagaggaguugcuccccuccaucugggcaaaugcaacaucgccggguggauucugggaaauccugagugugaaucucucagcacagccuccucuuggagcuacaucguggagaccuccucuagcgacaacggcacgugcuauccgggggauuuuauugacuacgaagaacugcgggagcagcuuuccagcgucucuuccuucgaacgcuuugagaucuuccccaagaccagcucuuggccuaaucacgauuccaacaagggagugacagccgcuuguccccaugccggcgcgaaaucuuuuuauaagaaucugaucuggcucguuaaaaagggcaacagcuacccuaaacuguccaagagcuauauuaaugacaaggggaaagaagugcuuguccuguggggaauccaccaccccuccaccucugccgaucaacagagccucuaccagaacgcugacgccuacguguucgugggcacauccagauauagcaagaaauuuaagccugagauugcuauccggccgaaaguccgcgaucaggaggggagaaugaauuacuauuggacccugguugaacccggagacaagauuacguucgaggccacaggcaaccugguggugccucgguacgcguuugccauggaacgcaacgcugggucuggaaucauuaucuccgauacccccguccaugacugcaauacaaccugucaaaccccuaaaggcgccaucaacacaagccuccccuuccagaauauucacccggugacgaucggcaagugcccuaaguauguuaaaucuaccaagcugagacuugcuacagggcugcggaacgugcccagcauucagucccgcggacucuuuggcgccaucgccggguucauugagggaggcuggaccgggauggucgacggaugguacggcuaucaucaccagaaugaacaaggcucuggguacgcugcggaucugaaaagcacacagaacgccaucgacgagaucaccaauaaggugaacuccguuauugagaaaaugaauacgcaguuuacagcugugggaaaggaguucaaccaccuugagaagagaaucgaaaaucugaacaaaaaggucgaugacggcuuccucgauauuuggaccuacaaugccgagcugcuggugcuccuggaaaacgagcggacccuugacuaucaugauagcaaugucaaaaaccuguacgagaaggugcgcucucagcucaaaaacaaugccaaggaaaucgggaacggauguuuugaguucuaucacaagugcgacaauacauguauggaauccguuaaaaacggcaccuacgauuauccuaaguacagcgaggaagcuaaacugaauagagaggagauugacggggugaaacuugaaucuacacggaucuaucaaauccuggccauuuacuccacggucgcgagcucccucgugcugguugugucucugggcgcuaucagcuuuuggaugugcuccaacggaucucuccagugccgcauuuguaucuga

SEQ ID NO: 195309 - RNA, 1701 nt, Artificial Sequence; identical to SEQ ID NO: 194741
  derived and/or modified CDS sequence (opt5) from hemagglutinin__InfluenzaA__ACV04308

SEQ ID NO: 195310 - RNA, 1701 nt, Artificial Sequence
  derived and/or modified CDS sequence (opt5) from hemagglutinin__InfluenzaA__ACV04318
augaaggccauccuggugguccuccuguacaccuucgcuacagccaacgcggacacgcuuugcauuggcuaucacgcuaauaacagcaccgauacaguugacaccgugcuggagaagaaugugacagucacccauuccgugaaccuccuggaagauaagcacaaugggaaacuuuguaagcugagaggaguugcuccccuccaucugggcaaaugcaacaucgccggguggauucugggaaauccugagugugaaucucucagcacagccuccucuuggagcuacaucguggagaccuccucuagcgacaacggcacgugcuauccgggggauuuuauugacuacgaagaacugcgggagcagcuuuccagcgucucuuccuucgaacgcuuugagaucuuccccaagaccagcucuuggccuaaucacgauuccaacaagggagugacagccgcuuguccccaugccggcgcgaaaucuuuuuauaagaaucugaucuggcucguuaaaaagggcaacagcuacccuaaacuguccaagagcuauauuaaugacaaggggaaagaagugcuuguccuguggggaauccaccaccccuccaccucugccgaucaacagagccucuaccagaacgcugacgccuacguguucgugggcacauccagauauagcaagaaauuuaagccugagauugcuauccggccgaaaguccgcgaucaggaggggagaaugaauuacuauuggacccugguugaacccggagacaagauuacguucgaggccacaggcaaccugguggugccucgguacgcguuugccauggaacgcaacgcugggucuggaaucauuaucuccgauacccccguccauaauugcaacacaaccugucaaaccccuaaaggcgccaucaauacaagccuccccuuccagaacauucacccgaucacgauuggcaagugcccuaaguaugugaaaucuaccaagcugagacuugcuacagggcugcggaauguucccagcauccagucccgcggacucuuuggcgccauugccggguucaucgagggaggcuggaccgggaugguggacggaugguacggcuaucaucaccagaacgaacaaggcucuggguacgcugcggaccugaaaagcacacagaaugccaucgaugagauuaccaacaaggucaauuccgugaucgagaaaaugaacacgcaguuuacagcuguuggaaaggaguucaaucaccuugagaagagaauugaaaaccugaauaaaaagguggacgauggcuuccucgacaucuggaccuacaacgccgagcugcugguccuccuggaaaaugagcggacccuugauuaucaugacagcaacgugaaaaaccuguacgagaagguccgcucucagcucaaaaauaacgccaaggaaauugggaauggauguuuugaguucuaucacaagugcgauaacacauguauggaauccgugaaaaauggcaccuacgacuauccuaaguacagcgaggaagcuaaacugaacagagaggagaucgaugggguuaaacuugaaucuacacggaucuaucaaauucuggccaucuacuccacgguggcgagcucccucguccuggugguuucucugggcgcuauuagcuuuuggaugugcuccaauggaucucuccagugccgcaucuguauuuga

SEQ ID NO: 195311 - RNA, 1701 nt, Artificial Sequence; identical to SEQ ID NO: 194741
  derived and/or modified CDS sequence (opt5) from hemagglutinin__InfluenzaA__ACV04328

SEQ ID NO: 195312 - RNA, 1701 nt, Artificial Sequence; identical to SEQ ID NO: 194741
  derived and/or modified CDS sequence (opt5) from hemagglutinin__InfluenzaA__ACV04338

SEQ ID NO: 195313 - RNA, 1701 nt, Artificial Sequence; identical to SEQ ID NO: 194983
  derived and/or modified CDS sequence (opt5) from hemagglutinin__InfluenzaA__ACV04358

SEQ ID NO: 195314 - RNA, 1701 nt, Artificial Sequence
  derived and/or modified CDS sequence (opt5) from hemagglutinin__InfluenzaA__ACV04368
augaaggccauccuggugguccuccuguacaccuucgcuacagccaacgcggacacgcuuugcauuggcuaucacgcuaauaacagcaccgauacaguugacaccgugcuggagaaaaaugugacagucacccauuccgugaaccuccuggaagauaagcacaaugggaaacuuugucagcugagaggaguugcgccccuccaucugggcaagugcaacaucgccggguggauucugggaaauccugagugugaaucucucagcacagcuuccucuuggagcuacaucguggagaccuccucuagcgacaacggcacgugcuauccgggggauuuuauugacuacgaagaacugcgggagcaacuuuccagcgucucuuccuucgaacgcuuugagaucuuccccaaaaccagcucuuggccuaaucacgauuccaacaagggagugacagccgcuuguccccaugccggcgccaagagcuuuuauaaaaaucugaucuggcucguuaagaaaggcaacucuuacccuaagcuguccaaaagcuauauuaaugacaaggggaaggaagugcuuguccuguggggaauccaccaccccuccaccucugccgaucagcagagccucuaccagaacgcugacgccuacguguucgugggcacauccagauauagcaaaaaguuuaaaccugagauugcuauccggccgaagguccgcgaucaagaggggagaaugaauuacuauuggacccugguugaacccggagacaaaauuacguucgaggccacaggcaaccugguggugccucgguacgcguuugccauggaacgcaacgcugggucuggaaucauuaucuccgauacccccguccaugacugcaauacaaccugucagaccccuaagggcgccaucaacacaagccuccccuuccagaauauucacccgaucacgauuggcaaaugcccuaaguaugugaagucuaccaaacugagacuugcuacagggcugcggaacguucccagcauccagucccgcggacucuuuggcgccauugccggguucaucgagggaggcuggaccgggaugguggacggaugguacggcuaucaucaccaaaaugaacagggcucuggguacgcugcggaucuuaagagcacacagaacgccaucgacgagauuaccaauaaagucaacuccgugaucgagaagaugaauacgcaguuuacagcuguuggaaaagaguucaaccaccuggagaagagaauugaaaaucugaacaagaaaguggaugacggcuuccucgauaucuggaccuacaaugccgagcugcugguccuccuggaaaacgagcggacccuugacuaucaugauagcaaugugaagaaccuguacgagaaaguccgcucucaacucaagaacaaugccaaagaaauugggaacggauguuuugaguucuaucacaagugcgacaauacauguauggaauccgugaagaacggcaccuacgauuauccuaaauacagcgaggaagcuaagcugaauagagaggagaucgacgggguuaaacuugaaucuacacggaucuaucagauucuggccaucuacuccacgguggcgagcucccucguccuggugguuucucugggcgcuauuagcuuuuggaugugcuccaacggaucucuccagugccgcaucuguauuuga

SEQ ID NO: 195315 - RNA, 1701 nt, Artificial Sequence
  derived and/or modified CDS sequence (opt5) from hemagglutinin__InfluenzaA__ACV04378
augaaggccauccuggugguccuccuguacaccuucgcuacagccaacgcggacacgcuuugcauuggcuaucacgcuaauaacagcaccgauacaguugacaccgugcuggagaagaaugugacagucacccauuccgugaaccuccuggaagauaagcacaaugggaaacuuuguaagcugagaggaguugcuccccuccaucugggcaaaugcaacaucgccggguggauucugggaaauccugagugugaaucucucagcacagccuccucuuggagcuacaucguggagaccuccucuagcgacaacggcacgugcuauccgggggauuuuauugacuacgaagaacugcgggagcagcuuuccagcgucucuuccuucgaacgcuuugagaucuuccccaagaccagcucuuggccuaaucacgauuccaacaagggagugacagccgcuuguccccaugccggcgcgaaaucuuuuuauaagaaucugaucuggcucguuaaaaagggcaacagcuacccuaaacuguccaagagcuauauuaaugacaaggggaaagaagugcuuguccuguggggaauccaccaccccuccaccucugccgaucaacagagccucuaccagaacgcugacgccuacguguucgugggcacauccagauauagcaagaaauuuaagccugagauugcuauccggccgaaaguccgcgaucaggaggggagaaugaauuacuauuggacccugguugaacccggagacaagauuacguucgaggccacaggcaaccugguggugccucgguacgcguuugccauggaacgcaacgcugggucuggaaucauuaucuccgauacccccguccaugacugcaauacaaccugucaaaccccuaaaggcgccaucaacacaagccuccccuuccagaauauucacccgaucacgauuggcaagugcccuaaguaugugaaaucuaccaagcugagacuugcuacagggcugcggaacauccccagcauucagucccgcggacucuuuggcgccaucgccggguucaucgagggaggcuggaccgggaugguugacggaugguacggcuaucaucaccagaaugaacaaggcucuggguacgcugcggaucugaaaagcacacagaacgccauugacgagaucaccaauaaggugaacuccgucauugagaaaaugaauacgcaguuuacagcugugggaaaggaguucaaccaccuugagaagagaaucgaaaaucugaacaaaaagguugaugacggcuuccucgauauuuggaccuacaaugccgagcugcuggugcuccuggaaaacgagcggacccuugacuaucaugauagcaaugucaaaaaccuguacgagaaggugcgcucucagcucaaaaacaaugccaaggaaaucgggaacggauguuuugaguucuaucacaagugcgacaauacauguauggaauccgucaaaaacggcaccuacgauuauccuaaguacagcgaggaagcuaaacugaauagagaggagaucgacggggugaaacuugaaucuacacggauuuaucaaauccuggccauuuacuccacgguugcgagcucccucgugcugaucgucucucugggcgcuauuagcuuuuggaugugcuccaacggaucucuccagugccgcaucuguauuuga

SEQ ID NO: 195316 - RNA, 1701 nt, Artificial Sequence; identical to SEQ ID NO: 194983
  derived and/or modified CDS sequence (opt5) from hemagglutinin__InfluenzaA__ACV04388

SEQ ID NO: 195317 - RNA, 1701 nt, Artificial Sequence; identical to SEQ ID NO: 194741
  derived and/or modified CDS sequence (opt5) from hemagglutinin__InfluenzaA__ACV04398

SEQ ID NO: 195318 - RNA, 1701 nt, Artificial Sequence; identical to SEQ ID NO: 194985
  derived and/or modified CDS sequence (opt5) from hemagglutinin__InfluenzaA__ACV04408

SEQ ID NO: 195319 - RNA, 1701 nt, Artificial Sequence; identical to SEQ ID NO: 194741
  derived and/or modified CDS sequence (opt5) from hemagglutinin__InfluenzaA__ACV04489

SEQ ID NO: 195320 - RNA, 1701 nt, Artificial Sequence; identical to SEQ ID NO: 194741
  derived and/or modified CDS sequence (opt5) from hemagglutinin__InfluenzaA__ACV04499

SEQ ID NO: 195321 - RNA, 1701 nt, Artificial Sequence; identical to SEQ ID NO: 194921
  derived and/or modified CDS sequence (opt5) from hemagglutinin__InfluenzaA__ACV04509

SEQ ID NO: 195322 - RNA, 1701 nt, Artificial Sequence; identical to SEQ ID NO: 194741
  derived and/or modified CDS sequence (opt5) from hemagglutinin__InfluenzaA__ACV04519

SEQ ID NO: 195323 - RNA, 1701 nt, Artificial Sequence; identical to SEQ ID NO: 194741
  derived and/or modified CDS sequence (opt5) from hemagglutinin__InfluenzaA__ACV04529

SEQ ID NO: 195324 - RNA, 1701 nt, Artificial Sequence; identical to SEQ ID NO: 194741
  derived and/or modified CDS sequence (opt5) from hemagglutinin__InfluenzaA__ACV04549

SEQ ID NO: 195325 - RNA, 1701 nt, Artificial Sequence; identical to SEQ ID NO: 194741
  derived and/or modified CDS sequence (opt5) from hemagglutinin__InfluenzaA__ACV04559

SEQ ID NO: 195326 - RNA, 1701 nt, Artificial Sequence; identical to SEQ ID NO: 194741
  derived and/or modified CDS sequence (opt5) from hemagglutinin__InfluenzaA__ACV04579

SEQ ID NO: 195327 - RNA, 1701 nt, Artificial Sequence
  derived and/or modified CDS sequence (opt5) from hemagglutinin__InfluenzaA__ACV04751
auggaggccauccugguggucaugcucuacaccuucgcuacagccaacgcggacacgcugugcauuggcuaucacgcuaauaacagcaccgauacaguugacaccgugcuugaaaagaaugugacagucacccauuccgugaaccugcucgaggauaaacacaaugggaagcuguguaaacuuagaggaguugcgccccugcggcucggcaagugcaacaucgccggguggauucugggaaauccugaaugugagucucugagcacagcuuccucuuggagcuacaucguggaaaccuccucuagcgacaacggcacgugcuauccgggggauuuuauugacuacgaggagcuccgcgaacagcuguccagcgucucuuccuucgagagauuugaaaucuuccccaaaaccagcucuuggccuaaucaugauuccaacaagggagugacagccgcuuguccccacgccggcgccaagagcuuuuauaaaaaucuuaucuggcugguuaagaaaggcaacucuuacccuaagcucuccaaaagcuauauuaaugacaaggggaaggaggugcugguccuuuggggaauccaucaccccuccaccucugccgaucaacagagccuguaccagaacgcugacgccuacguguucgugggcacaucccgguauagcaaaaaguuuaaaccugagauugcuauccgcccgaaggucagagaucaggaagggcggaugaauuacuauuggacccucguugagcccggagacaaaauuacguucgaagccacaggcaaccugguggugccucgcuacgcguuugccauggagagaaacgcugggucuggaaucauuaucuccgauacccccguccacaauugcaacacaaccugucaaaccccuaagggcgccaucaauacaagccugcccuuccagaacauucauccgaucacgauuggcaaaugcccuaaguaugugaagucuaccaaacuccggcuggcuacagggcuucgcaauguucccagcauccaguccagaggacuguuuggcgccauugccggguucaucgaaggaggcuggaccgggaugguggacggaugguacggcuaucaccaucagaacgagcaaggcucuggguacgcugcggaccucaagagcacacagaaugccaucgaugagauuaccaacaaagucaauuccgugaucgaaaagaugaacacgcaguuuacagcuguuggaaaagaguucaaucaccuggaaaagcggauugagaaccuuaauaagaaaguggacgauggcuuccuggacaucuggaccuacaacgccgaacuccugguccugcucgagaaugagcgcacccuggauuaucacgacagcaacgugaagaaccuuuacgaaaaagucagaucucagcugaagaauaacacaaaagagauugggaauggauguuuugaguucuaucauaagugcgauaacaccuguauggaauccgugaagaauggcacauacgacuauccuaaauacagcgaagaggccaagcucaaccgggaggaaaucgaugggguuaaacuggagucuacgcgcaucuaucaaauucuugcuaucuacuccaccguggccagcucccugguccucgugguuucucugggcgcgauuagcuuuuggaugugcuccaauggaucucugcagugcagaaucuguauuuga

SEQ ID NO: 195328 - RNA, 1701 nt, Artificial Sequence
  derived and/or modified CDS sequence (opt5) from hemagglutinin__InfluenzaA__ACV04752
auggaggccauccuggugguccuccuguacaccuucgcuacagccaacgcggacacgcuuugcauuggcuaucacgcuaauaacagcaccgauacaguugacaccgugcuggaaaagaaugugacagucacccauuccgugaacauccucgaggauaaacacaaugggaagcuguguaaacuuagaggaguugcgccccugcaucucggcaagugcaacauugccggguggauccuggaaaauccugagugugaaucucugagcacagcuuccucuuggagcuacauuguggagaccuccucuagcgacaacggaacgugcuauccgggcgauuuuaucgacuacgaggaacuccgggagcagcuguccagcgucucuuccuucgaacgcuuugagaucuuccccaaaaccagcucuuggccuaaucacgauuccaacaagggggugacagccgcuuguccccaugccggagccaagagcuuuuauaaaaaucuuauuuggcugguuaagaaaggcaacucuuacccuaagcucuccaaaagcuauaucaaugacaagggcaaggaggugcugguccuuugggggauucaccaccccuccaccucugccgaucaacagagccuguaccagaacgcugacgccuacguguucgugggauccagcagauauucuaaaaaguuuaaaccugaaaucgcuauucggccgaagguccgcgaucaggagggcagaaugaauuacuauuggacacucguugaacccggggacaaaaucaccuucgaggccacgggaaaccugguggugccucgguacgcguuugccauggaacgcaacgcuggcuccgggauuaucaucagcgauacacccguccaugacugcaauaccacaugucaaaccccuaagggagccauuaacaccucucugcccuuccacaauauccauccgauuacaaucggcaaaugcccuaaguauguuaagagcacgaaacucagacuggcuaccggccuucggaacgugcccuccauucagucucgcgggcuguuuggagccaucgccggcuucaucgaagggggauggacaggcaugguggacgggugguacggauaucaccaccagaaugagcagggcagcggcuacgcugcggaucucaaguccacccaaaacgccauugacgaaaucacaaauaaagucaacagcgugauugagaagaugaauacccaguuuacggcuguugggaaagaguucaaccaucuggagaagagaaucgaaaaucuuaacaagaaaguggaugacggauuccuggauauuuggacauacaaugccgagcuccugguccugcucgagaacgaacggacccuggacuaucacgauucuaaugugaagaaccuuuacgagaaaguccgcucccagcugaagaacaaugccaaagaaaucggcaacggguguuuugaguucuaucauaagugcgacaauaccuguauggaaagcgugaagaacggaacauacgauuauccuaaauacucugaggaggcuaagcucaauagagaagagaucgacggcguuaaacuggaauccacccggauuuaucagauccuugccauuuacagcacaguggcguccucucugguccucgugguuagccugggggcuaucuccuuuuggaugugcucuaacggcagccugcaaugccgcauuuguaucuga

SEQ ID NO: 195329 - RNA, 1701 nt, Artificial Sequence
  derived and/or modified CDS sequence (opt5) from hemagglutinin__InfluenzaA__ACV04753
auggaggccauccuggugguccuccuguacaccuucgcuacagccaacgcggacacgcuuugcauuggcuaucacgcuaauaacagcaccgauacaguugacaccgugcuggaaaagaaugugacagucacccauuccgugaaccuccuggaggauaaacacaaugggaagcuguguaaacugagaggaguugcgccccuccaucugggcaagugcaacaucgccggguggauucugggaaauccugaaugugagucucucagcacagcuuccucuuggagcuacaucguggaaaccuccucuagcgacaacggcacgugcuauccgggggauuuuauugacuacgaggagcugcgggaacagcuuuccagcgucucuuccuucgagcgcuuugaaaucuuccccaaaaccagcucuuggccuaaucacgauuccaacaagggagugacagccgcuuguccccaugccggcgccaagagcuuuuauaaaaaucugaucuggcucguuaagaaaggcaacucuuacccuaagcuguccaaaagcuauauuaaugacaaggggaaggaggugcuuguccuguggggaauccaccaccccuccaccucugccgaucaacagagccucuaccagaacgcugacgccuacguguucgugggcacauccagauauagcaaaaaguuuaaaccugagauugcuauccggccgaagguccgcgauagagaagggcggaugaauuacuauuggacccugguugagcccggagacaaaauuacguucgaagccacaggcaaccugguggugccucgcuacgcguuugccauggagagaaacgcugggucuggaaucauuaucuccgauacccccguccaugacugcaauacaaccugucagaccccuaagggcgccaucaacacaagccuccccuuccaaaauauucacccgaucacgauuggcaaaugcccuaaguaugugaagucuaccaaacugcggcuugcuacagggcugcgcaacguucccagcauccaguccagaggacucuuuggcgccauugccggguucaucgaaggaggcuggaccgggaugguggacggaugguacggcuaucaucaccagaaugagcagggcucuggguacgcugcggaucuuaagagcacacaaaacgccaucgacgagauuaccaauaaagucaacuccgugaucgaaaagaugaauacgcaguuuacagcuguuggaaaagaguucaaccaccuugaaaagcggauugagaaucugaacaagaaaguggaugacggcuuccucgauaucuggaccuacaaugccgaacugcugguccuccuggagaacgagcgcacccuugacuaucaugauagcaaugugaagaaccuguacgaaaaagucagaucucagcucaagaacaaugccaaagagauugggaacggauguuuugaguucuaucacaagugcgacaauacauguauggaauccgugaagaacggcaccuacgauuauccuaaauacagcgaagaggcuaagcugaaucgggaggaaaucgacgggguuaaacuugagucuacacgcaucuaucagauucuggccaucuacuccacgguggcgagcucccucguccuggugguuucucugggcgcuauuagcuuuuggaugugcuccaacggaucucuccaaugcagaaucuguauuuga

SEQ ID NO: 195330 - RNA, 1701 nt, Artificial Sequence
  derived and/or modified CDS sequence (opt5) from hemagglutinin__InfluenzaA__ACV04754
auggaggccauccuggugguccuccuguacaccuucgcuacagccaacgcggacacgcuuugcauuggcuaucacgcuaauaacagcaccgauacaguugacaccgugcuggaaaagaaugugcccgucacacauuccgugaaccuccugaaagauaagcacaaugggaaacuuuguaagcugagaggaguugccccucuccaucugggcaaaugcaacaucgccggguggauucugggaaauccggagugugaaucucucagcaccgcuuccucuuggagcuacaucguggagacauccucuagcgacaacgggaccugcuaucccggcgauuuuauugacuacgaagaacugcgggagcagcuuuccagcgucucuuccuucgaacgcuuugagaucuucccuaagacgagcucuuggcccaaucacgaauccaacaagggagugaccgccgcuuguccucaugccggcgcgaaaucuuuuuauaagaaucugaucuggcucguuaaaaagggcaacagcuaccccaaacuguccaagagcuauauuaaugauaaggggaaagaggugcuuguccuguggggaauccaccacccuuccacaucugccgaccaacagagccucuaccagaacgcugaugccuacguguucgugggcaccuccagauauagcaagaaauuuaagccggagauugcuauccggcccaaaguccgcgaccaggaagggagaaugaauuacuauuggacacugguugagccuggagauaagauuaccuucgaagccacgggcaaccugguggugccccgguacgcguuugccauggagcgcaacgcugggucuggaaucauuaucuccgacacaccuguccaugauugcaauaccacaugucaaacccccaaaggcgccaucaacaccagccucccguuccagaauauucacccuaucacaauuggcaagugccccaaguaugugaaaucuacgaagcugagacuugcuaccgggcugcggaacguuccuagcauccagucccgcggaguguuuggcgccauugccggguucaucgaaggaggcuggacagggauggucgacggaugguacggcuaucaucaccagaaugagcaaggcucuggguacgcugcggaccucaaaagcacccagaacgccaucgaugagauuacaaauaaggugaacuccguuaucgagaaaaugaauacccaguuuacggcugugggaaaggaguucaaccaccuggaaaagagaauugagaaucuuaacaaaaaggucgacgauggcuuccuggacaucuggacauacaaugccgaacuccuggugcugcucgagaacgagcggacccuggauuaucaugacagcaaugucaaaaaccuuuacgaaaaggugcgcucucagcugaaaaacaaugccaaggagauugggaacggauguuuugaguucuaucacaagugcgauaauaccuguauggaauccguuaaaaacggcacauacgacuaucccaaguacagcgaagaggcuaaacucaauagagaggaaaucgauggggugaagcuggagucuacccggaucuaucaaauucuugccaucuacuccacagucgcgagcucccuggugcucguugugucucugggcgcuauuagcuuuuggaugugcuccaacggaucucugcagugccgcaucuguauuuga

SEQ ID NO: 195331 - RNA, 1701 nt, Artificial Sequence; identical to SEQ ID NO: 195226
  derived and/or modified CDS sequence (opt5) from hemagglutinin__InfluenzaA__ACV04755

SEQ ID NO: 195332 - RNA, 1701 nt, Artificial Sequence; identical to SEQ ID NO: 194921
  derived and/or modified CDS sequence (opt5) from hemagglutinin__InfluenzaA__ACV33084

SEQ ID NO: 195333 - RNA, 1701 nt, Artificial Sequence; identical to SEQ ID NO: 194741
  derived and/or modified CDS sequence (opt5) from hemagglutinin__InfluenzaA__ACV33094

SEQ ID NO: 195334 - RNA, 1701 nt, Artificial Sequence; identical to SEQ ID NO: 194741
  derived and/or modified CDS sequence (opt5) from hemagglutinin__InfluenzaA__ACV33104

SEQ ID NO: 195335 - RNA, 1701 nt, Artificial Sequence; identical to SEQ ID NO: 194741
  derived and/or modified CDS sequence (opt5) from hemagglutinin__InfluenzaA__ACV33114

SEQ ID NO: 195336 - RNA, 1701 nt, Artificial Sequence; identical to SEQ ID NO: 194741
  derived and/or modified CDS sequence (opt5) from hemagglutinin__InfluenzaA__ACV33124

SEQ ID NO: 195337 - RNA, 1701 nt, Artificial Sequence; identical to SEQ ID NO: 194741
  derived and/or modified CDS sequence (opt5) from hemagglutinin__InfluenzaA__ACV33134

SEQ ID NO: 195338 - RNA, 1701 nt, Artificial Sequence; identical to SEQ ID NO: 195303
  derived and/or modified CDS sequence (opt5) from hemagglutinin__InfluenzaA__ACV33144

SEQ ID NO: 195339 - RNA, 1701 nt, Artificial Sequence; identical to SEQ ID NO: 194741
  derived and/or modified CDS sequence (opt5) from hemagglutinin__InfluenzaA__ACV33154

SEQ ID NO: 195340 - RNA, 1701 nt, Artificial Sequence; identical to SEQ ID NO: 194741
  derived and/or modified CDS sequence (opt5) from hemagglutinin__InfluenzaA__ACV33164

SEQ ID NO: 195341 - RNA, 1701 nt, Artificial Sequence; identical to SEQ ID NO: 194741
  derived and/or modified CDS sequence (opt5) from hemagglutinin__InfluenzaA__ACV33174

SEQ ID NO: 195342 - RNA, 1701 nt, Artificial Sequence; identical to SEQ ID NO: 194728
  derived and/or modified CDS sequence (opt5) from hemagglutinin__InfluenzaA__ACV41981

SEQ ID NO: 195343 - RNA, 1701 nt, Artificial Sequence; identical to SEQ ID NO: 194767
  derived and/or modified CDS sequence (opt5) from hemagglutinin__InfluenzaA__ACV41991

SEQ ID NO: 195344 - RNA, 1701 nt, Artificial Sequence; identical to SEQ ID NO: 194767
  derived and/or modified CDS sequence (opt5) from hemagglutinin__InfluenzaA__ACV42001

SEQ ID NO: 195345 - RNA, 1701 nt, Artificial Sequence; identical to SEQ ID NO: 194741
  derived and/or modified CDS sequence (opt5) from hemagglutinin__InfluenzaA__ACV42008

SEQ ID NO: 195346 - RNA, 1701 nt, Artificial Sequence; identical to SEQ ID NO: 194741
  derived and/or modified CDS sequence (opt5) from hemagglutinin__InfluenzaA__ACV42018

SEQ ID NO: 195347 - RNA, 1701 nt, Artificial Sequence; identical to SEQ ID NO: 194388
  derived and/or modified CDS sequence (opt5) from hemagglutinin__InfluenzaA__ACV49501

SEQ ID NO: 195348 - RNA, 1701 nt, Artificial Sequence
  derived and/or modified CDS sequence (opt5) from hemagglutinin__InfluenzaA__ACV49512
augaagaccaucauugcccugagcuacaucuucugccucgcucugggccaggaccuucccgggaacgauaauuccacagccacgcugugucucggacaccaugcggugccuaacggcacccuggucaaaacaauuaccgacgaucaaaucgagguuacaaaugcuaccgaacuugugcagucuagcuccacagggaagauuugcaacaauccgcacagaauccuggacggaaucgauuguacccucauugacgcccugcugggcgauccccauugcgacguguuucagaacgagacgugggaucucuucgucgaacggucuaaagccuuuagcaauuguuauccuuacgacgugcccgauuaugcuucccugcgcucucuuguugccagcuccgggacccuggaguucaucacagaaggauuuaccuggacaggcgugacccagaacggcgggagcaaugcuugcaagagaggaccuggcucuggguucuuuucccggcucaacuggcugacgaaaagcggaucuacauaccccguccuuaaugugaccaugccuaacaaugacaacuucgauaagcuguauauuuggggcguucaccauccguccacaaaucaagagcagaccagccucuacgugcaggccucugggcgcgucaccguguccacaagacggagccagcaaacgaucauucccaacaucgagucccgcccuugggugagaggacugucuagccggauuuccaucuauuggaccaucgucaagcccggcgacguucuggugauuaacagcaauggcaaccucaucgcgccucgcggguacuuuaaaaugagaacaggaaagucuuccauuaugcggagcgacgcccccaucgauaccuguauuucugaaugcaucacaccgaauggcagcaucccuaacgacaaacccuuccagaaugugaacaagauuaccuacggggcuuguccuaaauaugucaagcagaauacgcugaaacuugccacaggaaugcgcaacgugcccgagaaacagaccagaggccuguuuggggcuaucgccggauucauugaaaauggcugggagggcaugaucgaugggugguacggauuucggcaccaaaacuccgagggcaccgggcaggcggccgaccucaagucuacacaggcugccauugaucaaaucaauggaaaacugaaccgcguuaucgaaaagaccaaugagaaauuccaccagauugaaaaggaguucagcgaaguggagggcagaauccaggaccuugagaaauaugucgaagauacaaagauugaccugugguccuacaacgcugagcuccugguggcccuggaaaaucagcauacgaucgaucucaccgacagcgagaugaacaagcuguuugaaaagacacggagacaacuucgcgagaacgccgaggauauggggaauggcugcuucaagauuuaucacaaaugugacaacgcuugcaucgaaucuauucggaauggaaccuacgaccaugauguuuauagagacgaggcgcugaacaaucgcuuucagaucaaggauguggaacucaaauccggcuacaaggacuggauccuguggauuagcuucgccaucucuugcuuucuucugugugucgugcuccugggguucauuaugugggcuugccagcggggaaacaucagauguaauauuugcaucuga

SEQ ID NO: 195349 - RNA, 1701 nt, Artificial Sequence; identical to SEQ ID NO: 194401
  derived and/or modified CDS sequence (opt5) from hemagglutinin__InfluenzaA__ACV49523

SEQ ID NO: 195350 - RNA, 1698 nt, Artificial Sequence
  derived and/or modified CDS sequence (opt5) from hemagglutinin__InfluenzaA__ACV49545
augaaggccaaccugcucgugcugcuuugcgcucuggccgcggcugacgccgauaccaucuguauuggcuaccacgccaauaacagcacagacacggucgauaccguucucgagaaaaaugugacagugacccauuccgucaaccugcuugaagacucucacaaugggaagcugugcagacucaaaggaaucgcuccccugcagcugggcaaguguaacauugccggguggcuccugggaaauccugagugcgauccgcuucugcccgugcggagcugguccuauaucguugaaacaccuaacucugagaauggcauuuguuaccccggggacuucaucgauuaugaagaacuccgcgagcaacugagcuccgugucuagcuuugaaagauucgagaucuuuccuaaagaauccagcuggcccaaccauaauaccaacggagucacagcugccugcucucacgagggcaaguccagcuucuaccggaaucuucuguggcucaccgagaaggaaggcucuuauccuaaacugaagaacuccuacgugaauaaaaaggggaaagagguucuggugcucuggggcauucaucacccgcccaacagcaaggaacagcagaaccuguaucagaaugagaacgcguacgucucuguggugacguccaauuacaaccgcagauuuaccccugaaaucgccgagcggcccaagguccgcgaccaagcuggaagaaugaauuauuacuggacacuucugaaaccuggggauaccauuaucuucgaggccaacggaaaucucauugcucccauguaugccuuugcgcugagccggggcuucggguccggaaucauuacaucuaacgccagcaugcacgaauguaauaccaagugccagacgccgcuuggcgcuaucaacuccagccugccuuaccagaauauccaucccguuacaauuggcgaguguccuaaauaugugcgcucugccaagcucagaauggugaccgggcugcggaacauccccuccauucagagccgcggacuguuuggcgcuaucgccggguucauugaaggaggcuggacagggaugaucgacggaugguacggcuaucaccaucaaaaugagcagggcucuggguacgccgcugaucagaaaagcacccagaacgcgaucaauggaauuaccaacaaggucaacacagugaucgagaaaaugaauauucaauuuacggccguuggcaaggaguucaacaagcucgagaaaagaauggaaaaucugaacaagaaaguggacgauggguuucuugacaucuggaccuacaaugcugagcugcucguccugcuugaaaacgagcggacacuggacuuccacgauuccaaugugaagaaccucuaugaaaaaguuaagucucagcugaagaauaacgccaaagagauuggaaauggcugcuucgaguuuuaccacaagugugacaacgaaugcauggagagcgugcgcaaugggaccuaugauuaccccaaauauuccgaagagagcaagcugaacagagagaaagucgacggcgugaagcucgaaucuaugggaaucuaccagauccuggccauuuauuccacagucgcuagcucucuugugcugcucguuucccugggcgccaucagcuucuggaugugcuccaaugggucucugcaaugucggauuugcaucuga

SEQ ID NO: 195351 - RNA, 1701 nt, Artificial Sequence
  derived and/or modified CDS sequence (opt5) from hemagglutinin__InfluenzaA__ACV49556
augaaggccagacugcucauccugcuuugcgcucuggccgcgaccgacgcugauacaauuuguaucggcuaccacgccaacaauagcacggacaccguggauacaguccucgagaaaaacguuaccgugacacauuccgugaaucugcuugaagacucucacaacgggaagcugugccggcucaaaggaauugcuccccugcagcugggcaaguguaauaucgccggguggauucucggaaacccugagugcgauagccugcuuccggccuccucuuggagcuauaucgucgaaacccccaauuccaaaaacggcaucuguuacccuggggacuucauugauuaugaggaacugcgcgagcaacucucuagcguguccagcuuugagagauucgaaaucuuucccaaggagucuuccuggccuaagcauagcacaaccaaaggaguuacggcugccugcucucacgcgggcaaguccagcuucuaccggaaucugcuuuggcugaccaaaaaggaagacucuuaucccaaacucuccaacagcuacgugaauaagaagggcaaagagguccuggugcuguggggaguucaucacccuuccucuagcaaggagcagcagacacucuaucagaacgaaaaugccuacguguccgucgugagcucuaacuacaaucgcagauuuauuccggagaucgcugaacggcccgaggugaaagaucaagccgggcgcauuaacuauuacuggacccugcuugaaccuggcgacacaaucauuuucgaggcuaacgggaaucuggucgcccccugguaugcguuugcccucuccagaggauucggcagcgggaucaucaccucuaacgcuagcaugcacgaguguaauacgaagugccagacaccucagggagccauuaacuccucucugcccuuucagaauauccauccgguuaccauuggcgaauguccuaaauacgucaagagcgcuaaacuucggauggugacaggccugcgcaacauccccuccauucaaagcagaggacucuucggggccaucgccggcuuuaucgaagggggauggaccggcaugauugaugggugguauggauaccaccaucagaaugaacagggcucuggcuaugcugcggaccagaaguccacccaaaacgccaucaaugggauuacaaacaaggugaauagcgugaucgagaaaaugaacacgcaguucaccgcuguuggaaaggaauuuaauaaccuggagaaacggauggagaaucugaacaagaaaguggaugacggcuuccucgacauuuggacauacaacgccgaacugcuuguccugcucgagaaugaacgcacccuggauuuccacgacucuaacgugaagaaucuuuacgagaagguuaaaauccagcugaagaacaaugccaaagaaaucgggaacggaugcuuugaguucuaucacaagugugauaaugagugcauggaauccgugagaaacggcacauacgacuauccuaaauacagcaaggaguccaagcucaaucgggagaaaauugauggggucaagcuggagucuaugggcguguaucaaauccuggcuauuuacagcaccgucgccuccucucucgugcugcuuguuagccugggagcgaucuccuuuuggaugugcagcaacggcucucuccagugucgcauuugcaucuga

SEQ ID NO: 195352 - RNA, 1701 nt, Artificial Sequence
  derived and/or modified CDS sequence (opt5) from hemagglutinin__InfluenzaA__ACV49567
augaaggccaaacugcucauccugcuuugcgcucugaccgccacagacgcggauacgauuuguaucggcuaccacgcuaacaauagcaccgacacaguggauaccguccucgagaagaacguuacagugacccauuccgugaaucugcuugaagacucucacaacgggaaacugugcagacucaagggaauugccccgcugcagcugggcaaauguaauaucgccggguggauucucggaaacccugagugcgaaagccugcuuuccaagcggucuuggagcuauaucgcugagacacccaauuccgaaaacggcgccuguuaccccggggauuucgcugacuaugaggagcugcgcgaacaacucucuagcgucuccagcuuugagagauucgaaaucuuuccuaaggagcggucuuggcccaaacauaauauuacccgcggagugacggccgcgugcucccacgccggcaagagcucuuucuacaaaaaccugcuuuggcugaccgagacagauggcuccuauccuaagcucagcaaaucuuacguuaauaacaaggaaaaggaggugcugguccuguggggagugcaucaccccuccaauaucgaagaccagaaaacccucuauagaaaggagaacgcuuacguuagcguggucuccucuaauuacaaccggcgcuuuacaccugaaauugccgagagaccgaaagugcgggggcaggcuggccgcaucaacuauuacuggacccugcuugagcccggggauacgauuaucuucgaagccaauggaaaccugauugcgccuugguaugccuuugcucucagcagagacuucggcuccgggaucaucacaagcaaugccucuauggaugagugugacaccaagugccagacaccccaaggagcuauuaacuccagccugccuuuucagaauauccaccccgugaccauuggcgaauguccgaaauacgucaagucuaccaaacuucggaugguuacaggccugcgcaacaucccuagcauucaguccagaggacucuucggggccaucgccggcuuuaucgaagggggauggacgggcaugauugaugggugguauggauaccaucaccagaaugaacaaggcucuggcuaugcugcggaccaaaagagcacccagaacgccaucaauuggauuacaaacaaggucaauuccgugaucgagaaaaugaacacccaguucacagcuguggggaaggaguuuaauaaacuggaaaagcggauggagaaccugaauaaaaagguggacgauggauuccucgacauuuggaccuacaacgccgaacugcuuguucugcucgagaacgaacgcacgcuggauuuccaugacagcaaugugaagaaccuuuacgagaaagucaagaaucagcugagaaacaaugccaaagagaucggcaacgggugcuuugaguucuaucacaaguguaauaacgagugcauggaaucugugaaaaauggaacauacgauuaucccaaguacuccgaggagagcaagcucaaccgggagaaaaucgacggcguuaagcuggaaucuauggggguguaucagauucuggcuaucuacuccaccgucgccagcucccucgugcugcuugucucucugggcgcgauuagcuuuuggaugugcuccaauggaucucuccaguguagaaucugcauuuga

SEQ ID NO: 195353 - RNA, 1689 nt, Artificial Sequence
  derived and/or modified CDS sequence (opt5) from hemagglutinin__InfluenzaA__ACV49578
auggccaucauuuaccugauccuccuguucaccgcugugagaggcgaccagauuugcaucggguaucacgccaacaauagcacagagaaggucgauacgauucuugaacggaacguuaccgugacacaugcgaaagacauccuggagaagacccacaauggaaaacucuguaagcugaacggcauucccccucuugaacugggggauugcuccaucgcuggauggcuccugggcaauccggagugugaccgccugcucagagugcccgaauggucuuacaucauggagaaagagaacccuaaguauagccugugcuaccccggguccuuuaaugauuaugaggaacuuaagcaucugcucucuagcgucaaacacuucgaaaaggugaaaauucugccuaaggaccgguggacacaacauaccacaaccggaggcucccgcgccugugccguuucuggcaaccccagcuuuuucagaaauaugguguggcuuacgaaaaaggggccuaacuacccggucgcuaagggauccuauaauaacaccagcggcgagcagaugcugaucauuuggggagugcaccaccccaucgaugaggccgaacagauugcucucuaccagaaaguugggacauacgugucugccuccaccagcacacugaauaagcggucuaccccugagaucgcggcccgccccgaagucaacggccugggguccagaauggaguuuagcuggacgcuccuggacaugugggauacaaucaauuucgaaucuaccggaaaccuuguggcuccugaguauggcuuuaaaauuuccaagcggggcagcuccgggaucaugaaaacagagggaacccuggaaaacugcgagaccaagugucaaacaccccucggcgccauuaauacgacccugccguuccauaacgugcacccucuuacaaucggggaaugccccaaauacgucaagucugagaagcugguucucgcuaccggacugcgcaaugugccucagauugaaagcagaggccuguuuggggccaucgcgggauucaucgagggcggcuggcaggggaugguggacggaugguauggcuaccaucacuccaacgaucaggggagcggauaugccgcugacaaagagucuacacaaaaggccuuugauggcauuaccaauaaagucaacuccgugaucgaaaagaugaauacgcaguucgaggcuguugggaaagaauuuagcaaccucgagaagcggcuggaaaaucuuaacaagaaaauggaggacggcuuccuggacguguggacauacaaugccgagcuccugguccuuauggaaaacgagcgcacccuggauuuccacgacucuaaugugaagaaccucuaugauaaaguuagaaugcagcugcgggacaaugugaaggaacugggaaacggcuguuuugaguucuaccauaaaugcgaugacgaguguauggauagcgucaagaacgggaccuacgacuaucccaaguacgaagaggaauccaaacucaaucgcaacgagauuaagggagugaaacugucuagcaugggcgucuaucagauccuugccauuuacgcuacaguggcggggucccugagccucgccaucaugauggcuggaaucucuuuuuggaugugcuccaauggcagccugcaaugcagaauuuguaucuga

SEQ ID NO: 195354 - RNA, 1689 nt, Artificial Sequence; identical to SEQ ID NO: 195353
  derived and/or modified CDS sequence (opt5) from hemagglutinin__InfluenzaA__ACV49589

SEQ ID NO: 195355 - RNA, 1689 nt, Artificial Sequence
  derived and/or modified CDS sequence (opt5) from hemagglutinin__InfluenzaA__ACV49600
auggccaucauuuaccugauccuccuguucaccgcugugagaggcgaccagauuugcaucggguaucacgccaacaauagcacagagaaggucgauacgauucuugaacggaacguuaccgugacacaugcgaaagacauccuggagaagacccacaauggaaaacucuguaagcugaacggcauucccccucuugaacugggggauugcuccaucgcuggauggcuccugggcaauccggagugugaccgccugcucucugugcccgaauggagcuacaucauggagaaagagaacccuagagaugggcugugcuaucccggauccuuuaaugacuacgaggaacuuaagcaucugcucucuagcgucaagcacuucgaaaaagugaagauucugccuaaagaucgguggacacaacauaccacaaccggcggcucccgcgccugugccguuucugggaaccccagcuuuuucagaaauaugguguggcuuacggagaagggauccaacuauccugucgcuaaaggcagcuacaauaacaccucuggggagcagaugcugaucauuuggggagugcaccacccgaaugacgaaacagagcagcggacccucuaucagaacguuggcacauacguguccgucgggaccagcacgcugaauaagcgcucuacacccgaaaucgccaccagaccuaaggugaacggacaaggcggccggauggaguuuuccuggacacugcucgauaugugggacaccauuaacuucgaaagcaccgggaaucugaucgcucccgaguacggauuuaaaaucucuaagcgcggcuccagcgggauuaugaaaacagagggaacgcuugaaaacugcgagaccaagugucagacaccucugggcgccaucaauaccacacuccccuuccauaacgugcacccgcugaccauuggggaaugcccuaaauaugucaaguccgagaaacuuguucuggcgacgggacucagaaaugugccccagaucgaaucucggggccuguuuggcgccauugcuggguucaucgagggaggcuggcaggggaugguggauggaugguacggcuaucaucacagcaacgaccaaggguccggcuacgccgcugauaaggagagcacacagaaggccuuugacggaaucaccaauaaagucaacucugugauugaaaagaugaauacccaguucgaggcgguuggcaaagaauuuuccaaccuggagcgcagacucgaaaaucugaacaagaaaauggaggacggguuccuugauguguggacauauaaugccgagcugcucguccugauggaaaacgagcggacccuugacuuccacgauagcaaugugaagaaccuguacgacaagguucgcaugcagcucagagauaacgugaaagaacugggaaauggcuguuuugaguucuaucauaagugcgacgaugaguguaugaacucugucaaaaaugggacauacgacuacccuaaguaugaagaggaaagcaaacugaaccggaaugagaucaagggagugaagcucuccucuaugggcgucuaccaaauucuggcuaucuaugccacgguggcugggagccuuucccuggccauuaugauggccggcaucagcuuuuggaugugcucuaacggaucccuccagugcagaaucuguauuuga

SEQ ID NO: 195356 - RNA, 1689 nt, Artificial Sequence
  derived and/or modified CDS sequence (opt5) from hemagglutinin__InfluenzaA__ACV49611
auggccaucauuuaccugauccuccuguucaccgcugugagaggcgaccagauuugcaucggguaucacgccaacaauagcacagagaaggucgauacgauucuugaacggaacguuaccgugacacaugcgaaagacauccuggagaagacccacaauggaaaacucuguaagcugaacggcauucccccucuugaacugggggauugcuccaucgcuggauggcuccugggcaauccggagugugaccgccugcucucugugcccgaauggagcuacaucauggagaaagagaacccuagagaugggcugugcuaucccggauccuuuaaugacuacgaagaacuuaagcaucugcucucuagcgucaagcacuucgaaaaagugaagauucugccuaaagaucgguggacacaacauaccacaaccggcggcucccgcgccugugccguuucugggaaccccagcuuuuucagaaauaugguguggcuuacggagaagggauccaacuauccugucgcuaaaggcagcuacaauaacaccucuggggagcagaugcugaucauuuggggagugcaccacccgaaugacgaaacagagcagcggacccucuaucagaacguuggcacauacguguccgucgggaccagcacgcugaauaagcgcucuacacccaagaucgccaccagaccuaaagugaacggacaaggcggccggauggaauuuuccuggacacugcucgauaugugggacaccauuaacuucgagagcaccgggaaucugaucgcucccgaauacggauuuaagaucucuaaacgcggcuccagcgggauuaugaagacagagggaacgcuugagaacugcgaaaccaaaugucagacaccucugggcgccaucaauaccacacuccccuuccauaacgugcacccgcugaccauuggggagugcccuaaguaugucaaauccgaaaaacuuguucuggcgacgggacucagaaaugugccccagaucgagucucggggccuguuuggcgccauugcuggguucaucgaaggaggcuggcaggggaugguggauggaugguacggcuaucaucacagcaacgaccaaggguccggcuacgccgcugauaaggagagcacacagaaggccuuugacggaaucaccaauaaggucaacucugugauugagaaaaugaauacccaguucgaagcgguuggcaaggaguuuuccaaccuggaacgcagacucgagaaucugaacaaaaagguggaagacggguuccuugaugucuggacauauaaugccgagcugcucgugcugauggagaacgaacggacccuugacuuccacgauagcaauguuaagaaccuguacgacaaagugcgcaugcagcucagagauaacgucaaggagcugggaaauggcuguuuugaguucuaucauaaaugcgacgaugaguguaugaacucugugaagaaugggacauacgacuacccuaaauaugaggaagagagcaagcugaaccggaaugaaaucaagggagucaaacucuccucuaugggcguguaccaaauucuggcuaucuaugccacgguugcugggagccuuucccuggccauuaugauggccggcaucagcuuuuggaugugcucuaacggaucccuccagugcagaaucuguauuuga

SEQ ID NO: 195357 - RNA, 1701 nt, Artificial Sequence
  derived and/or modified CDS sequence (opt5) from hemagglutinin__InfluenzaA__ACV49633
augaagaccaucauugcccugagcuacauccucugccugguguucgcucagaaacuucccggcaacgacaauuccacagccacgcugugucucgggcaccaugcggucccuaacggaacccugguuaagacaauuaccaaugaucaaaucgaggugacaaacgcuaccgaacuugugcagucuagcuccacaggcagaauuugcgacucuccgcaccggauccuggaugggaaaaauuguacccucaucgacgcccugcugggagauccccauugcgacggcuuucagaacaaggagugggaucucuucgucgaacgcagcaaagccuauuccaauuguuacccuuaugacgugcccgauuacgcuucucugagaagccuuguugccuccagcgggacgcuggaguuuaccaacgaaggauucaauuggacaggcguggcucaggacggcaccucuuaugccugcaagcggggguccgucaagagcuuuuucucucgccucaacuggcugcacaaacuugaguacaaguauccugcgcugaaugugacaaugcccaacaaugauaaauuugacaagcucuacauuuggggaguucaucacccuuccaccgauagcgugcaaacgucucuguacguccaggccuccggcagagugacagugagcaccaaacggucccagcagacagucaucccgaacauugggucucgccccuggguuagaggaaucagcucccggauuagcaucuauuggaccauugugaagccuggcgacauccugcucaucaauucuaccgggaaccugauugcuccccgcggauacuucaagaucagauccggcaaaagcucuauuaugcggagcgacgccccuaucggcaacuguaauuccgagugcauuacacccaacgggucuaucccgaaugauaagccuuuucaaaacgugaaucgcaucacguauggagcuugucccagauacgucaaacagaacacccuuaagcuggccacaggcaugcggaaugugccugaaaaacagacccgcgggauuuucggagcgaucgccggcuuuauugagaacgggugggaaggaaugguugacggcugguauggcuucagacaccagaauagcgaggggacaggacaagcugccgaucucaaguccacccaggcugccaucaaccagauuaauggcaaacugaaccggcuuaucgagaagacgaaugaaaaguuuccccaaaucgagaaagaguucagcgaaguggaagggcgcauucaggaccuggagaaguacgucgaggauacaaaaaucgaccucuggucuuauaacgccgaacugcugguggcucucgagaaucagcauaccauugaucugaccgacuccgaaaugaacaaacuuuucgagagaacacggaagcagcugagagaaaacgcggaggauaugggaaauggcugcuuuaagaucuaccacaagugugacaacgccugcauugggagcauccgcaauggcaccuacgaucaugacguuuaucgggacgaggcucucaacaauagauuccaaauuaaaggaguggaacugaagucuggcuacaaagauuggauccuuuggaucuccuuugccauuagcugcuuccugcucugugucgugcugcugggguuuaucaugugggccugccagaagggaaacauucgcuguaauaucugcauuuga

SEQ ID NO: 195358 - RNA, 1701 nt, Artificial Sequence; identical to SEQ ID NO: 194428
  derived and/or modified CDS sequence (opt5) from hemagglutinin__InfluenzaA__ACV49644

SEQ ID NO: 195359 - RNA, 1698 nt, Artificial Sequence; identical to SEQ ID NO: 195247
  derived and/or modified CDS sequence (opt5) from hemagglutinin__InfluenzaA__ACV49676

SEQ ID NO: 195360 - RNA, 1701 nt, Artificial Sequence; identical to SEQ ID NO: 194728
  derived and/or modified CDS sequence (opt5) from hemagglutinin__InfluenzaA__ACV53450

SEQ ID NO: 195361 - RNA, 1701 nt, Artificial Sequence; identical to SEQ ID NO: 194728
  derived and/or modified CDS sequence (opt5) from hemagglutinin__InfluenzaA__ACV53460

SEQ ID NO: 195362 - RNA, 1701 nt, Artificial Sequence; identical to SEQ ID NO: 194728
  derived and/or modified CDS sequence (opt5) from hemagglutinin__InfluenzaA__ACV53480

SEQ ID NO: 195363 - RNA, 1701 nt, Artificial Sequence
  derived and/or modified CDS sequence (opt5) from hemagglutinin__InfluenzaA__ACV53490
auggaggccauccuggugguccuccuguacaccuucgcuacagccaacgcggacacgcuuugcauuggcuaucacgcuaauaacagcaccgauacaguugacaccgugcuggaaaagaaugugacagucacccauuccgugaaccuccuggaggauaagcacaaugggaaacuuuguaagcugagaggaguugcgccccuccaucugggcaagugcgacaucgccggguggauucugggaaacccugaaugugagucucucagcacagcuuccucuuggagcuacaucguggaaaccuccucuagcgauaauggcacgugcuauccgggggacuuuauugauuacgaggagcugcgggaacagcuuuccagcgucucuuccuucgagcgcuuugaaaucuuccccaaaaccagcucuuggccuaaccacgacuccaauaagggagugacagccgcuuguccccaugccggcgccaagagcuuuuauaaaaaccugaucuggcucguuaagaaaggcaauucuuacccuaagcuguccaaaagcuauauuaacgauaaggggaaggaggugcuuguccuguggggaauccaccaccccuccaccucugccgaccaacagagccucuaccagaaugcugaugccuacguguucgugggcuccagcagauauucuaaaaaguuuaaaccugagauugcuauccggccgaagguccgcgaccaggaagggagaaugaacuacuauuggacacugguugagcccggagauaaaauuaccuucgaagccacgggcaaucugguggugccucgguacgcguuugccauggagcgcaacgcuggguccggaaucauuaucagcgacacacccguccaugacugcaacaccacaugucaaaccccuaagggcgccaucaauaccucucuccccuuccacaacauucauccgaucacaauuggcaaaugcccuaaguauguuaagagcacgaaacugagacuugcuaccgggcugcggaaugugcccuccauccagucucgcggacucuuuggcgccauugccggguucaucgaaggaggcuggacagggaugguggauggaugguacggcuaucaccaccagaacgagcagggcagcggguacgcugcggaccugaaguccacccaaaaugccaucgaugagauuacaaacaaagucaauagcgugaucgaaaagaugaacacccaguuuacggcuguuggaaaagaguucaaucaucuugaaacaagaauugagaaccugaauaagaagguggacgauggcuuccucgacaucuggaccuacaacgccgaacugcugguccuccuggagaaugagcggacccuugauuaucacgacucuaacgugaaaaaucuguacgaaaagguccgcucccagcucaaaaacaacgccaaggagauugggaauggauguuuugaguucuaucauaaaugcgauaacacauguauggaaagcgugaagaauggcaccuacgacuauccuaaguacucugaagaggcuaaacugaacagagaggaaaucgaugggguuaaacuugaguccacacggaucuaucagauucuggccaucuacagcacgguggcguccucucucguccuggugguuagccugggcgcuauuuccuuuuggaugugcucuaauggaagccuccaaugccgcaucuguauuuga

SEQ ID NO: 195364 - RNA, 1701 nt, Artificial Sequence
  derived and/or modified CDS sequence (opt5) from hemagglutinin__InfluenzaA__ACV53500
auggaggccauccuggugguccuccuguacaccuucgcuacagccaacgcggacacgcuuugcauuggcuaucacgcuaauaacagcaccgauacaguugacaccgugcuggaaaagaaugugacagucacccauuccgugaaccuccuggaggauaagcacaaugggaaacuuuguaagcugagaggaguugcgccccuccaucugggcaagugcaacaucgccggguggauucugggaaauccugaaugugagucucucagcacagcuuccucuuggagcuacaucguggaaaccuccucuagcgacaacggcacgugcuauccgggggauuuuauugacuacgaggagcugcgggaacagcuuuccagcgucucuuccuucgagcgcuuugaaaucuuccccaaaaccagcucuuggccuaaucacgauuccaacaagggagugacagccgcuuguccccaugccggcgccaagagcuuuuauaaaaaucugaucuggcucguuaagaaaggcaacucuuacccuaagcuguccaaaagcuauauuaaugacaaggggaaggaggugcuuguccuguggggaauccaccaccccuccaccucugccgaucaacagagccucuaccagaacgcugacgccuacguguucgugggcuccagcagauauucuaaaaaguuuaaaccugagauugcuauccggccgaagguccgcgaucaggaagggagaaugaauuacuauuggacacugguugagcccggagacaaaauuaccuucgaagccacgggcaaccugguggugccucgguacgcguuugccauggagcgcaacgcuggguccggaaucauuaucagcgauacacccguccaugacugcaauaccacaugucaaaccccuaagggcgccaucaacaccucucuccccuuccacaauauucauccgaucacaauuggcaaaugcccuaaguauguuaagagcacgaaacugagacuugcuaccgggcugcggaacgugcccuccauccagucucgcggacucuuuggcgccauugccggguucaucgaaggaggcuggacagggaugguggacggaugguacggcuaucaccaccagaaugagcagggcagcggguacgcugcggaucugaaguccacccaaaacgccaucgacgagauuacaaauaaagucaacagcgugaucgaaaagaugaauacccaguuuacggcuguuggaaaagaguucaaccaucuugaaacaagaauugagaaucugaacaagaagguggaugacggcuuccucgauaucuggaccuacaaugccgaacugcugguccuccuggagaacgagcggacccuugacuaucacgauucuaaugugaaaaaccuguacgaaaagguccgcucccagcucaaaaacaaugccaaggagauugggaacggauguuuugaguucuaucauaaaugcgacaauacauguauggaaagcgugaagaacggcaccuacgauuauccuaaguacucugaagaggcuaaacugaauagagaggaaaucgacgggguuaaacuugaguccacacggaucuaucagauucuggccaucuacagcacgguggcguccucucucguccuggugguuagccugggcgcuauuuccuuuuggaugugcucuaacggaagccuccaaugccgcaucuguauuuga

SEQ ID NO: 195365 - RNA, 1701 nt, Artificial Sequence
  derived and/or modified CDS sequence (opt5) from hemagglutinin__InfluenzaA__ACV53880
augaaggccauccuggugguccuccuguacaccuucgcuacagccaacgcggacacgcuuugcauuggcuaucacgcuaauaacagcaccgauacaguugacaccgugcuggagaaaaaugugacagucacccauuccgugaaccuccuggaagauaagcacaaugggaaacuuuguaagcugagaggaguugcuccccuccaucugggcaaaugcaacaucgccggguggauucugggaaauccugagugugaaucucucagcacagccuccucuuggagcuacaucguggagaccuccucuagcgacaacggcacgugcuauccgggggauuuuauugacuacgaagaacugcgggagcagcuuuccagcgucucuuccuucgaacgcuuugagaucuuccccaagaccagcucuuggccuaaucacgauuccaacaagggagugacaaccgccuguccccaugcuggcgccaagagcuuuuauaagaaucugaucuggcucguuaaaaagggcaacucuuacccuaaacuguccaagagcuauauuaaugacaaggggaaagaagugcuuguccuguggggaauccaccaccccuccacaucugcggaucaacagagccucuaccagaacgccgacgcuuacguguucgugggcaccuccagauauagcaagaaauuuaagccugagauugccauccggccgaaaguccgcgaucaggaggggagaaugaauuacuauuggacgcugguugaacccggagacaagauuacauucgaggcuaccggcaaccugguggugccucgguacgccuuugcgauggaacgcaacgccgggucuggaaucauuaucuccgauacacccguccaugacugcaauaccaccugucaaacaccuaaaggcgcuaucaacacgagccuccccuuccagaauauucacccgaucaccauuggcaagugcccuaaguaugugaaaucuacaaagcugagacuugccaccgggcugcggaacguucccagcauccagucccgcggacucuuuggcgcuauugccggguucaucgagggaggcuggacagggaugguggacggaugguacggcuaucaucaccagaaugaacaaggcucuggguacgccgcugaucugaaaagcacccagaacgcgaucgacgagauuacgaauaaggucaacuccgugaucgagaaaaugaauacacaguuuaccgccguuggaaaggaguucaaccaccuugagaagagaauugaaaaucugaacaaaaagguggaugacggcuuccucgauaucuggaccuacaaugcugagcugcugguccuccuggaaaacgagcggacacuugacuaucaugauagcaaugugaaaaaccuguacgagaagguccgcucucagcucaaaaacaaugccaaggaaauugggaacggauguuuugaguucuaucacaagugcgacaauaccuguauggaauccgugaaaaacggcacauacgauuauccuaaguacagcgaggaagccaaacugaauagagaggagaucgacgggguuaaacuugaaucuacgcggaucuaucaaauucuggcuaucuacuccaccguggccagcucccucguccuggugguuucucugggcgcgauuagcuuuuggaugugcuccaacggaucucuccagugccgcaucuguauuuga

SEQ ID NO: 195366 - RNA, 1701 nt, Artificial Sequence; identical to SEQ ID NO: 194741
  derived and/or modified CDS sequence (opt5) from hemagglutinin__InfluenzaA__ACV53881

SEQ ID NO: 195367 - RNA, 1701 nt, Artificial Sequence; identical to SEQ ID NO: 194728
  derived and/or modified CDS sequence (opt5) from hemagglutinin__InfluenzaA__ACV53882

SEQ ID NO: 195368 - RNA, 1701 nt, Artificial Sequence; identical to SEQ ID NO: 194741
  derived and/or modified CDS sequence (opt5) from hemagglutinin__InfluenzaA__ACV53883

SEQ ID NO: 195369 - RNA, 1701 nt, Artificial Sequence; identical to SEQ ID NO: 194741
  derived and/or modified CDS sequence (opt5) from hemagglutinin__InfluenzaA__ACV53885

SEQ ID NO: 195370 - RNA, 1701 nt, Artificial Sequence
  derived and/or modified CDS sequence (opt5) from hemagglutinin__InfluenzaA__ACV53899
augaaggccauccuggugguccuccuguacaccuucgcuacagccaacgcggacacgcuuugcauuggcuaucacgcuaauaacagcaccgauacaguugacaccgugcuggagaaaaaugugacagucacccauuccgugaaccuccuggaagauaagcacaaugggaaacuuuguaagcugagaggaguugcuccccuccaucugggcaaaugcaacaucgccggguggauucugggaaauccugagugugaaucucucagcacagccuccucuuggagcuacaucguggagaccuccucuagcgacaacggcacgugcuauccgggggauuuuauugacuacgaagaacugcgggagcagcuuuccagcgucucuuccuucgaacgcuuugagaucuuccccaagaccagcucuuggccuaaucacgauuccaacaagggagugacagccgcuuguccccaugccggcgcgaaaucuuuuuauaagaaucugaucuggcucguuaaaaagggcaacagcuacccuaaacuguccaagagcuauauuaaugacaaggggaaagaagugcuuguccuguggggaauccaccaccccuccaccucugccgaucaacagagccucuaccagaacgcugacgccuacguguucgugggcacauccagauauagcaagaaauuuaagccugagauugcuauccggccgaaaguccgcgaucaggaggggagaaugaauuacuauuggacccugguugaacccggagacaagauuacguucgaggccacaggcaaccugguggugccucgguacgcguuugccauggaacgcaacgcugggucuggaaucauuaucuccgauacccccguccaugacugcaauacaaccugucaaaccccugagggcgccaucaacacaagccuccccuuccagaauauucacccgaucacgauuggcaaaugcccuaaguaugugaagucuaccaaacugagacuugcuacagggcugcggaacguucccagcauccagucccgcggacucuuuggcgccauugccggguucaucgaaggaggcuggaccgggaugguggacggaugguacggcuaucaucaccagaaugagcaaggcucuggguacgcugcggaucuuaagagcacacagaacgccaucgacgagauuaccaauaaagucaacuccgugaucgaaaagaugaauacgcaguuuacagcuguuggaaaagaguucaaccaccuggaaaagagaauugagaaucugaacaagaaaguggaugacggcuuccucgauaucuggaccuacaaugccgaacugcugguccuccuggagaacgagcggacccuugacuaucaugauagcaaugugaagaaccuguacgaaaaaguccgcucucagcucaagaacaaugccaaagagauugggaacggauguuuugaguucuaucacaagugcgacaauacauguauggaguccgugaagaacggcaccuacgauuauccuaaauacagcgaagaggcuaagcugaauagagaggaaaucgacgggguuaaacuugagucuacacggaucuaucaaauucuggccaucuacuccacgguggcgagcucccucguccuggugguuucucugggcgcuauuagcuuuuggaugugcuccaacggaucucuccagugccgcaucuguauuuga

SEQ ID NO: 195371 - RNA, 1701 nt, Artificial Sequence; identical to SEQ ID NO: 194741
  derived and/or modified CDS sequence (opt5) from hemagglutinin__InfluenzaA__ACV53909

SEQ ID NO: 195372 - RNA, 1701 nt, Artificial Sequence; identical to SEQ ID NO: 194741
  derived and/or modified CDS sequence (opt5) from hemagglutinin__InfluenzaA__ACV67220

SEQ ID NO: 195373 - RNA, 1701 nt, Artificial Sequence
  derived and/or modified CDS sequence (opt5) from hemagglutinin__InfluenzaA__ACV67221
augaaggccauccuggugguccuccuguacaccuucgcuacagccaacgcggacacgcuuugcauuggcuaucacgcuaauaacagcaccgauacaguugacaccgugcuggagaagaaugugacagucacccauuccgugaaccuccuggaagauaagcacaaugggaaacuuuguaagcugagaggaguugcuccccuccaucugggcaaaugcaacaucgccggguggauucugggaaauccugaguguggcucucucagcacagccuccucuuggagcuacaucguggaaaccuccucuagcgacaacgggacgugcuauccgggagauuuuauugacuacgaggaacugcgggagcagcuuuccagcgucucuuccuucgagcgcuuugaaaucuuccccaagaccagcucuuggccuaaucacgauuccaacaagggcgugacagccgcuuguccccaugccggcgcgaaaucuuuuuauaagaaucugaucuggcucguuaaaaaggggaacagcuacccuaaacuguccaagagcuauauuaaugacaagggaaaagaggugcuuguccuguggggcauccaccaccccuccaccucugccgaucaacagagccucuaccaguccgcugacgccuacguguucguggggacaagcagauauucuaagaaauuuaagccugaaauugcuauccggccgaaaguccgcgaucaggagggaagaaugaacuacuauuggacccugguugagcccggcgacaagauuacguucgaagccacagggaaucugguggugccucgguacgcguuugccauggagcgcaacgcuggauccggcaucauuaucagcgauacccccguccaugacugcaacacaaccugucaaaccccuaaaggcgccaucaauacaucucuccccuuccagaacauucacccgaucacgauugggaagugcccuaaguaugugaaaagcaccaagcugagacuugcuacaggacugcggaauguucccuccauccagucucgcggccucuuuggggccauugccggauucaucgaaggcggguggaccggaaugguggacggcugguacggcuaucaucaccagaacgagcaagggagcggauacgcugcggaucugaaauccacacagaaugccaucgacgaaauuaccaacaaggucaauagcgugaucgagaaaaugaacacgcaguuuacagcuguuggcaaggaguucaaucaccuugaaaagagaauugagaaccugaauaaaaagguggaugacggguuccucgauaucuggaccuacaacgccgaacugcugguccuccuggagaaugaacggacccuugacuaucaugauucuaacgugaaaaaucuguacgagaagguccgcucccagcucaaaaacaacgccaaggagauuggaaauggcuguuuugaguucuaucacaagugcgacaacacauguauggaaagcgugaaaaaugggaccuacgauuauccuaaguacucugaagaggcuaaacugaacagagaagagaucgacggcguuaaacuugaguccacacggaucuaucaaauucuggccaucuacagcacgguggcguccucucucguccuggugguuagccugggagcuauuuccuuuuggaugugcucuaauggcagccuccagugccgcaucuguauuuga

SEQ ID NO: 195374 - RNA, 1701 nt, Artificial Sequence; identical to SEQ ID NO: 194728
  derived and/or modified CDS sequence (opt5) from hemagglutinin__InfluenzaA__ACV67222

SEQ ID NO: 195375 - RNA, 1701 nt, Artificial Sequence; identical to SEQ ID NO: 194767
  derived and/or modified CDS sequence (opt5) from hemagglutinin__InfluenzaA__ACV67223

SEQ ID NO: 195376 - RNA, 1701 nt, Artificial Sequence; identical to SEQ ID NO: 194983
  derived and/or modified CDS sequence (opt5) from hemagglutinin__InfluenzaA__ACV67224

SEQ ID NO: 195377 - RNA, 1701 nt, Artificial Sequence; identical to SEQ ID NO: 194921
  derived and/or modified CDS sequence (opt5) from hemagglutinin__InfluenzaA__ACV67225

SEQ ID NO: 195378 - RNA, 1701 nt, Artificial Sequence; identical to SEQ ID NO: 194741
  derived and/or modified CDS sequence (opt5) from hemagglutinin__InfluenzaA__ACV67226

SEQ ID NO: 195379 - RNA, 1701 nt, Artificial Sequence
  derived and/or modified CDS sequence (opt5) from hemagglutinin__InfluenzaA__ACV67227
augaaggccauccuggugguccuccuguacaccuucgcuacagccaacgcggacacgcuuugcauuggcuaucacgcuaauaacagcaccgauacaguugacaccgugcuggagaagaaugugacagucacccauuccgugaaccuccuggaagauaagcacaaugggaaacuuuguaagcugagaggaguugcuccccuccaucugggcaaaugcaacaucgccggguggauucugggaaauccugagugugaaucucucagcacagccuccucuuggagcuacaucguggagaccuccucuagcgacaacggcacgugcuauccgggggauuuuauugacuacgaagaacugcgggagcagcuuuccagcgucucuuccuucgaacgcuuugagaucuuccccaagaccagcucuuggccuaaucacgauuccaacaagggagugacagccgcuuguccccaugccggcgcgaaaucuuuuuauaagaaucugaucuggcucguuaaaaagggcaacagcuacccuaaacuguccaagagcuauauuaaugacaaggggaaagaagugcuuguccuguggggaauccaccaccccuccaccucugccgaucaacagagccucuaccagaacgcugacgccuacguguucgugggcacauccagauauagcaagaaauuuaagccugagauugcuauccggccgaaaguccgcgaucaggaggggagaaugaauuacuauuggacccugguugaacccggagacaagauuacguucgaggccacaggcaaccugguggugccucgguacgcguuugccauggaacgcaacgcugggucuggaaucauuaucuccaauacccccguccaugauugcaacacaaccugucaaaccccuaaaggcgccaucaauacaagccuccccuuccagaacauucacccgaucacgauuggcaagugcccuaaguaugugaaaucuaccaagcugagacuugcuacagggcugcggaauguucccagcauccagucccgcggacucuuuggcgccauugccggguucaucgagggaggcuggaccgggaugguggacggaugguacggcuaucaucaccagaacgaacaaggcucuggguacgcugcggaccugaaaagcacacagaaugccaucgaugagauuaccaacaaggucaauuccgugaucgagaaaaugaacacgcaguuuacagcuguuggaaaggaguucaaucaccuugagaagagaauugaaaaccugaauaaaaagguggacgauggcuuccucgacaucuggaccuacaacgccgagcugcugguccuccuggaaaaugagcggacccuugauuaucaugacagcaacgugaaaaaccuguacgagaagguccgcucucagcucaaaaauaacgccaaggaaauugggaauggauguuuugaguucuaucacaagugcgauaacacauguauggaauccgugaaaaauggcaccuacgacuauccuaaguacagcgaggaagcuaaacugaacagagaggagaucgaugggguuaaacuugaaucuacacggaucuaucaaauucuggccaucuacuccacgguggcgagcucccucguccuggugguuucucugggcgcuauuagcuuuuggaugugcuccaauggaucucuccagugccgcaucuguauuuga

SEQ ID NO: 195380 - RNA, 1701 nt, Artificial Sequence; identical to SEQ ID NO: 194983
  derived and/or modified CDS sequence (opt5) from hemagglutinin__InfluenzaA__ACV67228

SEQ ID NO: 195381 - RNA, 1701 nt, Artificial Sequence
  derived and/or modified CDS sequence (opt5) from hemagglutinin__InfluenzaA__ACV67229
augaaggccauccuggugguccuccuguacaccuucgcuacagccaacgcggacacgcuuugcauuggcuaucacgcuaauaacagcaccgauacaguugacaccgugcuggagaagaaugugacagucacccauuccgugaaccuccuggaagauaagcacaaugggaaacuuuguaagcugagaggaguugcuccccuccaucugggcaaaugcaacaucgccggguggauucugggaaauccugagugugaaucucucagcacagccuccucuuggagcuacaucguggagaccuccucuagcgacaacggcacgugcuauccgggggauuuuauugacuacgaagaacugcgggagcagcuuuccagcgucucuuccuucgaacgcuuugagaucuuccccaagaccagcucuuggccuaaucacgauuccaacaagggagugacagccgcuuguccccaugccggcgcgaaaucuuuuuauaagaaucugaucuggcucguuaaaaagggcaacagcuacccuaaacuguccaagagcuauauuaaugacaaggggaaagaagugcuuguccuguggggaauccaccaccccuccaccucugccgaucaacagagccucuaccagaacgcugacgccuacguguucgugggcacauccagauauagcaagaaauuuaagccugagauugcuauccggccgaaaguccgcgaucaggaggggagaaugaauuacuauuggacccugguugaacccggagacaagauuacguucgaggccacaggcaaccugguggugccucgguacgcguuugccauggaacgcaacgcugggucuggaaucauuaucuccgauacccccguccaugacugcaauacaaccugucaaaccccuaaaggcgccaucaacacaagccuccccuuccagaauauucacccgaucacgauuggcaagugcccuaaguaugugaaaucuaccaagcugagacuugcuacagggcugcggaacguucccagcauccagucccgcggacucuuuggcgccauugccggguucaucgagggaggcuggaccgggaugguggacggaugguacggcuaucaucaccagaaugaacaaggcucuggguacgcugcggaucugaaaagcacacagaacccuaucgacgagauuaccaauaaggucaacuccgugaucgagaaaaugaauacgcaguuuacagccguuggaaaggaguucaaccaccuugagaagagaauugaaaaucugaacaaaaagguggaugacggcuuccucgauaucuggaccuacaaugcugagcugcugguccuccuggaaaacgagcggacccuugacuaucaugauagcaaugugaaaaaccuguacgagaagguccgcucucagcucaaaaacaaugccaaggaaauugggaacggauguuuugaguucuaucacaagugcgacaauacauguauggaauccgugaaaaacggcaccuacgauuaucccaaguacagcgaggaagccaaacugaauagagaggagaucgacgggguuaaacuugaaucuacacggaucuaucaaauucuggcuaucuacuccacgguggccagcucccucguccuggugguuucucugggcgcgauuagcuuuuggaugugcuccaacggaucucuccagugccgcaucuguauuuga

SEQ ID NO: 195382 - RNA, 1701 nt, Artificial Sequence; identical to SEQ ID NO: 194728
  derived and/or modified CDS sequence (opt5) from hemagglutinin__InfluenzaA__ACV67230

SEQ ID NO: 195383 - RNA, 1701 nt, Artificial Sequence; identical to SEQ ID NO: 194741
  derived and/or modified CDS sequence (opt5) from hemagglutinin__InfluenzaA__ACV67231

SEQ ID NO: 195384 - RNA, 1701 nt, Artificial Sequence; identical to SEQ ID NO: 194741
  derived and/or modified CDS sequence (opt5) from hemagglutinin__InfluenzaA__ACV67232

SEQ ID NO: 195385 - RNA, 1701 nt, Artificial Sequence; identical to SEQ ID NO: 194728
  derived and/or modified CDS sequence (opt5) from hemagglutinin__InfluenzaA__ACV67233

SEQ ID NO: 195386 - RNA, 1701 nt, Artificial Sequence; identical to SEQ ID NO: 194983
  derived and/or modified CDS sequence (opt5) from hemagglutinin__InfluenzaA__ACV67234

SEQ ID NO: 195387 - RNA, 1701 nt, Artificial Sequence
  derived and/or modified CDS sequence (opt5) from hemagglutinin__InfluenzaA__ACV67235
augaaggccauccuggugguccuccuguacaccuucgcuacagccaacgcggacacgcuuugcauuggcuaucacgcuaauaacagcaccgauacaguugacaccgugcuggagaaaaaugugacagucacccauuccgugaaccuccuggaagauaagcacaaugggaaacuuuguaagcugagaggaguugcuccccuccaucugggcaaaugcaacaucgccggguggauucugggaaauccugagugugaaucucucagcacagccuccucuuggagcuacaucguggagaccuccucuagcgacaacggcacgugcuauccgggggauuuuauugacuacgaagaacugcgggagcagcuuuccagcgucucuuccuucgaacgcuuugagaucuuccccaagaccagcucuuggccuaaucacgauuccaacaagggagugacagccgcuuguccccaugccggcgcgaaaucuuuuuauaagaaucugaucuggcucguuaaaaagggcaacagcuacccuaaacuguccaagagcuauauuaaugacaaggggaaagaagugcuuguccuguggggaauccaccaccccuccaccucugccgaucaacagagccucuaccagaacgcugacgccuacguguucgugggcuccagcagauauucuaagaaauuuaagccugagauugcuauccggccgaaaguccgcgaucaggaggggagaaugaauuacuauuggacacugguugaacccggagacaagauuaccuucgaggccacgggcaaccugguggugccucgguacgcguuugccauggaacgcaacgcuggguccggaaucauuaucagcgauacacccguccaugacugcaauaccacaugucaaaccccuaaaggcgccaucaacaccucucuccccuuccagaauauucacccgaucacaauuggcaagugcccuaaguaugugaaaagcacgaagcugagacuugcuaccgggcugcggaacguucccuccauccagucucgcggacucuuuggcgccauugccggguucaucgagggaggcuggacagggaugguggacggaugguacggcuaucaucaccagaaugaacaaggcagcggguacgcugcggaucugaaauccacccagaacgccaucgacgagauuacaaauaaggucaacagcgugaucgagaaaaugaauacccaguuuacggcuguuggaaaggaguucaaccaccuugagaagagaauugaaaaucugaacaaaaagguggaugacggcuuccucgauaucuggacauacaaugccgagcugcugguccuccuggaaaacgagcggacccuugacuaucaugauucuaaugugaaaaaccuguacgagaagguccgcucccagcucaaaaacaaugccaacgaaauugggaauggauguuuugaguucuaucacaagugcgacaacaccuguauggaaagcgugaagaauggcacauacgauuauccuaaauacucugaggaagcuaagcugaacagagaggagaucgacgggguuaaacuugaauccacccggaucuaucaaauucuggccaucuacagcacaguggcguccucucucguccuggugguuagccugggcgcuauuuccuuuuggaugugcucuaauggaagccuccagugccgcaucuguauuuga

SEQ ID NO: 195388 - RNA, 1701 nt, Artificial Sequence; identical to SEQ ID NO: 194985
  derived and/or modified CDS sequence (opt5) from hemagglutinin__InfluenzaA__ACV67236

SEQ ID NO: 195389 - RNA, 1701 nt, Artificial Sequence; identical to SEQ ID NO: 194728
  derived and/or modified CDS sequence (opt5) from hemagglutinin__InfluenzaA__ACV67238

SEQ ID NO: 195390 - RNA, 1701 nt, Artificial Sequence
  derived and/or modified CDS sequence (opt5) from hemagglutinin__InfluenzaA__ACV67239
augaaggccauccuggugguccuccuguacaccuucacaacggcuaacgccgacacccuuugcauuggcuaucacgcgaauaacagcacagauaccguugacacagugcuggagaaaaaugugaccgucacacauuccgugaaccuccuggaagauaagcacaaugggaaacuuuguaagcugagaggaguugcuccccuccaucugggcaaaugcaacaucgccggguggauucugggaaauccugagugugaaucucucagcaccgccuccucuuggagcuacaucguggagacguccucuagcgacaacgggaccugcuauccgggcgauuuuauugacuacgaagaacugcgggagcagcuuuccagcgucucuuccuucgaacgcuuugagaucuuccccaagacaagcucuuggccuaaucacgauuccaacaagggagugaccgcugccuguccccaugcuggcgccaagagcuuuuauaagaaucugaucuggcucguuaaaaagggcaacucuuacccuaaacuguccaagagcuauauuaaugacaaggggaaagaagugcuuguccuguggggaauccaccaccccuccacaucugcggaucaacagagccucuaccagaacgccgacgcuuacguguucgugggcuccagcagauauucuaagaaauuuaagccugagauugccauccggccgaaaguccgcgaucaggaggggagaaugaauuacuauuggacccugguugaacccggagacaagauuacguucgaggcuacaggcaaccugguggugccucgguacgccuuugcgauggaacgcaacgccggguccggaaucauuaucagcgauacccccguccaugacugcaauacaaccugucaaaccccuaaaggcgcuaucaacacaucucuccccuuccagaauauucacccgaucacgauuggcaagugcccuaaguaugugaaaagcaccaagcugagacuugccacagggcugcggaacguucccuccauccagucucgcggacucuuuggcgcuauugccggguucaucgagggaggcuggaccgggaugguggacggaugguacggcuaucaucaccagaaugaacaaggcagcggguacgccgcugaucugaaauccacacagaacgcgaucgacgagauuaccaauaaggucaacagcgugaucgagaaaaugaauacgcaguuuacagccguuggaaaggaguucaaccaccuugagaagagaauugaaaaucugaacaaaaagguggaugacggcuuccucgauaucuggaccuacaaugcugagcugcugguccuccuggaaaacgagcggacccuugacuaucaugauucuaaugugaaaaaccuguacgagaagguccgcucccagcucaaaaacaaugccaaggaaauugggaacggauguuuugaguucuaucacaagugcaauaacacauguauggaaagcgugaaaaauggcaccuacgacuauccuaaguacucugaggaagccaaacugaacagagaggagaucgaugggguuaaacuugaauccacacggaucuaucaaauucuggcuaucuacagcacgguggccuccucucucguccuggugguuagccugggcgcgauuuccuuuuggaugugcucuaauggaagccuccagugccgcaucuguauuuga

SEQ ID NO: 195391 - RNA, 1701 nt, Artificial Sequence; identical to SEQ ID NO: 194985
  derived and/or modified CDS sequence (opt5) from hemagglutinin__InfluenzaA__ACV67240

SEQ ID NO: 195392 - RNA, 1701 nt, Artificial Sequence
  derived and/or modified CDS sequence (opt5) from hemagglutinin__InfluenzaA__ACV67241
augaaggccauccuggugguccuccuguacaccuucgcuacagccaacgcggacacgcuuugcauuggcuaucacgcuaauaacagcaccgauacaguugacaccgugcuggagaaaaaugugacagucacccauuccgugaaccuccuggaagauaagcacaaugggaaacuuuguaagcugagaggaguugcuccccuccaucugggcaaaugcaacaucgccggguggauucugggaaauccugagugugaaucucucagcacagccuccucuuggagcuacaucguggagaccuccucuagcgacaacggcacgugcuauccgggggauuuuauugacuacgaagaacugcgggagcagcuuuccagcgucucuuccuucgaacgcuuugagaucuuccccaagaccagcucuuggccuaaucacgauuccaacaagggagugacagccgcuuguccccaugccggcgcgaaaucuuuuuauaagaaucugaucuggcucguuaaaaacggcaauagcuacccuaagcuguccaaaagcuauauuaacgacaaggggaaggaagugcuuguccuguggggaauccaccaccccuccaccucugccgaucaacagagccucuaccagaaugcugacgccuacguguucgugggcacauccagauauagcaaaaaguuuaaaccugagauugcuauccggccgaagguccgcgaucaggaggggagaaugaacuacuauuggacccugguugaacccggagacaaaauuacguucgaggccacaggcaaccugguggugccucgguacgcguuugccauggaacgcaaugcugggucuggaaucauuaucuccgauacccccguccaugacugcaacacaaccugucaaaccccuaagggcgccaucaauacaagccuccccuuccagaacauucacccgaucacgauuggcaaaugcccuaaguaugugaagucuaccaaacugagacuugcuacagggcugcggaauguucccagcauccagucccgcggacucuuuggcgccauugccggguucaucgagggaggcuggaccgggaugguggacggaugguacggcuaucaucaccagaacgaacaaggcucuggguacgcugcggaucuuaagagcacacagaaugccaucgacgagauuaccaacaaagucaauuccgugaucgagaagaugaacacgcaguuuacagcuguuggaaaagaguucaaucaccuggagaagagaauugaaaaccugaauaagaaaguggaugacggcuuccucgauaucuggaccuacaacgccgagcugcugguccuccuggaaaaugagcggacccuugacuaucaugauagcaacgugaagaaccuguacgagaaaguccgcucucagcucaagaauaacgccaaagaaauugggaauggauguuuugaguucuaucacaagugcgacaacacauguauggaauccgugaagaauggcaccuacgauuauccuaaauacagcgaggaagcuaagcugaacagagaggagaucgacgggguuaaacuugaaucuacacggaucuaucaaauucuggccaucuacuccacgguggcgagcucccucguccuggugguuucucugggcgcuauuagcuuuuggaugugcuccaauggaucucuccagugccgcaucuguauuuga

SEQ ID NO: 195393 - RNA, 1701 nt, Artificial Sequence; identical to SEQ ID NO: 194983
  derived and/or modified CDS sequence (opt5) from hemagglutinin__InfluenzaA__ACV67242

SEQ ID NO: 195394 - RNA, 1701 nt, Artificial Sequence; identical to SEQ ID NO: 194921
  derived and/or modified CDS sequence (opt5) from hemagglutinin__InfluenzaA__ACV67244

SEQ ID NO: 195395 - RNA, 1701 nt, Artificial Sequence; identical to SEQ ID NO: 194834
  derived and/or modified CDS sequence (opt5) from hemagglutinin__InfluenzaA__ACV67246

SEQ ID NO: 195396 - RNA, 1701 nt, Artificial Sequence; identical to SEQ ID NO: 195365
  derived and/or modified CDS sequence (opt5) from hemagglutinin__InfluenzaA__ACV67247

SEQ ID NO: 195397 - RNA, 1701 nt, Artificial Sequence; identical to SEQ ID NO: 194728
  derived and/or modified CDS sequence (opt5) from hemagglutinin__InfluenzaA__ACV70073

SEQ ID NO: 195398 - RNA, 1701 nt, Artificial Sequence; identical to SEQ ID NO: 194728
  derived and/or modified CDS sequence (opt5) from hemagglutinin__InfluenzaA__ACV70093

SEQ ID NO: 195399 - RNA, 1701 nt, Artificial Sequence; identical to SEQ ID NO: 194728
  derived and/or modified CDS sequence (opt5) from hemagglutinin__InfluenzaA__ACV70103

SEQ ID NO: 195400 - RNA, 1701 nt, Artificial Sequence; identical to SEQ ID NO: 194728
  derived and/or modified CDS sequence (opt5) from hemagglutinin__InfluenzaA__ACV70113

SEQ ID NO: 195401 - RNA, 1701 nt, Artificial Sequence; identical to SEQ ID NO: 194728
  derived and/or modified CDS sequence (opt5) from hemagglutinin__InfluenzaA__ACV70123

SEQ ID NO: 195402 - RNA, 1701 nt, Artificial Sequence; identical to SEQ ID NO: 194728
  derived and/or modified CDS sequence (opt5) from hemagglutinin__InfluenzaA__ACV70154

SEQ ID NO: 195403 - RNA, 1701 nt, Artificial Sequence
  derived and/or modified CDS sequence (opt5) from hemagglutinin__InfluenzaA__ACV70164
augaaggccauccuggugguccuccuguacaccuucacaacggcuaacgccgacacccuuugcauuggcuaucacgcgaauaacagcacagauaccguugacacagugcuggagaaaaaugugaccgucacacauuccgugaaccuccuggaagauaagcacaaugggaaacuuuguaagcugagaggaguugcuccccuccaucugggcaaaugcaacaucgccggguggauucugggaaauccugagugugaaucucucagcaccgccuccucuuggagcuacaucguggagacguccucuagcgacaacgggaccugcuauccgggcgauuuuauugacuacgaagaacugcgggagcagcuuuccagcgucucuuccuucgaacgcuuugagaucuuccccaagacaagcucuuggccuaaucacgauuccaacaagggagugaccgcugccuguccccaugcuggcgccaagagcuuuuauaagaaucugaucuggcucguuaaaaagggcaacucuuacccuaaacuguccaagagcuauauuaaugacaaggggaaagaagugcuuguccuguggggaauccaccaccccuccacaucugcggaucaacagagccucuaccagaacgccgacgcuuacguguucgugggcuccagcagauauucuaagaaauuuaagccugagauugccauccggccgaaaguccgcgaucaggaggggagaaugaauuacuauuggacccugguugaacccggagacaagauuacguucgaggcuacaggcaaccugguggugccucgguacgccuuugcgauggaacgcaacgccggguccggaaucauuaucagcgauacccccguccaugacugcaauacaaccugucaaacccucaaaggcgcuaucaacacaucucugccuuuccagaauauucaccccaucacgauuggcaagugcccgaaguaugugaaaagcaccaaacuuagacuggccacagggcuccggaacguuccuuccauccagucucgcggacuguuuggcgcuauugccggguucaucgagggaggcuggaccgggaugguggacggaugguacggcuaucaucaccagaaugaacaaggcagcggguacgccgcugaucuuaaauccacacagaacgcgaucgacgagauuaccaauaaggucaacagcgugaucgagaaaaugaauacgcaguuuacagccguuggaaaggaguucaaccaccuggagaagagaauugaaaaucucaacaaaaagguggaugacggcuuccuggauaucuggaccuacaaugcugagcugcucguccugcuugaaaacgagcggacccuggacuaucaugauucuaaugugaaaaaccucuacgagaagguccgcucccagcugaaaaacaaugccaaggaaauugggaacggauguuuugaguucuaucacaagugcgacaauacauguauggaaagcgugaaaaacggcaccuacgauuaucccaaguacucugaggaagccaaacuuaauagagaggagaucgacgggguuaagcuggaauccacacggaucuaucaaauucucgcuaucuacagcacgguggccuccucucugguccuggugguuagccucggcgcgauuuccuuuuggaugugcucuaacggaagccugcagugccgcaucuguauuuga

SEQ ID NO: 195404 - RNA, 1701 nt, Artificial Sequence; identical to SEQ ID NO: 194728
  derived and/or modified CDS sequence (opt5) from hemagglutinin__InfluenzaA__ACV70174

SEQ ID NO: 195405 - RNA, 1701 nt, Artificial Sequence; identical to SEQ ID NO: 194728
  derived and/or modified CDS sequence (opt5) from hemagglutinin__InfluenzaA__ACV70184

SEQ ID NO: 195406 - RNA, 1701 nt, Artificial Sequence; identical to SEQ ID NO: 194728
  derived and/or modified CDS sequence (opt5) from hemagglutinin__InfluenzaA__ACV70194

SEQ ID NO: 195407 - RNA, 1701 nt, Artificial Sequence; identical to SEQ ID NO: 194728
  derived and/or modified CDS sequence (opt5) from hemagglutinin__InfluenzaA__ACV70204

SEQ ID NO: 195408 - RNA, 1701 nt, Artificial Sequence; identical to SEQ ID NO: 194728
  derived and/or modified CDS sequence (opt5) from hemagglutinin__InfluenzaA__ACV70214

SEQ ID NO: 195409 - RNA, 1701 nt, Artificial Sequence; identical to SEQ ID NO: 194728
  derived and/or modified CDS sequence (opt5) from hemagglutinin__InfluenzaA__ACV70224

SEQ ID NO: 195410 - RNA, 1701 nt, Artificial Sequence; identical to SEQ ID NO: 194728
  derived and/or modified CDS sequence (opt5) from hemagglutinin__InfluenzaA__ACV70234

SEQ ID NO: 195411 - RNA, 1701 nt, Artificial Sequence; identical to SEQ ID NO: 194728
  derived and/or modified CDS sequence (opt5) from hemagglutinin__InfluenzaA__ACV70254

SEQ ID NO: 195412 - RNA, 1701 nt, Artificial Sequence; identical to SEQ ID NO: 194728
  derived and/or modified CDS sequence (opt5) from hemagglutinin__InfluenzaA__ACV70264

SEQ ID NO: 195413 - RNA, 1701 nt, Artificial Sequence; identical to SEQ ID NO: 194728
  derived and/or modified CDS sequence (opt5) from hemagglutinin__InfluenzaA__ACV70274

SEQ ID NO: 195414 - RNA, 1701 nt, Artificial Sequence; identical to SEQ ID NO: 194728
  derived and/or modified CDS sequence (opt5) from hemagglutinin__InfluenzaA__ACV70284

SEQ ID NO: 195415 - RNA, 1701 nt, Artificial Sequence; identical to SEQ ID NO: 194728
  derived and/or modified CDS sequence (opt5) from hemagglutinin__InfluenzaA__ACV70294

SEQ ID NO: 195416 - RNA, 1701 nt, Artificial Sequence; identical to SEQ ID NO: 194728
  derived and/or modified CDS sequence (opt5) from hemagglutinin__InfluenzaA__ACV70304

SEQ ID NO: 195417 - RNA, 1701 nt, Artificial Sequence; identical to SEQ ID NO: 195403
  derived and/or modified CDS sequence (opt5) from hemagglutinin__InfluenzaA__ACV70314

SEQ ID NO: 195418 - RNA, 1701 nt, Artificial Sequence
  derived and/or modified CDS sequence (opt5) from hemagglutinin__InfluenzaA__ACV70324
augaaggccauccuggugguccuccuguacaccuucgcuacagccaacgcggacacgcuuugcauuggcuaucacgcuaauaacagcaccgauacaguugacaccgugcuggagaagaaugugacagucacccauuccgugaaccuccuggaagauaagcacaaugggaaacuuuguaagcugagaggaguugcuccccuccaucugggcaaaugcaacaucgccggguggauucugggaaauccugagugugaaucucucuuuacagccagcuccuggucuuacaucguggagaccagcuccucugacaacggcacgugcuauccgggggauuucauugacuacgaagaacugcgggagcagcuuagcuccgucagcucuuuugaacgcuucgagaucuuucccaagaccuccagcuggccuaaucacgauucuaacaagggagugacagccgcuuguccccaugccggcgcgaaauccuucuauaagaaucugaucuggcucguuaaaaagggcaacagcuacccuaaacugucuaaguccuauauuaaugacaaggggaaagaagugcuuguccuguggggaauccaccaccccagcaccuccgccgaucaacagucucucuaccagaacgcugacgccuacguguuugugggcagcuccagauauagcaagaaauucaagccugagauugcuauccggccgaaaguccgcgaucaggaggggagaaugaauuacuauuggacacugguugaacccggagacaagauuaccuuugaggccacgggcaaccugguggugccucgguacgcguucgccauggaacgcaacgcugggucuggaaucauuaucuccgauacacccguccaugacugcaauaccacaugucaaaccccuaaaggcgccaucaacaccagccuccccuuucagaauauucacccgaucacaauuggcaagugcccuaaguaugugaaaucuacgaagcugagacuugcuaccgggcugcggaacguucccagcauccagucccgcggacucuucggcgccauugccggguuuaucgagggaggcuggacagggaugguggacggaugguacggcuaucaucaccagaaugaacaaggcucuggguacgcugcggaucugaaaagcacccagaacgccaucgacgagauuacaaauaaggucaacuccgugaucgagaaaaugaauacccaguucacggcuguuggaaaggaguucaaccaccuugagaagagaauugaaaaucugaacaaaaagguggaugacggcuuucucgauaucuggacauacaaugccgagcugcugguccuccuggaaaacgagcggacccuugacuaucaugauagcaaugugaaaaaccuguacgagaagguccgcucucagcucaaaaacaaugccaaggaaauugggaacggauguuucgaguuuuaucacaagugcgacaauaccuguauggaauccgugaaaaacggcacauacgauuauccuaaguacagcgaggaagcuaaacugaauagagaggagaucgacgggguuaaacuugaaucuacccggaucuaucaaauucuggccaucuacuccacaguggcgagcucccucguccuggugguuucucugggcgcuauuagcuucuggaugugcuccaacggaucucuccagugccgcaucuguauuuga

SEQ ID NO: 195419 - RNA, 1701 nt, Artificial Sequence; identical to SEQ ID NO: 194728
  derived and/or modified CDS sequence (opt5) from hemagglutinin__InfluenzaA__ACV70334

SEQ ID NO: 195420 - RNA, 1701 nt, Artificial Sequence; identical to SEQ ID NO: 194728
  derived and/or modified CDS sequence (opt5) from hemagglutinin__InfluenzaA__ACV70344

SEQ ID NO: 195421 - RNA, 1701 nt, Artificial Sequence; identical to SEQ ID NO: 194728
  derived and/or modified CDS sequence (opt5) from hemagglutinin__InfluenzaA__ACV70354

SEQ ID NO: 195422 - RNA, 1701 nt, Artificial Sequence; identical to SEQ ID NO: 194728
  derived and/or modified CDS sequence (opt5) from hemagglutinin__InfluenzaA__ACV70364

SEQ ID NO: 195423 - RNA, 1701 nt, Artificial Sequence; identical to SEQ ID NO: 194728
  derived and/or modified CDS sequence (opt5) from hemagglutinin__InfluenzaA__ACV70374

SEQ ID NO: 195424 - RNA, 1701 nt, Artificial Sequence; identical to SEQ ID NO: 194728
  derived and/or modified CDS sequence (opt5) from hemagglutinin__InfluenzaA__ACV70384

SEQ ID NO: 195425 - RNA, 1701 nt, Artificial Sequence; identical to SEQ ID NO: 194728
  derived and/or modified CDS sequence (opt5) from hemagglutinin__InfluenzaA__ACV70394

SEQ ID NO: 195426 - RNA, 1701 nt, Artificial Sequence; identical to SEQ ID NO: 194728
  derived and/or modified CDS sequence (opt5) from hemagglutinin__InfluenzaA__ACV70404

SEQ ID NO: 195427 - RNA, 1701 nt, Artificial Sequence; identical to SEQ ID NO: 195403
  derived and/or modified CDS sequence (opt5) from hemagglutinin__InfluenzaA__ACV70414

SEQ ID NO: 195428 - RNA, 1701 nt, Artificial Sequence; identical to SEQ ID NO: 194728
  derived and/or modified CDS sequence (opt5) from hemagglutinin__InfluenzaA__ACV70424

SEQ ID NO: 195429 - RNA, 1701 nt, Artificial Sequence; identical to SEQ ID NO: 194728
  derived and/or modified CDS sequence (opt5) from hemagglutinin__InfluenzaA__ACV70434

SEQ ID NO: 195430 - RNA, 1701 nt, Artificial Sequence; identical to SEQ ID NO: 194728
  derived and/or modified CDS sequence (opt5) from hemagglutinin__InfluenzaA__ACV70444

SEQ ID NO: 195431 - RNA, 1701 nt, Artificial Sequence; identical to SEQ ID NO: 194728
  derived and/or modified CDS sequence (opt5) from hemagglutinin__InfluenzaA__ACV70454

SEQ ID NO: 195432 - RNA, 1701 nt, Artificial Sequence; identical to SEQ ID NO: 194728
  derived and/or modified CDS sequence (opt5) from hemagglutinin__InfluenzaA__ACV70464

SEQ ID NO: 195433 - RNA, 1701 nt, Artificial Sequence; identical to SEQ ID NO: 194728
  derived and/or modified CDS sequence (opt5) from hemagglutinin__InfluenzaA__ACV70474

SEQ ID NO: 195434 - RNA, 1701 nt, Artificial Sequence; identical to SEQ ID NO: 194728
  derived and/or modified CDS sequence (opt5) from hemagglutinin__InfluenzaA__ACV70484

SEQ ID NO: 195435 - RNA, 1701 nt, Artificial Sequence; identical to SEQ ID NO: 194728
  derived and/or modified CDS sequence (opt5) from hemagglutinin__InfluenzaA__ACV70494

SEQ ID NO: 195436 - RNA, 1701 nt, Artificial Sequence; identical to SEQ ID NO: 194728
  derived and/or modified CDS sequence (opt5) from hemagglutinin__InfluenzaA__ACV70504

SEQ ID NO: 195437 - RNA, 1701 nt, Artificial Sequence; identical to SEQ ID NO: 194728
  derived and/or modified CDS sequence (opt5) from hemagglutinin__InfluenzaA__ACV70514

SEQ ID NO: 195438 - RNA, 1701 nt, Artificial Sequence; identical to SEQ ID NO: 194728
  derived and/or modified CDS sequence (opt5) from hemagglutinin__InfluenzaA__ACV70524

SEQ ID NO: 195439 - RNA, 1701 nt, Artificial Sequence; identical to SEQ ID NO: 194921
  derived and/or modified CDS sequence (opt5) from hemagglutinin__InfluenzaA__ACV70534

SEQ ID NO: 195440 - RNA, 1701 nt, Artificial Sequence; identical to SEQ ID NO: 194728
  derived and/or modified CDS sequence (opt5) from hemagglutinin__InfluenzaA__ACV70544

SEQ ID NO: 195441 - RNA, 1701 nt, Artificial Sequence; identical to SEQ ID NO: 194728
  derived and/or modified CDS sequence (opt5) from hemagglutinin__InfluenzaA__ACV70564

SEQ ID NO: 195442 - RNA, 1701 nt, Artificial Sequence; identical to SEQ ID NO: 194728
  derived and/or modified CDS sequence (opt5) from hemagglutinin__InfluenzaA__ACV70584

SEQ ID NO: 195443 - RNA, 1701 nt, Artificial Sequence; identical to SEQ ID NO: 195403
  derived and/or modified CDS sequence (opt5) from hemagglutinin__InfluenzaA__ACV70594

SEQ ID NO: 195444 - RNA, 1701 nt, Artificial Sequence; identical to SEQ ID NO: 194728
  derived and/or modified CDS sequence (opt5) from hemagglutinin__InfluenzaA__ACV70604

SEQ ID NO: 195445 - RNA, 1701 nt, Artificial Sequence; identical to SEQ ID NO: 194728
  derived and/or modified CDS sequence (opt5) from hemagglutinin__InfluenzaA__ACV70614

SEQ ID NO: 195446 - RNA, 1701 nt, Artificial Sequence; identical to SEQ ID NO: 194728
  derived and/or modified CDS sequence (opt5) from hemagglutinin__InfluenzaA__ACV70624

SEQ ID NO: 195447 - RNA, 1701 nt, Artificial Sequence; identical to SEQ ID NO: 194728
  derived and/or modified CDS sequence (opt5) from hemagglutinin__InfluenzaA__ACV70634

SEQ ID NO: 195448 - RNA, 1701 nt, Artificial Sequence; identical to SEQ ID NO: 194728
  derived and/or modified CDS sequence (opt5) from hemagglutinin__InfluenzaA__ACV70644

SEQ ID NO: 195449 - RNA, 1701 nt, Artificial Sequence; identical to SEQ ID NO: 194728
  derived and/or modified CDS sequence (opt5) from hemagglutinin__InfluenzaA__ACV70654

SEQ ID NO: 195450 - RNA, 1701 nt, Artificial Sequence; identical to SEQ ID NO: 194728
  derived and/or modified CDS sequence (opt5) from hemagglutinin__InfluenzaA__ACV70664

SEQ ID NO: 195451 - RNA, 1701 nt, Artificial Sequence; identical to SEQ ID NO: 194728
  derived and/or modified CDS sequence (opt5) from hemagglutinin__InfluenzaA__ACV70674

SEQ ID NO: 195452 - RNA, 1701 nt, Artificial Sequence; identical to SEQ ID NO: 194728
  derived and/or modified CDS sequence (opt5) from hemagglutinin__InfluenzaA__ACV70684

SEQ ID NO: 195453 - RNA, 1701 nt, Artificial Sequence; identical to SEQ ID NO: 194728
  derived and/or modified CDS sequence (opt5) from hemagglutinin__InfluenzaA__ACV70694

SEQ ID NO: 195454 - RNA, 1701 nt, Artificial Sequence; identical to SEQ ID NO: 194728
  derived and/or modified CDS sequence (opt5) from hemagglutinin__InfluenzaA__ACV70704

SEQ ID NO: 195455 - RNA, 1701 nt, Artificial Sequence; identical to SEQ ID NO: 194728
  derived and/or modified CDS sequence (opt5) from hemagglutinin__InfluenzaA__ACV70714

SEQ ID NO: 195456 - RNA, 1701 nt, Artificial Sequence; identical to SEQ ID NO: 194728
  derived and/or modified CDS sequence (opt5) from hemagglutinin__InfluenzaA__ACV70724

SEQ ID NO: 195457 - RNA, 1701 nt, Artificial Sequence; identical to SEQ ID NO: 195365
  derived and/or modified CDS sequence (opt5) from hemagglutinin__InfluenzaA__ACV70734

SEQ ID NO: 195458 - RNA, 1701 nt, Artificial Sequence; identical to SEQ ID NO: 194728
  derived and/or modified CDS sequence (opt5) from hemagglutinin__InfluenzaA__ACV70744

SEQ ID NO: 195459 - RNA, 1701 nt, Artificial Sequence; identical to SEQ ID NO: 194728
  derived and/or modified CDS sequence (opt5) from hemagglutinin__InfluenzaA__ACV70754

SEQ ID NO: 195460 - RNA, 1701 nt, Artificial Sequence; identical to SEQ ID NO: 194728
  derived and/or modified CDS sequence (opt5) from hemagglutinin__InfluenzaA__ACV70764

SEQ ID NO: 195461 - RNA, 1701 nt, Artificial Sequence; identical to SEQ ID NO: 194728
  derived and/or modified CDS sequence (opt5) from hemagglutinin__InfluenzaA__ACV70784

SEQ ID NO: 195462 - RNA, 1701 nt, Artificial Sequence
  derived and/or modified CDS sequence (opt5) from hemagglutinin__InfluenzaA__ACV70794
augaaggccauccuggugguccuccuguacaccuucgcuacagccaacgcggacacgcuuugcauuggcuaucacgcuaauaacagcaccgauacaguugacaccgugcuggagaagaaugugacagucacccauuccgugaaccuccuggaagauaagcacaaugggaaacuuuguaagcugagaggaguugcuccccuccaucugggcaaaugcaacaucgccggguggauucugggaaauccugagugugaaucucucagcacagccuccucuuggagcuacaucguggagaccuccucuagcgacaacggcacgugcuauccgggggauuuuauugacuacgaagaacugcgggagcagcuuuccagcgucucuuccuucgaacgcuuugagaucuuccccaagaccagcucuuggccuaaucacgauuccaacaagggagccacagcugccuguccccaugcgggcgccaaaggcuuuuauaagaaucugaucuggcucgugaaaaaggggaacagcuacccuaaacugucuaaguccuauauuaaugacaagggaaaagaaguucuugugcuguggggcauccaccaccccagcaccuccgcugaucaacagucucucuaccagaacgccgacgcuuacgucuucguggggagcuccagauauagcaagaaauuuaagccugagauugccauccggccgaaagugcgcgaucaggagggaagaaugaauuacuauuggacacuggucgaacccggcgacaagauuaccuucgaggcgacggggaaccugguugugccucgguacgccuuugcuauggaacgcaacgccggaucuggcaucauuaucuccgauacacccgugcaugacugcaauaccacaugucaaaccccuaaaggcgcuaucaacaccagccuccccuuccagaauauucacccgaucacaauugggaagugcccuaaguaugucaaaucuacgaagcugagacuugccaccggacugcggaacgugcccagcauccagucccgcggccucuuuggggccauugcuggauucaucgagggcggguggacaggaaugguugacggcugguacggcuaucaucaccagaaugaacaagggucuggauacgcggccgaucugaaaagcacccagaacgcuaucgacgagauuacaaauaaggugaacuccgucaucgagaaaaugaauacccaguuuacggccgugggcaaggaguucaaccaccuugagaagagaauugaaaaucugaacaaaaagguugaugacggguuccucgauaucuggacauacaaugccgagcugcuggugcuccuggaaaacgagcggacccuugacuaucaugauagcaaugucaaaaaccuguacgagaaggugcgcucucagcucaaaaacaaugcuaaggaaauuggaaacggcuguuuugaguucuaucacaagugcgacaauaccuguauggaauccgucaaaaacgggacauacgauuauccuaaguacagcgaggaagccaaacugaauagagaggagaucgacggcgugaaacuugaaucuacccggaucuaucaaauucuggcgaucuacuccacaguugcuagcucccucgugcuggucgugucucugggagccauuagcuuuuggaugugcuccaacggcucucuccagugccgcaucuguauuuga

SEQ ID NO: 195463 - RNA, 1701 nt, Artificial Sequence; identical to SEQ ID NO: 194728
  derived and/or modified CDS sequence (opt5) from hemagglutinin__InfluenzaA__ACV70804

SEQ ID NO: 195464 - RNA, 1701 nt, Artificial Sequence; identical to SEQ ID NO: 195403
  derived and/or modified CDS sequence (opt5) from hemagglutinin__InfluenzaA__ACV70824

SEQ ID NO: 195465 - RNA, 1701 nt, Artificial Sequence; identical to SEQ ID NO: 194728
  derived and/or modified CDS sequence (opt5) from hemagglutinin__InfluenzaA__ACV70834

SEQ ID NO: 195466 - RNA, 1701 nt, Artificial Sequence
  derived and/or modified CDS sequence (opt5) from hemagglutinin__InfluenzaA__ACV70844
augaaggccauccuggugguccuccuguacaccuucgcuacagccaacgcggacacgcuuugcauuggcuaucacgcuaauaacagcaccgauacaguugacaccgugcuggagaaaaaugugacagucacccauuccgugaaccuccuggaagauaagcacaaugggaaacuuuguaagcugagaggaguugcuccccuccaucugggcaaaugcaacaucgccggguggauucugggaaauccugagugugaaucucucagcacagccuccucuuggagcuacaucguggagaccuccucuagcgacaacggcacgugcuauccgggggauuuuauugacuacgaagaacugcgggagcagcuuuccagcgucucuuccuucgaacgcuuugagaucuuccccaagaccagcucuuggccuaaucacgauuccaacaagggagugacagccgcuuguccccaugccggcgcgaaaggcuuuuauaagaaucugaucuggcucguuaaaaaggggaacagcuacccuaaacugucuaaguccuauauuaaugacaagggaaaagaagugcuuguccuguggggcauccaccaccccagcaccuccgccgaucaacagucucucuaccagaacgcugacgccuacguguucguggggagcuccagauauagcaagaaauuuaagccugagauugcuauccggccgaaaguccgcgaucaggagggaagaaugaauuacuauuggacacugguugaacccggcgacaagauuaccuucgaggccacggggaaccugcucgugccucgguacgcguuugccauggaacgcaacgcuggaucuggcaucauuaucuccgauacacccgugcaugacugcaauaccacaugucaaaccccuaaaggcgccaucaacaccagccugcccuuccagaauauucacccgaucacaauugggaagugcccuaaguaugucaaaucuacgaaacuuagacuggcuaccggacuccggaacgugcccagcauccagucccgcggccuguuuggggccauugccggauucaucgagggcggguggacaggaaugguugacggcugguacggcuaucaucaccagaaugaacaagggucuggauacgcugcggaucuuaagagcacccagaacgccaucgacgagauuacaaauaaggugaacuccgucaucgagaaaaugaauacccaguuuacggcugugggcaaggaguucaaccaccuggagaagagaauugaaaaucucaacaaaaagguugaugacggguuccuggauaucuggacauacaaugccgagcugcucgugcugcuugaaaacgagcggacccuggacuaucaugauagcaaugucaaaaaccucuacgagaaggugcgcucucagcugaaaaacaaugccaaggaaauuggaaacggcuguuuugaguucuaucacaagugcgacaauaccuguauggaauccgucaaaaacgggacauacgauuauccuaaguacagcgaggaagcuaaacuuaauagagaggagaucgacggcgugaagcuggaaucuacccggaucuaucaaauucucgccaucuacuccacaguugcgagcucccuggugcuggucgugucucucggagcuauuagcuuuuggaugugcuccaacggcucucugcagugccgcaucuguauuuga

SEQ ID NO: 195467 - RNA, 1701 nt, Artificial Sequence; identical to SEQ ID NO: 194728
  derived and/or modified CDS sequence (opt5) from hemagglutinin__InfluenzaA__ACV70854

SEQ ID NO: 195468 - RNA, 1701 nt, Artificial Sequence
  derived and/or modified CDS sequence (opt5) from hemagglutinin__InfluenzaA__ACV70864
augaaggccauccuggugguccuccuguacaccuucgcuacagccaacgcggacacgcuuugcauuggcuaucacgcuaauaacagcaccgauacaguugacaccgugcuggagaagaaugugacagucacccauuccgugaaccuccuggaagauaagcacaaugggaaacuuuguaagcugagaggaguugcuccccuccaucugggcaaaugcaacaucgccggguggauucugggaaauccugagugugaaucucucagcacagccuccucuuggagcuacaucguggagaccuccucuagcgacaacggcacgugcuauccgggggauuuuauugacuacgaagaacugcgggagcagcuuuccagcgucucuuccuucgaacgcuuugagaucuuccccaagaccagcucuuggccuaaucacgauuccaacaagggagugacagccgcuuguccccaugccggcgcgaaaucuuuuuauaagaaucugaucuggcucguuaaaaagggcaccagcuacccuaaacuguccaagagcuauauuaacgacaaggggaaagaagugcuuguccuguggggaauccaccaccccuccacaucugccgaucaacagagccucuaccagaaugcugacgccuacguguucgugggcuccagcagauauucuaagaaauuuaagccugagauugcuauccggccgaaaguccgcgaucaggaggggagaaugaacuacuauuggacccugguugaacccggagacaagauuacguucgaggccacaggcaaucugguggugccucgguacgcguuugccauggaacgcaacgcuggguccggaaucauuaucagcgauacccccguccaugacugcaacacaaccugucaaaccccuaaaggcgccaucaauacaucucuccccuuccagaacauucacccgaucacgauuggcaagugcccuaaguaugugaaaagcaccaagcugagacuugcuacagggcugcggaauguucccuccauccagucucgcggacucuuuggcgccauugccggguucaucgagggaggcuggaccgggaugguggacggaugguacggcuaucaucaccagaacgaacaaggcagcggguacgcugcggaucugaaauccacacagaaugccaucgacgagauuaccaacaaggucaauagcgugaucgagaaaaugaacacgcaguuuacagcuguuggaaaggaguucaaucaccuugagaagagaauugaaaaccugaauaaaaagguggaugacggcuuccucgauaucuggaccuacaacgccgagcugcugguccuccuggaaaaugagcggacccuugacuaucaugauucuaacgugaaaaaucuguacgagaagguccgcucccagcucaaaaacaacgccaaggaaauugggaauggauguuuugaguucuaucacaagugcgacaacacauguauggaaagcgugaaaaauggcaccuacgauuauccuaaguacucugaggaagcuaaacugaacagagaggagaucgacgggguuaaacuugaauccacacggaucuaucaaauucuggccaucuacagcacgguggcguccucucucguccuggugguuagccugggcgcuauuuccuuuuggaugugcucuaauggaagccuccagugccgcaucuguauuuga

SEQ ID NO: 195469 - RNA, 1701 nt, Artificial Sequence; identical to SEQ ID NO: 194728
  derived and/or modified CDS sequence (opt5) from hemagglutinin__InfluenzaA__ACV70874

SEQ ID NO: 195470 - RNA, 1701 nt, Artificial Sequence; identical to SEQ ID NO: 194921
  derived and/or modified CDS sequence (opt5) from hemagglutinin__InfluenzaA__ACV70884

SEQ ID NO: 195471 - RNA, 1701 nt, Artificial Sequence
  derived and/or modified CDS sequence (opt5) from hemagglutinin__InfluenzaA__ACV70904
augaaggccauccuggugguccuccuguacaccuucgcuacagccaacgcggacacgcuuugcauuggcuaucacgcuaauaacagcaccgauacaguugacaccgugcuggagaagaaugugacagucacccauuccgugaaccuccuggaagauaagcacaaugggaaacuuuguaagcugagaggaguugcuccccuccaucugggcaaaugcaacaucgccggguggauucugggaaauccugagugugaaucucucagcacagccuccucuuggagcuacaucguggagaccuccucuagcgacaacggcacgugcuauccgggggauuuuauugacuacgaagaacugcgggagcagcuuuccagcgucucuuccuucgaacgcuuugagaucuuccccaagaccagcucuuggccuaaucacgauuccaacaagggagugacagccgcuuguccccaugccggcgcgaaaucuuuuuauaagaaucugaucuggcucguuaaaaagggcaacagcuacccuaaacuguccaagagcuauauuaaugacaaggggaaagaagugcuuguccuguggggaauccaccaccccuccaccucugccgaucaacagagccucuaccagaacgcugacgccuacguguucgugggcuccagcagauauucuaagaaauuuaagccugagauugcuauccggccgaaaguccgcgaucaggaggggagaaugaauuacuauuggacacugguugaacccggagacaagauuaccuucgaggccacgggcaaccugguggugccucgguacgcguuugccauggaacgcaacgcuggguccggaaucauuaucagcgauacacccguccaugacugcaauaccacaugucaaaccccuaaaggcgccaucaacaccucucuccccuuccagaauauucacccgaucacaauuggcaagugcccuaaguaugugaaaagcacgaagcugagacuugcuaccgggcugcggaacauccccuccauucagucucgcggacucuuuggcgccaucgccggguucaucgagggaggcuggacagggaugguugacggaugguacggcuaucaucaccagaaugaacaaggcagcggguacgcugcggaucugaaauccacccagaacgccauugacgagaucacaaauaaggugaacagcgucauugagaaaaugaauacccaguuuacggcugugggaaaggaguucaaccaccuugagaagagaaucgaaaaucugaacaaaaagguugaugacggcuuccucgauauuuggacauacaaugccgagcugcuggugcuccuggaaaacgagcggacccuugacuaucaugauucuaaugucaaaaaccuguacgagaaggugcgcucccagcucaaaaacaaugccaaggaaaucgggaacggauguuuugaguucuaucacaagugcgacaauaccuguauggaaagcgucaaaaacggcacauacgauuauccuaaguacucugaggaagcuaaacugaauagagaggagaucgacggggugaaacuugaauccacccggauuuaucaaauccuggccauuuacagcacaguugcguccucucucgugcuggucgugagccugggcgcuaucuccuuuuggaugugcucuaacggaagccuccagugccgcauuuguaucuga

SEQ ID NO: 195472 - RNA, 1701 nt, Artificial Sequence; identical to SEQ ID NO: 194728
  derived and/or modified CDS sequence (opt5) from hemagglutinin__InfluenzaA__ACV70914

SEQ ID NO: 195473 - RNA, 1701 nt, Artificial Sequence; identical to SEQ ID NO: 194728
  derived and/or modified CDS sequence (opt5) from hemagglutinin__InfluenzaA__ACV70924

SEQ ID NO: 195474 - RNA, 1701 nt, Artificial Sequence; identical to SEQ ID NO: 194728
  derived and/or modified CDS sequence (opt5) from hemagglutinin__InfluenzaA__ACV70934

SEQ ID NO: 195475 - RNA, 1701 nt, Artificial Sequence; identical to SEQ ID NO: 194728
  derived and/or modified CDS sequence (opt5) from hemagglutinin__InfluenzaA__ACV70944

SEQ ID NO: 195476 - RNA, 1701 nt, Artificial Sequence
  derived and/or modified CDS sequence (opt5) from hemagglutinin__InfluenzaA__ACV70954
augaaggccauccuggugguccuccuguacaccuucgcuacagccaacgcggacacgcuuugcauuggcuaucacgcuaauaacagcaccgauacaguugacaccgugcuggagaaaaaugugacagucacccauuccgugaaccuccuggaagauaagcacaaugggaaacuuuguaagcugagaggaguugcuccccuccaucugggcaaaugcaacaucgccggguggauucugggaaauccugagugugaaucucucagcacagccuccucuuggagcuacaucguggagaccuccucuagcgacaacggcacgugcuauccgggggauuuuauugacuacgaagaacugcgggagcagcuuuccagcgucucuuccuucgaacgcuuugagaucuuccccaagaccagcucuuggccuaaucacgauuccaacaagggagugacagccgcuuguccccaugccggcgcgaaaucuuuuuauaagaaucugaucuggcucguuaaaaagggcaacagcuacccuaaacuguccaagagcuauauuaaugacaaggggaaagaagugcuuguccuguggggaauccaccaccccuccaccucugccgaucaacagagccucuaccagaacgcugacgccuacguguucgugggcuccagcagauauucuaagaaauuuaagccugagauugcuauccggccgaaaguccgcgaucaggaggggagaaugaauuacuauuggacacugguugaacccggagacaagauuaccuucgaggccacgggcaaccugcucgugccucgguacgcguuugccauggaacgcaacgcuggguccggaaucauuaucagcgauacacccgugcaugacugcaauaccacaugucaaaccccuaaaggcgccaucaacaccucucugcccuuccagaauauucacccgaucacaauuggcaagugcccuaaguaugucaaaagcacgaaacuuagacuggcuaccgggcuccggaacgugcccuccauccagucucgcggacuguuuggcgccauugccggguucaucgagggaggcuggacagggaugguugacggaugguacggcuaucaucaccagaaugaacaaggcagcggguacgcugcggaucuuaaguccacccagaacgccaucgacgagauuacaaauaaggugaacagcgucaucgagaaaaugaauacccaguuuacggcugugggaaaggaguucaaccaccuggagaagagaauugaaaaucucaacaaaaagguugaugacggcuuccuggauaucuggacauacaaugccgagcugcucgugcugcuugaaaacgagcggacccuggacuaucaugauucuaaugucaaaaaccucuacgagaaggugcgcucccagcugaaaaacaaugccaaggaaauugggaacggauguuuugaguucuaucacaagugcgacaauaccuguauggaaagcgucaaaaacggcacauacgauuauccuaaguacucugaggaagcuaaacuuaauagagaggagaucgacggggugaagcuggaauccacccggaucuaucaaauucucgccaucuacagcacaguugcguccucucuggugcuggucgugagccucggcgcuauuuccuuuuggaugugcucuaacggaagccugcagugccgcaucuguauuuga

SEQ ID NO: 195477 - RNA, 1701 nt, Artificial Sequence; identical to SEQ ID NO: 194728
  derived and/or modified CDS sequence (opt5) from hemagglutinin__InfluenzaA__ACV70964

SEQ ID NO: 195478 - RNA, 1701 nt, Artificial Sequence; identical to SEQ ID NO: 194728
  derived and/or modified CDS sequence (opt5) from hemagglutinin__InfluenzaA__ACV70974

SEQ ID NO: 195479 - RNA, 1701 nt, Artificial Sequence; identical to SEQ ID NO: 195471
  derived and/or modified CDS sequence (opt5) from hemagglutinin__InfluenzaA__ACV70984

SEQ ID NO: 195480 - RNA, 1701 nt, Artificial Sequence; identical to SEQ ID NO: 195476
  derived and/or modified CDS sequence (opt5) from hemagglutinin__InfluenzaA__ACV70994

SEQ ID NO: 195481 - RNA, 1701 nt, Artificial Sequence; identical to SEQ ID NO: 194728
  derived and/or modified CDS sequence (opt5) from hemagglutinin__InfluenzaA__ACV71004

SEQ ID NO: 195482 - RNA, 1701 nt, Artificial Sequence
  derived and/or modified CDS sequence (opt5) from hemagglutinin__InfluenzaA__ACV82230
augaagaccaucauugcccugagcuacauccucugccugguguucgcucagaaacuucccggcaacgacaauuccacagccacgcugugucucgggcaccaugcggucccuaacggaaccauuguuaagacaaucaccaaugaucaaauugaggugacaaacgcuaccgaacuggugcagucuagcuccacaggcgagaucugcgacucuccgcaccagauccuugaugggaaaaauuguacccugauugacgcccuccugggagauccccagugcgacggcuuucaaaacaagaaaugggaucuguucgucgaaagaagccaggccuauuccaauuguuacccuuaugacgugcccgauuacgcuucucuccggagccugguugccuccagcgggacgcuugaguuuaacaaugaaucuuucaacuggaccggagugacacagaauggcaccuccagcgcuugcauccgcagaucuaagaacuccuuuuucagccggcugaauuggcucacacaucugaacuuuaaguaucaggcccuuaaugucaccaugccuaacaacgagcaauucgacaaacuguacauuuggggcgugcaccaucccgggacggauaaggaccagaucuuucucuaugcgcaggccucuggacgcauuacaguuuccaccaaaagaagccagcaaacagugaucccuaauauuggcucccggccgcgcgucagaaacauccccucucggaucagcauuuacuggaccaucgugaagccuggggauauucugcugaucaauuccaccggaaaccucauugcuccccgcggcuacuucaaaauccagagcgggaagucuuccaucaugagaagcgacgccccuauuggaaaguguaauucugagugcaucacacccaacggcagcauuccgaaugacaaaccuuuucagaacgugaaucggaucacguauggcgcuuguccccgcuacgucaagcaaaacacccugaaacuugccacagggaugagaaauguuccugaaaagcagacccggggaauuuucggcgcgaucgccggguuuaucgagaacggaugggaaggcaugguggaugggugguauggauuccgccaccaaaauuccgagggcagaggccaggcugccgaccugaaaucuacacaggcugccauugaucagaucaacgggaagcucaaucggcugauuggaaaaaccaacgagaaguuccaccagaucgaaaaggaguuuagcgaaguggagggccgcauucaggaccuugaaaaauacgucgaggauacgaagaucgaccugugguccuauaacgccgagcuccugguggcucuggaaaaucaacauacaauugaucucaccgacagcgagaugaacaaacuguucgaaaagaccaaaaagcagcuuagagagaaugcggaagauauggggaacggaugcuuuaagaucuaccacaaaugugacaaugccugcaucggcucuauucggaacgggacauaugaucaugacguuuacagagacgaggcucugaauaaccgcuuccagaucaagggcguggagcucaaauccggauacaaggauuggauucuguggaucagcuuugccauuucuugcuuccuucugugugucgcccuccugggcuuuaucaugugggcuugccagaaagggaauauccgguguaacauuugcaucuga

SEQ ID NO: 195483 - RNA, 1701 nt, Artificial Sequence
  derived and/or modified CDS sequence (opt5) from hemagglutinin__InfluenzaA__ACV82232
augaagaccaucauugcccugagcuacauccucugccugguguucgcucagaaacuucccggcaacgacaauuccacagccacgcugugucucgggcaccaugcggucccuaacggaaccauuguuaagacaaucaccaaugaucaaauugaggugacaaacgcuaccgaacuggugcagucuagcuccacaggcgagaucugcgacucuccgcaccagauccuugauggggaaaauuguacccugauugacgcccuccugggagauccccagugcgacggcuuucaaaacaaaaagugggaucuguucgucgagagaagcaaagccuauuccaauuguuacccuuaugacgugcccgauuacgcuucucuccggagccugguugccuccagcgggacgcuugaauuuaacaaugagucuuucaacuggaccggagugacacagaauggcaccuccagcgcuugcauccgcagaucuaacaauuccuuuuucagccggcugaacuggcucacacaucugaauuuuaaguauccugcccuuaacgucaccaugcccaacaaugagcaguucgacaagcuguacauuuggggcgugcaccauccugggacggauaaagaccagaucuuucucuaugcgcaagccucuggacgcauuacaguuuccaccaagagaagccagcaggcugugaucccgaacauuggcucccggccccgcgucagaaauaucccuucucggaucagcauuuacuggacaaucgugaaacccggggauauucugcugaucaacuccaccggaaaucucauugccccucgcggcuacuucaagaucagaagcgggaaaucuuccaucaugcggagcgacgcucccauuggaaaguguaacucugaaugcaucaccccgaauggcagcauuccuaacgacaagcccuuucagaaugugaaccgcaucacauauggcgccuguccuagauacgucaaacaaaauacgcugaaacuugcgaccgggaugcggaacguucccgagaagcagacacgcggaauuuucggcgccaucgcuggguuuaucgaaaauggaugggagggcaugguggaugggugguauggauucagacaccagaacuccgagggccggggccaagccgcugaccugaagucuacccaggccgccauugaucagaucaaugggaaacucaacagacugauuggaaagacaaacgaaaaauuccaccagaucgagaaggaauuuagcgagguggaaggccgcauucaagaccuugagaaguacgucgaggauaccaaaaucgaccugugguccuauaaugcugaacuccugguggcgcuggagaaccagcauacgauugaucucacagacagcgaaaugaauaagcuguucgagaaaaccaagaaacagcuucgggaaaacgccgaggauauggggaauggaugcuuuaagaucuaccacaagugugacaacgcuugcaucggcucuauuagaaaugggaccuaugaucaugacguuuaccgcgacgaggcccugaacaaucgguuccagaucaaaggcguggaacucaaguccggauacaaagauuggauucuguggaucagcuuugccauuucuugcuuccuucugugugucgcucuccugggcuuuaucaugugggccugccaaaaggggaacaucagauguaauauuugcaucuga

SEQ ID NO: 195484 - RNA, 1698 nt, Artificial Sequence
  derived and/or modified CDS sequence (opt5) from hemagglutinin__InfluenzaA__ACV82233
augaaggugaaacugcucguccugcuuugcaccuucacagccacguacgcugacaccaucuguauuggcuaucacgccaacaauagcacagauaccguugacacagugcuggagaagaacgugaccgucacacauuccgugaaucuccuggaaaacaaucacaacgggaaacuuugccugcucaagggaaucgcgccccugcagcugggcaauuguucuguugcuggguggauucucggaaacccugagugcgaacugcuuaucagcaaagaguccuggucuuacauuguggaaaagccgaaucccgagaacggcaccuguuauccugggcauuuugccgauuacgaggaacugagagagcaacucagcuccgucucuagcuucgaacgguuugagaucuuccccaaggaguccagcuggccuaaucacacggugaccggaguuucugccuccugcagccauaacggcgaaaauucuuuuuaucgcaaccugcuuuggcugacaggcaaaaaugggcucuaccccaaccuguccaagagcuaugcuaacaauaaagagaaggaagugcugguccucuggggagugcaccacccuccgaacaucgccgaccagaaaacccuguaccauacagagaaugcuuacgugucugucguuuccagccacuauuccagaaaguucacccccgaaauugccaagcggccuaaaauccgcgaucaggagggcagaauuaacuacuauuggacgcuucuggagcccggggacacaaucauuuuugaagcgaauggaaaccucaucgccccucgguacgcuuucgcccugucucgcggcuuugggagcggaauuaucaauuccaacgcucccauggauaagugugacgccaaaugccagaccccgcaaggcgcgaucaauagcucucuuccuuuccagaacgugcaucccgugacaauuggcgaguguccuaaguaugucagauccgccaaacugcggauggugaccgggcuccgcaauauccccagcauucagucuagaggacuguuuggcgcuaucgccggguucauugaaggaggcuggaccgggaugguugauggaugguacggcuaucaccaccagaacgagcaaggcagcggguacgcugccgaccagaaguccacacagaaugccaucaacggaaucacgaauaaagugaacucugucauugaaaagaugaacacccaguuuacagcugugggcaaggaguucaauaaacuggagcggcgcauggaaaaccucaauaagaaaguugaugacggguucaucgauauuuggaccuacaacgcggagcugcuugugcugcucgaaaaugagagaacacuggacuuucaugacagcaacgucaagaaucuuuaugaaaaagugaagucccaacugaagaacaaugccaaagagaucggaaacggcugcuucgaguuuuaccacaaguguaaugaugaaugcauggagagcgucaaaaacgggaccuaugacuaccccaaguauucugaagaguccaaacucaaucgggagaagauugauggcgugaagcuggaaagcaugggaguuuaccagauccuggcuaucuauucuacgguggccuccagccucguccugcuugugucccugggcgccauuucuuucuggaugugcagcaacgggucccuccagugucgcaucugcauuuga

SEQ ID NO: 195485 - RNA, 1701 nt, Artificial Sequence
  derived and/or modified CDS sequence (opt5) from hemagglutinin__InfluenzaA__ACV83662
augaaggccauccuggugguccuccuguacaccuucgcuacagccaacgcggacacgcuuugcauuggcuaucacgcuaauaacagcaccgauacaguugacaccgugcuggagaagaaugugacagucacccauuccgugaaccuccuggaagauaagcacaaugggaaacuuuguaagcugagaggaguugcuccccuccaucugggcaaaugcaacaucgccggguggauucugggaaauccugagugugaaucucucagcacagccuccucuuggagcuacaucguggagaccuccucuagcgacaacggcacgugcuauccgggggauuuuauugacuacgaagaacugcgggagcagcuuuccagcgucucuuccuucgaacgcuuugagaucuuccccaagaccagcucuuggccuaaucacgauuccaacaagggagugacagccgcuuguccccaugccggcgcgaaaucuuuuuauaagaaucugaucuggcucguuaaaaagggcaacagcuacccuaaacuguccaagagcuauauuaaugacaaggggaaagaagugcuuguccuguggggaauccaccaccccuccaccucugccgaucaacagagccucuaccagaacgcugacgccuacguguucgugggcacauccagauauagcaagaaauuuaagccugagauugcuauccggccgaaaguccgcgauagagaggggcggaugaauuacuauuggacccugguugaacccggagacaagauuacguucgaggccacaggcaaccugguggugccucgcuacgcguuugccauggucagaaacgcugggucuggaaucauuaucuccgauacccccgugcaugacugcaauacaaccugucagaccccuaaaggcgccaucaacacaagccuccccuuccaaaauauucacccgaucacgauuggcaagugcccuaaguauguuaaaucuaccaagcugcggcuugcuacagggcugcgcaacgugcccagcauccaguccagaggacucuuuggcgccauugccggguucaucgaaggaggcuggaccgggauggucgacggaugguacggcuaucaucaccagaaugagcagggcucuggguacgcugcggaucugaaaagcacacaaaacgccaucgacgaaauuaccaauaaggugaacuccguuaucgagaaaaugaauacgcaguuuacagcugugggaaaggaguucaaccaccuugaaaagcggauugagaaucugaacaaaaaggucgaugacggcuuccucgauaucuggaccuacaaugccgaacugcuggugcuccuggagaacgaacgcacccuugacuaucaugauagcaaugucaaaaaccuguacgagaaggugagaucucagcucaaaaacaaugccaaggagauugggaacggauguuuugaguucuaucacaagugcgacaauacauguauggaguccguuaaaaacggcaccuacgauuauccuaaguacagcgaagaggcuaaacugaaucgggaagagaucgacggggugaaacuugagucuacacgcaucuaucagauucuggccaucuacuccacggucgcgagcucccucgugcugguugugucucugggcgcuauuagcuuuuggaugugcuccaacggaucucuccaaugcagaaucuguauuuga

SEQ ID NO: 195486 - RNA, 1701 nt, Artificial Sequence
  derived and/or modified CDS sequence (opt5) from hemagglutinin__InfluenzaA__ACV83663
augaaggccauccuggugguccuccuguacaccuucgcuacagccaacgcggacacgcuuugcauuggcuaucacgcuaauaacagcaccgauacaguugacaccgugcuggagaagaaugugacagucacccauuccgugaaccuccuggaagauaagcacaaugggaaacuuuguaagcugagaggaguugcuccccuccaucugggcaaaugcaacaucgccggguggauucugggaaauccugagugugaaucucucagcacagccuccucuuggagcuacaucguggagaccuccucuagcgacaacggcacgugcuauccgggggauuuuauugacuacgaagaacugcgggagcagcuuuccagcgucucuuccuucgaacgcuuugagaucuuccccaagaccagcucuuggccuaaucacgauuccaacaagggagugacagccgcuuguccccaugccggcgcgaaaucuuuuuauaagaaucugaucuggcucguuaaaaagggcaacagcuacccuaaacuguccaagagcuauauuaaugacaaggggaaagaagugcuuguccuguggggaauccaccaccccuccaccucugccgaucaacagagccucuaccagaacgcugacgccuacguguucgugggcacauccagauauagcaagaaauuuaagccugagauugcuauccggccgaaaguccgcgggcaggagggaagaaugaauuacuauuggacccugguugaacccggcgauaagauuacguucgaggccacagggaaccugguggugccucgguacgcguuugccauggaacgcaacgcuggaucuggcaucauuaucuccgacacccccguccaugauugcaauacaaccugucaaaccccuaaaggcgccaucaacacaagccuccccuuccagaauauucacccgaucacgauugggaagugcccuaaguaugugaaaucuaccaagcugagacuugcuacaggacugcggaacguucccagcauccagucccgcggccucuuuggggccauugccggauucaucgagggcggguggaccggaaugguggacggcugguacggcuaucaucaccagaaugaacaagggucuggauacgcugcggaccugaaaagcacacagaacgccaucgaugagauuaccaauaaggucaacuccgugaucgagaaaaugaauacgcaguuuacagcuguuggcaaggaguucaaccaccuugagaagagaauugaaaaucugaacaaaaagguggacgauggguuccucgacaucuggaccuacaaugccgagcugcugguccuccuggaaaacgagcggacccuugauuaucaugacagcaaugugaaaaaccuguacgagaagguccgcucucagcucaaaaacaaugccaaggaaauuggaaacggcuguuuugaguucuaucacaagugcgauaauacauguauggaauccgugaaaaacgggaccuacgacuauccuaaguacagcgaggaagcuaaacugaauagagaggagaucgauggcguuaaacuugaaucuacacggaucuaucaaauucuggccaucuacuccacgguggcgagcucccucguccuggugguuucucugggagcuauuagcuuuuggaugugcuccaacggcucucuccagugccgcaucuguauuuga

SEQ ID NO: 195487 - RNA, 1701 nt, Artificial Sequence; identical to SEQ ID NO: 195486
  derived and/or modified CDS sequence (opt5) from hemagglutinin__InfluenzaA__ACV83664

SEQ ID NO: 195488 - RNA, 1701 nt, Artificial Sequence
  derived and/or modified CDS sequence (opt5) from hemagglutinin__InfluenzaA__ACV83665
auggaggccauccuggugguccuccuguacaccuucgcuacagccaacgcggacacgcuuugcauuggcuaucacgcuaauaacagcaccgauacaguugacaccgugcuggaaaagaaugugacagucacccauuccgugaaccuccuggaggauaaacacaaugggaagcuguguaaacugagaggaguugcgccccuccaucugggcaagugcaacaucgccggguggauucugggaaauccugaaugugagucucucagcacagcuuccucuuggagcuacaucguggaaaccuccucuagcgacaacggcacgugcuauccgggggauuuuauugacuacgaggagcugcgggaacagcuuuccagcgucucuuccuucgagcgcuuugaaaucuuccccaaaaccagcucuuggccuaaucacgauuccaacaagggagugacagccgcuuguccccaugccggcgccaagagcuuuuauaaaaaucugaucuggcucguuaagaaaggcaacucuuacccuaagcuguccaaaagcuauauuaaugacaaggggaaggaggugcuuguccuguggggaauccaccaccccuccaccauugccgaucaacagucucucuaccagaacgcugacgccuacguguucgugggcagcuccagauauagcaaaaaguuuaaaccugagaucgcuauucggccgaagguccgcgaucaggaagggagaaugaauuacuauuggacacugguugagcccggagacaaaaucaccuucgaagccacgggcaaccugguggugccucgguacgcguuugccauggagcgcaacgcugggucuggaauuaucaucuccgauacacccguccaugacugcaauaccacaugucaaaccccuaagggcgccauuaacaccagccuccccuuccacaauauccauccgauuacaaucggcaaaugcccuaaguaugugaagucuacgaaacugagacuugcuaccgggcugcggaacguucccagcauucagucccgcggacucuuuggcgccaucgccggguucaucgaaggaggcuggacagggaugguggacggaugguacggcuaucaccaccagaaugagcagggcucuggguacgcugcggaucuuaagagcacccaaaacgccauugacgagaucacaaauaaagucaacuccgugauugaaaagaugaauacccaguuuacggcuguuggaaaagaguucaaccaucuugaaaagagaaucgagaaucugaacaagaaaguggaugacggcuuccucgauauuuggacauacaaugccgaacugcugguccuccuggagaacgagcggacccuugacuaucacgauagcaaugugaagaaccuguacgaaaaaguccgcucucagcucaagaacaaugccaaagagaucgggaacggauguuuugaguucuaucauaagugcgacaauaccuguauggaauccgugaagaacggcacauacgauuauccuaaauacagcgaagaggcuaagcugaauagagaggaaaucgacgggguuaaacuugagucuacccggauuuaucagauccuggccauuuacuccacaguggcgagcucccucguccuggugguuucucugggcgcuaucagcuuuuggaugugcuccaacggaucucuccaaugccgcauuuguaucuga

SEQ ID NO: 195489 - RNA, 1701 nt, Artificial Sequence
  derived and/or modified CDS sequence (opt5) from hemagglutinin__InfluenzaA__ACV83667
augaaggccauccuggugguccuccuguacaccuucgcuacagccaacgcggacacgcuuugcauuggcuaucacgcuaauaacagcaccgauacaguugacaccgugcuggagaagaaugugacagucacccauuccgugaaccuccuggaagauaagcacaaugggaaacuuuguaagcugagaggaguugcuccccuccaucugggcaaaugcaacaucgccggguggauucugggaaauccugagugugaaucucucagcacagccuccucuuggagcuacaucguggagaccuccucuagcgacaacggcacgugcuauccgggggauuuuauugacuacgaagaacugcgggagcagcuuuccagcgucucuuccuucgaacgcuuugagaucuuccccaagaccagcucuuggccuaaucacgauuccaacaagggagugacagccgcuuguccccaugccggcgcgaaaucuuuuuauaagaaucugaucuggcucguuaaaaagggcaacagcuacccuaaacuguccaagagcuauauuaaugacaaggggaaagaagugcuuguccuguggggaauccaccaccccuccaccucugccgaucaacagagccucuaccagaacgcugacgccuacguguucgugggcacauccagauauagcaagaaauuuaagccugagauugcuauccggccgaaaguccgcaaucaggaggggagaaugaacuacuauuggacccugguugaacccggagauaagauuacguucgaggccacaggcaaccugguggugccucgguacgcguuugccauggaacgcaaugcugggucuggaaucauuaucuccgacacccccguccaugauugcaacacaaccugucaaaccccuaaaggcgccaucaauacaagccuccccuuccagaacauucacccgaucacgauuggcaagugcccuaaguaugugaaaucuaccaagcugagacuugcuacagggcugcggaauguucccagcauccagucccgcggacucuuuggcgccauugccggguucaucgagggaggcuggaccgggaugguggacggaugguacggcuaucaucaccagaacgaacaaggcucuggguacgcugcggaccugaaaagcacacagaaugccaucgaugagauuaccaacaaggucaauuccgugaucgagaaaaugaacacgcaguuuacagcuguuggaaaggaguucaaucaccuugagaagagaauugaaaaccugaauaaaaagguggacgauggcuuccucgacaucuggaccuacaacgccgagcugcugguccuccuggaaaaugagcggacccuugauuaucaugacagcaacgugaaaaaccuguacgagaagguccgcucucagcucaaaaauaacgccaaggaaauugggaauggauguuuugaguucuaucacaagugcgauaacacauguauggaauccgugaaaaauggcaccuacgacuauccuaaguacagcgaggaagcuaaacugaacagagaggagaucgaugggguuaaacuugaaucuacacggaucuaucaaauucuggccaucuacuccacgguggcgagcucccucguccuggugguuucucugggcgcuauuagcuuuuggaugugcuccaauggaucucuccagugccgcaucuguauuuga

SEQ ID NO: 195490 - RNA, 1701 nt, Artificial Sequence; identical to SEQ ID NO: 194741
  derived and/or modified CDS sequence (opt5) from hemagglutinin__InfluenzaA__ACV83668

SEQ ID NO: 195491 - RNA, 1701 nt, Artificial Sequence; identical to SEQ ID NO: 194741
  derived and/or modified CDS sequence (opt5) from hemagglutinin__InfluenzaA__ACV83670

SEQ ID NO: 195492 - RNA, 1701 nt, Artificial Sequence; identical to SEQ ID NO: 194983
  derived and/or modified CDS sequence (opt5) from hemagglutinin__InfluenzaA__ACV83671

SEQ ID NO: 195493 - RNA, 1701 nt, Artificial Sequence; identical to SEQ ID NO: 195303
  derived and/or modified CDS sequence (opt5) from hemagglutinin__InfluenzaA__ACV88399

SEQ ID NO: 195494 - RNA, 1701 nt, Artificial Sequence; identical to SEQ ID NO: 195303
  derived and/or modified CDS sequence (opt5) from hemagglutinin__InfluenzaA__ACV88409

SEQ ID NO: 195495 - RNA, 1701 nt, Artificial Sequence; identical to SEQ ID NO: 194728
  derived and/or modified CDS sequence (opt5) from hemagglutinin__InfluenzaA__ACV88419

SEQ ID NO: 195496 - RNA, 1698 nt, Artificial Sequence; identical to SEQ ID NO: 195350
  derived and/or modified CDS sequence (opt5) from hemagglutinin__InfluenzaA__ACV89502

SEQ ID NO: 195497 - RNA, 1701 nt, Artificial Sequence
  derived and/or modified CDS sequence (opt5) from hemagglutinin__InfluenzaA__ACV89516
augaaggccagacugcucauccugcuuugcgcucuggccgcgaccgacgcugauacaauuuguaucggcuaccacgccaacaauagcacggacaccguggauacaguccucgagaaaaacguuaccgugacacauuccgugaaucugcuugaagacucucacaacgggaagcugugccggcucaaaggaauugcuccccugcagcugggcaaguguaauaucgccggguggauucucggaaacccugagugcgauagccugcuuccggccuccucuuggagcuauaucgucgaaacccccaauuccaaaaacggcaucuguuacccuggggacuucauugauuaugaggaacugcgcgagcaacucucuagcguguccagcuuugagagauucgaaaucuuucccaaggagucuuccuggccuaagcauagcacaaccaaaggaguuacggcugccugcucucacgcgggcaaguccagcuucuaccggaaucugcuuuggcugaccaaaaagggcgacucuuaucccaaacucuccaacagcuacgugaauaagaaggggaaagaaguccuggugcuguggggaguucaucacccuuccucuagcaaggagcagcagacacucuaucagaacgagaaugccuacguguccgucgugagcucuaacuacaaucgcagauuuauuccggaaaucgcugagcggcccgaagugaaagaucaagccggccgcauuaacuauuacuggacccugcuugagccuggggacacaaucauuuucgaagcuaacggaaaucuggucgcccccugguaugcguuugcccucuccagaggcuucgggagcggaaucaucaccucuaacgcuagcaugcacgaguguaauacgaagugccagacaccucagggcgccauuaacuccucucugcccuuucagaauauccauccgguuaccauuggcgaguguccuaaauacgugaaaagcgcuaaacuucggauggugacagggcugcgcaacauccccuccauucaaagcagaggacucuucggcgccaucgccggguuuaucgaaggaggcuggaccgggaugauugauggaugguauggcuaccaccaucagaaugagcagggcucuggguaugcugcggaccagaaguccacccaaaacgccaucaauggaauuacaaacaaggucaauagcgugaucgaaaagaugaacacgcaguucaccgcuguuggcaaggaguuuaauaaccuggaaaaacggauggagaaucugaacaagaaaguggaugacggguuccucgacauuuggacauacaacgccgagcugcuuguccugcucgaaaaugagcgcacccuggauuuccacgacucuaacgugaagaaucuuuacgaaaagguuaaaauccagcugaagaacaaugccaaagagaucggaaacggcugcuuugaguucuaucacaagugugauaaugaaugcauggaguccgugagaaacgggacauacgacuauccuaaauacagcaaggaauccaagcucaaucgggagaaaauugauggcgucaagcuggaaucuaugggaguguaucaaauccuggcuauuuacagcaccgucgccuccucucucgugcugcuuguuagccugggcgcgaucuccuuuuggaugugcagcaacgggucucuccagugucgcauuugcaucuga

SEQ ID NO: 195498 - RNA, 1698 nt, Artificial Sequence
  derived and/or modified CDS sequence (opt5) from hemagglutinin__InfluenzaA__ACV90512
augaacgugaagcugcucguccugcuuugcaccuucacagccacguacgcugacaccaucuguauuggcuaucacgccaauaacagcacagauaccguugacacagugcuggagaaaaaugugaccgucacacauuccgugaaccuccuggaaaauucucacaacgggaaacuuugccugcucaaaggaaucgcgccccugcagcugggcaauuguagcguugcuggguggauucucggaaacccugagugcgaacugcuuaucuccaaggagucuuggagcuacauuguggaaaaaccgaaucccgagaacggcaccuguuauccugggcauuuugccgauuacgaggaacugagagagcaacucuccucugucagcuccuucgaacgguuugagaucuuccccaaggagagcucuuggccuaaucacacggugaccggaguuuccgccagcugcucucauaacggcgaaaauuccuuuuaucgcaaccugcuuuggcugacaggcaagaaugggcucuaccccaaccugagcaaaucuuaugcuaacaauaaggagaaagaagugcugguccucuggggagugcaccacccuccgaacaucgccgaccagaagacccuguaccauacagagaaugcuuacguguccgucguuagcucccacuauucuagaaaauucacccccgaaauugccaagcggccuaaggugcgcgaucaggagggcagaaucaacuacuauuggacgcuucuggagcccggggacacaauuaucuuugaagcgaauggaaaccucauugccccucgguacgcuuucgcccugagccgcggcuuuggguccggaaucauuaauagcaacgcucccaucgauaaaugggacgccaagugucagaccccgcaaggcgcgaucaauucuucccuuccuuuccagaacgugcaucccgucacaauuggcgaguggccuaaauaugugagaagcgccaagcugcggaugguuaccgggcuccgcaauauccccucuauucagagcagaggacuguuuggcgcuaucgccggguucauugaaggaggcuggaccgggaugguggauggaugguacggcuaucaccaccagaacgagcaaggcuccggguacgcugccgaccagaaaucuacacagaaugccaucaacggaaucacgaauaagaugaacagcgucauugaaaagaugaacacccaguuuacagcugugggcaaggaguucaauaagcuggagcggcgcauggaaaaccucaauaaaaagguugaugacggguucaucgauauuuggaccuacaacgcggagcugcuugugcugcucgaaaaugagagaacacuggacuuucaugacuccaacgucaaaaaucuuuaugaaaaggugaaaagccaacugaagaacaaugccaaggagaucggaaacggcugcuucgaguuuuaccacaaauguaaugaugaaugcauggagucugucaagaacgggaccuaugacuaccccaaauauuccgaagagagcaagcucaaucgggagaaaauugauggcgugacgcuggaaucuaugggaguuuaccagauccuggcuaucuauuccacaguggccagcucccucguccugcuugugucucugggcgccauuagcuucuggauguguuccaacgggucucuccagugccgcaucugcauuuga

SEQ ID NO: 195499 - RNA, 1701 nt, Artificial Sequence; identical to SEQ ID NO: 194741
  derived and/or modified CDS sequence (opt5) from hemagglutinin__InfluenzaA__ACV91672

SEQ ID NO: 195500 - RNA, 1701 nt, Artificial Sequence; identical to SEQ ID NO: 194741
  derived and/or modified CDS sequence (opt5) from hemagglutinin__InfluenzaA__ACV91676

SEQ ID NO: 195501 - RNA, 1701 nt, Artificial Sequence; identical to SEQ ID NO: 194741
  derived and/or modified CDS sequence (opt5) from hemagglutinin__InfluenzaA__ACV91680

SEQ ID NO: 195502 - RNA, 1701 nt, Artificial Sequence
  derived and/or modified CDS sequence (opt5) from hemagglutinin__InfluenzaA__ACX31591
augaagaccaucauugcccugagcuacauccucugccugguguucgcucagaaacuucccggcaacgacaauuccacagccacgcugugucucgggcaccaugcggucccuaacggaaccauuguuaagacaaucaccaaugaucaaauugaggugacaaacgcuaccgaacuggugcagucuagcuccacaggcgagaucugcgacucuccgcaccagauccuugaugggaaaaauuguacccugauugacgcccuccugggagauccccagugcgacggcuuucaaaacaagaaaugggaucuguucgucgaaagaagcaaggccuauuccaauuguuacccuuaugacgugcccgauuacgcuucucuccggagccugguugccuccagcgggacgcuugaguuuaacaaugaaucuuucaacuggaccggagugacacagaauggcaccuccagcgcuugcauccgcagaucuaagaacuccuuuuucagccggcugaauuggcucacacaucugaacuuuaaauaucaggcccuuaaugucaccaugccuaacaacgagcaguucgacaagcuguacauuuggggcgugcaccaucccgggacggauaaagaccaaaucuuucucuaugcgcaggccucuggacgcauuacaguuuccaccaagagaagccagcagacagugaucccuaauauuggcucccggccgcgcgucagaaacauccccucucggaucagcauuuacuggaccaucgugaaaccuggggauauucugcugaucaauuccaccggaaaccucauugcuccccgcggcuacuucaagauccaaagcgggaagucuuccaucaugagaagcgacgccccuauuggaaaauguaauucugagugcaucacacccaacggcagcauuccgaaugacaagccuuuucagaacgugaaucggaucacguauggcgcuuguccccgcuacgucaaacagaacacccugaaacuugccacagggaugagaaauguuccugaaaaacaaacccggggaauuuucggcgcgaucgccggguuuaucgagaacggaugggaaggcaugguggaugggugguauggauuccgccaccaaaauuccgagggcagaggccaggcugccgaccugaagucuacacaggcugccauugaucagaucaacgggaaacucaaucggcugauuggaaagaccaacgagaaguuccaccagaucgaaaaagaguuuagcgaaguggagggccgcauucaggaccuugaaaaguacgucgaggauacgaaaaucgaccugugguccuauaacgccgagcuccugguggcucuggaaaaucagcauacaauugaucucaccgacagcgagaugaacaagcuguucgaaaagaccaagaagcaacuuagagagaaugcggaagauauggggaacggaugcuuuaaaaucuaccacaagugugacaaugccugcaucggcucuauucggaacgggacauaugaucaugacguuuacagagacgaggcucugaauaaccgcuuccagaucaaaggcguggagcucaaguccggauacaaagauuggauucuguggaucagcuuugccauuucuugcuuccuucugugugucgcccuccugggcuuuaucaugugggcuugccagaaggggaauauccgguguaacauuugcaucuga

SEQ ID NO: 195503 - RNA, 1701 nt, Artificial Sequence
  derived and/or modified CDS sequence (opt5) from hemagglutinin__InfluenzaA__ACX31933
augaaggccauccuggugguccuccuguacaccuucgcuacagccaacgcggacacgcuuugcauuggcuaucacgcuaauaacagcaccgauacaguugacaccgugcuggagaagaaugugacagucacccauuccgugaaccuccuggaagauaagcacaaugggaaacuuuguaagcugagaggaguugcuccccuccaucugggcaaaugcaacaucgccggguggauucugggaaauccugagugugaaucucucagcacagccuccucuuggagcuacaucguggagaccuccucuagcggcaacgggacgugcuauccgggagacuuuauugauuacgaagaacugcgggagcagcuuuccagcgucucuuccuucgaacgcuuugagaucuuccccaagaccagcucuuggccuaaucacgacuccaacaagggcgugacagccgcuuguccccaugccggcgcgaaaucuuuuuauaagaaucugaucuggcucguuaaaaaggggaacagcuacccuaaacuguccaagagcuauauuaaugauaagggaaaagaagugcuuguccuguggggcauccaccaccccuccaccucugccgaccaacagagccucuaccagaacgcugaugccuacguguucguggggacauccagauauagcaagaaauuuaagccugagauugcuauccggccgaaaguccgcgaccaggagggaagaaugaauuacuauuggacccugguugaacccggcgauaagauuacguucgaggccacagggaaccugguggugccucgguacgcguuugccauggaacgcaacgcuggaucuggcaucauuaucuccgacacccccguccaugauugcaauacaaccugucaaaccccuaaaggcgccaucaacacaagccuccccuuccagaauauucacccgaucacgauugggaagugcccuaaguaugugaaaucuaccaagcugagacuugcuacaggacugcggaacguucccagcauccagucccgcggccucuuuggggccauugccggauucaucgagggcggguggaccggaaugguggacggcugguacggcuaucaucaccagaaugaacaagggucuggauacgcugcggaccugaaaagcacacagaacgccaucgaugagauuaccaauaaggucaacuccgugaucgagaaaaugaauacgcaguuuacagcuguuggcaaggaguucaaccaccuugagaagagaauugaaaaucugaacaaaaagguggacgauggguuccucgacaucuggaccuacaaugccgagcugcugguccuccuggaaaacgagcggacccuugauuaucaugacagcaaugugaaaaaccuguacgagaagguccgcucucagcucaaaaacaaugccaaggaaauuggaaacggcuguuuugaguucuaucacaagugcgauaauacauguauggaauccgugaaaaacgggaccuacgacuauccuaaguacagcgaggaagcuaaacugaauagagaggagaucaacggcguuaaacuugaaucuacacggaucuaucaaauucuggccaucuacuccacgguggcgagcucccucguccuggugguuucucugggagcuauuagcuuuuggaugugcuccaauggcucucuccagugccgcaucuguauuuga

SEQ ID NO: 195504 - RNA, 1701 nt, Artificial Sequence
  derived and/or modified CDS sequence (opt5) from hemagglutinin__InfluenzaA__ACX31934
augaaggccauccuggugguccuccuguacaccuucgcuacagccaacgcggacacgcuuugcauuggcuaucacgcuaauaacagcaccgauacaguugacaccgugcuggagaagaaugugacagucacccauuccgugaaccuccuggaagauaagcacaaugggaaacuuuguaagcugagaggaguugcuccccuccaucugggcaaaugcaacaucgccggguggauucugggaaauccugagugugaaucucucagcacagccuccucuuggagcuacaucguggagaccuccucuagcgacaacggcacgugcuauccgggggauuuuauugacuacgaagaacugcgggagcagcuuuccagcgucucuuccuucgaacgcuuugagaucuuccccaagaccagcucuuggccuaaucacgauuccaacaagggagugacagccgcuuguccccaugccggcgcgaaaucuuuuuauaagaaucugaucuggcucguuaaaaagggcaacagcuacccuaaacuguccaagagcuauauuaaugacaaggggaaagaagugcuuguccuguggggaauccaccaccccuccaccucugccgaucaacagagccucuaccagaacgcugacgccuacguguucgugggcacauccagauauagcaagaaauuuaagccugagauuaccauccggccgaaaguccgcgggcaggagggaagaaugaauuacuauuggacgcugguugaacccggcgauaagauuacauucgaggcuaccgggaaccugguggugccucgguacgccuuugcgauggaacgcaacgccggaucuggcaucauuaucuccgacacacccguccaugauugcaauaccaccugucaaacaccuaaaggcgcuaucaacacgagccuccccuuccagaauauucacccgaucaccauugggaagugcccuaaguaugugaaaucuacaaagcugagacuugccaccggacugcggaacguucccagcauccagucccgcggccucuuuggggcuauugccggauucaucgagggcggguggacaggaaugguggacggcugguacggcuaucaucaccagaaugaacaagggucuggauacgccgcugaccugaaaagcacccagaacgcgaucgaugagauuacgaauaaggucaacuccgugaucgagaaaaugaauacacaguuuaccgccguuggcaaggaguucaaccaccuugagaagagaauugaaaaucugaacaaaaagguggacgauggguuccucgacaucuggaccuacaaugcugagcugcugguccuccuggaaaacgagcggacacuugauuaucaugacagcaaugugaaaaaccuguacgagaagguccgcucucagcucaaaaacaaugccaaggaaauuggaaacggcuguuuugaguucuaucacaagugcgauaauaccuguauggaauccgugaaaaacgggacauacgacuauccuaaguacagcgaggaagccaaacugaauagagaggagaucgauggcguuaaacuugaaucuacgcggaucuaucaaauucuggcuaucuacuccaccguggccagcucccucguccuggugguuucucugggagcgauuagcuuuuggaugugcuccaacggcucucuccagugccgcaucuguauuuga

SEQ ID NO: 195505 - RNA, 1701 nt, Artificial Sequence; identical to SEQ ID NO: 194741
  derived and/or modified CDS sequence (opt5) from hemagglutinin__InfluenzaA__ACX31935

SEQ ID NO: 195506 - RNA, 1701 nt, Artificial Sequence; identical to SEQ ID NO: 194741
  derived and/or modified CDS sequence (opt5) from hemagglutinin__InfluenzaA__ACX31936

SEQ ID NO: 195507 - RNA, 1701 nt, Artificial Sequence; identical to SEQ ID NO: 194832
  derived and/or modified CDS sequence (opt5) from hemagglutinin__InfluenzaA__ACX31939

SEQ ID NO: 195508 - RNA, 1701 nt, Artificial Sequence; identical to SEQ ID NO: 194832
  derived and/or modified CDS sequence (opt5) from hemagglutinin__InfluenzaA__ACX31940

SEQ ID NO: 195509 - RNA, 1701 nt, Artificial Sequence; identical to SEQ ID NO: 194741
  derived and/or modified CDS sequence (opt5) from hemagglutinin__InfluenzaA__ACX31943

SEQ ID NO: 195510 - RNA, 1701 nt, Artificial Sequence; identical to SEQ ID NO: 194741
  derived and/or modified CDS sequence (opt5) from hemagglutinin__InfluenzaA__ACX31946

SEQ ID NO: 195511 - RNA, 1701 nt, Artificial Sequence; identical to SEQ ID NO: 194741
  derived and/or modified CDS sequence (opt5) from hemagglutinin__InfluenzaA__ACX31947

SEQ ID NO: 195512 - RNA, 1701 nt, Artificial Sequence; identical to SEQ ID NO: 194741
  derived and/or modified CDS sequence (opt5) from hemagglutinin__InfluenzaA__ACX31948

SEQ ID NO: 195513 - RNA, 1701 nt, Artificial Sequence
  derived and/or modified CDS sequence (opt5) from hemagglutinin__InfluenzaA__ACX31949
augaaggccauccuggugguccuccuguacaccuucgcuacagccaacgcggacacgcuuugcauuggcuaucacgcuaauaacagcaccgauacaguugacaccgugcuggagaaaaaugugacagucacccauuccgugaaccuccuggaagauaagcacaaugggaaacuuuguaagcugagaggaguugcuccccuccaucugggcaaaugcaacaucgccggguggauucugggaaauccugagugugaaucucucagcacagccuccucuuggagcuacaucguggagaccuccucuagcgacaacggcacgugcuauccgggggauuuuauugacuacgaagaacugcgggagcagcuuuccagcgucucuuccuucgaacgcuuugagaucuuccccaagaccagcucuuggccuaaucacgauuccaacaagggagugacagccgcuuguccccaugccggcgcgaaaucuuuuuauaagaaucugaucuggcucguuaaaaagggcaacagcuacccuaaacuguccaagagcuauauuaaugacaaggggaaagaagugcuuguccuguggggaauccaccaccccuccaccucugccgaucaacagagccucuaccagaacgcugacgccuacguguucgugggcacauccagauauagcaagaaauuuaagccugagauugcuauccggccgaaaguccgcgaucaggaggggagaaugaauuacuauuggacccugguugaacccggagacaagauuacguucgaggccacaggcaaccugguggugccucgguacgcguuugccauggaacgcaacgcugggucuggaaucauuaucuccgauacccccguccauuauugcaauacaaccugucaaaccccuaaaggcgccaucaacacaagccuccccuuccagaauauucacccgaucacgauuggcaagugcccuaaguacgugaaaucuaccaagcugagacuugcuacagggcugcggaacguucccagcauccagucccgcggacucuuuggcgccauugccggguucaucgagggaggcuggaccgggaugguggacggaugguauggcuaccaucaccagaaugaacaaggcucuggguacgcugcggaccugaaaagcacacagaacgccaucgaugagauuaccaauaaggucaacuccgugaucgagaaaaugaauacgcaguuuacagcuguuggaaaggaguucaaccaccuugagaagagaauugaaaaucugaacaaaaagguggacgauggcuuccucgacaucuggaccuauaaugccgagcugcugguccuccuggaaaacgagcggacccuugauuaccaugacagcaaugugaaaaaccuguaugaggaaguccgcucucagcucaagaacaaugccaaagagauugggaacggauguuuugaguucuaccacaagugcgauaauacauguauggaauccgugaagaacggcaccuaugacuacccuaaauauagcgaagaggcuaagcugaauagagaggaaaucgaugggguuaaacuugagucuacacggaucuaccaaauucuggccaucuacuccacgguggcgagcucccucguccuggugguuucucugggcgcuauuagcuuuuggaugugcuccaacggaucucuccagugccgcaucuguauuuga

SEQ ID NO: 195514 - RNA, 1701 nt, Artificial Sequence; identical to SEQ ID NO: 194741
  derived and/or modified CDS sequence (opt5) from hemagglutinin__InfluenzaA__ACX31950

SEQ ID NO: 195515 - RNA, 1701 nt, Artificial Sequence; identical to SEQ ID NO: 194741
  derived and/or modified CDS sequence (opt5) from hemagglutinin__InfluenzaA__ACX31951

SEQ ID NO: 195516 - RNA, 1701 nt, Artificial Sequence; identical to SEQ ID NO: 194741
  derived and/or modified CDS sequence (opt5) from hemagglutinin__InfluenzaA__ACX31954

SEQ ID NO: 195517 - RNA, 1701 nt, Artificial Sequence; identical to SEQ ID NO: 194741
  derived and/or modified CDS sequence (opt5) from hemagglutinin__InfluenzaA__ACX31955

SEQ ID NO: 195518 - RNA, 1701 nt, Artificial Sequence; identical to SEQ ID NO: 194728
  derived and/or modified CDS sequence (opt5) from hemagglutinin__InfluenzaA__ACX31956

SEQ ID NO: 195519 - RNA, 1701 nt, Artificial Sequence; identical to SEQ ID NO: 194741
  derived and/or modified CDS sequence (opt5) from hemagglutinin__InfluenzaA__ACX31957

SEQ ID NO: 195520 - RNA, 1701 nt, Artificial Sequence; identical to SEQ ID NO: 194728
  derived and/or modified CDS sequence (opt5) from hemagglutinin__InfluenzaA__ACX31958

SEQ ID NO: 195521 - RNA, 1701 nt, Artificial Sequence; identical to SEQ ID NO: 194983
  derived and/or modified CDS sequence (opt5) from hemagglutinin__InfluenzaA__ACX31960

SEQ ID NO: 195522 - RNA, 1701 nt, Artificial Sequence
  derived and/or modified CDS sequence (opt5) from hemagglutinin__InfluenzaA__ACX31961
augaaggccauccugguggucaugcucuacaccuucgcuacagccaacgcggacacgcugugcauuggcuaucacgcuaauaacagcaccgauacaguugacaccgugcuugagaaaaaugugacagucacccauuccgugaaccugcucgaagauaagcacaaugggaaacuguguaaacuuagaggaguugcuccccugcaucucggcaagugcaacaucgccggguggauucugggaaauccugagugugaaucucugagcacagccuccucuuggagcuacaucguggagaccuccucuagcgacaacggcacgugcuauccgggggauuuuauugacuacgaagaacuccgggagcagcuguccagcgucucuuccuucgaacgcuuugagaucuuccccaagaccagcucuuggccuaaucacgauuccaacaagggagugacagccgcuuguccccaugccggcgcgaaaucuuuuuauaagaaucuuaucuggcugguuaaaaagggcaacagcuacccuaaacucuccaagagcuauauuaaugacaaggggaaagaagugcugguccuuuggggaauccaccaccccuccaccucugccgaucaacagagccuguaccagaacgcugacgccuacguguucgugggcuccagcagauauucuaagaaauuuaagccugagauugcuauccggccgaaaguccgcgaucaggaggggagaaugaauuacuauuggacacucguugaacccggagacaagauuaccuucgaggccacgggcaaccugguggugccucgguacgcguuugccauggaacgcaacgcuggguccggaaucauuaucagcgauacacccguccaugacugcaauaccacaugucaaaccccuaaaggcgccaucaacaccucucugcccuuccagaauauucacccgaucacaauuggcaagugcccuaaguaugugaaaagcacgaagcucagacuggcuaccgggcuucggaacguucccuccauccagucucgcggacuguuuggcgccauugccggguucaucgagggaggcuggacagggaugguggacggaugguacggcuaucaucaccagaaugaacaaggcagcggguacgcugcggaucucaaauccacccagaacgccaucgacgagauuacaaauaaggucaacagcgugaucgagaaaaugaauacccaguuuacggcuguuggaaaggaguucaaccaccuggagaagagaauugaaaaucuuaacaaaaagguggaugacggcuucauggauaucuggacauacaaugccgagcugcucguccugcuggaaaacgagcggacccucgacuaucaugauucuaaugugaaaaaccuguacgagaagguccgcucccagcuuaaaaacaaugccaaggaaauugggaacggauguuuugaguucuaucacaagugcgacaauaccuguauggaaagcgugaaaaacggcacauacgauuauccuaaguacucugaggaagcuaaacugaauagagaggagaucgacgggguuaagcucgaauccacccggaucuaucaaauucuggccaucuacagcacaguggcguccucucuuguccuggugguuagccucggcgcuauuuccuuuuggaugugcucuaacggaagccugcagugccgcaucuguauuuga

SEQ ID NO: 195523 - RNA, 1701 nt, Artificial Sequence; identical to SEQ ID NO: 194741
  derived and/or modified CDS sequence (opt5) from hemagglutinin__InfluenzaA__ACX31962

SEQ ID NO: 195524 - RNA, 1701 nt, Artificial Sequence; identical to SEQ ID NO: 194741
  derived and/or modified CDS sequence (opt5) from hemagglutinin__InfluenzaA__ACX31964

SEQ ID NO: 195525 - RNA, 1701 nt, Artificial Sequence; identical to SEQ ID NO: 194728
  derived and/or modified CDS sequence (opt5) from hemagglutinin__InfluenzaA__ACX35237

SEQ ID NO: 195526 - RNA, 1701 nt, Artificial Sequence; identical to SEQ ID NO: 194741
  derived and/or modified CDS sequence (opt5) from hemagglutinin__InfluenzaA__ACX35247

SEQ ID NO: 195527 - RNA, 1701 nt, Artificial Sequence; identical to SEQ ID NO: 194741
  derived and/or modified CDS sequence (opt5) from hemagglutinin__InfluenzaA__ACX35257

SEQ ID NO: 195528 - RNA, 1701 nt, Artificial Sequence; identical to SEQ ID NO: 194741
  derived and/or modified CDS sequence (opt5) from hemagglutinin__InfluenzaA__ACX35267

SEQ ID NO: 195529 - RNA, 1701 nt, Artificial Sequence; identical to SEQ ID NO: 194741
  derived and/or modified CDS sequence (opt5) from hemagglutinin__InfluenzaA__ACX35277

SEQ ID NO: 195530 - RNA, 1701 nt, Artificial Sequence; identical to SEQ ID NO: 194741
  derived and/or modified CDS sequence (opt5) from hemagglutinin__InfluenzaA__ACX35287

SEQ ID NO: 195531 - RNA, 1701 nt, Artificial Sequence; identical to SEQ ID NO: 194741
  derived and/or modified CDS sequence (opt5) from hemagglutinin__InfluenzaA__ACX35297

SEQ ID NO: 195532 - RNA, 1701 nt, Artificial Sequence
  derived and/or modified CDS sequence (opt5) from hemagglutinin__InfluenzaA__ACX35307
augaaggccauccuggugguccuccuguacaccuucgcuacagccaacgcggacacgcuuugcauuggcuaucacgcuaauaacagcaccgauacaguugacaccgugcuggagaagaaugugacagucacccauuccgugaaccuccuggaagauaagcacaaugggaaacuuuguaagcugagaggaguugcuccccuccaucugggcaaaugcaacaucgccggguggauucugggaaauccugagugugaaucucucagcacagccuccucuuggagcuacaucguggagaccuccucuagcgacaacggcacgugcuauccgggggauuuuauugacuacgaagaacugcgggagcagcuuuccagcgucucuuccuucgaacgcuuugagaucuuccccaagaccagcucuuggccuaaucacgauuccaacaagggagugacagccgcuuguccccaugccggcgcgaaaucuuuuuauaagaaucugaucuggcucguuaaaaagggcaacagcuacccuaaacuguccaagagcuauauuaaugacaaggggaaagaagugcuuguccuguggggaauccaccaccccuccaccucugccgaucaacagagccucuaccagaacgcugacgccuacguguucgugggcacauccagauauagcaagaaauuuaagccugagauugcuauccggccgaaaguccgcgaucaggaggggagaaugaauuacuauuggacccugguuggacccggcgacaagauuacguucgaagccacagggaaccugguggugccucgguacgcguuugccauggagcgcaacgcuggaucuggcaucauuaucuccgauacccccguccaugacugcaauacaaccugucaaaccccuaaaggcgccaucaacacaagccuccccuuccagaauauucacccgaucacgauugggaagugcccuaaguaugugaaaucuaccaagcugagacuugcuacaggacugcggaacguucccagcauccagucccgcggccucuuuggggccauugccggauucaucgaaggcggguggaccggaaugguggacggcugguacggcuaucaucaccagaaugagcaagggucuggauacgcugcggaucugaaaagcacacagaacgccaucgacgaaauuaccaauaaggucaacuccgugaucgagaaaaugaauacgcaguuuacagcuguuggcaaggaguucaaccaccuugaaaagagaauugagaaucugaacaaaaagguggaugacggguuccucgauaucuggaccuacaaugccgaacugcugguccuccuggagaacgaacggacccuugacuaucaugauagcaaugugaaaaaccuguacgagaagguccgcucucagcucaaaaacaaugccaaggagauuggaaacggcuguuuugaguucuaucacaagugcgacaauacauguauggaguccgugaaaaacgggaccuacgauuauccuaaguacagcgaagaggcuaaacugaauagagaagagaucgacggcguuaaacuugagucuacacggaucuaucaaauucuggccaucuacuccacgguggcgagcucccucguccuggugguuucucugggagcuauuagcuuuuggaugugcuccaacggcucucuccagugccgcaucuguauuuga

SEQ ID NO: 195533 - RNA, 1701 nt, Artificial Sequence; identical to SEQ ID NO: 194983
  derived and/or modified CDS sequence (opt5) from hemagglutinin__InfluenzaA__ACX35317

SEQ ID NO: 195534 - RNA, 1701 nt, Artificial Sequence
  derived and/or modified CDS sequence (opt5) from hemagglutinin__InfluenzaA__ACX35327
augaaggccauccuggugguccuccuguacaccuucgcuacagccaacgcggacacgcuuugcauuggcuaucacgcuaauaacagcaccgauacaguugacaccgugcuggagaagaaugugacagucacccauuccgugaaccuccuggaagauaagcacaaugggaaacuuuguaagcugagaggaguugcuccccuccaucugggcaaaugcaacaucgccggguggauucugggaaauccugagugugaaucucucagcacagccuccucuuggagcuacaucguggagaccuccucuagcgacaacggcacgugcuauccgggggauuuuauugacuacgaagaacugcgggagcagcuuuccagcgucucuuccuucgaacgcuuugagaucuuccccaagaccagcucuuggccuaaucacgauuccaacaagggagugacagccgcuuguccccaugccggcgcgaaaucuuuuuauaagaaucugaucuggcucguuaaaaagggcaacagcuacccuaaacuguccaagagcuauauuaaugacaaggggaaagaagugcuuguccuguggggaauccaccaccccuccaccucugccgaucaacagagccucuaccagaacgcugacuccuacguguucgugggcacaagcagauauucuaagaaauuuaagccugagauugccauccggccgaaaguccgcgaucaggaggggagaaugaauuacuauuggacccugguugaacccggagacaagauuacguucgaggcuacaggcaaccugguggugccucgguacgccuuugcgauggaacgcaacgccggguccggaaucauuaucagcgauacccccguccaugacugcaauacaaccugucaaaccccuaaaggcgcuaucaacacaucucuccccuuccagaauauucacccgaucacgauuggcaagugcccuaaguaugugaaaagcaccaagcugagacuugccacagggcugcggaacguucccuccauccagucucgcggacucuuuggcgcuauugccggguucaucgagggaggcuggaccgggaugguggacggaugguacggcuaucaucaccagaaugaacaaggcagcggguacgccgcugaucugaaauccacacagaacgcgaucgacgagauuaccaauaaggucaacagcgugaucgagaaaaugaauacgcaguuuacagccguuggaaaggaguucaaccaccuugagaagagaauugaaaaucugaacaaaaagguggaugacggcuuccucgauaucuggaccuacaaugcugagcugcugguccuccuggaaaacgagcggacccuugacuaucaugauucuaaugugaaaaaccuguacgagaagguccgcucccagcucaaaaacaaugccaaggaaauugggaacggauguuuugaguucuaucacaagugcgacaauacauguauggaaagcgugaaaaacggcaccuacgauuauccuaaguacucugaggaagccaaacugaauagagaggagaucgacgggguuaaacuugaauccacacggaucuaucaaauucuggcuaucuacagcacgguggccuccucucucguccuggugguuagccugggcgcgauuuccuuuuggaugugcucuaacggaagccuccagugccgcaucuguauuuga

SEQ ID NO: 195535 - RNA, 1701 nt, Artificial Sequence
  derived and/or modified CDS sequence (opt5) from hemagglutinin__InfluenzaA__ACX36501
augaaggccauccuggugguccuccuguacaccuucgcuacagccaacgcggacacgcuuugcauuggcuaucacgcuaauaacagcaccgauacaguugacaccgugcuggagaaaaaugugacagucacccauuccgugaaccuccuggaagauaagcacaaugggaaacuuuguaagcugagaggaguugcuccccuccaucugggcaaaugcaacaucgccggguggauucugggaaauccugagugugaaucucucagcacagccuccucuuggagcuacaucguggagaccuccucuagcgacaacggcacgugcuauccgggggauuuuauugacuacgaagaacugcgggagcagcuuuccagcgucucuuccuucgaacgcuuugagaucuuccccaagaccagcucuuggccuaaucacgauuccaacaagggagugacagccgcuuguccccaugccggcgcgaaaucuuuuuauaagaaucugaucuggcucguuaaaaagggcaacagcuacccuaaacuguccaagagcuauauuaaugacaaggggaaagaagugcuuguccuguggggaauccaccaccccuccaccucugccgaucaacagagcauuuaccagaacgcugacgccuacguguucgugggcacauccagauauagcaagaaauuuaagccugagaucgcuauucggccgaaaguccgcgaucaggaggggagaaugaauuacuauuggacccucguugaacccggagacaagaucacguucgaggccacaggcaaccugguggugccucgguacgcguuugccauggaacgcaacgcugggucuggaauuaucaucuccgauacccccguccaugacugcaauacaaccugucaaaccccuaaaggcgccauuaacacaagccugcccuuccagaauauccacccgauuacgaucggcaagugcccuaaguaugugaaaucuaccaagcucagacuggcuacagggcuucggaacguucccagcauucagucccgcggacuguuuggcgccaucgccggguucaucgagggaggcuggaccgggaugguggacggaugguacggcuaucaucaccagaaugaacaaggcucuggguacgcugcggaucucaaaagcacacagaacgccauugacgagaucaccaauaaggucaacuccgugauugagaaaaugaauacgcaguuuacagcuguuggaaaggaguucaaccaccuggagaagagaaucgaaaaucuuaacaaaaagguggaugacggcuuccuggauauuuggaccuacaaugccgagcuccugguccugcucgaaaacgagcggacccuggacuaucaugauagcaaugugaaaaaccuuuacgagaagguccgcucucagcugaaaaacaaugccaaggaaaucgggaacggauguuuugaguucuaucacaagugcgacaauacauguauggaauccgugaaaaacggcaccuacgauuauccuaaguacagcgaggaagcuaaacucaauagagaggagaucgacgggguuaagcuggaaucuacacggauuuaucaaauccuugccauuuacuccacgguggcgagcucccugguccucgugguuucucugggcgcuaucagcuuuuggaugugcuccaacggaucucugcagugccgcauuuguaucuga

SEQ ID NO: 195536 - RNA, 1701 nt, Artificial Sequence
  derived and/or modified CDS sequence (opt5) from hemagglutinin__InfluenzaA__ACX36502
augaaggccauccuggugguccuccuguacaccuucgcuacagccaacgcggacacgcuuugcauuggcuaucacgcuaauaacagcaccgauacaguugacaccauccuggagaaaaaugugacagugacccauuccgucaaccuccuggaagauaagcacaaugggaaacuuuguaagcugagaggaguggcuccccuccaucugggcaaaugcaacauugccggguggauccugggaaauccugagugugaaucucucagcacagccuccucuuggagcuacauuguugagaccuccucuagcgacaacggcacgugcuauccgggggauuuuaucgacuacgaagaacugcgggagcagcuuuccagcgugucuuccuucgaacgcuuugagaucuuccccaagaccagcucuuggccuaaucacgauuccaacaagggagucacagccgcuuguccccaugccggcgcgaaaucuuuuuauaagaaucugauuuggcucgugaaaaagggcaacagcuacccuaaacuguccaagagcuauaucaaugacaaggggaaagaaguucuugugcuguggggcauucaccaccccuccaccucugccgaucaacagagcaucuaccagaacgcugacgccuacgucuucgugggaacauccagauauagcaagaaauuuaagccugagauugcuauccggccgaaagugcgcgaucaggaggggagaaugaauuacuauuggacccucgucgaacccggagacaagauuacguucgaggccacaggcaaccugguugugccucgguacgcguuugccauggaacgcaacgcugggucuggaaucaucauuuccgauacccccgugcaugacugcaauacaaccugucaaaccccuaaaggcgccaucaacacaagccugcccuuccagaauauucacccgaucacgauuggcaagugcccuaaguaugucaaaucuaccaagcucagacuggcuacagggcuucggaacgugcccagcauccagucccgcggacuguuuggcgccaucgccggguucauugagggaggcuggaccgggaugguugacggaugguacggcuaucaucaccagaaugaacaaggcucuggguacgcugcggaucucaaaagcacacagaacgccaucgacgagauuaccaauaaggugaacuccgucaucgagaaaaugaauacgcaguuuacagcugugggaaaggaguucaaccaccuggagaagagaauugaaaaucuuaacaaaaagguugaugacggcuuccuggauaucuggaccuacaaugccgagcuccuggugcugcucgaaaacgagcggacccuggacuaucaugauagcaaugucaaaaaccuuuacgagaaggugcgcucucagcugaaaaacaaugccaaggaaaucgggaacggauguuuugaguucuaucacaagugcgacaauacauguauggaauccgucaaaaacggcaccuacgauuauccuaaguacagcgaggaagcuaaacucaauagagaggagauugacggggugaagcuggaaucuacacggaucuaucaaauucuugccaucuacuccacgguugcgagcucccuggugcucgucgugucucugggcgcuauuagcuuuuggaugugcuccaacggaucucugcagugccgcaucuguauuuga

SEQ ID NO: 195537 - RNA, 1701 nt, Artificial Sequence
  derived and/or modified CDS sequence (opt5) from hemagglutinin__InfluenzaA__ACX36503
augaaggccauccuggugguccuccuguacaccuucgcuacagccaacgcggacacgcuuugcauuggcuaucacgcuaauaacagcaccgauacaguugacaccauccuggagaaaaaugugacagugacccauuccgucaaccuccuggaagauaagcacaaugggaaacuuuguaagcugagaggaguggcuccccuccaucugggcaaaugcaacauugccggguggauccugggaaauccugagugugaaucucucagcacagccuccucuuggagcuacauuguugagaccuccucuagcgacaacggcacgugcuauccgggggauuuuaucgacuacgaagaacugcgggagcagcuuuccagcgugucuuccuucgaacgcuuugagaucuuccccaagaccagcucuuggccuaaucacgauuccaacaagggagucacagccgcuuguccccaugccggcgcgaaaucuuuuuauaagaaucugauuuggcucgugaaaaagggcaacagcuacccuaaacuguccaagagcuauaucaaugacaaggggaaagaaguucuugugcuguggggcauucaccaccccuccaccucugccgaucaacagagcaucuaccagaacgcugacgccuacgucuucgugggaacauccagauauagcaagaaauuuaagccugagauugcuauccggccgaaagugcgcgaucaggaggggagaaugaauuacuauuggacccucgucgaacccggagacaagauuacguucgaggccacaggcaaccugguugugccucgguacgcguuugccauggaacgcaacgcugggucuggaaucaucauuuccgauacccccgugcaugacugcaauacaaccugucaaaccccuaaaggcgccaucaacacaagccugcccuuccagaauauucacccgaucacgauuggcaagugcccuaaguaugucaaaucuaccaagcucagacuggcuacagggcuucggaacgugcccagcauccagucccgcggacuguuuggcgccaucgccggguucauugagggaggcuggaccgggaugguugacggaugguacggcuaucaucaccagaaugaacaaggcucuggguacgcugcggaucucaaaagcacacagaacgccaucgacgagauuaccaauaaggugaacuccgucaucgagaaaaugaauacgcaguuuacagcugugggaaaggaguucaaccaccuggagaagagaauugaaaaucuuaacaaaaagguugaugacggcuuccuggauaucuggaccuacaaugccgagcuccuggugcugcucgaaaacgagcggacccuggacuaucaugauagcaaugucaaaaaccuuuacgagaaggugcgcucucagcugaaaaacaauacaaaggaaaucgggaacggauguuuugaguucuaucacaagugcgacaauaccuguauggaauccgucaaaaacggcacauacgauuauccuaaguacagcgaggaagccaaacucaauagagaggagauugacggggugaagcuggaaucuacgcggaucuaucaaauucuugcuaucuacuccaccguugccagcucccuggugcucgucgugucucugggcgcgauuagcuuuuggaugugcuccaacggaucucugcagugccgcaucuguauuuga

SEQ ID NO: 195538 - RNA, 1701 nt, Artificial Sequence
  derived and/or modified CDS sequence (opt5) from hemagglutinin__InfluenzaA__ACX47367
augaaggccauccuggugguccuccuguacaccuucgcuacagccaacgcggacacgcuuugcauuggcuaucacgcuaauaacagcaccgauacaguugacaccgugcuggagaaaaaugugacagucacccauuccgugaaccuccuggaagauaagcacaaugggaaacuuuguaagcugagaggaguugcuccccuccaucugggcaaaugcaacaucgccggguggauucugggaaauccugagugugaaucucucagcacagccuccucuuggagcuacaucguggagaccuccucuagcgacaacggcacgugcuauccgggggauuuuauugacuacgaagaacugcgggagcagcuuuccagcgucucuuccuucgaacgcuuugagaucuuccccaagaccagcucuuggccuaaucacgaucccaacaagggagugacagccgcuuguccucaugccggcgcgaaauccuuuuauaagaaucugaucuggcucguuaaaaagggcaacagcuaccccaaacugucuaaguccuauauuaaugacaaggggaaagaagugcuuguccuguggggaauccaccacccuagcaccuccgccgaucaacagucucucuaccagaacgcugacgccuacguguucgugggcacaagcagauauuccaagaaauuuaagccggagauugcuauccggcccaaaguccgcgaucaggaggggagaaugaauuacuauuggacccugguuaagccuggagacaaaauuacguucgaagccacaggcaaccugguggugccccgguacgcguuugccauggagcgcaacgcugggagcggaaucauuaucucugauaccccuguccaugacugcaauacaaccugucaaacccccaagggcgccaucaacacaucccucccguuccagaauauucacccuaucacgauuggcaagugccccaaauaugugaaaagcaccaaacugagacuugcuacagggcugcggaacguuccuucuauccagagccgcggacucuuuggcgccauugccggguucaucgaaggaggcuggaccgggaugguggacggaugguacggcuaucaucaccagaaugagcaaggcuccggguacgcugcggaucugaagucuacacagaacgccaucgacgaaauuaccaauaaagucaacagcgugaucgagaagaugaauacgcaguuuacagcuguuggaaaggaguucaaccaccuugaaaagagaauugagaaucugaacaagaaaguggaugacggcuuccucgauaucuggaccuacaaugccgaacugcugguccuccuggagaacgaacggacccuugacuaucaugauuccaaugugaagaaccuguacgagaaaguccgcagccagcucaagaacaaugccaaggagauugggaacggauguuuugaguucuaucacaaaugcgacaauacauguauggagucugugaagaacggcaccuacgauuaucccaaauacuccgaagaggcuaagcugaauagagaagagaucgacgggguuaaacuugagagcacacggaucuaucaaauucuggccaucuacucuacgguggcguccagccucguccuggugguuucccugggcgcuauuucuuuuuggaugugcagcaacggaucccuccagugccgcaucuguauuuga

SEQ ID NO: 195539 - RNA, 1701 nt, Artificial Sequence
  derived and/or modified CDS sequence (opt5) from hemagglutinin__InfluenzaA__ACX47368
augaaggccauccuggugguccuccuguacaccuucgcuacagccaacgcggacacgcuuugcauuggcuaucacgcuaauaacagcaccgauacaguugacaccgugcuggagaagaaugugacagucacccauuccgugaaccuccuggaagauaagcacaaugggaaacuuuguaagcugagaggaguugcuccccuccaucugggcaaaugcaacaucgccggguggauucugggaaauccugagugugaaucucucagcacagccuccucuuggagcuacaucguggagaccuccucuagcgacaacggcacgugcuauccgggggauuuuauugacuacgaagaacugcgggagcagcuuuccagcgucucuuccuucgaacgcuuugagaucuuccccaagaccagcucuuggccuaaucacgaucccaacaagggagugacagccgcuuguccucaugccggcgcgaaauccuuuuauaagaaucugaucuggcucguuaaaaagggcaacagcuaccccaaacugucuaaguccuauauuaaugacaaggggaaagaagugcuuguccuguggggaauccaccacccuagcaccuccgccgaucaacagucucucuaccagaacgcugacgccuacguguucgugggcacaagcagauauuccaagaaauuuaagccggagauugcuauccggcccaaaguccgcgaucaggaggggagaaugaauuacuauuggacccugguugaaccuggagacaagauuacguucgaggccacaggcaaccugguggugccccgguacgcguuugccauggaacgcaacgcugggagcggaaucauuaucucugauaccccuguccaugacugcaauacaaccugucaaacccccaaaggcgccaucaacacaucccucccguuccagaauauucacccuaucacgauuggcaagugccccaaguaugugaaaagcaccaagcugagacuugcuacagggcugcggaacguuccuucuauccagagccgcggacucuuuggcgccauugccggguucaucgagggaggcuggaccgggaugguggacggaugguacggcuaucaucaccagaaugaacaaggcuccggguacgcugcggaucugaaaucuacacagaacgccaucgacgagauuaccaauaaggucaacagcgugaucgagaaaaugaauacgcaguuuacagcuguuggaaaggaguucaaccaccuugagaagagaauugaaaaucugaacaaaaagguggaugacggcuuccucgauaucuggaccuacaaugccgagcugcugguccuccuggaaaacgagcggacccuugacuaucaugauuccaaugugaaaaaccuguacgagaagguccgcagccagcucaaaaacaaugccaaggaaauugggaacggauguuuugaguucuaucacaagugcgacaauacauguauggaaucugugaaaaacggcaccuacgauuaucccaaguacuccgaggaagcuaaacugaauagagaggagaucgacgggguuaaacuugaaagcacacggaucuaucaaauucuggccaucuacucuacgguggcguccagccucguccuggugguuucccugggcgcuauuucuuuuuggaugugcagcaacggaucccuccagugccgcaucuguauuuga

SEQ ID NO: 195540 - RNA, 1701 nt, Artificial Sequence; identical to SEQ ID NO: 195539
  derived and/or modified CDS sequence (opt5) from hemagglutinin__InfluenzaA__ACX47369

SEQ ID NO: 195541 - RNA, 1701 nt, Artificial Sequence
  derived and/or modified CDS sequence (opt5) from hemagglutinin__InfluenzaA__ACX47370
augaaggccauccuggugguccuccuguacaccuucgcuacagccaacgcggacacgcuuugcauuggcuaucacgcuaauaacagcaccgauacaguugacaccgugcuggagaagaaugugacagucacccauuccgugaaccuccuggaagauaagcacaaugggaaacuuuguaagcugagaggaguugcuccccuccaucugggcaaaugcaacaucgccggguggauucugggaaauccugagugugaaucucucagcacagccuccucuuggagcuacaucguggagaccuccucuagcgacaacggcacgugcuauccgggggauuuuauugacuacgaagaacugcgggagcagcuuuccagcgucucuuccuucgaacgcuuugagaucuuccccaagaccagcucuuggccuaaucacgaucccaacaagggagugacagccgcuuguccucaugccggcgcgaaauccuuuuauaagaaucugaucuggcucguuaaaaagggcaacagcuaccccaaacugucuaaguccuauauuaaugacaaggggaaagaagugcuuguccuguggggaauccaccacccuagcaccuccgccgauagacaaucucucuaccagaacgcugacgccuacguguucgugggcacaagccgguauuccaagaaauuuaagccggagauugcuauccgccccaaagucagagaucaggaggggcggaugaauuacuauuggacccugguugaaccuggagacaagauuacguucgaggccacaggcaaccugguggugccccgcuacgcguuugccauggaaagaaacgcugggagcggaaucauuaucucugauaccccuguccaugacugcaauacaaccugucagacccccaaaggcgccaucaacacaucccucccguuccaaaauauucacccuaucacgauuggcaagugccccaaguaugugaaaagcaccaagcugcggcuugcuacagggcugcgcaacguuccuucuauccagagcagaggacucuuuggcgccauugccggguucaucgagggaggcuggaccgggaugguggacggaugguacggcuaucaucaccagaaugaacagggcuccggguacgcugcggaucugaaaucuacacaaaacgccaucgacgagauuaccaauaaggucaacagcgugaucgagaaaaugaauacgcaguuuacagcuguuggaaaggaguucaaccaccuugagaagcggauugaaaaucugaacaaaaagguggaugacggcuuccucgauaucuggaccuacaaugccgagcugcugguccuccuggaaaacgagcgcacccuugacuaucaugauuccaaugugaaaaaccuguacgagaaggucagaagccagcucaaaaacaaugccaaggaaauugggaacggauguuuugaguucuaucacaagugcgacaauacauguauggaaucugugaaaaacggcaccuacgauuaucccaaguacuccgaggaagcuaaacugaaucgggaggagaucgacgggguuaaacuugaaagcacacgcaucuaucagauucuggccaucuacucuacgguggcguccagccucguccuggugguuucccugggcgcuauuucuuuuuggaugugcagcaacggaucccuccaaugcagaaucuguauuuga

SEQ ID NO: 195542 - RNA, 1701 nt, Artificial Sequence; identical to SEQ ID NO: 195539
  derived and/or modified CDS sequence (opt5) from hemagglutinin__InfluenzaA__ACX47371

SEQ ID NO: 195543 - RNA, 1701 nt, Artificial Sequence; identical to SEQ ID NO: 195539
  derived and/or modified CDS sequence (opt5) from hemagglutinin__InfluenzaA__ACX47372

SEQ ID NO: 195544 - RNA, 1701 nt, Artificial Sequence; identical to SEQ ID NO: 195539
  derived and/or modified CDS sequence (opt5) from hemagglutinin__InfluenzaA__ACX47373

SEQ ID NO: 195545 - RNA, 1701 nt, Artificial Sequence; identical to SEQ ID NO: 195539
  derived and/or modified CDS sequence (opt5) from hemagglutinin__InfluenzaA__ACX47374

SEQ ID NO: 195546 - RNA, 1701 nt, Artificial Sequence
  derived and/or modified CDS sequence (opt5) from hemagglutinin__InfluenzaA__ACX47375
augaaggccauccuggugguccuccuguacaccuucgcuacagccaacgcggacacgcuuugcauuggcuaucacgcuaauaacagcaccgauacaguugacaccgugcuggagaaaaaugugacagucacccauuccgugaaccuccuggaagauaagcacaaugggaaacuuuguaagcugagaggaguugcuccccuccaucugggcaaaugcaacaucgccggguggauucugggaaauccugagugugaaucucucagcacagccuccucuuggagcuacaucguggagaccuccucuagcgacaacggcacgugcuauccgggggauuuuauugacuacgaagaacugcgggagcagcuuuccagcgucucuuccuucgaacgcuuugagaucuuccccaagaccagcucuuggccuaaucacgaucccaacaagggagugacagccgcuuguccucaugccggcgcgaaauccuuuuauaagaaucugaucuggcucguuaaaaagggcaacagcuaccccaaacugucuaaguccuauauuaaugacaaggggaaagaagugcuuguccuguggggaauccaccacccuagcaccuccgccgaucaacagucucucuaccagaacgcugacgccuacguguucgugggcacaagcagauauuccaagaaauuuaagccggagauugcuauccggcccaaaguccgcgaucaggaggggagaaugaauuacuauuggacccugguugaaccuggagacaagauuacguucgaggccacaggcaaccugguggugccccgguacgcguuugccauggaacgcaacgcugggagcggaaucauuaucucugauaccccuguccaugacugcaauacaaccugucaaacccccaacggcgccaucaauacaucccucccguuccagaacauucacccuaucacgauuggcaaaugccccaaguauguuaagagcaccaaacugagacuugcuacagggcugcggaaugugccuucuauccagagccgcggacucuuuggcgccauugccggguucaucgagggaggcuggaccgggaugguggacggaugguacggcuaucaucaccagaacgaacaaggcuccggguacgcugcggaucugaagucuacacagaaugccaucgacgagauuaccaacaaagucaauagcgugaucgagaagaugaacacgcaguuuacagcuguuggaaaagaguucaaucaccuugagaagagaauugaaaaccugaauaagaaaguggaugacggcuuccucgauaucuggaccuacaacgccgagcugcugguccuccuggaaaaugagcggacccuugacuaucaugauuccaacgugaagaaccuguacgagaaaguccgcagccagcucaagaauaacgccaaagaaauugggaauggauguuuugaguucuaucacaagugcgacaacacauguauggaaucugugaagaauggcaccuacgauuaucccaaauacuccgaggaagcuaagcugaacagagaggagaucgacgggguuaaacuugaaagcacacggaucuaucaaauucuggccaucuacucuacgguggcguccagccucguccuggugguuucccugggcgcuauuucuuuuuggaugugcagcaauggaucccuccagugccgcaucuguauuuga

SEQ ID NO: 195547 - RNA, 1701 nt, Artificial Sequence; identical to SEQ ID NO: 195539
  derived and/or modified CDS sequence (opt5) from hemagglutinin__InfluenzaA__ACX47376

SEQ ID NO: 195548 - RNA, 1701 nt, Artificial Sequence; identical to SEQ ID NO: 195539
  derived and/or modified CDS sequence (opt5) from hemagglutinin__InfluenzaA__ACX47377

SEQ ID NO: 195549 - RNA, 1701 nt, Artificial Sequence
  derived and/or modified CDS sequence (opt5) from hemagglutinin__InfluenzaA__ACX47380
augaaggccauccuggugguccuccuguacaccuucgcuacagccaacgcggacacgcuuugcauuggcuaucacgcuaauaacagcaccgauacaguugacaccgugcuggagaaaaaugugacagucacccauuccgugaaccuccuggaagauaagcacaaugggaaacuuuguaagcugagaggaguugcuccccuccaucugggcaaaugcaacaucgccggguggauucugggaaauccugagugugaaucucucagcacaaccuccucuuggagcuacaucguggagacguccucuagcgacaacgggaccugcuauccgggcgauuuuauugacuacgaagaacugcgggagcagcuuuccagcgucucuuccuucgaacgcuuugagaucuuccccaagacaagcucuuggccuaaucacgauuccaacaagggagugaccgccgccuguccccaugcuggcgccaagagcuuuuauaagaaucugaucuggcucguuaaaaagggcaacucuuacccuaaacuguccaagagcuauauuaaugacaaggggaaagaagugcuuguccuguggggaauccaccaccccuccacaucugcggaucaacagagccucuaccagaacgccgacgcuuacguguucgugggcaccuccagauauagcaagaaauuuaagccugagauugccauccggccgaaaguccgcgaucaggaggggagaaugaauuacuauuggacgcugguugaacccggagacaagauuacauucgaggcuaccggcaaccugguggugccucgguacgccuuugucauggaacgcaacgcggggucuggaaucauuaucuccgauacacccgugcaugacugcaauaccaccugucaaacaccuaaaggcgccaucaacacgagccuccccuuccagaauauucacccgaucaccauuggcaagugcccuaaguauguuaaaucuacaaagcugagacuugcuaccgggcugcggaacgugcccagcauccagucccgcggacucuuuggcgccauugcuggguucaucgagggaggcuggacagggauggucgacggaugguacggcuaucaucaccagaaugaacaaggcucuggguacgccgccgaucugaaaagcacccagaacgcuaucgacgagauuacgaauaaggugaacuccguuaucgagaaaaugaauacacaguuuaccgcggugggaaaggaguucaaccaccuugagaagagaauugaaaaucugaacaaaaaggucgaugacggcuuccucgauaucuggaccuacaaugccgagcugcuggugcuccuggaaaacgagcggacacuugacuaucaugauagcaaugucaaaaaccuguacgagaaggugcgcucucagcucaaaaacaaugcuaaggaaauugggaacggauguuuugaguucuaucacaagugcgacaauaccuguauggaauccguuaaaaacggcacauacgauuauccuaaguacagcgaggaagccaaacugaauagagaggagaucgacggggugaaacuugaaucuacgcggaucuaucaaauucuggccaucuacuccaccgucgcuagcucccucgugcugguugugucucugggcgccauuagcuuuuggaugugcuccaacggaucucuccagugccgcaucuguauuuga

SEQ ID NO: 195550 - RNA, 1701 nt, Artificial Sequence; identical to SEQ ID NO: 195549
  derived and/or modified CDS sequence (opt5) from hemagglutinin__InfluenzaA__ACX47381

SEQ ID NO: 195551 - RNA, 1701 nt, Artificial Sequence; identical to SEQ ID NO: 195549
  derived and/or modified CDS sequence (opt5) from hemagglutinin__InfluenzaA__ACX47382

SEQ ID NO: 195552 - RNA, 1701 nt, Artificial Sequence
  derived and/or modified CDS sequence (opt5) from hemagglutinin__InfluenzaA__ACX47383
augaaggccauccuggugguccuccuguacaccuucgcuacagccaacgcggacacgcuuugcauuggcuaucacgcuaauaacagcaccgauacaguugacaccgugcuggagaaaaaugugacagucacccauuccgugaaccuccuggaagauaagcacaaugggaaacuuuguaagcugagaggaguugcuccccuccaucugggcaaaugcaacaucgccggguggauucugggaaauccugagugugaaucucucagcacaaccuccucuuggagcuacaucguggagacguccucuagcgacaacgggaccugcuauccgggcgauuuuauugacuacgaagaacugcgggagcagcuuuccagcgucucuuccuucgaacgcuuugagaucuuccccaagacaagcucuuggccuaaucacgauuccaacaagggagugaccgccgccuguccccaugcuggcgccaagagcuuuuauaaaaaucugaucuggcucguuaaaaagggcaacucuuacccuaaacuguccaagagcuauauuaaugacaaggggaaagaagugcuuguccuguggggaauccaccaccccuccacaucugcggaucaacagagccucuaccagaacgccgacgcuuacguguucgugggcaccuccagauauagcaagaaauuuaagccugagauugccauccggccgaaaguccgcgaucaggaggggagaaugaauuacuauuggacgcugguugaacccggagacaagauuacauucgaggcuaccggcaaccugguggugccucgguacgccuuugcgauggaacgcaacgccgggucuggaaucauuaucuccgauacacccguccaugacugcaauaccaccugucaaacaccuaaaggcgcuaucaacacgagccuccccuuccagaauauucacccgaucaccauuggcaagugcccuaaguaugugaaaucuacaaagcugagacuugccaccgggcugcggaacguucccagcauccagucccgcggacucuuuggcgcuauugccggguucaucgagggaggcuggacagggaugguggacggaugguacggcuaucaucaccagaaugaacaaggcucuggguacgccgcugaucugaaaagcacccagaacgcgaucgacgagauuacgaauaaggucaacuccgugaucgagaaaaugaauacacaguuuaccgccguuggaaaggaguucaaccaccuugagaagagaauugaaaaucugaacaaaaagguggaugacggcuuccucgauaucuggaccuacaaugcugagcugcugguccuccuggaaaacgagcggacacuugacuaucaugauagcaaugugaaaaaccuguacgagaagguccgcucucagcucaaaaacaaugccaaggaaauugggaacggauguuuugaguucuaucacaagugcgacaauaccuguauggaauccgugaaaaacggcacauacgauuauccuaaguacagcgaggaagccaaacugaauagagagaagaucgacgggguuaaacuugagucuacgcggaucuaucaaauucuggcuaucuacuccaccguggccagcucccucguccuggugguuucucugggcgcgauuagcuuuuggaugugcuccaacggaucucuccagugccgcaucuguauuuga

SEQ ID NO: 195553 - RNA, 1701 nt, Artificial Sequence
  derived and/or modified CDS sequence (opt5) from hemagglutinin__InfluenzaA__ACX47384
augaaggccauccuggugguccuccuguacaccuucgcuacagccaacgcggacacgcuuugcauuggcuaucacgcuaauaacagcaccgauacaguugacaccgugcuggagaaaaaugugacagucacccauuccgugaaccuccuggaagauaagcacaaugggaaacuuuguaagcugagaggaguugcuccccuccaucugggcaaaugcaacaucgccggguggauucugggaaauccugagugugaaucucucagcacaaccuccucuuggagcuacaucguggagacguccucuagcgacaacgggaccugcuauccgggcgauuuuauugacuacgaagaacugcgggagcagcuuuccagcgucucuuccuucgaacgcuuugagaucuuccccaagacaagcucuuggccuaaucacgauuccaacaagggagugaccgccgccuguccccaugcuggcgccaagagcuuuuauaagaaucugaucuggcucguuaaaaagggcaacucuuacccuaaacuguccaagagcuauauuaaugacaaggggaaagaagugcuuguccuguggggaauccaccaccccuccacaucugcggaucaacagagccucuaccagaacgccgacgcuuacguguucgugggcaccuccagauauagcaagaaauuuaagccugagauugccauccggccgaaaguccgcgaucaggaggggagaaugaauuacuauuggacgcugguugaacccggagacaagauuacauucgaggcuaccggcaaccugguggugccucgguacgccuuugcgauggaacgcaacgccgggucuggaaucauuaucuccgauacacccguccaugacugcaauaccaccugucaaacaccuaaaggcgcuaucaacacgagccuccccuuccagaauauucacccgaucaccauuggcaagugcccuaaguaugugaaaucuacaaagcugagacuugccaccgggcugcggaacguucccagcauccagucccgcggacucuuuggcgcuauugccggguucaucgagggaggcuggacagggaugguggacggaugguacggcuaucaucaccagaaugaacaaggcucuggguacgccgcugaucugaaaagcacccagaacgcgaucgacgagauuacgaauaaggucaacuccgugaucgagaaaaugaauacacaguuuaccgccguuggaaaggaguucaaccaccuugagaagagaauugaaaaucugaacaaaaagguggaugacggcuuccucgauaucuggaccuacaaugcugagcugcugguccuccuggaaaacgagcggacacuugacuaucaugauagcaaugugaaaaaccuguacgagaagguccgcucucagcucaaaaacaaugccaaggaaauugggaacggauguuuugaguucuaucacaagugcgacaauaccuguauggaauccgugaaaaacggcacauacgauuauccuaaguacagcgaggaagccaaacugaauagagaggagaucgacgggguuaaacuugaaucuacgcggaucuaucaaauucuggcuaucuacuccaccguggccagcucccucguccuggugguuucucugggcgcgauuagcuuuuggaugugcuccaacggaucucuccagugccgcaucuguauuuga

SEQ ID NO: 195554 - RNA, 1701 nt, Artificial Sequence; identical to SEQ ID NO: 195553
  derived and/or modified CDS sequence (opt5) from hemagglutinin__InfluenzaA__ACX47385

SEQ ID NO: 195555 - RNA, 1701 nt, Artificial Sequence; identical to SEQ ID NO: 195553
  derived and/or modified CDS sequence (opt5) from hemagglutinin__InfluenzaA__ACX47387

SEQ ID NO: 195556 - RNA, 1701 nt, Artificial Sequence; identical to SEQ ID NO: 194741
  derived and/or modified CDS sequence (opt5) from hemagglutinin__InfluenzaA__ACX55834

SEQ ID NO: 195557 - RNA, 1701 nt, Artificial Sequence; identical to SEQ ID NO: 195539
  derived and/or modified CDS sequence (opt5) from hemagglutinin__InfluenzaA__ACX61574

SEQ ID NO: 195558 - RNA, 1701 nt, Artificial Sequence; identical to SEQ ID NO: 194741
  derived and/or modified CDS sequence (opt5) from hemagglutinin__InfluenzaA__ACX61575

SEQ ID NO: 195559 - RNA, 1701 nt, Artificial Sequence
  derived and/or modified CDS sequence (opt5) from hemagglutinin__InfluenzaA__ACX83577
augaaggccauccuggugguccuccuguacaccuucgcuacagccaacgcggacacgcuuugcauuggcuaucacgcuaauaacagcaccgauacaguugacaccgugcuggagaaaaaugugacagucacccauuccgugaaccuccuggaagauaagcacaaugggaaacuuuguaagcugagaggaguugcuccccuccaucugggcaaaugcaacaucgccggguggauucugggaaauccugagugugaaucuuuuagcacauccucuagcugguccuacaucguggagaccucuagcuccgacaacggcacgugcuauccgggggauuucauugacuacgaagaacuccgggagcagcugagcucugucuccagcuuugaacgcuucgagaucuuucccaagaccucuuccuggccuaaucacgauagcaacaagggagugacagccgccuguccccaugcuggcgccaaaucuuucuauaagaaucuuaucuggcugguuaaaaagggcaacuccuacccuaaacucagcaaguccuauauuaaugacaaggggaaagaagugcugguccuuuggggaauccaccaccccucuaccagcgcggaucaacagucccuguaccagaacgccgacgcuuacguguuugugggcacaagcagauauucuaagaaauucaagccugagauugccauccggccgaaaguccgcgggcaggagggaagaaugaauuacuauuggacccucguugaacccggcgauaagauuacguuugaggcuacagggaaccugguggugccucgguacgccuucgcgauggaacgcaacgccggauccggcaucauuaucagcgacacccccguccaugauugcaauacaaccugucaaaccccuaaaggcgcuaucaacacaucucugcccuuucagaauauucacccgaucacgauugggaagugcccuaaguaugugaaaagcaccaagcucagacuggccacaggacuucggaacguucccuccauccagucucgcggccuguucggggcuauugccggauuuaucgagggcggguggaccggaaugguggacggcugguacggcuaucaucaccagaaugaacaagggagcggauacgccgcugaccucaaauccacacagaacgcgaucgaugagauuaccaauaaggucaacagcgugaucgagaaaaugaauacgcaguucacagccguuggcaaggaguucaaccaccuggagaagagaauugaaaaucuuaacaaaaagguggacgauggguuucuggacaucuggaccuacaaugcugagcuccugguccugcucgaaaacgagcggacccuggauuaucaugacucuaaugugaaaaaccuuuacgagaagguccgcucccagcugaaaaacaaugccaaggaaauuggaaacggcuguuucgaguuuuaucacaagugcgauaauacauguauggaaagcgugaaaaacgggaccuacgacuauccuaaguacucugaggaagccaaacucaauagagaggagaucgauggcguuaagcuggaauccacacggaucuaucaaauucuugcuaucuacagcacgguggccuccucucugguccucgugguuagccugggagcgauuuccuucuggaugugcucuaacggcagccugcagugccgcaucuguauuuga

SEQ ID NO: 195560 - RNA, 1701 nt, Artificial Sequence
  derived and/or modified CDS sequence (opt5) from hemagglutinin__InfluenzaA__ACX94091
augaaggccauccuggugguccuccuguacaccuucgcuacagccaacgcggacacgcuuugcauuggcuaucacgcuaauaacagcaccgauacaguugacaccgugcuggagaagaaugugacagucacccauuccgugaaccuccuggaagauaagcacaaugggaaacuuuguaagcugagaggaguugcuccccuccaucugggcaaaugcaacaucgccggguggauucugggaaauccugagugugaaucucucagcacagccuccucuuggagcuacaucguggagaccuccucuagcgacaacggcacgugcuauccgggggauuuuauugacuacgaagaacugcgggagcagcuuuccagcgucucuuccuucgaacgcuuugagaucuuccccaagaccaucagcuggccuaaucacgauucuaacaagggagugacagccgcuuguccccaugccggcgcgaaauccuuuuauaagaaucugauuuggcucguuaaaaagggcaacagcuacccuaaacugucuaaguccuauaucaaugacaaggggaaagaagugcuuguccuguggggcauucaccaccccagcaccuccgccgaucaacagucucucuaccagaacgcugacgccuacguguucgugggaacaagcagauauuccaagaaauuuaagccugagaucgcuauucggccgaaaguccgcgaucaggaggggagaaugaauuacuauuggacccugguugaacccggagacaagaucacguucgaggccacaggcaaccugguggugccucgguacgcguuugccauggaacgcaacgcugggagcggaauuaucaucucugauacccccguccaugacugcaauacaaccugucaaaccccuaaaggcgccauuaacacaucccuccccuuccagaauauccacccgauuacgaucggcaagugcagcaaguaugugaaaucuaccaagcugagacuugcuacagggcugcggaacguuccuagcauucagucccgcggacucuuuggcgccaucgccggguucaucgagggaggcuggaccgggaugguggacggaugguacggcuaucaucaccagaaugaacaaggcucuggguacgcugcggaucugaaaagcacacagaacgccauugacgagaucaccaauaaggucaacuccgugauugagaaaaugaauacgcaguuuacagcuguuggaaaggaguucaaccaccuugagaagagaaucgaaaaucugaacaaaaagguggaugacggcuuccucgauauuuggaccuacaaugccgagcugcugguccuccuggaaaacgagcggacccuugacuaucaugauagcaaugugaaaaaccuguacgagaagguccgcucucagcucaaaaacaaugccaaggaaaucgggaacggauguuuugaguucuaucacaagugcgacaauacauguauggaauccgugaaaaacggcaccuacgauuaucccaaguacagcgaggaagcuaaacugaauagagaggagaucgacgggguuaaacuugaaucuacacggauuuaucaaauccuggccauuuacuccacgguggcgagcucccucguccuggugguuucucugggcgcuaucagcuuuuggaugugcuccaacggaucucuccagugccgcauuuguaucuga

SEQ ID NO: 195561 - RNA, 1701 nt, Artificial Sequence
  derived and/or modified CDS sequence (opt5) from hemagglutinin__InfluenzaA__ACY26192
augaaggccauccuggugguccuccuguacaccuucgcuacagccaacgcggacacgcuuugcauuggcuaucacgcuaauaacagcaccgauacaguugacaccgugcuggagaagaaugugacagucacccauuccgugaaccuccuggaagauaagcacaaugggaaacuuuguaagcugagaggaguugcuccccuccaucugggcaaaugcaacaucgccggguggauucugggaaauccugagugugaaucucucagcacagccuccucuuggagcuacaucguggagaccuccucuagcgacaacggcacgugcuauccgggggauuuuauugacuacgaagaacugcgggagcagcuuuccagcgucucuuccuucgaacgcuuugagaucuuccccaagaccagcucuuggccuaaucacgauuccaacaagggagugacagccgcuuguccccaugccggcgcgaaaucuuuuuauaagaaucugaucuggcucguuaaaaagggcaacagcuacccuaaacuguccaagagcuauauuaaugacaaggggaaagaagugcuuguccuguggggaauccaccaccccuccaccucugccgaucaacagagccucuaccagaacgcugacgccuacguguucgugggcacauccagauauagcaagaaauuuaagccugagauugcuauccggccgaaaguccgcgaucaggaggggagaaugaauuacuauuggacccugguugaacccggagacaagauuacguucgaggccacaggcaaccugguggugccucgguacgcguuugccauggaacgcaacgcugggucuggaaucauuaucuccgauacccccguccauaauugcaacacaaccugucaaaccccuaaaggcgccaucaauacaagccuccccuuccagaacauucacccgaucacgauuggcaagugcccuaaguaugugaaaucuaccaagcugagacuugcuacagggcugcggaauguucccagcauccagucccgcggacucuuuggcgccauugccggguucaucgagggaggcuggaccgggaugguggacggaugguacggcuaucaucaccagaacgaacaaggcucuggguacgcugcggaccugaaaagcacacaggaugccaucgacgagauuaccaauaaggucaacuccgugaucgagaaaaugaauacgcaguuuacagcuguuggaaaggaguucaaccaccuugagaagagaauugaaaaucugaacaaaaagguggaugacggcuuccucgauaucuggaccuacaaugccgagcugcugguccuccuggaaaacgagcggacccuugacuaucaugauagcaaugugaaaaaccuguacgagaagguccgcucucagcucaaaaacaaugccaaggaaauugggaacggauguuuugaguucuaucacaagugcgacaauacauguauggaauccgugaaaaacggcaccuacgauuauccuaaguacagcgaggaagcuaaacugaauagagaggagaucgacgggguuaaacuugaaucuacacggaucuaucaaauucuggccaucuacuccacgguggcgagcucccucguccuggugguuucucugggcgcuauuagcuuuuggaugugcuccaacggaucucuccagugccgcaucuguauuuga

SEQ ID NO: 195562 - RNA, 1701 nt, Artificial Sequence; identical to SEQ ID NO: 195310
  derived and/or modified CDS sequence (opt5) from hemagglutinin__InfluenzaA__ACY26202

SEQ ID NO: 195563 - RNA, 1701 nt, Artificial Sequence; identical to SEQ ID NO: 194741
  derived and/or modified CDS sequence (opt5) from hemagglutinin__InfluenzaA__ACY46103

SEQ ID NO: 195564 - RNA, 1701 nt, Artificial Sequence; identical to SEQ ID NO: 194741
  derived and/or modified CDS sequence (opt5) from hemagglutinin__InfluenzaA__ACY46113

SEQ ID NO: 195565 - RNA, 1701 nt, Artificial Sequence
  derived and/or modified CDS sequence (opt5) from hemagglutinin__InfluenzaA__ACY46123
augaaggccauccuggugguccuccuguacaccuucgcuacagccaacgcggacacgcuuugcauuggcuaucacgcuaauaacagcaccgauacaguugacaccgugcuggagaagaaugugacagucacccauuccgugaaccuccuggaagauaagcacaaugggaaacuuuguaagcugagaggaguugcuccccuccaucugggcaaaugcaacaucgccggguggauucugggaaauccugagugugaaucucucagcacagccuccucuuggagcuacaucguggagaccuccucuagcgacaacggcacgugcuauccgggggauuuuauugacuacgaagaacugcgggagcagcuuuccagcgucucuuccuucgaacgcuuugagaucuuccccaagaccagcucuuggccuaaucacgauuccaacaagggagugacagccgcuuguccccaugccggcgcgaaaucuuuuuauaagaaucugaucuggcucguuaaaaagggcaacagcuacccuaaacuguccaagagcuauauuaaugacaaggggaaagaagugcuuguccuguggggaauccaccaccccuccaccucugccgaucaacagagccucuaccagaacgcugacgccuacguguucgugggcacauccagauauagcaagaaauuuaagccugagauugcuauccggccgaaagucggggaucaggagggacgcaugaauuacuauuggacccugguugaacccggcgacaagauuacguucgaggccacagggaaccugguggugccuagauacgcguuugccauggaacggaacgcuggaucuggcaucauuaucuccgauacccccguccaugacugcaauacaaccugucaaaccccuaaaggcgccaucaacacaagccuccccuuccagaauauucacccgaucacgauugggaagugcccuaaguaugugaaaucuaccaagcugcgccuugcuacaggacugagaaacguucccagcauccagucccggggccucuuuggggccauugccggauucaucgagggcggguggaccggaaugguggacggcugguacggcuaucaucaccagaaugaacaagggucuggauacgcugcggaucugaaaagcacacagaacgccaucgacgagauuaccaauaaggucaacuccgugaucgagaaaaugaauacgcaguuuacagcuguuggcaaggaguucaaccaccuugagaagcgcauugaaaaucugaacaaaaagguggaugacggguuccucgauaucuggaccuacaaugccgagcugcugguccuccuggaaaacgagagaacccuugacuaucaugauagcaaugugaaaaaccuguacgagaagguccggucucagcucaaaaacaaugccaaggaaauuggaaacggcuguuuugaguucuaucacaagugcgacaauacauguauggaauccgugaaaaacgggaccuacgauuauccuaaguacagcgaggaagcuaaacugaaucgcgaggagaucgacggcguuaaacuugaaucuacaagaaucuaucaaauucuggccaucuacuccacgguggcgagcucccucguccuggugguuucucugggagcuauuagcuuuuggaugugcuccaacggcucucuccagugccggaucuguauuuga

SEQ ID NO: 195566 - RNA, 1701 nt, Artificial Sequence; identical to SEQ ID NO: 194741
  derived and/or modified CDS sequence (opt5) from hemagglutinin__InfluenzaA__ACY46133

SEQ ID NO: 195567 - RNA, 1701 nt, Artificial Sequence; identical to SEQ ID NO: 194741
  derived and/or modified CDS sequence (opt5) from hemagglutinin__InfluenzaA__ACY46163

SEQ ID NO: 195568 - RNA, 1701 nt, Artificial Sequence
  derived and/or modified CDS sequence (opt5) from hemagglutinin__InfluenzaA__ACY46173
augaaggccauccuggugguccuccuguacaccuucgcuacagccaacgcggacacgcuuugcauuggcuaucacgcuaauaacagcaccgauacaguugacaccgugcuggagaaaaaugugacagucacccauuccgugaaccuccuggaagauaagcacaaugggaaacuuuguaagcugagaggaguugcuccccuccaucugggcaaaugcaacaucgccggguggauucugggaaauccugagugugaaucucucagcacagccuccucuuggagcuacaucguggagaccuccucuagcgacaacggcacgugcuauccgggggauuuuauugacuacgaagaacugcgggagcagcuuuccagcgucucuuccuucgaacgcuuugagaucuuccccaagaccagcucuuggccuaaucacgauuccaacaagggagugacagccgcuuguccccaugccggcgcgaaaucuuuuuauaagaaucugaucuggcucguuaaaaagggcaacagcuacccuaaacuguccaagagcuauauuaaugacaaggggaaagaagugcuuguccuguggggaauccaccaccccuccaccucugccgaucaacagagccucuaccagaacgcugacgccuacguguucgugggcuccagcaaguauucuaaaaaguuuaaaccugagauugcuaucagaccgaagguccgggaucaggaggggcgcaugaauuacuauuggacacugguugaacccggagacaaaauuaccuucgaggccacgggcaaccugguggugccuagauacgcguuugccauggaacggaacgcuggguccggaaucauuaucagcgauacacccguccaugacugcaauaccacaugucaaaccccuaagggcgccaucaacaccucucuccccuuccagaauauucacccgaucacaauuggcaagugcccuaaauauguuaagagcacgaaacugcgccuugcuaccgggcugagaaacgugcccuccauccagucucggggacucuuuggcgccauugccggguucaucgagggaggcuggacagggaugguggacggaugguacggcuaucaucaccagaaugaacaaggcagcggguacgcugcggaucugaaguccacccagaacgccaucgacgagauuacaaauaaagucaacagcgugaucgagaagaugaauacccaguuuacggcuguuggaaaggaguucaaccaccuugagaaacgcauugaaaaucugaacaagaaaguggaugacggcuuccucgauaucuggacauacaaugccgagcugcugguccuccuggaaaacgagagaacccuugacuaucaugauucuaaugugaagaaccuguacgagaaaguccggucccagcucaagaacaaugccaaggaaauugggaacggauguuuugaguucuaucacaaaugcgacaauaccuguauggaaagcgugaagaacggcacauacgauuauccuaaauacucugaggaagcuaagcugaaucgcgaggagaucgacgggguuaaacuugaauccaccagaaucuaucaaauucuggccaucuacagcacaguggcguccucucucguccuggugguuagccugggcgcuauuuccuuuuggaugugcucuaacggaagccuccagugccggaucuguauuuga

SEQ ID NO: 195569 - RNA, 1701 nt, Artificial Sequence; identical to SEQ ID NO: 194741
  derived and/or modified CDS sequence (opt5) from hemagglutinin__InfluenzaA__ACY46213

SEQ ID NO: 195570 - RNA, 1701 nt, Artificial Sequence; identical to SEQ ID NO: 194741
  derived and/or modified CDS sequence (opt5) from hemagglutinin__InfluenzaA__ACY46223

SEQ ID NO: 195571 - RNA, 1701 nt, Artificial Sequence; identical to SEQ ID NO: 194741
  derived and/or modified CDS sequence (opt5) from hemagglutinin__InfluenzaA__ACY46233

SEQ ID NO: 195572 - RNA, 1701 nt, Artificial Sequence; identical to SEQ ID NO: 194741
  derived and/or modified CDS sequence (opt5) from hemagglutinin__InfluenzaA__ACY46243

SEQ ID NO: 195573 - RNA, 1701 nt, Artificial Sequence; identical to SEQ ID NO: 194741
  derived and/or modified CDS sequence (opt5) from hemagglutinin__InfluenzaA__ACY46253

SEQ ID NO: 195574 - RNA, 1701 nt, Artificial Sequence; identical to SEQ ID NO: 194741
  derived and/or modified CDS sequence (opt5) from hemagglutinin__InfluenzaA__ACY46263

SEQ ID NO: 195575 - RNA, 1701 nt, Artificial Sequence; identical to SEQ ID NO: 194741
  derived and/or modified CDS sequence (opt5) from hemagglutinin__InfluenzaA__ACY46273

SEQ ID NO: 195576 - RNA, 1701 nt, Artificial Sequence; identical to SEQ ID NO: 194741
  derived and/or modified CDS sequence (opt5) from hemagglutinin__InfluenzaA__ACY46283

SEQ ID NO: 195577 - RNA, 1701 nt, Artificial Sequence
  derived and/or modified CDS sequence (opt5) from hemagglutinin__InfluenzaA__ACY46293
augaaggccauccuggugguccuccuguacaccuucgcuacagccaacgcggacacgcuuugcauuggcuaucacgcuaauaacagcaccgauacaguugacaccgugcuggagaagaaugugacagucacccauuccgugaaccuccuggaagauaagcacaaugggaaacuuuguaagcugagaggaguugcuccccuccaucugggcaaaugcaacaucgccggguggauucugggaaauccugagugugaaucucucagcacagccuccucuuggagcuacaucguggagaccuccucuagcgacaacggcacgugcuauccgggggauuuuauugacuacgaagaacugcgggagcagcuuuccagcgucucuuccuucgaacgcuuugagaucuuccccaagaccagcucuuggccuaaucacgauuccaacaagggagugacagccgcuuguccccaugccggcgcgaaaucuuuuuauaagaaucugaucuggcucguuaaaaagggcaacagcuacccuaaacuguccaagagcuauauuaaugacaaggggaaagaagugcuuguccuguggggaauccaccaccccuccaccucugccgaucaacagagccucuaccagaacgcugacgccuacguguucgugggcacauccagauauagcaagaaauuuaagccugagauugcuauccggccgaaaguccgcgaucaggaggggagaaugaauuacuauuggacccugguugaacccggagacaagauuacguucgaggccacaggcaaccugguggugccucgguacgcguuugccauggaacgcaacgcugggucuggaaucauuaucuccgauacccccguccaugacugcaauacaaccugucaaaccccuaaaggcgccaucaacacaagccuccccuuccagaauauucacccgaucacgauuggcaagugcccuaaguaugugaaaucuaccaagcugagacuugcugccgggcugcggaacguucccagcauccagucccgcggacucuuuggcgccauugcuggguucaucgagggaggcuggacagggaugguggacggaugguacggcuaucaucaccagaaugaacaaggcucuggguacgcggccgaucugaaaagcacccagaacgcuaucgacgagauuacaaauaaggucaacuccgugaucgagaaaaugaauacccaguuuacggccguuggaaaggaguucaaccaccuugagaagagaauugaaaaucugaacaaaaagguggaugacggcuuccucgauaucuggacauacaaugccgagcugcugguccuccuggaaaacgagcggacccuugacuaucaugauagcaaugugaaaaaccuguacgagaagguccgcucucagcucaaaaacaaugcuaaggaaauugggaacggauguuuugaguucuaucacaagugcgacaauaccuguauggaauccgugaaaaacggcacauacgauuauccuaaguacagcgaggaagccaaacugaauagagaggagaucgacgggguuaaacuugaaucuacccggaucuaucaaauucuggcgaucuacuccacaguggcuagcucccucguccuggugguuucucugggcgccauuagcuuuuggaugugcuccaacggaucucuccagugccgcaucuguauuuga

SEQ ID NO: 195578 - RNA, 1701 nt, Artificial Sequence; identical to SEQ ID NO: 194741
  derived and/or modified CDS sequence (opt5) from hemagglutinin__InfluenzaA__ACY46303

SEQ ID NO: 195579 - RNA, 1701 nt, Artificial Sequence; identical to SEQ ID NO: 194741
  derived and/or modified CDS sequence (opt5) from hemagglutinin__InfluenzaA__ACY46313

SEQ ID NO: 195580 - RNA, 1701 nt, Artificial Sequence; identical to SEQ ID NO: 194741
  derived and/or modified CDS sequence (opt5) from hemagglutinin__InfluenzaA__ACY46323

SEQ ID NO: 195581 - RNA, 1701 nt, Artificial Sequence; identical to SEQ ID NO: 194741
  derived and/or modified CDS sequence (opt5) from hemagglutinin__InfluenzaA__ACY46343

SEQ ID NO: 195582 - RNA, 1701 nt, Artificial Sequence; identical to SEQ ID NO: 194741
  derived and/or modified CDS sequence (opt5) from hemagglutinin__InfluenzaA__ACY46353

SEQ ID NO: 195583 - RNA, 1701 nt, Artificial Sequence
  derived and/or modified CDS sequence (opt5) from hemagglutinin__InfluenzaA__ACY46373
augaaggccauccugauugugcuccuguacaccuucgcuacagccaacgcggacacgcuuugcaucggcuaucacgcuaauaacagcaccgauacagucgacaccguucuggagaagaaugugacagugacccauuccgucaaccuccuggaagauaagcacaaugggaaacuuuguaagcugagaggaguggcuccccuccaucugggcaaaugcaacauugccggguggauccugggaaauccugagugugaaucucucagcacagccuccucuuggagcuacauuguugagaccuccucuagcgacaacggcacgugcuauccgggggauuuuaucgacuacgaagaacugcgggagcagcuuuccagcgugucuuccuucgaacgcuuugagaucuuccccaagaccagcucuuggccuaaucacgauuccaacaagggagucacagccgcuuguccccaugccggcgcgaaaucuuuuuauaagaaucugauuuggcucgugaaaaagggcaacagcuacccuaaacuguccaagagcuauaucaaugacaaggggaaagaaguucuugugcuguggggcauucaccaccccuccaccucugccgaucaacagagccucuaccagaacgcugacgccuacgucuucgugggaacauccagauauagcaagaaauuuaagccugagaucgcuauucggccgaaagugcgcgaucaggaggggagaaugaauuacuauuggacccuggucgaacccggagacaagaucacguucgaggccacaggcaaccugguugugccucgguacgcguuugccauggaacgcaacgcugggucuggaauuaucaucuccgauacccccgugcaugacugcaauacaaccugucaaaccccuaaaggcgccauuaacacaagccuccccuuccagaauauccacccgauuacgaucggcaagugcccuaaguaugucaaaucuaccaagcugagacuugcuacagggcugcggaacgugcccagcauucagucccgcggacucuuuggcgccaucgccggguucaucgagggaggcuggaccgggaugguugacggaugguacggcuaucaucaccagaaugaacaaggcucuggguacgcugcggaucugaaaagcacacagaacgccauugacgagaucaccaauaaggugaacuccgucauugagaaaaugaauacgcaguuuacagcugugggaaaggaguucaaccaccuugagaagagaaucgaaaaucugaacaaaaagguugaugacggcuuccucgauauuuggaccuacaaugccgagcugcuggugcuccuggaaaacgagcggacccuugacuaucaugauagcaaugucaaaaaccuguacgagaaggugcgcucucagcucaaaaacaaugccaaggaaaucgggaacggauguuuugaguucuaucacaagugcgacaauacauguauggaauccgucaaaaacggcaccuacgauuauccuaaguacagcgaggaagcuaaacugaauagagaggagaucgacggggugaaacuugaaucuacacggauuuaucaaauccuggccauuuacuccacgguugcgagcucccucgugcuggucgugucucugggcgcuaucagcuuuuggaugugcuccaacggaucucuccagugccgcauuuguaucuga

SEQ ID NO: 195584 - RNA, 1701 nt, Artificial Sequence
  derived and/or modified CDS sequence (opt5) from hemagglutinin__InfluenzaA__ACY46383
augaaggccauccuggugguccuccuguacaccuucgcuacagccaacgcggacacgcuuugcauuggcuaucacgcuaauaacagcaccgauacaguugacaccgugcuggagaagaaugugacagucacccauuccgugaaccuccuggaagauaagcacaaugggaaacuuuguaagcugagaggaguugcuccccuccaucugggcaaaugcaacaucgccggguggauucugggaaauccugagugugaaucucucagcacagccuccucuuggagcuacaucguggagaccuccucuagcgacaacggcacgugcuauccgggggauuuuauugacuacgaagaacugcgggagcagcuuuccagcgucucuuccuucgaacgcuuugagaucuuccccaagaccagcucuuggccuaaucacgauuccaacaagggagugacagccgcuuguccccaugccggcgcgaaaucuuuuuauaagaaucugaucuggcucguuaaaaagggcaacagcuacccuaaacuguccaagagcuauauuaaugacaaggggaaagaagugcuuguccuguggggaauccaccaccccuccaccucugccgaucaacagagccucuaccagaacgcugacgccuacguguucgugggcuccagcagauauucuaagaaauuuaagccugagauugcuauccggccgaaaguccgcgaucaggaggggagaaugaauuacuauuggacacugguugaacccggagacaagauuaccuucgaggccacgggcaaccugguggugccucgguacgcguuugccauggaacgcaacgcuggguccggaaucauuaucagcgauacacccguccaugacugcaauaccacaugucaaaccccuaaaggcgccaucaacaccucucuccccuuccacaauauucauccgaucacaauuggcaagugcccuaaguaugugaaaagcacgaagcugagacuugcuaccgggcugcggaacguucccuccauccagucucgcggacucuuuggcgccauugccggguucaucgagggaggcuggacagggaugguggacggaugguacggcuaucaccaccagaaugaacagggcagcggguacgcugcggaucugaaauccacccaaaacgccaucgacgagauuacaaauaaggucaacagcgugaucgagaaaaugaauacccaguuuacggcuguuggaaaggaguucaaccaucuugagaagagaauugaaaaucugaacaaaaagguggaugacggcuuccucgauaucuggacauacaaugccgagcugcugguccuccuggaaaacgagcggacccuugacuaucacgauucuaaugugaaaaaccuguacgagaagguccgcucccagcucaaaaacaaugccaaggaaauugggaacggauguuuugaguucuaucauaagugcgacaauaccuguauggaaagcgugaaaaacggcacauacgauuauccuaaguacucugaggaagcuaaacugaauagagaggagaucgacgggguuaaacuugaauccacccggaucuaucagauucuggccaucuacagcacaguggcguccucucucguccuggugguuagccugggcgcuauuuccuuuuggaugugcucuaacggaagccuccaaugccgcaucuguauuuga

SEQ ID NO: 195585 - RNA, 1701 nt, Artificial Sequence; identical to SEQ ID NO: 194741
  derived and/or modified CDS sequence (opt5) from hemagglutinin__InfluenzaA__ACY46393

SEQ ID NO: 195586 - RNA, 1701 nt, Artificial Sequence; identical to SEQ ID NO: 194741
  derived and/or modified CDS sequence (opt5) from hemagglutinin__InfluenzaA__ACY46403

SEQ ID NO: 195587 - RNA, 1701 nt, Artificial Sequence; identical to SEQ ID NO: 194741
  derived and/or modified CDS sequence (opt5) from hemagglutinin__InfluenzaA__ACY46413

SEQ ID NO: 195588 - RNA, 1701 nt, Artificial Sequence; identical to SEQ ID NO: 194741
  derived and/or modified CDS sequence (opt5) from hemagglutinin__InfluenzaA__ACY46433

SEQ ID NO: 195589 - RNA, 1701 nt, Artificial Sequence; identical to SEQ ID NO: 194741
  derived and/or modified CDS sequence (opt5) from hemagglutinin__InfluenzaA__ACY46443

SEQ ID NO: 195590 - RNA, 1701 nt, Artificial Sequence; identical to SEQ ID NO: 194741
  derived and/or modified CDS sequence (opt5) from hemagglutinin__InfluenzaA__ACY46453

SEQ ID NO: 195591 - RNA, 1701 nt, Artificial Sequence
  derived and/or modified CDS sequence (opt5) from hemagglutinin__InfluenzaA__ACY46463
augaaggccauccugguggucaugcucuacaccuucgcuacagccaacgcggacacgcugugcauuggcuaucacgcuaauaacagcaccgauacaguugacaccgugcuugagaaaaaugugacagucacccauuccgugaaccugcucgaagauaagcacaaugggaaacuguguaaacuuagaggaguugcuccccugcaucucggcaagugcaacaucgccggguggauucugggaaauccugagugugaaucucugagcacagccuccucuuggagcuacaucguggagaccuccucuagcgacaacggcacgugcuauccgggggauuuuauugacuacgaagaacuccgggagcagcuguccagcgucucuuccuucgaacgcuuugagaucuuccccaagaccagcucuuggccuaaucacgauuccaacaagggagugacagccgcuuguccccaugccggcgcgaaaucuuuuuauaagaaucuuaucuggcugguuaaaaagggcaacagcuacccuaaacucuccaagagcuauauuaaugacaaggggaaagaagugcugguccuuuggggaauccaccaccccuccaccucugccgaucaacagagccuguaccagaacgcugacgccuacguguucgugggcacauccagauauagcaagaaauuuaagccugagauugcuauccggccgaaaguccgcgaucaggaggggagaaugaauuacuauuggacccucguugaacccggagacaagauuacguucgaggccacaggcaaccugguggugccucgguacgcguuugccaugguccgcaacgcugggucuggaaucauuaucuccgauacccccgugcaugacugcaauacaaccugucaaaccccuaaaggcgccaucaacacaagccugcccuuccagaauauucacccgaucacgauuggcaagugcccuaaguauguuaaaucuaccaagcucagacuggcuacagggcuucggaacgugcccagcauccagucccgcggacuguuuggcgccauugccggguucaucgaaggaggcuggaccgggauggucgacggaugguacggcuaucaucaccagaaugagcaaggcucuggguacgcugcggaucucaaaagcacacagaacgccaucgacgaaauuaccaauaaggugaacuccguuaucgagaaaaugaauacgcaguuuacagcugugggaaaggaguucaaccaccuggaaaagagaauugagaaucuuaacaaaaaggucgaugacggcuuccuggauaucuggaccuacaaugccgaacuccuggugcugcucgagaacgaacggacccuggacuaucaugauagcaaugucaaaaaccuuuacgagaaggugcgcucucagcugaaaaacaaugccaaggagauugggaacggauguuuugaguucuaucacaagugcgacaauacauguauggaguccguuaaaaacggcaccuacgauuauccuaaguacagcgaagaggcuaaacucaauagagaagagaucgacggggugaagcuggagucuacacggaucuaucaaauucuugccaucuacuccacggucgcgagcucccuggugcucguugugucucugggcgcuauuagcuuuuggaugugcuccaacggaucucugcagugccgcaucuguauuuga

SEQ ID NO: 195592 - RNA, 1701 nt, Artificial Sequence; identical to SEQ ID NO: 194741
  derived and/or modified CDS sequence (opt5) from hemagglutinin__InfluenzaA__ACY46473

SEQ ID NO: 195593 - RNA, 1701 nt, Artificial Sequence; identical to SEQ ID NO: 194728
  derived and/or modified CDS sequence (opt5) from hemagglutinin__InfluenzaA__ACY46493

SEQ ID NO: 195594 - RNA, 1701 nt, Artificial Sequence
  derived and/or modified CDS sequence (opt5) from hemagglutinin__InfluenzaA__ACY46513
augaaggccauccuggugguccuccuguacaccuucgcuacagccaacgcggacacgcuuugcauuggcuaucacgcuaauaacagcaccgauacaguugacaccgugcuggagaaaaaugugacagucacccauuccgugaaccuccuggaagauaagcacaaugggaaacuuuguaagcugagaggaguugcuccccuccaucugggcaaaugcaacaucgccggguggauucugggaaauccugagugugaaucucucagcacagccuccucuuggagcuacaucguggagaccuccucuagcgacaacggcacgugcuauccgggggauuuuauugacuacgaagaacugcgggagcagcuuuccagcgucucuuccuucgaacgcuuugagaucuuccccaagaccagcucuuggccuaaucacgauuccaacaagggagugacagccgcuuguccccaugccggcgcgaaaucuuuuuauaagaaucugaucuggcucguuaaaaagggcaacagcuacccuaaacuguccaagagcuauauuaaugacaaggggaaagaagugcuuguccuguggggaauccaccaccccuccaccucugccgaucaacagagccucuaccagaacgcugacgccuacguguucgugggcuccagcaaguauucuaaaaaguuuaaaccugagauugcuaucagaccgaagguccgggaucaggaggggcgcaugaauuacuauuggacacugguugaacccggagacaaaauuaccuucgaggccacgggcaaccugguggugccuagauacgcguuugccauggaacggaacgcuggguccggaaucauuaucagcgauacacccguccaugacugcaauaccacaugucaaaccccuaagggcgccaucaacaccucucuccccuuccagaauauucacccgaucacaauuggcaagugcccuaaauauguuaagagcacgaaacugcgccuugcuaccgggcugagaaacgugcccuccauccagucucggggacucuuuggcgccauugccggguucaucgagggaggcuggacagggaugguggacggaugguacggcuaucaucaccagaaugaacaaggcagcggguacgcugcggaucugaaguccacccagaacgccaucgacgagauuacaaauaaagucaacagcgugaucgagaagaugaauacccaguuuacggcuguuggaaaggaguucaaccaccuugagaaacgcauugaaaaucugaacaagaaaguggaugacggcuuccucgauaucuggacauacaaugccgagcugcugguccuccuggacaacgaaagaacccuugauuaucaugacucuaaugugaagaaccuguacgagaaaguccggucccagcucaagaacaaugccaaggagauugggaacggauguuuugaguucuaucacaaaugcgauaauaccuguauggaaagcgugaagaacggcacauacgacuauccuaaauacucugaagaggcuaagcugaaucgcgaagagaucgaugggguuaaacuugaguccaccagaaucuaucaaauucuggccaucuacagcacaguggcguccucucucguccuggugguuagccugggcgcuauuuccuuuuggaugugcucuaacggaagccuccagugccggaucuguauuuga

SEQ ID NO: 195595 - RNA, 1701 nt, Artificial Sequence; identical to SEQ ID NO: 194741
  derived and/or modified CDS sequence (opt5) from hemagglutinin__InfluenzaA__ACY46523

SEQ ID NO: 195596 - RNA, 1701 nt, Artificial Sequence; identical to SEQ ID NO: 194741
  derived and/or modified CDS sequence (opt5) from hemagglutinin__InfluenzaA__ACY46533

SEQ ID NO: 195597 - RNA, 1701 nt, Artificial Sequence; identical to SEQ ID NO: 194741
  derived and/or modified CDS sequence (opt5) from hemagglutinin__InfluenzaA__ACY46562

SEQ ID NO: 195598 - RNA, 1701 nt, Artificial Sequence; identical to SEQ ID NO: 194741
  derived and/or modified CDS sequence (opt5) from hemagglutinin__InfluenzaA__ACY46572

SEQ ID NO: 195599 - RNA, 1701 nt, Artificial Sequence; identical to SEQ ID NO: 194741
  derived and/or modified CDS sequence (opt5) from hemagglutinin__InfluenzaA__ACY46582

SEQ ID NO: 195600 - RNA, 1701 nt, Artificial Sequence; identical to SEQ ID NO: 194741
  derived and/or modified CDS sequence (opt5) from hemagglutinin__InfluenzaA__ACY46592

SEQ ID NO: 195601 - RNA, 1701 nt, Artificial Sequence; identical to SEQ ID NO: 194741
  derived and/or modified CDS sequence (opt5) from hemagglutinin__InfluenzaA__ACY46622

SEQ ID NO: 195602 - RNA, 1701 nt, Artificial Sequence
  derived and/or modified CDS sequence (opt5) from hemagglutinin__InfluenzaA__ACY46672
augaaggccauccuggugguccuccuguacaccuucgcuacagccaacgcggacacgcuuugcauuggcuaucacgcuaauaacagcaccgauacaguugacaccgugcuggagaagaaugugacagucacccauuccgugaaccuccuggaagauaagcacaaugggaaacuuuguaagcugagaggaguugcuccccuccaucugggcaaaugcaacaucgccggguggauucugggaaauccugagugugaaucucucagcacagccuccucuuggagcuacaucguggagaccuccucuagcgacaacggcacgugcuauccgggggauuuuauugacuacgaagaacugcgggagcagcuuuccagcgucucuuccuucgaacgcuuugagaucuuccccaagaccagcucuuggccuaaucacgauuccaacaagggagugacagccgcuuguccccaugccggcgcgaaaucuuuuuauaagaaucugaucuggcucguuaaaaagggcaacagcuacccuaaacuguccaagagcuauauuaaugacaaggggaaagaagugcuuguccuguggggaauccaccaccccuccaccucugccgaucaacagagccucuaccagaacgcugacgccuacguguucgugggcacauccagauauagcaagaaauuuaagccugagauugcuauccggccgaaaguccgcgaucaggaggggagaaugaauuacuauuggacccugguugaacccggagacaagauuacguucgaggccacaggcaaccugguggugccucgguacgcguuugccaugguccgcaacgcugggucuggaaucauuaucuccgauacccccgugcaugacugcaauacaaccugucaaaccccuaaaggcgccaucaacacaagccuccccuuccagaauauucacccgaucacgauuggcaagugcccuaaguauguuaaaucuaccaagcugagacuugcuacagggcugcggaacgugcccagcauccagucccgcggacucuuuggcgccauugccggguucaucgaaggaggcuggaccgggauggucgacggaugguacggcuaucaucaccagaaugagcaaggcucuggguacgcugcggaucugaaaagcacacagaacgccaucgacgaaauuaccaauaaggugaacuccguuaucgagaaaaugaauacgcaguuuacagcugugggaaaggaguucaaccaccuugaaaagagaauugagaaucugaacaaaaaggucgaugacggcuuccucgauaucuggaccuacaaugccgaacugcuggugcuccuggagaacgaacggacccuugacuaucaugauagcaaugucaaaaaccuguacgagaaggugcgcucucagcucaaaaacaaugccaaggagauugggaacggauguuuugaguucuaucacaagugcgacaauacauguauggaguccguuaaaaacggcaccuacgauuauccuaaguacagcgaagaggcuaaacugaauagagaagagaucgacggggugaaacuugagucuacacggaucuaucaaauucuggccaucuacuccacggucgcgagcucccucgugcugguugugucucugggcgcuauuagcuuuuggaugugcuccaacggaucucuccagugccgcaucuguauuuga

SEQ ID NO: 195603 - RNA, 1701 nt, Artificial Sequence; identical to SEQ ID NO: 194741
  derived and/or modified CDS sequence (opt5) from hemagglutinin__InfluenzaA__ACY46682

SEQ ID NO: 195604 - RNA, 1701 nt, Artificial Sequence; identical to SEQ ID NO: 194741
  derived and/or modified CDS sequence (opt5) from hemagglutinin__InfluenzaA__ACY46692

SEQ ID NO: 195605 - RNA, 1701 nt, Artificial Sequence; identical to SEQ ID NO: 194741
  derived and/or modified CDS sequence (opt5) from hemagglutinin__InfluenzaA__ACY46712

SEQ ID NO: 195606 - RNA, 1701 nt, Artificial Sequence
  derived and/or modified CDS sequence (opt5) from hemagglutinin__InfluenzaA__ACY46722
augaaggccauccuggugguccuccuguacaccuucgcuacagccaacgcggacacgcuuugcauuggcuaucacgcuaauaacagcaccgauacaguugacaccgugcuggagaagaaugugacagucacccauuccgugaaccuccuggaagauaagcacaaugggaaacuuuguaagcugagaggaguugcuccccuccaucugggcaaaugcaacaucgccggguggauucugggaaauccugagugugaaucucucagcacagccuccucuuggagcuacaucguggagaccuccucuagcgacaacggcacgugcuauccgggggauuuuauugacuacgaagaacugcgggagcagcuuuccagcgucucuuccuucgaacgcuuugagaucuuccccaagaccagcucuuggccuaaucacgauuccaacaagggagugacagccgcuuguccccaugccggcgcgaaaucuuuuuauaagaaucugaucuggcucguuaaaaagggcaacagcuacccuaaacuguccaagagcuauauuaaugacaaggggaaagaagugcuuguccuguggggaauccaccaccccuccaccucugccggccaacagagccucuaccagaacgcugaugccuacguguucguggggacauccagauauagcaagaaauuuaagccugagauugcuauccggccgaaaguccgcgaccaggagggaagaaugaauuacuauuggacccugguugaacccggcgauaagauuacguucgaggccacagggaaccugguggugccucgguacgcguuugccauggaacgcaacgcuggaucuggcaucauuaucuccgacacccccguccaugauugcaauacaaccugucaaaccccuaaaggcgccaucaacacaagccuccccuuccagaauauucacccgaucacgauugggaagugcccuaaguaugugaaaucuaccaagcugagacuugcuacaggacugcggaacguucccagcauccagucccgcggccucuuuggggccauugccggauucaucgagggcggguggaccggaaugguggacggcugguacggcuaucaucaccagaaugaacaagggucuggauacgcugcggaccugaaaagcacacagaacgccaucgaugagauuaccaauaaggucaacuccgugaucgagaaaaugaauacgcaguuuacagcuguuggcaaggaguucaaccaccuugagaagagaauugaaaaucugaacaaaaagguggacgauggguuccucgacaucuggaccuacaaugccgagcugcugguccuccuggaaaacgagcggacccuugauuaucaugacagcaaugugaaaaaccuguacgagaagguccgcucucagcucaaaaacaaugccaaggaaauuggaaacggcuguuuugaguucuaucacaagugcgauaauacauguauggaauccgugaaaaacgggaccuacgacuauccuaaguacagcgaggaagcuaaacugaauagagaggagaucgauggcguuaaacuugaaucuacacggaucuaucaaauucuggccaucuacuccacgguggcgagcucccucguccuggugguuucucugggagcuauuagcuuuuggaugugcuccaacggcucucuccagugccgcaucuguauuuga

SEQ ID NO: 195607 - RNA, 1701 nt, Artificial Sequence
  derived and/or modified CDS sequence (opt5) from hemagglutinin__InfluenzaA__ACY46742
augaaggccauccuggugguccuccuguacaccuucgcuacagccaacgcggacacgcuuugcauuggcuaucacgcuaauaacagcaccgauacaguugacaccgugcuggagaagaaugugacagucacccauuccgugaaccuccuggaagauaagcacaaugggaaacuuuguaagcugagaggaguugcuccccuccaucugggcaaaugcaacaucgccggguggauucugggaaauccugagugugaaucucucagcacagccuccucuuggagcuacaucguggagaccuccucuagcgacaacggcacgugcuauccggggaauuuuauugauuacgaagaacugcgggagcagcuuuccagcgucucuuccuucgaacgcuuugagaucuuccccaagaccagcucuuggccuaaccacgacuccaauaagggagugacagccgcuuguccccaugccggcgcgaaaucuuuuuauaagaaccugaucuggcucguuaaaaagggcaauagcuacccuaaacuguccaagagcuauauuaacgauaaggggaaagaagugcuuguccuguggggaauccaccaccccuccaccucugccgaccaacagagccucuaccagaaugcugaugccuacguguucgugggcacauccagauauagcaagaaauuuaagccugagauugcuauccggccgaaaguccgcgaccaggaggggagaaugaacuacuauuggacccugguugaacccggagauaagauuacguucgaggccacaggcaaccugguggugccucgguacgcguuugccauggaacgcaaugcugggucuggaaucauuaucuccgacacccccguccaugauugcaacacaaccugucaaaccccuaaaggcgccaucaauacaagccuccccuuccagaacauucacccgaucacgauuggcaagugcccuaaguaugugaaaucuaccaagcugagacuugcuacagggcugcggaauguucccagcauccagucccgcggacucuuuggcgccauugccggguucaucgagggaggcuggaccgggaugguggacggaugguacggcuaucaucaccagaacgaacaaggcucuggguacgcugcggaccugaaaagcacacagaaugccaucgaugagauuaccaacaaggucaauuccgugaucgagaaaaugaacacgcaguuuacagcuguuggaaaggaguucaaucaccuugagaagagaauugaaaaccugaauaaaaagguggacgauggcuuccucgacaucuggaccuacaacgccgagcugcugguccuccuggaaaaugagcggacccuugauuaucaugacagcaacgugaaaaaccuguacgagaagguccgcucucagcucaaaaauaacgccaaggaaauugggaauggauguuuugaguucuaucacaagugcgauaacacauguauggaauccgugaaaaauggcaccuacgacuauccuaaguacagcgaggaagcuaaacugaacagagaggagaucgaugggguuaaacuugaaucuacacggaucuaucaaauucuggccaucuacuccacgguggcgagcucccucguccuggugguuucucugggcgcuauuagcuuuuggaugugcuccaauggaucucuccagugccgcaucuguauuuga

SEQ ID NO: 195608 - RNA, 1701 nt, Artificial Sequence; identical to SEQ ID NO: 194741
  derived and/or modified CDS sequence (opt5) from hemagglutinin__InfluenzaA__ACY46762

SEQ ID NO: 195609 - RNA, 1701 nt, Artificial Sequence; identical to SEQ ID NO: 194741
  derived and/or modified CDS sequence (opt5) from hemagglutinin__InfluenzaA__ACY46772

SEQ ID NO: 195610 - RNA, 1701 nt, Artificial Sequence; identical to SEQ ID NO: 194741
  derived and/or modified CDS sequence (opt5) from hemagglutinin__InfluenzaA__ACY46903

SEQ ID NO: 195611 - RNA, 1701 nt, Artificial Sequence; identical to SEQ ID NO: 194767
  derived and/or modified CDS sequence (opt5) from hemagglutinin__InfluenzaA__ACY77534

SEQ ID NO: 195612 - RNA, 1698 nt, Artificial Sequence
  derived and/or modified CDS sequence (opt5) from hemagglutinin__InfluenzaA__ACY77544
augaaggccauccugguggucaugcucuacaccuucgcuacagccaacgcggacacgcugugcauuggcuaucacgcuaauaacagcaccgauacaguugacaccgugcuugagaaaaaugugacagucacccauuccgugaaccugcucgaagauaagcacaaugggaaacuguguaaacuuagaggaguugcuccccugcaucucggcaagugcaacaucgccggguggauucugggaaauccugagugugaaucucugagcacagccuccucuuggagcuacaucguggagaccuccucuagcgacaacggcacgugcuauccgggggauuuuauugacuacgaagaacuccgggagcagcuguccagcgucucuuccuucgaacgcuuugagaucuuccccaagaccagcucuuggccuaaucacgauuccaacaagggagugacagccgcuuguccccaugccggcgcgaaaucuuuuuauaagaaucuuaucuggcugguuaaaaagggcaacagcuacccuaaacucuccaagagcuauauuaaugacaaggggaaagaagugcugguccuuuggggaauccaccaccccuccaccucugccgaucaacagagccuguaccagaacgcugacgccuacguguucgugggcuccagcagauauucuaagaaauuuaagccugagauugcuauccggccgaaaguccgcgaucaggaggggagaaugaauuacuauuggacacucguugaacccggagacaagauuaccuucgaggccacgggcaaccugguggugccucgguacgcguuugccauggaacgcaacgcuggguccggaaucauuaucagcgauacaaccguccaugacugcaauacaaccugucaaacccccaaaggcgccaucaacacaucucugccuuuccagaauauucaccccaucacgauuggcaagugcccgaaguaugugaaaagcaccaagcucagacuggcuacagggcuucggaacguuccuuccauccagucucgcggacuguuuggcgccauugccggguucaucgagggaggcuggaccgggaugguggacggaugguacggcuaucaucaccagaaugaacaaggcagcggguacgcugcggaucucaaauccacacagaacgccaucgacgagauuaccaauaaggucaacagcgugaucgagaaaaugaauacgcaguuuacagcuguuggaaaggaguucaaccaccuggagaagagaauugaaaaucuuaacaaaaagguggaugacggcuuccuggauaucuggaccuacaaugccgagcuccugguccugcucgaaaacgagcggacccuggacuaucaugauucuaaugugaaaaaccuuuacgagaagguccgcucccagcugaaaaacaaugccaaggaaauugggaacggauguuuugaguucuaucacaagugcgacaauacauguauggaaagcgugaaaaacggcaccuacgauuaucccaaguacucugaggaagcuaaacucaauagagaggagaucgacgggguuaagcuggaauccacacggaucuaucaaauucuugccaucuacagcacgguggcguccucucugguccucgugguuagccugggcgcuauuuccuuuuggaugugcucuuggagccugcagugccgcaucuguauuuga

SEQ ID NO: 195613 - RNA, 1698 nt, Artificial Sequence
  derived and/or modified CDS sequence (opt5) from hemagglutinin__InfluenzaA__ACY77554
augaaggccauccuggugguccuccuguacaccuucgcuacagccaacgcggacacgcuuugcauuggcuaucacgcuaauaacagcaccgauacaguugacaccgugcuggagaagaaugugacagucacccauuccgugaaccuccuggaagauaagcacaaugggaaacuuuguaagcugagaggaguugcuccccuccaucugggcaaaugcaacaucgccggguggauucugggaaauccugagugugaaucucucagcacagccuccucuuggagcuacaucguggagaccuccucuagcgacaacggcacgugcuauccgggggauuuuauugacuacgaagaacugcgggagcagcuuuccagcgucucuuccuucgaacgcuuugagaucuuccccaagaccagcucuuggccuaaucacgauuccaacaagggagugacagccgcuuguccccaugccggcgcgaaaucuuuuuauaagaaucugaucuggcucguuaaaaagggcaacagcuacccuaaacuguccaagagcuauauuaaugacaaggggaaagaagugcuuguccuguggggaauccaccaccccuccaccucugccgaucaacagagccucuaccagaacgcugacgccuacguguucgugggcacauccagauauagcaagaaauuuaagccugagauugcuauccggccgaaaguccgcgaucaggaggggagaaugaauuacuauuggacccugguugaacccggagacaagauuacguucgaggccacaggcaaccugguggugccucgguacgcguuugccauggaacgcaacgcugggucuggaaucauuaucuccgauacccccguccauaauugcaacacaaccugucaaaccccuaaaggcgccaucaauacaagccuccccuuccagaacauucacccgaucacgauuggcaagugcccuaaguaugugaaaucuaccaagcugagacuugcuacagggcugcggaauguucccagcauccagucccgcggacucuuuggcgccauugccggguucaucgagggaggcuggaccgggaugguggacggaugguacggcuaucaucaccagaacgaacaaggcucuggguacgcugcggaccugaaaagcacacagaaugccaucgaugagauuaccaacaaggucaauuccgugaucgagaaaaugaacacgcaguuuacagcuguuggaaaggaguucaaucaccuugagaagagaauugaaaaccugaauaaaaagguggacgauggcuuccucgacaucuggaccuacaacgccgagcugcugguccuccuggaaaaugagcggacccuugauuaucaugacagcaacgugaaaaaccuguacgagaagguccgcucucagcucaaaaauaacgccaaggaaauugggaauggauguuuugaguucuaucacaagugcgauaacacauguauggaauccgugaaaaauggcaccuacgacuauccuaaguacagcgaggaagcuaaacugaacagagaggagaucgaugggguuaaacuugaaucuacacggaucuaucaaauucuggccaucuacuccacgguggcgagcucccucguccuggugguuucucugggcgcuauuagcuuuuggaugugcuccggacaucuccagugccgcaucuguauuuga

SEQ ID NO: 195614 - RNA, 1695 nt, Artificial Sequence
  derived and/or modified CDS sequence (opt5) from hemagglutinin__InfluenzaA__ACY77573
augaaggccauccuggugguccuccuguacaccuucgcuacagccaacgcggacacgcuuugcauuggcuaucacgcuaauaacagcaccgauacaguugacaccgugcuggagaaaaaugugacagucacccauuccgugaaccuccuggaagauaagcacaaugggaaacuuuguaagcugagaggaguugcuccccuccaucugggcaaaugcaacaucgccggguggauucugggaaauccugagugugaaucucucagcacagccuccucuuggagcuacaucguggagaccuccucuagcgacaacggcacgugcuauccgggggauuuuauugacuacgaggaacugcgggagcagcuuuccagcgucucuuccuucgaacgcuuugagaucuuccccaagaccagcucuuggccuaaucacgauuccaacaagggagugacagccgcuuguccccaugccggcgcgaaaucuuuuuauaagaaucugaucuggcucguuaaaaagggcaacagcuacccuaaacuguccaagagcuauauuaaugacaaggggaaagaagugcuuguccuguggggaauccaccaccccuccaccucugccgaucaacagagccucuaccagaacgcugacgccuacguguucgugggcuccagcagauauucuaagaaauuuaagccugagauugcuauccggccgaaaguccgcgaucaggaggggagaaugaauuacuauuggacacugguugaacccggagacaagauuaccuucgaggccacgggcaaccugguggugccucgguacgcguuugccauggaacgcaacgcuggguccggaaucauuaucagcgauacacccguccaugacugcaauaccacaugucaaaccccuaaaggcgccaucaacaccucucuccccuuccagaauauucacccgaucacaauuggcaagugcccuaaguaugugaaaagcacgaagcugagacuugcuaccgggcugcggaacguucccuccauccagucucgcggacucuuuggcgccauugccggguucaucgagggaggcuggacagggaugguggacggaugguacggcuaucaucaccagaaugaacaaggcagcggguacgcugcggaucugaaauccacccagagcgccaucgacgagauuacaaacaaggucaauucugugaucgagaaaaugaacacccagcuuacgggacaguguaaggaauuuaaucaccuggagaagagaauugaaaaccucaauaaaaagguugaugacggcuuccuggauaucuggacauacaacgcugagcugcucgugcugcuugaaaaugagcggacccuggacuaucaugauuccaacgucaaaaaucucuacgagaaggugcgcagccaacugaaaaacaacgccaaugaaauugggaacggaugcuucgaguuuuaucacaagugugacaauaccugcauggaaucugucaagaacggcacauacgauuauccuaaauacuccgaggaagccaaacuuaauagagaggagaucgacggggugaagcuggaaagcacccggaucuaucagauucucgcuaucuacuccacaguugccucuagccuggugcuggucgugucccucggcgcgauuucuuucuggaugugcagcggacauuccugucgcaucugcauuuga

SEQ ID NO: 195615 - RNA, 1701 nt, Artificial Sequence
  derived and/or modified CDS sequence (opt5) from hemagglutinin__InfluenzaA__ACY77593
augaaggccauccugguggucaugcucuacaccuucgcuacagccaacgcggacacgcugugcauuggcuaucacgcuaauaacagcaccgauacaguugacaccgugcuugagaaaaaugugacagucacccauuccgugaaccugcucgaagauaagcacaaugggaaacuguguaaacuuagaggaguugcuccccugcaucucggcaagugcaacaucgccggguggauucugggaaauccugagugugaaucucugagcacagccuccucuuggagcuacaucguggagaccuccucuagcgacaacggcacgugcuauccgggggauuuuauugacuacgaagaacuccgggagcagcuguccagcgucucuuccuucgaacgcuuugagaucuuccccaagaccagcucuuggccuaaucacgauuccaacaagggagugacagccgcuuguccccaugccggcgcgaaaucuuuuuauaagaaucuuaucuggcugguuaaaaagggcaacagcuacccuaaacucuccaagagcuauauuaaugacaaggggaaagaagugcugguccuuuggggaauccaccaccccuccaccucugccgaucaacagagccuguaccagaacgcugacgccuacguguucgugggcuccagcagauauucuaagaaauuuaagccugagauugcuauccggccgaaaguccgcgaucaggaggggagaaugaauuacuauuggacacucguugaacccggagacaagauuaccuucgaggccacgggcaaccugguggugccucgguacgcguuugccauggaacgcaacgcuggguccggaaucauuaucagcgauacaaccguccaugacugcaauacaaccugucaaacccccaaaggcgccaucaacacaucucugccuuuccagaauauucaccccaucacgauuggcaagugcccgaaguaugugaaaagcaccaagcucagacuggcuacagggcuucggaacguuccuuccauccagucucgcggacuguuuggcgccauugccggguucaucgagggaggcuggaccgggaugguggacggaugguacggcuaucaucaccagaaugaacaaggcagcggguacgcugcggaucucaaauccacacagaacgccaucgacgagauuaccaauaaggucaacagcgugaucgagaaaaugaauacgcaguuuacagcuguuggaaaggaguucaaccaccuggagaagagaauugaaaaucuuaacaaaaagguggaugacggcuuccuggauaucuggaccuacaaugccgagcuccugguccugcucgaaaacgagcggacccuggacuaucaugauucuaaugugaaaaaccuuuacgagaagguccgcucccagcugaaaaacaaugccaaggaaauugggaacggauguuuugaguucuaucacaagugcgacaauacauguauggaaagcgugaaaaacggcaccuacgauuaucccaaguacucugaggaagcuaaacucaauagagaggagaucgacgggguuaagcuggaauccacacggaucuaucaaauucuugccaucuacagcacgguggcguccucucugguccucgugguuagccugggcgcuauuuccuuuuggaugugcucuaacggaagccugcagugccgcaucuguauuuga

SEQ ID NO: 195616 - RNA, 1698 nt, Artificial Sequence
  derived and/or modified CDS sequence (opt5) from hemagglutinin__InfluenzaA__ACY77603
augaaggccauccugguggucaugcucuacaccuucgcuacagccaacgcggacacgcugugcauuggcuaucacgcuaauaacagcaccgauacaguugacaccgugcuugagaaaaaugugacagucacccauuccgugaaccugcucgaagauaagcacaaugggaaacuguguaaacuuagaggaguugcuccccugcaucucggcaagugcaacaucgccggguggauucugggaaauccugagugugaaucucugagcacagccuccucuuggagcuacaucguggagaccuccucuagcgacaacggcacgugcuauccgggggauuuuauugacuacgaagaacuccgggagcagcuguccagcgucucuuccuucgaacgcuuugagaucuuccccaagaccagcucuuggccuaaucacgauuccaacaagggagugacagccgcuuguccccaugccggcgcgaaaucuuuuuauaagaaucuuaucuggcugguuaaaaagggcaacagcuacccuaaacucuccaagagcuauauuaaugacaaggggaaagaagugcugguccuuuggggaauccaccaccccuccaccucugccgaucaacagagccuguaccagaacgcugacgccuacguguucgugggcuccagcagauauucuaagaaauuuaagccugagauugcuauccggccgaaaguccgcgaucaggaggggagaaugaauuacuauuggacacucguugaacccggagacaagauuaccuucgaggccacgggcaaccugguggugccucgguacgcguuugccauggaacgcaacgcuggguccggaaucauuaucagcgauacacccguccaugacugcaauaccacaugucaaaccccuaaaggcgccaucaacaccucucugcccuuccagaauauucacccgaucacaauuggcaagugcccuaaguaugugaaaagcacgaagcucagacuggcuaccgggcuucggaacguucccuccauccagucucgcggacuguuuggcgccauugccggguucaucgagggaggcuggacagggaugguggacggaugguacggcuaucaucaccagaaugaacaaggcagcggguacgcugcggaucucaaauccacccagaacgccaucgacgagauuacaaauaaggucaacagcgugaucgagaaaaugaauacccaguuuacggcuguuggaaaggaguucaaccaccuggagaagagaauugaaaaucuuaacaaaaagguggaugacggcuuccuggauaucuggacauacaaugccgagcuccugguccugcucgaaaacgagcggacccuggacuaucaugauucuaaugugaaaaaccuuuacgagaagguccgcucccagcugaaaaacaaugccaaggaaauugggaacggauguuuugaguucuaucacaagugcgacaauaccuguauggaaagcgugaaaaacggcacauacgauuauccuaaguacucugaggaagcuaaacucaauagagaggagaucgacgggguuaagcuggaauccacccggaucuaucaaauucuugccaucuacagcacaguggcguccucucugguccucgugguuagccugggcgcuauuuccuuuuggaugugcucuuggagccugcagugccgcaucuguauuuga

SEQ ID NO: 195617 - RNA, 1695 nt, Artificial Sequence
  derived and/or modified CDS sequence (opt5) from hemagglutinin__InfluenzaA__ACY77613
augaaggccauccuggugguccuccuguacaccuucgcuacagccaacgcggacacgcuuugcauuggcuaucacgcuaauaacagcaccgauacaguugacaccgugcuggagaagaaugugacagucacccauuccgugaaccuccuggaagauaagcacaaugggaaacuuuguaagcugagaggaguugcuccccuccaucugggcaaaugcaacaucgccggguggauucugggaaauccugagugugaaucucucagcacagccuccucuuggagcuacaucguggagaccuccucuagcgacaacggcacgugcuauccgggggauuuuauugacuacgaagaacugcgggagcagcuuuccagcgucucuuccuucgaacgcuuugagaucuuccccaagaccagcucuuggccuaaucacgauuccaacaagggagugacagccgcuuguccccaugccggcgcgaaaucuuuuuauaagaaucugaucuggcucguuaaaaagggcaacagcuacccuaaacuguccaagagcuauauuaaugacaaggggaaagaagugcuuguccuguggggaauccaccaccccuccaccucugccgaucaacagagccucuaccagaacgcugacgccuacguguucgugggcacauccagauauagcaagaaauuuaagccugagauugcuauccggccgaaaguccgcgaucaggaggggagaaugaauuacuauuggacccugguugaacccggagacaagauuacguucgaggccacaggcaaccugguggugccucgguacgcguuugccauggaacgcaacgcugggucuggaaucauuaucuccgauacccccguccaugacugcaauacaaccugucaaaccccuaaaggcgccaucaacacaagccuccccuuccagaauauucacccgaucacgauuggcaagugcccuaaguaugugaaaucuaccaagcugagacuugcuacagggcugcggaacguucccagcauccagucccgcggacucuuuggcgccauugccggguucaucgagggaggcuggaccgggaugguggacggaugguacggcuaucaucaccagaaugaacaaggcucuggguacgcugcggaucugaaaagcacacagaacgccaucgacgagauuaccaauaaggucaacuccgugaucgagaaaaugaauacgcaguuuacaggacaguguaaggaguucaaccaccuugagaagagaauugaaaaucugaacaaaaagguugaugacggcuuccucgauaucuggaccuacaaugcugagcugcuggugcuccuggaaaacgagcggacccuugacuaucaugauagcaaugucaaaaaccuguacgagaaggugcgcucucaacucaaaaacaaugccaaggaaauugggaacggaugcuuugaguucuaucacaagugugacaauacaugcauggaauccgucaaaaacggcaccuacgauuauccuaaguacagcgaggaagccaaacugaauagagaggagaucgacggggugaaacuugaaucuacacggaucuaucagauucuggcuaucuacuccacgguugccagcucccucgugcuggucgugucucugggcgcgauuagcuuuuggaugugcuccggacauucuugucgcaucugcauuuga

SEQ ID NO: 195618 - RNA, 1701 nt, Artificial Sequence; identical to SEQ ID NO: 194741
  derived and/or modified CDS sequence (opt5) from hemagglutinin__InfluenzaA__ACY77623

SEQ ID NO: 195619 - RNA, 1707 nt, Artificial Sequence
  derived and/or modified CDS sequence (opt5) from hemagglutinin__InfluenzaA__ACY77653
augaaggccauccuggugguccuccuguacaccuucgcuacagccaacgcggacacgcuuugcauuggcuaucacgcuaauaacagcaccgauacaguugacaccgugcuggagaaaaaugugacagucacccauuccgugaacauccucgaagauaagcacaaugggaaacuguguaaacuuagaggaguugcuccccugcaucucggcaagugcaacauugccggguggauccugggaaauccugagugugaaucucugagcacagccuccucuuggagcuacauuguggagaccuccucuagcgacaacggcacgugcuauccgggggauuuuaucgacuacgaagaacuccgggagcagcuguccagcgucucuuccuucgaacgcuuugagaucuuccccaagaccagcucuuggccuaaucacgauuccaacaagggagugacagccgcuuguccccaugccggcgcgaaaucuuuuuauaagaaucuuauuuggcugguuaaaaagggcaacagcuacccuaaacucuccaagagcuauaucaaugacaaggggaaagaagugcugguccuuuggggcauucaccaccccuccaccucugccgaucaacagagccuguaccagaacgcugacgccuacguguucgugggauccagcagauauucuaagaaauuuaagccugagaucgcuauucggccgaaaguccgcgaucaggaggggagaaugaauuacuauuggacacucguugaacccggagacaagaucaccuucgaggccacgggcaaccugguggugccucgguacgcguuugccauggaacgcaacgcuggguccggaauuaucaucagcgauacacccguccaugacugcaauaccacaugucaaaccccuaaaggcgccauuaacaccucucugcccuuccagaauauccacccgauuacaaucggcaagugcccuaaguaugugaaaagcacgaagcucagacuggcuaccgggcuucggaacguucccuccauucagucucgcggacuguuuggcgccaucgccggguucaucgagggaggcuggacagggaugguggacggaugguacggcuaucaucaccagaaugaacaaggcagcggguacgcugcggaucucaaauccacccagaacgccauugacgagaucacaaauaaggucaacagcgugauugagaaaaugaauacccaguuuacggcuguuggaaaggaguucaaccaccuggagaagagaaucgaaaaucuuaacaaaaagguggaugacggcuuccuggauauuuggacauacaaugccgagcuccugguccugcucgaaaacgagcggacccuggacuaucaugauucuaaugugaaaaaccuuuacgagaagguccgcucccagcugaaaaacaaugccaaggaaguggggaacggauguuuugaguucuaucacaagugcgacaauaccuguauggaaagcguuaaaaacggcacauacgauuauccuaaguacucugaggaagcuaaacucaauagagaggagaucgacggggugaagcuggaauccacccggaucuaucaaauucuugccaucuacagcacagucgcguccucucuggugcucguugugagccugggcgcuauuuccuuuuggaugugcucuggacauagcggcucccugcagugccgcaucuguauuuga

SEQ ID NO: 195620 - RNA, 1698 nt, Artificial Sequence
  derived and/or modified CDS sequence (opt5) from hemagglutinin__InfluenzaA__ACY77663
augaaggccauccuggugguccuccuguacaccuucgcuacagccaacgcggacacgcuuugcauuggcuaucacgcuaauaacagcaccgauacaguugacaccgugcuggagaagaaugugacagucacccauuccgugaaccuccuggaagauaagcacaaugggaaacuuuguaagcugagaggaguugcuccccuccaucugggcaaaugcaacaucgccggguggauucugggaaauccugagugugaaucucucagcacagccuccucuuggagcuacaucguggagaccuccucuagcgacaacggcacgugcuauccgggggauuuuauugacuacgaagaacugcgggagcagcuuuccagcgucucuuccuucgaacgcuuugagaucuuccccaagaccagcucuuggccuaaucacgauuccaacaagggagugacagccgcuuguccccaugccggcgcgaaaucuuuuuauaagaaucugaucuggcucguuaaaaagggcaacagcuacccuaaacuguccaagagcuauauuaaugacaaggggaaagaagugcuuguccuguggggaauccaccaccccuccaccucugccgaucaacagagccucuaccagaacgcugacgccuacguguucgugggcacauccagauauagcaagaaauuuaagccugagauugcuauccggccgaaaguccgcgaucaggaggggagaaugaauuacuauuggacccugguugaacccggagacaagauuacguucgaggccacaggcaaccugguggugccucgguacgcguuugccauggaacgcaacgcugggucuggaaucauuaucuccgauacccccguccaugacugcaauacaaccugucaaaccccuaaaggcgccaucaacacaagccuccccuuccagaauauucacccgaucacgauuggcaagugcccuaaguaugugaaaucuaccaagcugagacuugcuacagggcugcggaacguucccagcauccagucccgcggacucuuuggcgccauugccggguucaucgagggaggcuggaccgggaugguggacggaugguacggcuaucaucaccagaaugaacaaggcucuggguacgcugcggaucugaaaagcacacagaacgccaucgacgagauuaccaauaaggucaacuccgugaucgagaaaaugaauacgcaguuuacagcuguuggaaaggaguucaaccaccuugagaagagaauugaaaaucugaacaaaaagguggaugacggcuuccucgauaucuggaccuacaaugccgagcugcugguccuccuggaaaacgagcggacccuugacuaucaugauagcaaugugaaaaaccuguacgagaagguccgcucucagcucaaaaacaaugccaaggaaauugggaacggauguuuugaguucuaucacaagugcgacaauacauguauggaauccgugaaaaacggcaccuacgauuauccuaaguacagcgaggaagcuaaacugaauagagaggagaucgacgggguuaaacuugaaucuacacggaucuaucaaauucuggccaucuacuccacgguggcgagcucccucguccuggugguuucucugggcgcuauuagcuuuuggaugugcuccuggucucuccugugccgcaucuguauuuga

SEQ ID NO: 195621 - RNA, 1698 nt, Artificial Sequence
  derived and/or modified CDS sequence (opt5) from hemagglutinin__InfluenzaA__ACY77683
augaaggccauccuggugguccuccuguacaccuucgcuacagccaacgcggacacgcuuugcauuggcuaucacgcuaauaacagcaccgauacaguugacaccgugcuggagaaaaaugugacagucacccauuccgugaacauccucgaagauaagcacaaugggaaacuguguaaacuuagaggaguugcuccccugcaucucggcaagugcaacauugccggguggauccugggaaauccugagugugaaucucugagcacagccuccucuuggagcuacauuguggagaccuccucuagcgacaacggcacgugcuauccgggggauuuuaucgacuacgaagaacuccgggagcagcuguccagcgucucuuccuucgaacgcuuugagaucuuccccaagaccagcucuuggccuaaucacgauuccaacaagggagugacagccgcuuguccccaugccggcgcgaaaucuuuuuauaagaaucuuauuuggcugguuaaaaagggcaacagcuacccuaaacucuccaagagcuauaucaaugacaaggggaaagaagugcugguccuuuggggcauucaccaccccuccaccucugccgaucaacagagccuguaccagaacgcugacgccuacguguucgugggauccagcagauauucuaagaaauuuaagccugagaucgcuauucggccgaaaguccgcgaucaggaggggagaaugaauuacuauuggacacucguugaacccggagacaagaucaccuucgaggccacgggcaaccugguggugccucgguacgcguuugccauggaacgcaacgcuggguccggaauuaucaucagcgauacacccguccaugacugcaauaccacaugucaaaccccuaaaggcgccauuaacaccucucugcccuuccagaauauccacccgauuacaaucggcaagugcccuaaguaugugaaaagcacgaagcucagacuggcuaccgggcuucggaacguucccuccauucagucucgcggacuguuuggcgccaucgccggguucaucgagggaggcuggacagggaugguggacggaugguacggcuaucaucaccagaaugaacaaggcagcggguacgcugcggaucucaaauccacccagaacgccauugacgagaucacaaauaaggucaacagcgugauugagaaaaugaauacccaguuuacggcuguuggaaaggaguucaaccaccuggagaagagaaucgaaaaucuuaacaaaaagguggaugacggcuuccuggauauuuggacauacaaugccgagcuccugguccugcucgaaaacgagcggacccuggacuaucaugauucuaaugugaaaaaccuuuacgagaagguccgcucccagcugaaaaacaaugccaaggaaguggggaacggauguuuugaguucuaucacaagugcgacaauaccuguauggaaagcguuaaaaacggcacauacgauuauccuaaguacucugaggaagcuaaacucaauagagaggagaucgacggggugaagcuggaauccacccggaucuaucaaauucuugccaucuacagcacagucgcguccucucuggugcucguugugagccugggcgcuauuuccuuuuggaugugcucuuggagccugcagugccgcaucuguauuuga

SEQ ID NO: 195622 - RNA, 1698 nt, Artificial Sequence
  derived and/or modified CDS sequence (opt5) from hemagglutinin__InfluenzaA__ACY77693
augaaggccauccuggugguccuccuguacaccuucgcuacagccaacgcggacacgcuuugcauuggcuaucacgcuaauaacagcaccgauacaguugacaccgugcuggagaaaaaugugacagucacccauuccgugaacauccucgaagauaagcacaaugggaaacuguguaaacuuagaggaguugcuccccugcaucucggcaagugcaacauugccggguggauccugggaaauccugagugugaaucucugagcacagccuccucuuggagcuacauuguggagaccuccucuagcgacaacggcacgugcuauccgggggauuuuaucgacuacgaagaacuccgggagcagcuguccagcgucucuuccuucgaacgcuuugagaucuuccccaagaccagcucuuggccuaaucacgauuccaacaagggagugacagccgcuuguccccaugccggcgcgaaaucuuuuuauaagaaucuuauuuggcugguuaaaaagggcaacagcuacccuaaacucuccaagagcuauaucaaugacaaggggaaagaagugcugguccuuuggggcauucaccaccccuccaccucugccgaucaacagagccuguaccagaacgcugacgccuacguguucgugggauccagcagauauucuaagaaauuuaagccugagaucacaauucggccgaaaguccgcgaucaggaggggagaaugaauuacuauuggacccucguugaacccggagacaagaucacguucgaggcuacaggcaaccugguggugccucgguacgccuuugcgauggaacgcaacgccggguccggaauuaucaucagcgauacccccguccaugacugcaauacaaccugucaaaccccuaaaggcgcuauuaacacaucucugcccuuccagaauauccacccgauuacgaucggcaagugcccuaaguaugugaaaagcaccaagcucagacuggccacagggcuucggaacguucccuccauucagucucgcggacuguuuggcgcuaucgccggguucaucgagggaggcuggaccgggaugguggacggaugguacggcuaucaucaccagaaugaacaaggcagcggguacgccgcugaucucaaauccacacagaacgcgauugacgagaucaccaauaaggucaacagcgugauugagaaaaugaauacgcaguuuacaggacaguguaaggaguucaaccaccuggagaagagaaucgaaaaucuuaacaaaaagguugaugacggcuuccuggauauuuggaccuacaaugccgagcuccuggugcugcucgaaaacgagcggacccuggacuaucaugauucuaaugucaaaaaccuuuacgagaaggugcgcucccaacugaaaaacaaugcuaaggaagucgggaacggaugcuuugaguucuaucacaagugugacaauacaugcauggaaagcgugaaaaacggcaccuacgauuauccuaaguacucugaggaagccaaacucaauagagaggagaucgacgggguuaagcuggaauccacacggaucuaucagauucuugccaucuacagcacgguggcuuccucucugguccucgugguuagccugggcgccauuuccuuuuggaugugcucuuggagccugcagugucgcaucugcauuuga

SEQ ID NO: 195623 - RNA, 1698 nt, Artificial Sequence
  derived and/or modified CDS sequence (opt5) from hemagglutinin__InfluenzaA__ACY77703
augaaggccauccuggugguccuccuguacaccuucgcuacagccaacgcggacacgcuuugcauuggcuaucacgcuaauaacagcaccgauacaguugacaccgugcuggagaaaaaugugacagucacccauuccgugaacauccucgaagauaagcacaaugggaaacuguguaaacuuagaggaguugcuccccugcaucucggcaagugcaacauugccggguggauccugggaaauccugagugugaaucucugagcacagccuccucuuggagcuacauuguggagaccuccucuagcgacaacggcacgugcuauccgggggauuuuaucgacuacgaagaacuccgggagcagcuguccagcgucucuuccuucgaacgcuuugagaucuuccccaagaccagcucuuggccuaaucacgauuccaacaagggagugacagccgcuuguccccaugccggcgcgaaaucuuuuuauaagaaucuuauuuggcugguuaaaaagggcaacagcuacccuaaacucuccaagagcuauaucaaugacaaggggaaagaagugcugguccuuuggggcauucaccaccccuccaccucugccgaucaacagagccuguaccagaacgcugacgccuacguguucgugggauccagcagauauucuaagaaauuuaagccugagaucgcuauucggccgaaaguccgcgaucaggaggggagaaugaauuacuauuggacacucguugaacccggagacaagaucaccuucgaggccacgggcaaccugguggugccucgguacgcguuugccauggaacgcaacgcuggguccggaauuaucaucagcgauacacccguccaugacugcaauaccacaugucaaaccccuaaaggcgccauuaacaccucucugcccuuccagaauauccacccgauuacaaucggcaagugcccuaaguaugugaaaagcacgaagcucagacuggcuaccgggcuucggaacguucccuccauucagucucgcggacuguuuggcgccaucgccggguucaucgagggaggcuggacagggaugguggacggaugguacggcuaucaucaccagaaugaacaaggcagcggguacgcugcggaucucaaauccacccagaacgccauugacgagaucacaaauaaggucaacagcgugauugagaaaaugaauacccaguuuacgggacaguguaaggaguucaaccaccuggagaagagaaucgaaaaucuuaacaaaaagguugaugacggcuuccuggauauuuggacauacaaugcugagcuccuggugcugcucgaaaacgagcggacccuggacuaucaugauucuaaugucaaaaaccuuuacgagaaggugcgcucccaacugaaaaacaaugccaaggaagucgggaacggaugcuuugaguucuaucacaagugugacaauaccugcauggaaagcgugaaaaacggcacauacgauuauccuaaguacucugaggaagccaaacucaauagagaggagaucgacgggguuaagcuggaauccacccggaucuaucagauucuugcuaucuacagcacaguggccuccucucugguccucgugguuagccugggcgcgauuuccuuuuggaugugcucuuggagccugcagugucgcaucugcauuuga

SEQ ID NO: 195624 - RNA, 1698 nt, Artificial Sequence
  derived and/or modified CDS sequence (opt5) from hemagglutinin__InfluenzaA__ACY77713
augaaggccauccuggugguccuccuguacaccuucgcuacagccaacgcggacacgcuuugcauuggcuaucacgcuaauaacagcaccgauacaguugacaccgugcuggagaaaaaugugacagucacccauuccgugaacauccucgaagauaagcacaaugggaaacuguguaaacuuagaggaguugcuccccugcaucucggcaagugcaacauugccggguggauccugggaaauccugagugugaaucucugagcacagccuccucuuggagcuacauuguggagaccuccucuagcgacaacggcacgugcuauccgggggauuuuaucgacuacgaagaacuccgggagcagcuguccagcgucucuuccuucgaacgcuuugagaucuuccccaagaccagcucuuggccuaaucacgauuccaacaagggagugacagccgcuuguccccaugccggcgcgaaaucuuuuuauaagaaucuuauuuggcugguuaaaaagggcaacagcuacccuaaacucuccaagagcuauaucaaugacaaggggaaagaagugcugguccuuuggggcauucaccaccccuccaccucugccgaucaacagagccuguaccagaacgcugacgccuacguguucgugggauccagcagauauucuaagaaauuuaagccugagaucgcuauucggccgaaaguccgcgaucaggaggggagaaugaauuacuauuggacacucguugaacccggagacaagaucaccuucgaggccacgggcaaccugguggugccucgguacgcguuugccauggaacgcaacgcuggguccggaauuaucaucagcgauacacccguccaugacugcaauaccacaugucaaaccccuaaaggcgccauuaacaccucucugcccuuccagaauauccacccgauuacaaucggcaagugcccuaaguaugugaaaagcacgaagcucagacuggcuaccgggcuucggaacguucccuccauucagucucgcggacuguuuggcgccaucgccggguucaucgagggaggcuggacagggaugguggacggaugguacggcuaucaucaccagaaugaacaaggcagcggguacgcugcggaucucaaauccacccagaacgccauugacgagaucacaaauaaggucaacagcgugauugagaaaaugaauacccaguuuacgggacaguguaaggaguucaaccaccuggagaagagaaucgaaaaucuuaacaaaaagguugaugacggcuuccuggauauuuggacauacaaugcugagcuccuggugcugcucgaaaacgagcggacccuggacuaucaugauucuaaugucaaaaaccuuuacgagaaggugcgcucccaacugaaaaacaaugccaaggaagucgggaacggaugcuuugaguucuaucacaagugugacaauaccugcauggaaagcgugaaaaacggcacauacgauuauccuaaguacucugaggaagccaaacucaauagagaggagaucgacgggguuaagcuggaauccacccggaucuaucagauucuugcuaucuacagcacaguggccuccucucugguccucgugguuagccugggcgcgauuuccuuuuggaugugcucuggacaucugcagugucgcaucugcauuuga

SEQ ID NO: 195625 - RNA, 1701 nt, Artificial Sequence; identical to SEQ ID NO: 195054
  derived and/or modified CDS sequence (opt5) from hemagglutinin__InfluenzaA__ACY77723

SEQ ID NO: 195626 - RNA, 1695 nt, Artificial Sequence
  derived and/or modified CDS sequence (opt5) from hemagglutinin__InfluenzaA__ACY77733
augaaggccauccuggugguccuccuguacaccuucgcuacagccaacgcggacacgcuuugcauuggcuaucacgcuaauaacagcaccgauacaguugacaccgugcuggagaaaaaugugacagucacccauuccgugaacauccucgaagauaagcacaaugggaaacuguguaaacuuagaggaguugcuccccugcaucucggcaagugcaacauugccggguggauccugggaaauccugagugugaaucucugagcacagccuccucuuggagcuacauuguggagaccuccucuagcgacaacggcacgugcuauccgggggauuuuaucgacuacgaagaacuccgggagcagcuguccagcgucucuuccuucgaacgcuuugagaucuuccccaagaccagcucuuggccuaaucacgauuccaacaagggagugacagccgcuuguccccaugccggcgcgaaaucuuuuuauaagaaucuuauuuggcugguuaaaaccggcaacagcuacccuaagcucuccaaaagcuauaucaaugacaaggggaaggaagugcugguccuuuggggcauucaccaccccuccacaucugccgaucaacagagccuguaccagaacgcugacgccuacguguucgugggauccagcagauauucuaaaaaguuuaaaccugagaucgcuauucggccgaagguccgcgaucaggaggggagaaugaauuacuauuggacccucguugaacccggagacaaaaucacguucgaggccacaggcaaccugguggugccucgguacgcguuugccauggaacgcaacgcuggguccggaauuaucaucagcgauacccccguccaugacugcaauacaaccugucaaaccccuaagggcgccauuaacacaucucugcccuuccagaauauccacccgauuacgaucggcaaaugcccuaaguauguuaagagcaccaaacucagacuggcuacagggcuucggaacgugcccuccauucagucucgcggacuguuuggcgccaucgccggguucaucgagggaggcuggaccgggaugguggacggaugguacggcuaucaucaccagaaugaacaaggcagcggguacgcugcggaucucaaguccacacagaacgccauugacgagaucaccaauaaagucaacagcgugauugagaagaugaauacgcaguuuacagcuguuggaaaagaguucaaccaccuggagaagagaaucgaaaaucuuaacaagaaaguggaugacggcuuccuggauauuuggaccuacaaugccgagcuccugguccugcucgaaaacgagcggacccuggacuaucaugauucuaaugugaagaaccuuuacgagaaaguccgcucccagcugaagaacaaugccaaagaaaucgggaacggauguuuugaguucuaucacaagugcgacaauacauguauggaaagcgugaagaacggcaccuacgauuauccuaaauacucugaggaagcuaagcucaauagagaggagaucgacgggguuaaacuggaauccacacggauuuaucaaauccuugccauuuacagcacgguggcguccucucugguccucgugguuagccugggcgcuaucuccuuuuggaugugcucuggacugcagugccgcauuuguaucuga

SEQ ID NO: 195627 - RNA, 1698 nt, Artificial Sequence
  derived and/or modified CDS sequence (opt5) from hemagglutinin__InfluenzaA__ACY77743
augaaggccauccuggugguccuccuguacaccuucgcuacagccaacgcggacacgcuuugcauuggcuaucacgcuaauaacagcaccgauacaguugacaccgugcuggagaagaaugugacagucacccauuccgugaaccuccuggaagauaagcacaaugggaaacuuuguaagcugagaggaguugcuccccuccaucugggcaaaugcaacaucgccggguggauucugggaaauccugagugugaaucucucagcacagccuccucuuggagcuacaucguggagaccuccucuagcgacaacggcacgugcuauccgggggauuuuauugacuacgaagaacugcgggagcagcuuuccagcgucucuuccuucgaacgcuuugagaucuuccccaagaccagcucuuggccuaaucacgauuccaacaagggagugacagccgcuuguccccaugccggcgcgaaaucuuuuuauaagaaucugaucuggcucguuaaaaagggcaacagcuacccuaaacuguccaagagcuauauuaaugacaaggggaaagaagugcuuguccuguggggaauccaccaccccuccaccucugccgaucaacagagccucuaccagaacgcugacgccuacguguucgugggcuccagcagauauucuaagaaauuuaagccugagauugcuauccggccgaaaguccgcgaucaggaggggagaaugaauuacuauuggacacugguugaacccggagacaagauuaccuucgaggccacgggcaaccugguggugccucgguacgcguuugccauggaacgcaacgcuggguccggaaucauuaucagcgauacacccguccaugacugcaauaccacaugucaaaccccuaaaggcgccaucaacaccucucuccccuuccagaauauucacccgaucacaauuggcaagugcccuaaguaugugaaaagcacgaagcugagacuugcuaccgggcugcggaacguucccuccauccagucucgcggacucuuuggcgccauugccggguucaucgagggaggcuggacagggaugguggacggaugguacggcuaucaucaccagaaugaacaaggcagcggguacgcugcggaucugaaauccacccagaacgccaucgacgagauuacaaauaaggucaacagcgugaucgagaaaaugaauacccaguuuacggcuguuggaaaggaguucaaccaccuugagaagagaauugaaaaucugaacaaaaagguggaugacggcuuccucgauaucuggacauacaaugccgagcugcugguccuccuggaaaacgagcggacccuugacuaucaugauucuaaugugaaaaaccuguacgagaagguccgcucccagcucaaaaacaaugccaaggaaguggggaacggauguuuugaguucuaucacaagugcgacaauaccuguauggaaagcguuaaaaacggcacauacgauuauccuaaguacucugaggaagcuaaacugaauagagaggagauugacggggugaaacuugaauccacccggaucuaucaaauccuggccauuuacagcacagucgcguccucucucgugcugguugugagccugggcgcuaucuccuuuuggaugugcucuuggagccuccagugccgcauuuguaucuga

SEQ ID NO: 195628 - RNA, 1701 nt, Artificial Sequence; identical to SEQ ID NO: 194741
  derived and/or modified CDS sequence (opt5) from hemagglutinin__InfluenzaA__ACY77753

SEQ ID NO: 195629 - RNA, 1695 nt, Artificial Sequence
  derived and/or modified CDS sequence (opt5) from hemagglutinin__InfluenzaA__ACY77783
augaaggccauccuggugguccuccuguacaccuucgcuacagccaacgcggacacgcuuugcauuggcuaucacgcuaauaacagcaccgauacaguugacaccgugcuggagaagaaugugacagucacccauuccgugaaccuccugggggauaagcacaauggaaaacuuuguaagcugagaggcguugcuccccuccaucuggggaaaugcaacaucgccggauggauucugggcaauccugaaugugagucucucagcacagccuccucuuggagcuacaucguggaaaccuccucuagcgacaacgggacgugcuauccgggagauuuuauugacuacgaggaacugcgggagcagcuuuccagcgucucuuccuucgagcgcuuugaaaucuuccccaagaccagcucuuggccuaaucacgauuccgacaagggcgugacagccgcuuguccccaugccggcgcgaaaucuuuuuauaagaaccugaucuggcucguuaaaaaggggaauagcuacccuaaacuguccaagagcuauauuaacgauaagggaaaagaggugcuuguccuguggggcauccaccaccccuccaccucugccgaccaacagagccucuaccagaaugcugauacauacguguucguggggaccuccagauauagcaagaaauuuaagccugaaauugccauccggccgaaaguccgcgaccaggagggaagaaugaacuacuauuggacgcugguugagcccggcgauaagauuacauucgaagcuaccgggaaucugguggugccucgguacgccuuugcgauggagcgcaacgccggaucuggcaucauuaucuccgacacacccguccaugacugcaacaccaccugucaaacaccuaaaggcgcuaucaauacgagccuccccuuccagaacauucacccgaucaccauugggaagugcccuaaguaugugaaaucuacaaagcugagacuugccaccggacugcggaauguucccagcauccagucccgcggccucuuuggggcuauugccggauucaucgaaggcggguggacaggaaugguggauggcugguacggcuaucaucaccagaacgagcaagggucuggauacgccgcugaccugaaaagcacccagaaugcgaucgaugaaauuacgaacaaggucaauuccgugaucgagaaaaugaacacacaguuuaccgccguuggcaaggaguucaaucaccuugaaaagagaauugagaaccugaauaaaaagguggacgauggguuccucgacaucuggaccuacaacgcugaacugcugguccuccuggagaaugaacggacacuugauuaucaugacagcaacgugaaaucucuguacgagaagguccgcucccagcucaaaaauaacgccaaggagauuggaaacggcuguuuugaguucuaucacaagugcgauaauaccuguauggaaagcgugaaaaacgggacauacgacuauccuaaguacucugaagaggccaaacugaauagagaagagaucgauggcguuaaacuugaguccacgcggaucuaucaaauucuggcuaucuacagcaccguggccuccucucucguccuggugguuagccugggagcgauuuccuuuuggaugugcucuggccauagcugccgcaucuguauuuga

SEQ ID NO: 195630 - RNA, 1698 nt, Artificial Sequence
  derived and/or modified CDS sequence (opt5) from hemagglutinin__InfluenzaA__ACY77813
augaaggccauccuggugguccuccuguacaccuucgcuacagccaacgcggacacgcuuugcauuggcuaucacgcuaauaacagcaccgauacaguugacaccgugcuggagaagaaugugacagucacccauuccgugaaccuccuggaagauaagcacaaugggaaacuuuguaagcugagaggaguugcuccccuccaucugggcaaaugcaacaucgccggguggauucugggaaauccugagugugaaucucucagcacagccuccucuuggagcuacaucguggagaccuccucuagcgacaacggcacgugcuauccgggggauuuuauugacuacgaagaacugcgggagcagcuuuccagcgucucuuccuucgaacgcuuugagaucuuccccaagaccagcucuuggccuaaucacgauuccaacaagggagugacagccgcuuguccccaugccggcgcgaaaucuuuuuauaagaaucugaucuggcucguuaaaaagggcaacagcuacccuaaacuguccaagagcuauauuaaugacaaggggaaagaagugcuuguccuguggggaauccaccaccccuccaccucugccgaucaacagagccucuaccagaacgcugacgccuacguguucgugggcacauccagauauagcaagaaauuuaagccugagauugcuauccggccgaaaguccgcgaucaggaggggagaaugaauuacuauuggacccugguugaacccggagacaagauuacguucgaggccacaggcaaccugguggugccucgguacgcguuugccauggaacgcaacgcugggucuggaaucauuaucuccgauacccccguccaugacugcaauacaaccugucaaaccccuaaaggcgccaucaacacaagccuccccuuccagaauauucacccgaucacgauuggcaagugcccuaaguaugugaaaucuaccaagcugagacuugcuacagggcugcggaacguucccagcauccagucccgcggacucuuuggcgccauugccggguucaucgagggaggcuggaccgggaugguggacggaugguacggcuaucaucaccagaaugaacaaggcucuggguacgcugcggaucugaaaagcacacagaacgccaucgacgagauuaccaauaaggucaacuccgugaucgagaaaaugaauacgcaguuuacaggacaguguaaggaguucaaccaccuugagaagagaauugaaaaucugaacaaaaagguugaugacggcuuccucgauaucuggaccuacaaugcugagcugcuggugcuccuggaaaacgagcggacccuugacuaucaugauagcaaugucaaaaaccuguacgagaaggugcgcucucaacucaaaaacaaugccaaggaaauugggaacggaugcuuugaguucuaucacaagugugacaauacaugcauggaauccgucaaaaacggcaccuacgauuauccuaaguacagcgaggaagccaaacugaauagagaggagaucgacggggugaaacuugaaucuacacggaucuaucagauucuggcuaucuacuccacgguugccagcucccucgugcuggucgugucucugggcgcgauuagcuuuuggaugugcuccggacaucuccagugucgcaucugcauuuga

SEQ ID NO: 195631 - RNA, 1698 nt, Artificial Sequence
  derived and/or modified CDS sequence (opt5) from hemagglutinin__InfluenzaA__ACY77823
augaaggccauccuggugguccuccuguacaccuucgcuacagccaacgcggacacgcuuugcauuggcuaucacgcuaauaacagcaccgauacaguugacaccgugcuggagaagaaugugacagucacccauuccgugaaccuccuggaagauaagcacaaugggaaacuuuguaagcugagaggaguugcuccccuccaucugggcaaaugcaacaucgccggguggauucugggaaauccugagugugaaucucucagcacagccuccucuuggagcuacaucguggagaccuccucuagcgacaacggcacgugcuauccgggggauuuuauugacuacgaagaacugcgggagcagcuuuccagcgucucuuccuucgaacgcuuugagaucuuccccaagaccagcucuuggccuaaucacgauuccaacaagggagugacagccgcuuguccccaugccggcgcgaaaucuuuuuauaagaaucugaucuggcucguuaaaaagggcaacagcuacccuaaacuguccaagagcuauauuaaugacaaggggaaagaagugcuuguccuguggggaauccaccaccccuccaccucugccgaucaacagagccucuaccagaacgcugacgccuacguguucgugggcacauccagauauagcaagaaauuuaagccugagauugcuauccggccgaaaguccgcgaucaggaggggagaaugaauuacuauuggacccugguugaacccggagacaagauuacguucgaggccacaggcaaccugguggugccucgguacgcguuugccauggaacgcaacgcugggucuggaaucauuaucuccgauacccccguccaugacugcaauacaaccugucaaaccccuaaaggcgccaucaacacaagccuccccuuccagaauauucacccgaucacgauuggcaagugcccuaaguaugugaaaucuaccaagcugagacuugcuacagggcugcggaacguucccagcauccagucccgcggacucuuuggcgccauugccggguucaucgagggaggcuggaccgggaugguggacggaugguacggcuaucaucaccagaaugaacaaggcucuggguacgcugcggaucugaaaagcacacagaacgccaucgacgagauuaccaauaaggucaacuccgugaucgagaaaaugaauacgcaguuuacaggacaguguaaggaguucaaccaccuugagaagagaauugaaaaucugaacaaaaagguugaugacggcuuccucgauaucuggaccuacaaugcugagcugcuggugcuccuggaaaacgagcggacccuugacuaucaugauagcaaugucaaaaaccuguacgagaaggugcgcucucaacucaaaaacaaugccaaggaaauugggaacggaugcuuugaguucuaucacaagugugacaauacaugcauggaauccgucaaaaacggcaccuacgauuauccuaaguacagcgaggaagccaaacugaauagagaggagaucgacggggugaaacuugaaucuacacggaucuaucagauucuggcuaucuacuccacgguugccagcucccucgugcuggucgugucucugggcgcgauuagcuuuuggaugugcuccuggucucuccagugucgcaucugcauuuga

SEQ ID NO: 195632 - RNA, 1698 nt, Artificial Sequence
  derived and/or modified CDS sequence (opt5) from hemagglutinin__InfluenzaA__ACY77833
augaaggccauccuggugguccuccuguacaccuucgcuacagccaacgcggacacgcuuugcauuggcuaucacgcuaauaacagcaccgauacaguugacaccgugcuggagaagaaugugacagucacccauuccgugaaccuccuggaagauaagcacaaugggaaacuuuguaagcugagaggaguugcuccccuccaucugggcaaaugcaacaucgccggguggauucugggaaauccugagugugaaucucucagcacagccuccucuuggagcuacaucguggagaccuccucuagcgacaacggcacgugcuauccgggggauuuuauugacuacgaagaacugcgggagcagcuuuccagcgucucuuccuucgaacgcuuugagaucuuccccaagaccagcucuuggccuaaucacgauuccaacaagggagugacagccgcuuguccccaugccggcgcgaaaucuuuuuauaagaaucugaucuggcucguuaaaaagggcaacagcuacccuaaacuguccaagagcuauauuaaugacaaggggaaagaagugcuuguccuguggggaauccaccaccccuccaccucugccgaucaacagagccucuaccagaacgcugacgccuacguguucgugggcacauccagauauagcaagaaauuuaagccugagauugcuauccggccgaaaguccgcgaucaggaggggagaaugaauuacuauuggacccugguugaacccggagacaagauuacguucgaggccacaggcaaccugguggugccucgguacgcguuugccauggaacgcaacgcugggucuggaaucauuaucuccgauacccccguccaugacugcaauacaaccugucaaaccccuaaaggcgccaucaacacaagccuccccuuccagaauauucacccgaucacgauuggcaagugcccuaaguaugugaaaucuaccaagcugagacuugcuacagggcugcggaacguucccagcauccagucccgcggacucuuuggcgccauugccggguucaucgagggaggcuggaccgggaugguggacggaugguacggcuaucaucaccagaaugaacaaggcucuggguacgcugcggaucugaaaagcacacagaacgccaucgacgagauuaccaauaaggucaacuccgugaucgagaaaaugaauacgcaguuuacagcuguuggaaaggaguucaaccaccuugagaagagaauugaaaaucugaacaaaaagguggaugacggcuuccucgauaucuggaccuacaaugccgagcugcugguccuccuggaaaacgagcggacccuugacuaucaugauagcaaugugaaaaaccuguacgagaagguccgcucucagcucaaaaacaaugccaaggaaauugggaacggauguuuugaguucuaucacaagugcgacaauacauguauggaauccgugaaaaacggcaccuacgauuauccuaaguacagcgaggaagcuaaacugaauagagaggagaucgacgggguuaaacuugaaucuacacggaucuaucaaauucuggccaucuacuccacgguggcgagcucccucguccuggugguuucucugggcgcuauuagcuuuuggaugugcuccuggucucuccagugccgcaucuguauuuga

SEQ ID NO: 195633 - RNA, 1698 nt, Artificial Sequence
  derived and/or modified CDS sequence (opt5) from hemagglutinin__InfluenzaA__ACY77843
augaaggccauccugguggucaugcucuacaccuucgcuacagccaacgcggacacgcugugcauuggcuaucacgcuaauaacagcaccgauacaguugacaccgugcuugagaaaaaugugacagucacccauuccgugaaccugcucgaagauaagcacaaugggaaacuguguaaacuuagaggaguugcuccccugcaucucggcaagugcaacaucgccggguggauucugggaaauccugagugugaaucucugagcacagccuccucuuggagcuacaucguggagaccuccucuagcgacaacggcacgugcuauccgggggauuuuauugacuacgaagaacuccgggagcagcuguccagcgucucuuccuucgaacgcuuugagaucuuccccaagaccagcucuuggccuaaucacgauuccaacaagggagugacagccgcuuguccccaugccggcgcgaaaucuuuuuauaagaaucuuaucuggcugguuaaaaagggcaacagcuacccuaaacucuccaagagcuauauuaaugacaaggggaaagaagugcugguccuuuggggaauccaccaccccuccaccucugccgaucaacagagccuguaccagaacgcugacgccuacguguucgugggcuccagcagauauucuaagaaauuuaagccugagauugcuauccggccgaaaguccgcgaucaggaggggagaaugaauuacuauuggacacucguugaacccggagacaagauuaccuucgaggccacgggcaaccugguggugccucgguacgcguuugccauggaacgcaacgcuggguccggaaucauuaucagcgauacaaccguccaugacugcaauacaaccugucaaacccccaaaggcgccaucaacacaucucugccuuuccagaauauucaccccaucacgauuggcaagugcccgaaguaugugaaaagcaccaagcucagacuggcuacagggcuucggaacguuccuuccauccagucucgcggacuguuuggcgccauugccggguucaucgagggaggcuggaccgggaugguggacggaugguacggcuaucaucaccagaaugaacaaggcagcggguacgcugcggaucucaaauccacacagaacgccaucgacgagauuaccaauaaggucaacagcgugaucgagaaaaugaauacgcaguuuacagcuguuggaaaggaguucaaccaccuggagaagagaauugaaaaucuuaacaaaaagguggaugacggcuuccuggauaucuggaccuacaaugccgagcuccugguccugcucgaaaacgagcggacccuggacuaucaugauucuaaugugaaaaaccuuuacgagaagguccgcucccagcugaaaaacaaugccaaggaaauugggaacggauguuuugaguucuaucacaagugcgacaauacauguauggaaagcgugaaaaacggcaccuacgauuaucccaaguacucugaggaagcuaaacucaauagagaggagaucgacgggguuaagcuggaauccacacggaucuaucaaauucuugccaucuacagcacgguggcguccucucugguccucgugguuagccugggcgcuauuuccuuuuggaugugcucuggacaucugcagugccgcaucuguauuuga

SEQ ID NO: 195634 - RNA, 1701 nt, Artificial Sequence
  derived and/or modified CDS sequence (opt5) from hemagglutinin__InfluenzaA__ACY77863
augaaggccauccuggugguccuccuguacaccuucgcuacagccaacgcggacacgcuuugcauuggcuaucacgcuaauaacagcaccgauacaguugacaccgugcuggagaagaaugugacagucacccauuccgugaaccuccuggaagauaagcacaaugggaaacuuuguaagcugagaggaguugcuccccuccaucugggcaaaugcaacaucgccggguggauucugggaaauccugagugugaaucucucagcacagccuccucuuggagcuacaucguggagaccuccucuagcgacaacggcacgugcuauccgggggauuuuauugacuacgaagaacugcgggagcagcuuuccagcgucucuuccuucgaacgcuuugagaucuuccccaagaccagcucuuggccuaaucacgauuccaacaagggagugacagccgcuuguccccaugccggcgcgaaaucuuuuuauaagaaucugaucuggcucguuaaaaagggcaacagcuacccuaaacuguccaagagcuauauuaaugacaaggggaaagaagugcuuguccuguggggaauccaccaccccuccaccucugccgaucaacagagccucuaccagaacgcugacgccuacguguucgugggcacauccagauauagcaagaaauuuaagccugagauugcuauccggccgaaaguccgcgaucaggaggggagaaugaauuacuauuggacccugguugaacccggagacaagauuacguucgaggccacaggcaaccugguggugccucgguacgcguuugccauggaacgcaacgcugggucuggaaucauuaucuccgauacccccguccaugacugcaauacaaccugucaaaccccuaaaggcgccaucaacacaagccuccccuuccagaauauucacccgaucacgauuggcaagugcccuaaguaugugaaaucuaccaagcugagacuugcuacagggcugcggaacguucccagcauccagucccgcggacucuuuggcgccauugccggguucaucgagggaggcuggaccgggaugguggacggaugguacggcuaucaucaccagaaugaacaaggcucuggguacgcugcggaucugaaaagcacacagaacgccaucgacgagauuaccaauaaggucaacuccgugaucgagaaaaugaauacgcaguuuacagcuguuggaaaggaguucaaccaccuugagaagagaauugaaaaucugaacaaaaagguggaugacggcuuccucgauaucuggaccuacaaugccgagcugcugguccuccuggaaaacgagcggacccuugacuaucaugauagcaaugugaaaaaccuguacgagaagguccgcucucagcucaaaaacaaugccaaggaaauugggaacggauguuuugaguucuaucacaagugcgacaauacauguauggaauccgugaaaaacggcaccuacgauuauccuaaguacagcgaggaagcuaaacugaauagagaggagaucgacgggguuaaacuugaaucuacacggaucuaucaaauucuggccaucuacuccacgguggcgagcucccucguccuggugguuucucugggcgcuauuagcuuuuggaugugcuccggaaugucucuccagugccgcaucuguauuuga

SEQ ID NO: 195635 - RNA, 1701 nt, Artificial Sequence; identical to SEQ ID NO: 194728
  derived and/or modified CDS sequence (opt5) from hemagglutinin__InfluenzaA__ACY77874

SEQ ID NO: 195636 - RNA, 1701 nt, Artificial Sequence; identical to SEQ ID NO: 194728
  derived and/or modified CDS sequence (opt5) from hemagglutinin__InfluenzaA__ACY77884

SEQ ID NO: 195637 - RNA, 1701 nt, Artificial Sequence
  derived and/or modified CDS sequence (opt5) from hemagglutinin__InfluenzaA__ACY77904
augaaggccauccuggugguccuccuguacaccuucgcuacagccaacgcggacacgcuuugcauuggcuaucacgcuaauaacagcaccgauacaguugacaccgugcuggagaaaaaugugacagucacccauuccgugaaccuccuggaagauaagcacaaugggaaacuuuguaagcugagaggaguugcuccccuccaucugggcaaaugcaacaucgccggguggauucugggaaauccugagugugaaucucucagcacagccuccucuuggagcuacaucguggagaccuccucuagcgacaacggcacgugcuauccgggggauuuuauugacuacgaagaacugcgggagcagcuuuccagcgucucuuccuucgaacgcuuugagaucuuccccaagaccagcucuuggccuaaucacgauuccaacaagggagugacagccgcuuguccccaugccggcgcgaaaucuuuuuauaagaaucugaucuggcucguuaaaaagggcaacagcuacccuaaacuguccaagagcuauauuaaugacaaggggaaagaagugcuuguccuguggggaauccaccaccccuccaccucugccgaucaacagagccucuaccagaacgcugacgccuacguguucgugggcuccagcaaguauucuaaaaaguuuaaaccugagauugcuaucagaccgaagguccgggaucaggaggggcgcaugaauuacuauuggacacugguugaacccggagacaaaauuaccuucgaggccacgggcaaccugguggugccuagauacgcguuugccauggaacggaacgcuggguccggaaucauuaucagcgauacacccguccaugacugcaauaccacaugucaaaccccuaagggcgccaucaacaccucucuccccuuccagaauauucacccgaucacaauuggcaagugcccuaaacauguuaagagcacgaaacugcgccuugcuaccgggcugagaaacgugcccuccauccagucucggggacucuuuggcgccauugccggguucaucgagggaggcuggacagggaugguggacggaugguauggcuaccaccaccagaaugaacaaggcagcggguaugcugcggaucugaaguccacccagaacgccaucgacgagauuacaaauaaagucaacagcgugaucgagaagaugaauacccaguuuacggcuguuggaaaggaguucaaccaucuugagaaacgcauugaaaaucugaacaagaaaguggaugacggcuuccucgauaucuggacauacaaugccgagcugcugguccuccuggaaaacgagagaacccuugacuaccacgauucuaaugugaagaaccuguaugagaaaguccggucccagcucaagaacaaugccaaggaaauugggaacggauguuuugaguucuaccauaaaugcgacaauaccuguauggaaagcgugaagaacggcacauaugauuacccuaaauauucugaggaagcuaagcugaaucgcgaggagaucgacgggguuaaacuugaauccaccagaaucuaccaaauucuggccaucuauagcacaguggcguccucucucguccuggugguuagccugggcgcuauuuccuuuuggaugugcucuaacggaagccuccagugccggaucuguauuuga

SEQ ID NO: 195638 - RNA, 1701 nt, Artificial Sequence; identical to SEQ ID NO: 194921
  derived and/or modified CDS sequence (opt5) from hemagglutinin__InfluenzaA__ACY77914

SEQ ID NO: 195639 - RNA, 1701 nt, Artificial Sequence
  derived and/or modified CDS sequence (opt5) from hemagglutinin__InfluenzaA__ACY77924
augaaggccauccuggugguccuccuguacaccuucgcuacagccaacgcggacacgcuuugcauuggcuaucacgcuaauaacagcaccgauacaguugacaccgugcuggagaagaaugugacagucacccauuccgugaaccuccuggaagauaagcacgacgggaaacuuuguaagcugagaggaguugcuccccuccaucugggcaaaugcaauaucgccggguggauucugggaaacccugagugugaaucucucagcacagccuccucuuggagcuacaucguggagaccuccucuagcgauaauggcacgugcuauccgggggacuuuauugauuacgaagaacugcgggagcagcuuuccagcgucucuuccuucgaacgcuuugagaucuuccccaagaccagcucuuggccuaaccacgacuccaauaagggagugacagccgcuuguccccaugccggcgcgaaaucuuuuuauaagaaccugaucuggcucguuaaaaagggcaauagcuacccuaaacuguccaagagcuauauuaacgauaaggggaaagaagugcuuguccuguggggaauccaccaccccuccaccucugccgaccaacagagccucuaccagaaugcugaugccuacguguucgugggcacauccagauauagcaagaaauuuaagccugagauugcuauccggccgaaaguccgcgaccaggaggggagaaugaacuacuauuggacccugguugaacccggagauaagauuacguucgaggccacaggcaaucugguggugccucgguacgcguuugccauggaacgcaacgcugggucuggaaucauuaucuccgacacccccguccaugacugcaacacaaccugucaaaccccuaaaggcgccaucaauacaagccuccccuuccagaacauucacccgaucacgauuggcaagugcccuaaguaugugaaaucuaccaagcugagacuugcuacagggcugcggaauguucccagcauccagucccgcggacucuuuggcgccauugccggguucaucgagggaggcuggaccgggaugguggauggaugguacggcuaucaucaccagaacgaacaaggcucuggguacgcugcggaccugaaaagcacacagaaugccaucgaugagauuaccaacaaggucaauuccgugaucgagaaaaugaacacgcaguuuacagcuguuggaaaggaguucaaucaccuugagaagagaauugaaaaccugaauaaaaagguggacgauggcuuccucgacaucuggaccuacaacgccgagcugcugguccuccuggaaaaugagcggacccuugauuaucaugacagcaacgugaaaaaucuguacgagaagguccgcucucagcucaaaaacaacgccaaggaaauugggaauggauguuuugaguucuaucacaagugcgauaacacauguauggaauccgugaaaaauggcaccuacgacuauccuaaguacagcgaggaagcuaaacugaacagagaggagaucgaugggguuaaacuugaaucuacacggaucuaucaaauucuggccaucuacuccacgguggcgagcucccucguccuggugguuucucugggcgcuauuagcuuuuggaugugcuccaauggaucucuccagugccgcaucuguauuuga

SEQ ID NO: 195640 - RNA, 1701 nt, Artificial Sequence; identical to SEQ ID NO: 195489
  derived and/or modified CDS sequence (opt5) from hemagglutinin__InfluenzaA__ACY77934

SEQ ID NO: 195641 - RNA, 1701 nt, Artificial Sequence
  derived and/or modified CDS sequence (opt5) from hemagglutinin__InfluenzaA__ACY77944
augaaggccauccuggugguccuccuguacaccuucgcuacagccaacgcggacacgcuuugcauuggcuaucacgcuaauaacagcaccgauacaguugacaccgugcuggagaaaaaugugacagucacccauuccgugaaccuccuggaagauaagcacaaugggaaacuuuguaagcugagaggaguugcuccccuccaucugggcaaaugcaacaucgccggguggauucugggaaauccugagugugaaucucucagcacagccuccucuuggagcuacaucguggagaccuccucuagcgacaacggcacgugcuauccgggggauuuuauugacuacgaagaacugcgggagcagcuuuccagcgucucuuccuucgaacgcuuugagaucuuccccaagaccagcucuuggccuaaucacgauuccaacaagggagugacagccgcuuguccccaugccggcgcgaaaucuuuuuauaagaaucugaucuggcucguuaaaaagggcaacagcuacccuaaacuguccaagagcuauauuaaugacaaggggaaagaagugcuuguccuguggggaauccaccaccccuccaccucugccgaucaacagagccucuaccagaacgcugacgccuacguguucgugggcuccagcagauauucuaagaaauuuaagccugagauugcuauccggccgaaaguccgcgaucaggaggggagaaugaauuacuauuggacacugguugaacccggagacaagauuaccuucgaggccacgggcaaccugguggugccucgguacgcguuugccauggaacgcaacgcugaguccgggaucauuaucagcgauacacccguccaugacugcaauaccacaugucaaaccccuaaaggagccaucaacaccucucuccccuuccagaauauucacccgaucacaauuggcaagugcccuaaguaugugaaaagcacgaagcugagacuugcuaccggccugcggaacguucccuccauccagucucgcgggcucuuuggagccauugccggcuucaucgaagggggauggacaggcaugguggacgggugguacggauaucaucaccagaaugagcaaggcagcggcuacgcugcggaucugaaauccacccagaacgccaucgacgagauuacaaauaaggucaacagcgugaucgaaaagaugaauacccaguuuacggcuguugggaaggaguucaaccaccuugaaaagagaauugagaaucugaacaaaaagguggaugacggauuccucgauaucuggacauacaaugccgaacugcugguccuccuggagaacgagcggacccuugacuaucaugauucuaaugugaaaaaccuguacgaaaagguccgcucccagcucaaaaacaaugccaaggagauuggcaacggguguuuugaguucuaucacaagugcgacaauaccuguauggagagcgugaaaaacggaacauacgauuauccuaaguacucugaagaggcuaaacugaauagagaggaaaucgacggcguuaaacuugaguccacccggaucuaucaaauucuggccaucuacagcacaguggcguccucucucguccuggugguuagccugggggcuauuuccuuuuggaugugcucuaacggcagccuccagugccgcaucuguauuuga

SEQ ID NO: 195642 - RNA, 1701 nt, Artificial Sequence; identical to SEQ ID NO: 194728
  derived and/or modified CDS sequence (opt5) from hemagglutinin__InfluenzaA__ACY77954

SEQ ID NO: 195643 - RNA, 1701 nt, Artificial Sequence; identical to SEQ ID NO: 194728
  derived and/or modified CDS sequence (opt5) from hemagglutinin__InfluenzaA__ACY77964

SEQ ID NO: 195644 - RNA, 1701 nt, Artificial Sequence; identical to SEQ ID NO: 194728
  derived and/or modified CDS sequence (opt5) from hemagglutinin__InfluenzaA__ACY77974

SEQ ID NO: 195645 - RNA, 1701 nt, Artificial Sequence; identical to SEQ ID NO: 194728
  derived and/or modified CDS sequence (opt5) from hemagglutinin__InfluenzaA__ACY77984

SEQ ID NO: 195646 - RNA, 1701 nt, Artificial Sequence; identical to SEQ ID NO: 194728
  derived and/or modified CDS sequence (opt5) from hemagglutinin__InfluenzaA__ACY77994

SEQ ID NO: 195647 - RNA, 1701 nt, Artificial Sequence
  derived and/or modified CDS sequence (opt5) from hemagglutinin__InfluenzaA__ACY79633
augaaggagauccuggugguccuccuguacaccuucgccacagcuaacgccgacacgcuuugcauuggcuaucacgcgaauaacagcaccgauacaguugacaccgugcuggagaaaaaugugacagucacccauuccgugaaccuccuggaagauaagcacaaugggaaacuuuguaagcugagaggaguugcuccccuccaucugggcaaaugcaacaucgccggguggauucugggaaauccugaaugugagucucucagcacagccuccucuuggagcuacaucguggaaaccuccucuagcgacaacggcacgugcuauccgggggauuuuauugacuacgaggagcugcgggaacagcuuuccagcgucucuuccuucgagcgcuuugaaaucuuccccaagaccagcucuuggccuaaucacgauuccaacaagggagugacagcugccuguccccaugcuggcgccaagagcuuuuauaagaaucugaucuggcucguuaaaaagggcaacucuuacccuaaacuguccaagagcuauauuaaugacaaggggaaagaggugcuuguccuguggggaauccaccaccccuccaccucugcggaucaacagagccucuaccagaacgccgacgcuuacguguucgugggcacauccagauauagcaagaaauuuaagccugagauugccauccggccgaaaguccgcgaucaggaagggagaaugaauuacuauuggacccugguugagcccggagacaagauuacguucgaagcuacaggcaaccugguggugccucgguacgccuuugcgauggagcgcaacgccagaucugggaucauuaucuccgauacccccguccaugacugcaauacaaccugucaaaccccuaaaggagcuaucaacacaagccuccccuuccagaauauucacccgaucacgauuggcaagugcccuaaguaugugaaaucuaccaagcugcggcuugccacaggccugcgcaacguucccagcauccaguccagagggcucuuuggagcuauugccggcuucaucgaagggggauggaccggcaugguggacgggugguacggauaucaucaccagaaugagcaaggcucuggcuacgccgcugaucugaaaagcacacagaacgcgaucgacgagauuaccaauaaggucaacuccgugaucgaaaagaugaauacgcaguuuacagccguugggaaagaguucaaccaccuugaaaagcggauugagaaucugaacaaaaagguggaugacggauuccucgauaucuggaccuacaaugcugaacugcugguccuccuggagaacgagcgcacccuugacuaucaugauagcaaugugaaaaaccuguacgaaaaggucagaucucagcucaaaaacaaugccaaggagauuggcaacggguguuuugaguucuaucacaagugcgacaauacauguauggaauccgugaaaaacggaaccuacgauuauccuaaguacagcgaagaggccaaacugaaucgggaggaaaucgacggcguuaaacuugagucuacacgcaucuaucaaauucuggcuaucuacuccacgguggccagcucccucguccuggugguuucucugggggcgauuagcuuuuggaugugcuccaacggcucucuccagugcagaaucuguauuuga

SEQ ID NO: 195648 - RNA, 1701 nt, Artificial Sequence; identical to SEQ ID NO: 195539
  derived and/or modified CDS sequence (opt5) from hemagglutinin__InfluenzaA__ACZ01953

SEQ ID NO: 195649 - RNA, 1701 nt, Artificial Sequence
  derived and/or modified CDS sequence (opt5) from hemagglutinin__InfluenzaA__ACZ05050
augaaggccauccuggugguccuccuguacaccuucgcuacagccaacgcggacacgcuuugcauuggcuaucacgcuaauaacagcaccgauacaguugacaccgugcuggagaagaaugugacagucacccauuccgugaaccuccuggaagauaagcacaaugggaaacuuuguaagcugagaggaguugcuccccuccaucugggcaaaugcaacaucgccggguggauucugggaaauccugagugugaaucucucagcacagccuccucuuggagcuacaucguggagaccuccucuagcgacaacggcacgugcuauccgggggauuuuauugacuacgaagaacugcgggagcagcuuuccagcgucucuuccuucgaacgcuuugagaucuuccccaagaccagcucuuggccuaaucacgauuccaacaagggagugacagccgcuuguagccaugccggcgcgaaaucuuuuuauaagaaucugaucuggcucguuaaaaagggcaacuccuaccccaaacugagcaaguccuauauuaaugacaaggggaaagaagugcuuguccuguggggaauccaccacccuucuaccagcgccgaucaacagucccucuaccagaacgcugacgccuacguguucgugggcagcucuagauauuccaagaaauuuaagcccgagauugcuauccggccuaaaguccgcgaucaggaggggagaaugaauuacuauuggacacugguugaaccgggagacaagauuaccuucgaggccacgggcaaccugguggugccccgguacgcguuugccauggaacgcaacgcugggagcggaaucauuaucucugauacaccuguccaugacugcaauaccacaugucaaacccccaaaggcgccaucaacaccagccucccuuuccagaauauucaccccaucacaauuggcaagugcccgaaguaugugaaauccacgaagcugagacuugcuaccgggcugcggaacguuccuucuauccagagccgcggacucuuuggcgccauugccggguucaucgagggaggcuggacagggaugguggacggaugguacggcuaucaucaccagaaugaacaaggcuccggguacgcugcggaucugaaaagcacccagaacgccaucgacgagauuacaaauaaggucaacucugugaucgagaaaaugaauacccaguuuacggcuguuggaaaggaguucaaccaccuugagaagagaauugaaaaucugaacaaaaagguggaugacggcuuccucgauaucuggacauacaaugccgagcugcugguccuccuggaaaacgagcggacccuugacuaucaugauuccaaugugaaaaaccuguacgagaagguccgcagccagcucaaaaacaaugccaaggaaauugggaacggauguuuugaguucuaucacaagugcgacaauaccuguauggaaucugugaaaaacggcacauacgauuaucccaaguacuccgaggaagcuaaacugaauagagaggagaucgacgggguuaaacuugaaagcacccggaucuaucaaauucuggccaucuacuccacaguggcgucuagccucguccuggugguuucccugggcgcuauuucuuuuuggaugugcagcaacggaucccuccagugccgcaucuguauuuga

SEQ ID NO: 195650 - RNA, 1701 nt, Artificial Sequence
  derived and/or modified CDS sequence (opt5) from hemagglutinin__InfluenzaA__ACZ05061
auggaggccauccuggugguccuccuguacaccuucacaacggcuaacgccgacacccuuugcauuggcuaucacgcgaauaacagcacagauaccguugacacagugcuggaaaagaaugugaccgucacacauuccgugaaccuccuggaggauaaacacaaugggaaacuuuguaagcugagaggaguugcuccccuccaucugggcaagugcaacaucgccggguggauucugggaaauccugaaugugagucucucagcaccgccuccucuuggagcuacaucguggaaacguccucuagcgacaacgggaccugcuauccgggcgauuuuauugacuacgaggagcugcgggaacagcuuuccagcgucucuuccuucgagcgcuuugaaaucuuccccaaaacaagcucuuggccuaaucacgauuccaacaagggagugaccgcugccuguccccaugcuggcgccaagagcuuuuauaaaaaucugaucuggcucguuaagaaaggcaacucuuacccuaagcuguccaaaagcuauauuaaugacaaggggaaggaggugcuuguccuguggggaauccaccaccccuccacaucugcggaucaacagagccucuaccagaacgccgacgcuuacguguucgugggcuccagcagauauucuaaaaaguuuaaaccugagauugccauccggccgaagguccgcgaucaggaagggagaaugaauuacuauuggacccugguugagcccggagacaaaauuacguucgaagcuacaggcaaccugguggugccucgguacgccuuugcgauggagcgcaacgccggguccggaaucauuaucagcgauacccccguccaugacugcaauacaaccugucaaacccucaagggcgcuaucaacacaucucugccuuuccagaauauucaccccaucacgauuggcaaaugcccgaaguauguuaagagcaccaaacuuagacuggccacagggcuccggaacgugccuuccauccagucucgcggacuguuuggcgcuauugccggguucaucgaaggaggcuggaccgggaugguggacggaugguacggcuaucaucaccagaaugagcaaggcagcggguacgccgcugaucuuaaguccacacagaacgcgaucgacgagauuaccaauaaagucaacagcgugaucgaaaagaugaauacgcaguuuacagccguuggaaaagaguucaaccaccuggaaaagagaauugagaaucucaacaagaaaguggaugacggcuuccuggauaucuggaccuacaaugcugaacugcucguccugcuugagaacgagcggacccuggacuaucaugauucuaaugugaagaaccucuacgaaaaaguccgcucccagcugaagaacaaugccaaagagauugggaacggauguuuugaguucuaucacaagugcgacaauacauguauggaaagcgugaagaacggcaccuacgauuaucccaaauacucugaagaggccaaacuuaauagagaggaaaucgacgggguuaagcuggaguccacacggaucuaucaaauucucgcuaucuacagcacgguggccuccucucugguccuggugguuagccucggcgcgauuuccuuuuggaugugcucuaacggaagccugcagugccgcaucuguauuuga

SEQ ID NO: 195651 - RNA, 1701 nt, Artificial Sequence; identical to SEQ ID NO: 194728
  derived and/or modified CDS sequence (opt5) from hemagglutinin__InfluenzaA__ACZ05071

SEQ ID NO: 195652 - RNA, 1701 nt, Artificial Sequence; identical to SEQ ID NO: 194728
  derived and/or modified CDS sequence (opt5) from hemagglutinin__InfluenzaA__ACZ05081

SEQ ID NO: 195653 - RNA, 1701 nt, Artificial Sequence; identical to SEQ ID NO: 194728
  derived and/or modified CDS sequence (opt5) from hemagglutinin__InfluenzaA__ACZ05091

SEQ ID NO: 195654 - RNA, 1701 nt, Artificial Sequence; identical to SEQ ID NO: 194728
  derived and/or modified CDS sequence (opt5) from hemagglutinin__InfluenzaA__ACZ05101

SEQ ID NO: 195655 - RNA, 1701 nt, Artificial Sequence; identical to SEQ ID NO: 194728
  derived and/or modified CDS sequence (opt5) from hemagglutinin__InfluenzaA__ACZ05111

SEQ ID NO: 195656 - RNA, 1701 nt, Artificial Sequence
  derived and/or modified CDS sequence (opt5) from hemagglutinin__InfluenzaA__ACZ05121
augaaggccauccuggugguccuccuguacaccuucgcuacagccaacgcggacacgcuuugcauuggcuaucacgcuaauaacagcaccgauacaguugacaccgugcuggagaaaaaugugacagucacccauuccgugaaccuccuggaagauaagcacaaugggaaacuuuguaagcugagaggaguugcuccccuccaucugggcaaaugcaacaucgccggguggauucugggaaauccugagugugaaucucucagcacagccuccucuuggagcuacaucguggagaccuccucuagcgacaacggcacgugcuauccgggggauuuuauugacuacgaagaacugcgggagcagcuuuccagcgucucuuccuucgaacgcuuugagaucuuccccaagaccagcucuuggccuaaucacgauuccaacaagggagugacagccgcuuguccccaugccggcgcgaaaucuuuuuauaauaaccugaucuggcucguuaagaaaggcaauagcuacccuaagcuguccaaaagcuauauuaacgacaaggggaaggaagugcuuguccuguggggaauccaccaccccuccaccucugccgaucaacagagccucuaccagaaugcugacgccuacguguucgugggcuccagcagauauucuaaaaaguuuaaaccugagauugcuauccggccgaagguccgcgaucaggaggggagaaugaacuacuauuggacacugguugaacccggagacaaaauuaccuucgaggccacgggcaaccugguggugccucgguacgcguuugccauggaacgcaaugcuggguccggaaucauuaucagcgauacacccguccaugacugcaacaccacaugucaaaccccuaagggcgccaucaauaccucucuccccuuccagaacauucacccgaucacaauuggcaaaugcccuaaguauguuaagagcacgaaacugagacuugcuaccgggcugcggaaugugcccuccauccagucucgcggacucuuuggcgccauugccggguucaucgagggaggcuggacagggaugguggacggaugguacggcuaucaucaccagaacgaacaaggcagcggguacgcugcggaucugaaguccacccagaaugccaucgacgagauuacaaacaaagucaauagcgugaucgagaagaugaacacccaguuuacggcuguuggaaaagaguucaaucaccuugagaagagaauugaaaaccugaauaagaaaguggaugacggcuuccucgauaucuggacauacaacgccgagcugcugguccuccuggaaaaugagcggacccuugacuaucaugauucuaacgugaagaaccuguacgagaaaguccgcucccagcucaagaauaacgccaaagaaauugggaauggauguuuugaguucuaucacaagugcgacaacaccuguaugggcagcgugaagaaugggacauacgauuauccuaaauacucugaagaggcuaagcugaacagagaagagaucgacggcguuaaacuugaguccacccggaucuaucaaauucuggccaucuacagcacaguggcguccucucucguccuggugguuagccugggagcuauuuccuuuuggaugugcucuaauggcagccuccagugccgcaucuguauuuga

SEQ ID NO: 195657 - RNA, 1701 nt, Artificial Sequence; identical to SEQ ID NO: 194728
  derived and/or modified CDS sequence (opt5) from hemagglutinin__InfluenzaA__ACZ05131

SEQ ID NO: 195658 - RNA, 1701 nt, Artificial Sequence; identical to SEQ ID NO: 194728
  derived and/or modified CDS sequence (opt5) from hemagglutinin__InfluenzaA__ACZ05141

SEQ ID NO: 195659 - RNA, 1701 nt, Artificial Sequence; identical to SEQ ID NO: 194728
  derived and/or modified CDS sequence (opt5) from hemagglutinin__InfluenzaA__ACZ05151

SEQ ID NO: 195660 - RNA, 1701 nt, Artificial Sequence
  derived and/or modified CDS sequence (opt5) from hemagglutinin__InfluenzaA__ACZ05172
augaagaccaucauugcccugagcuacauccucugccugguguucgcucagaaacuucccggcaacgacaauuccacagccacgcugugucucgggcaccaugcggucccuaacggaaccauuguuaagacaaucaccaaugaucaaauugaggugacaaacgcuaccgaacuggugcagucuagcuccacaggcgagaucugcgacucuccgcaccagauccuugaugggaaaaauuguacccugauugacgcccuccugggagauccccagugcgacggcuuucaaaacaagaaaugggaucuguucgucgaaagaagcaaggccuauuccaauuguuacccuuaugacgugcccgauuacgcuucucuccggagccugguugccuccagcgggacgcuugaguuuaacaaugaaucuuucaacuggaccggagugacacaggacggcaccuccagcgcuugcauccgcagaucuaaaaauuccuuuuucagccggcugaacuggcucacacaucugaauuuuaaauauccugcccuuaacgucaccaugcccaauaacgagcaguucgauaagcuguacauuuggggcgugcaccauccugggacggacaaagaucagaucuuucucuaugcgcaagccucuggacgcauuacaguuuccaccaagagaagccagcagacagcuaucccgaacauuggcucccggccccgcgugagaaauaucccuucucggaucagcauuuacuggaccaucgucaaacccggggacauucugcugaucaacuccaccggaaaucucauugccccucgcggcuacuucaagaucagaagcgggaagucuuccaucaugcggagcgacgcucccauuggaaaauguaacucugagugcaucacaccgaauggcagcauuccuaacgauaagcccuuucagaaugugaaccgcaucacguauggcgccuguccuagauacgugaaacaaaauacccugaaacuugcgacagggaugcggaacguccccgaaaagcagacccgcggaauuuucggcgccaucgcuggguuuaucgagaauggaugggaaggcaugguugacgggugguauggauucagacaccagaacuccgagggccggggccaagccgcugaucugaagucuacacaggccgccauugaccagaucaaugggaaacucaacagacugauuggaaagaccaaugagaaguuccaccagaucgaaaaagaguuuagcgaaguggagggccgcauucaagaucuugaaaaguacguggaggacacgaaaaucgaucugugguccuauaacgcugagcuccuggucgcgcuggaaaaccagcauacaauugaccucaccgauagcgagaugaauaagcuguucgaaaagaccaagaagcagcuucgggagaacgccgaagacauggggaauggaugcuuuaaaaucuaccacaagugugauaacgcuugcaucggcucuauuagaaaugggacauaugaccaugacguguaccgcgaugaggcccugaacaaucgguuccagaucaaaggcguugagcucaaguccggauacaaagacuggauucuguggaucagcuuugccauuucuugcuuccuucuguguguggcucuccugggcuuuaucaugugggccugccaaaaggggaacaucagauguaauauuugcaucuga

SEQ ID NO: 195661 - RNA, 1698 nt, Artificial Sequence; identical to SEQ ID NO: 195203
  derived and/or modified CDS sequence (opt5) from hemagglutinin__InfluenzaA__ACZ05194

SEQ ID NO: 195662 - RNA, 1701 nt, Artificial Sequence; identical to SEQ ID NO: 195660
  derived and/or modified CDS sequence (opt5) from hemagglutinin__InfluenzaA__ACZ05205

SEQ ID NO: 195663 - RNA, 1701 nt, Artificial Sequence
  derived and/or modified CDS sequence (opt5) from hemagglutinin__InfluenzaA__ACZ05216
augaagaccaucauugcccugagcuacauccucugccugguguucgcucagaaaauucccggcaacgacaauaacacagccacgcuuugucuggggcaccaugcggucccuaauggaaccaucguuaagacaauuaccaacgaucaaaucgaggugacaaaugcuaccgaacucgugcaguccucuagcacaggcgagaucugcgacuccccgcaccagauucuggauggggaaaacuguacccuuaucgacgcccugcucggagauccccagugcgacggcuuucaaaauaaaaagugggaucuguucgucgagagaucuaaagccuauagcaacuguuacccuuaugacgugcccgauuacgcuucccugcggucucucguugccagcuccgggacgcuggaauuuaauaacgagagcuucaauuggaccggagugacacagaacggcaccucuuccgcuugcauucgcagaagcaauaacucuuucuucucccggcuuaauuggcugacacaucucaaguuuaaguauccugcccugaacgucaccaugcccaacaaugagcaguucgacaaacuuuacaucuggggcgugcaccauccugggacggauaacgaccagauuuuucuguaugcgcaagccagcggacgcaucacaguuucuaccaagagaucccagcagacagugauuccgaauaucggcagccggccccgcgucagaaacaucccuucccggauuucuaucuacuggaccauugugaaacccggggauauccuccugauuaauagcaccggaaaccugaucgcuccucgcggcuacuucaagaucagauccgggaaaagcucuauuaugcgguccgacgcccccaucggaaaguguaauagcgaaugcauuacaccgaacggcucuaucccuaaugacaagcccuuucagaacgugaaucgcauuacguauggcgcuuguccuagauacgucaaacaaaacacccucaagcuggccacagggaugcggaauguucccgagaaacagacccgcggaaucuucggcgcgaucgccggguuuauugaaaacggaugggagggcaugguggaugggugguauggauucagacaccagaauagcgagggccggggccaagcugccgaccuuaaguccacacaggcugccaucgaucagauuaacgggaaacugaacagacucaucggaaagaccaaugaaaaauuccaccagauugagaaggaauuuucugagguggaaggccgcauccaagaccuggagaaguacgucgaggauacgaaaauugaccuuuggagcuauaacgccgaacugcucguggcucuggagaaucagcauacaaucgaucugaccgacuccgaaaugaacaagcucuuugagaaaaccaagaaacagcugcgggaaaaugcggaggauauggggaacggaugcuuuaagaucuaccacaagugugacaaugccugcauuggcagcaucagaaacgggacauaugaucaugacguuuaccgcgacgaggcucuuaauaaccgguuccagauuaaaggcguggaacugaagucuggauacaaagauuggauccucuggauuuccuuugccaucagcugcuuccugcuuugugucgcccugcucggcuuuaucaugugggcuugccaaaaggggaauauuagauguaacaucugcauuuga

SEQ ID NO: 195664 - RNA, 1701 nt, Artificial Sequence; identical to SEQ ID NO: 195660
  derived and/or modified CDS sequence (opt5) from hemagglutinin__InfluenzaA__ACZ05227

SEQ ID NO: 195665 - RNA, 1701 nt, Artificial Sequence
  derived and/or modified CDS sequence (opt5) from hemagglutinin__InfluenzaA__ACZ05238
augaagaccaucauugcccugagcuacauccucugccugguguucgcucagaaacuucccggcaacgacaauuccacagccacgcugugucucgggcaccaugcggucccuaacggaaccauuguuaagacaaucaccaaugaucaaauugaggugacaaacgcuaccgaacuggugcagucuagcuccacaggcgagaucugcgacucuccgcaccagauccuugaugggaaaaauuguacccugauugacgcccuccugggagauccccagugcgacggcuuucaaaacaagaaaugggaucuguucgucgaaagaagcaaggccuauuccaauuguuacccuuaugacgugcccgauuacgcuucucuccggagccugguugccuccagcgggacgcuugaguuuaacaaugaaucuuucaacugggcuggagugacccagaauggcacauccagcgccugcauccgcagaucuaagaacuccuuuuucagccggcugaauuggcucacccaucugaacuuuaaauauccugcgcuuaaugucacaaugcccaacaacgagcaguucgacaagcuguacauuuggggcgugcaccauccugggaccgauaaagaccagaucuuucucuaugcccaggcuucuggacgcauuacgguuuccacaaagagaagccagcagaccgccaucccgaauauuggcucccggccccgcgugagaaacaucccuucucggaucagcauuuacuggacaaucgucaaacccggggauauucugcugaucaauuccaccggaaaccucauugcuccucgcggcuacuucaagaucagaagcgggaagucuuccaucaugcggagcgacgcccccauuggaaaauguaauucugagugcaucaccccgaacggcagcauuccuaaugacaagcccuuucagaacgugaaucgcaucacauauggcgcguguccuagauacgugaaacaaaacacgcugaaacuugccaccgggaugcggaauguccccgaaaaacagacacgcggaauuuucggcgcuaucgccggguuuaucgagaacggaugggaaggcaugguugaugggugguauggauucagacaccaaaauuccgagggccggggccaagcugccgaccugaagucuacccaggccgcuauugaucagaucaacgggaaacucaauagacugauuggaaagacaaacgagaaguuccaccagaucgaaaaagaguuuagcgaaguggagggccgcauucaagaccuugaaaaguacguggaggauaccaaaaucgaccugugguccuauaacgcggagcuccuggucgcccuggaaaaucagcauacgauugaucucacagacagcgagaugaacaagcuguucgaaaagaccaagaagcagcuucgggagaaugcugaagauauggggaacggaugcuuuaaaaucuaccacaagugugacaaugccugcaucggcucuauuagaaacgggaccuaugaucaugacguguaccgcgacgaggcccugaauaaccgguuccagaucaaaggcguugagcucaaguccggauacaaagauuggauucuguggaucagcuuugcuauuucuugcuuccuucuguguguggcccuccugggcuuuaucaugugggcgugccaaaaggggaauaucagauguaacauuugcaucuga

SEQ ID NO: 195666 - RNA, 1701 nt, Artificial Sequence; identical to SEQ ID NO: 195660
  derived and/or modified CDS sequence (opt5) from hemagglutinin__InfluenzaA__ACZ05249

SEQ ID NO: 195667 - RNA, 1701 nt, Artificial Sequence; identical to SEQ ID NO: 195660
  derived and/or modified CDS sequence (opt5) from hemagglutinin__InfluenzaA__ACZ05260

SEQ ID NO: 195668 - RNA, 1701 nt, Artificial Sequence
  derived and/or modified CDS sequence (opt5) from hemagglutinin__InfluenzaA__ACZ05271
augaagaccaucauugcccugagcuacauccucugccugguguucgcucagaaacuucccggcaacgacaauuccacagccacgcugugucucgggcaccaugcggucccuaacggaaccauuguuaagacaaucaccaaugaucaaauugaggugacaaacgcuaccgaacuggugcagucuagcuccacaggcgagaucugcgacucuccgcaccagauccuugauggggaaaauuguacccugauugacgcccuccugggagauccccagugcgacggcuuucaaaacaaaaagugggaucuguucgucgagagaagcaaagccuauuccaauuguuacccuuaugacgugcccgauuacgcuucucuccggagccugguugccuccagcgggacgcuugaauuuaacaaugagucuuucaacuggaccggagugacacagaauggcaccuccagcgcuugcauccgcagaucuaacaauuccuuuuucagccggcugaacuggcucacacaucugaaguuuaaguauccugcccuuaaugucaccaugcccaacaacgagcaguucgacaaacuguacauuuggggcgugcaccauccugggacggauaaugaccagaucuuucucuaugcgcaagccucuggacgcauuacaguuuccaccaagagaagccagcagacagugaucccgaacauuggcucccggccccgcgucagaaauaucccuucucggaucagcauuuacuggaccaucgugaaacccggggauauucugcugaucaacuccaccggaaaucucauugcuccucgcggcuacuucaagaucagaagcgggaaaucuuccaucaugcggagcgacgcccccauuggaaaguguaacucugaaugcaucacaccgaauggcagcauuccuaacgacaagcccuuucagaaugugaaccgcaucacguauggcgcuuguccuagauacgucaaacaaaauacccugaaacuugccacagggaugcggaacguucccgagcgccagaccagaggaauuuucggcgcgaucgccggguuuaucgaaaauggaugggagggcaugguggaugggugguauggauuccggcaccagaacuccgagggcagaggccaagcugccgaccugaagucuacacaggcugccauugaucagaucaaugggaagcucaaccgccugauuggaaaaaccaacgaaaaguuccaccagaucgagaaagaauuuagcgagguggaaggccggauucaagaccuugagaaguacgucgaggauacgaagaucgaccugugguccuauaaugccgaacuccugguggcucuggagaaccagcauacaauugaucucaccgacagcgaaaugaauaaacuguucgagaagaccaaaaagcagcuuagagaaaacgcggaggauauggggaauggaugcuuuaaaaucuaccacaagugugacaacgccugcaucggcucuauucgcaaugggacauaugaucaugacguuuaccgggacgaggcucugaacaauagauuccagaucaagggcguggaacucaaauccggauacaaggauuggauucuguggaucagcuuugccauuucuugcuuccuucugugugucgcccuccugggcuuuaucaugugggcuugccaaaaagggaacauccgcuguaauauuugcaucuga

SEQ ID NO: 195669 - RNA, 1701 nt, Artificial Sequence
  derived and/or modified CDS sequence (opt5) from hemagglutinin__InfluenzaA__ACZ05282
augaagaccacaaucgcccugagcuacauucucugccugguguucgcucagaaacuucccggcaacgacaauuccacggccacccugugucucgggcaccaugcggucccuaacggaacaaucguuaagaccauuacaaaugaucaaaucgaggugaccaacgcuacagaacuggugcagucuagcuccaccggcgagauuugcgacucuccgcaccagauccuugauggggaaaauuguacgcugaucgacgcccuccugggagauccccagugcgacggcuuucaaaacaaaaagugggaucuguucgucgagagaagcaaagccuauuccaauuguuacccuuaugacgugcccgauuacgcuucucuccggagccugguugccuccagcgggacccuugaauuuaacaaugagucuuucaacuggacaggagugacccagaauggcacauccagcgcuugcauucgcagaucuaacaauuccuuuuucagccggcugaacuggcucacccaucugaaguuuaaguauccugcccuuaaugucacgaugcccaacaacgagcaguucgacaaacuguacaucuggggcgugcaccauccugggacagauaaugaccagauuuuucucuaugcgcaagccucuggacgcaucaccguuuccacaaagagaagccagcagaccgugauuccgaacaucggcucccggccccgcgucagaaauauuccuucucggaucagcaucuacuggaccauugugaaacccggggauauccugcugauuaacuccacaggaaaucucaucgcuccucgcggcuacuucaagauucagagcgggaaaucuuccaucaugagaagcgacgcccccaucggaaaguguaacucugaaugcauuacgccgaauggcagcaucccuaacgacaagcccuuucaaaaugugaaccggauuaccuauggcgcuuguccucgcuacgucaaacagaauacacugaaacuugccaccgggaugagaaacguucccgagaagcagacacggggaaucuucggcgcgauugccggguuuaucgaaaauggaugggagggcaugguggaugggugguauggauuccgccaccaaaacuccgagggcagaggccaggcugccgaccugaagucuacccaggcugccaucgaucagauuaaugggaaacucaaccggcugaucggaaagacgaacgaaaaauuccaccaaauugagaaggaauuuagcgagguggaaggcagaauccaggaccuugagaaguacgucgaggauacaaaaauugaccugugguccuauaaugccgaacuccugguggcucuggagaaccagcauaccaucgaucucaccgacagcgaaaugaauaagcuguucgagaaaacaaagaaacagcuucgcgaaaacgcggaggauauggggaauggaugcuuuaagauuuaccacaagugugacaacgccugcaucggcucuauccggaaugggaccuaugaucaugacguuuacagagacgaggcucugaacaaucgcuuccaaauuaaaggcguggaacucaaguccggauacaaagauuggauccuguggauuagcuuugccaucucuugcuuccuucugugugucgcccuccugggcuuuauuaugugggcuugccagaaggggaacauccgguguaauaucugcauuuga

SEQ ID NO: 195670 - RNA, 1701 nt, Artificial Sequence; identical to SEQ ID NO: 195660
  derived and/or modified CDS sequence (opt5) from hemagglutinin__InfluenzaA__ACZ05304

SEQ ID NO: 195671 - RNA, 1701 nt, Artificial Sequence; identical to SEQ ID NO: 195483
  derived and/or modified CDS sequence (opt5) from hemagglutinin__InfluenzaA__ACZ05315

SEQ ID NO: 195672 - RNA, 1701 nt, Artificial Sequence; identical to SEQ ID NO: 195660
  derived and/or modified CDS sequence (opt5) from hemagglutinin__InfluenzaA__ACZ05326

SEQ ID NO: 195673 - RNA, 1701 nt, Artificial Sequence
  derived and/or modified CDS sequence (opt5) from hemagglutinin__InfluenzaA__ACZ05337
augaagaccaucauugcccugagcuacauccucugccugguguucacacagaaacuucccggcaacgacaauuccacggcuacccugugucucgggcaccaugccgucccuaacggaacaauuguuaagaccaucacaaaugaucaaauugaggugaccaacgcgacagaacuggugcagucuagcuccaccggcgagaucugcgacucuccgcaccagauccuugaugggaaaaauuguacgcugauugacgcucuccugggagauccccagugcgacggcuuucaaaacaagaaaugggaucuguucgucgaaagaagcaaggccuauuccaauuguuacccuuaugacgugcccgauuacgccucucuccggagccugguugcuuccagcgggacccuugaguuuaacaaugaacgcuucaacuggacaggagugacccagaauggcacaucuuccgccugcaucagacggagcaagaacuccuuuuucucucgccugaauuggcucacccaucugaacuuuaaauauccugcucuuaaugucacgaugcccaacaacgagcaguucgacaagcuguacauuuggggcgugcaccauccugggacagauaaagaccagaucuuucucuaugcccaagcgagcggaagaauuaccguuucuacaaagcggucccagcagaccgugaucccgaauauuggcagccgccccagaguccggaacaucccuucccgcaucucuauuuacuggaccaucgugaaacccggggauauucugcugaucagcuccacaggaaaucucauugccccuagaggcuacuucaagauccggagcgggaagucuuccaucaugcgcagcgacgcucccauuggaaaauguaacucugagugcaucacgccgaauggcagcauuccuaacgacaagcccuuucagaaugugaacagaaucaccuauggcgccuguccucgguacgucaaacaaaauacacugaaacuugcuaccgggaugcgcaacguucccgaaaaacagacaagaggaauuuucggcgccaucgcgggguuuaucgagaauggaugggaaggcaugguggaugggugguauggauuccggcaccagaacuccgagggcagaggccaagccgcugaccugaagucuacccaggccgcuauugaucagaucaaugggaaacucaaccgccugauuggaaagacgaaugagaaguuccaccagaucgaaaaagaguuuagcgaaguggagggccggauucaagaccuugaaaaguacgucgaggauacaaaaaucgaccugugguccuauaacgccgagcuccugguggcccuggaaaaccagcauaccauugaucucaccgacagcgagaugaauaagcuguucgaaaagacaaagaagcagcuuagagagaacgcugaagauauggggaauggaugcuuuaaaaucuaccacaagugugacaacgcgugcaucggcucuauucgcaaugggaccuaugaucaugacguuuaccgggacgaggcccugaacaauagauuccagaucaaaggcguggagcucaaguccggauuuaaagauuggauucuguggaucagcuucgcuauuucuugcuuucuucugugugucgcccuccugggcuucaucaugugggccugccaaaaggggaacauccgcuguaauauuugcaucuga

SEQ ID NO: 195674 - RNA, 1701 nt, Artificial Sequence; identical to SEQ ID NO: 195660
  derived and/or modified CDS sequence (opt5) from hemagglutinin__InfluenzaA__ACZ05348

SEQ ID NO: 195675 - RNA, 1701 nt, Artificial Sequence; identical to SEQ ID NO: 195665
  derived and/or modified CDS sequence (opt5) from hemagglutinin__InfluenzaA__ACZ05359

SEQ ID NO: 195676 - RNA, 1701 nt, Artificial Sequence; identical to SEQ ID NO: 195660
  derived and/or modified CDS sequence (opt5) from hemagglutinin__InfluenzaA__ACZ05370

SEQ ID NO: 195677 - RNA, 1701 nt, Artificial Sequence
  derived and/or modified CDS sequence (opt5) from hemagglutinin__InfluenzaA__ACZ05392
augaagaccaucauugcccugagcuacauccucugccugguguucgcucagaaacuucccggcaacgacaauuccacagccacgcugugucucgggcaccaugcggucccuaacggaaccauuguuaagacaaucaccaaugaucaaauugaggugacaaacgcuaccgaacuggugcagucuagcuccacaggcgagaucugcgacucuccgcaccagauccuugaugggaaaaauuguacccugauugacgcccuccugggagauccccagugcgacggcuuucaaaacaagaaaugggaucuguucgucgaaagaagcaaggccuauuccaauuguuacccuuaugacgugcccgauuacgcuucucuccggagccugguugccuccagcgggacgcuugaguuuaacaaugaaucuuucaacuggaccggagugacacagaauggcgcuuccagcgccugcauccgcagaucuaagaacuccuuuuucagccggcugaauuggcucacccaucugaacuuuaaauauccugcgcuuaaugucacaaugcccaacaacgagcaguucgacaagcuguacauuuggggcgugcaccauccugggaccgauaaagaccagaucuuucucuaugcccaggcuucuggacgcauuacgguuuccacaaagagaagccagcagaccgccaucccgaauauuggcucccggccccgcgugagaaacaucccuucucggaucagcauuuacuggacaaucgucaaacccggggauauucugcugaucaauuccaccggaaaccucauugcuccucgcggcuacuucaagaucagaagcgggaagucuuccaucaugcggagcgacgcccccauuggaaaauguaauucugagugcaucaccccgaacggcagcauuccuaaugacaagcccuuucagaacgugaaucgcaucacauauggcgcguguccuagauacgugaaacaaaacacgcugaaacuugccaccgggaugcggaauguccccgaaaaacagacacgcggaauuuucggcgcuaucgccggguuuaucgagaacggaugggaaggcaugguugaugggugguauggauucagacaccaaaauuccgagggccggggccaagcugccgaccugaagucuacccaggccgcuauugaucagaucaacgggaaacucaauagacugauuggaaagacaaacgagaaguuccaccagaucgaaaaagaguuuagcgaaguggagggccgcauucaagaccuugaaaaguacguggaggauaccaaaaucgaccugugguccuauaacgcggagcuccuggucgcccuggaaaaucagcauacgauugaucucacagacagcgagaugaacaagcuguucgaaaagaccaagaagcagcuucgggagaaugcugaagauauggggaacggaugcuuuaaaaucuaccacaagugugacaaugccugcaucggcucuauuagaaacgggaccuaugaucaugacguguaccgcgacgaggcccugaauaaccgguuccagaucaaaggcguugagcucaaguccggauacaaagauuggauucuguggaucagcuuugcuauuucuugcuuccuucuguguguggcccuccugggcuuuaucaugugggcgugccaaaaggggaauaucagauguaacauuugcaucuga

SEQ ID NO: 195678 - RNA, 1701 nt, Artificial Sequence; identical to SEQ ID NO: 195660
  derived and/or modified CDS sequence (opt5) from hemagglutinin__InfluenzaA__ACZ05403

SEQ ID NO: 195679 - RNA, 1701 nt, Artificial Sequence
  derived and/or modified CDS sequence (opt5) from hemagglutinin__InfluenzaA__ACZ05436
augaagaccaucauugcccugagcuacauccucugccugguguucgcucagaaacuucccggcaacgacaauuccacagccacgcugugucucgggcaccaugcggucccuaacggaaccauuguuaagacaaucaccaaugaucaaauugaggugacaaacgcuaccgaacuggugcagucuagcuccacaggcgagaucugcgacucuccgcaccagauccuugaugggaaaagcuguacccugauugacgcccuccugggagauccccagugcgacggcuuucaaaauaagaaaugggaucuguucgucgaaagauccaaggccuauucuaacuguuacccuuaugacgugcccgauuacgcuagccuccggucccugguugccagcucugggacgcuugaguuuaauaacgaauccuucaauuggaccggagugacacagaacggcaccagcucugcuugcauccgcagauccaagaauagcuuuuucucucggcugaacuggcucacacaucugaauuuuaaauauccugcccuuaacgucaccaugcccaauaacgagcaguucgacaagcuguacauuuggggcgugcaccauccugggacggauaaagaccagaucuuucucuaugcgcaagccuccggacgcauuacaguuagcaccaagagaucccagcagacagcuaucccgaacauuggcucucggccccgcgugagaaauaucccuagccggaucuccauuuacuggaccaucgucaaacccggggauauucugcugaucaacagcaccggaaaucucauugccccucgcggcuacuucaagaucagaucugggaaguccagcaucaugcggucugacgcucccauuggaaaauguaacagcgagugcaucacaccgaauggcuccauuccuaacgacaagcccuuucagaaugugaaccgcaucacguauggcgccuguccuagauacgugaaacaaaauacccugaaacuugcgacagggaugcggaacguccccgaaaaacagacccgcggaauuuucggcgccaucgcuggguuuaucgagaauggaugggaaggcaugguugaugggugguauggauucagacaccagaacucugagggccggggccaagccgcugaccucaagagcacacaggccgccauugaucagaucaaugggaaacugaacagacugauuggaaagaccaaugagaaguuccaccagaucgaaaaagaguuuuccgaaguggagggccgcauucaagaccuugaaaaguacguggaggauacgaaaaucgaccuguggagcuauaacgcugagcuccuggucgcgcuggaaaaccagcauacaauugaucucaccgacucugagaugaauaagcuguucgaaaagaccaagaagcagcuucgggagaacgccgaagauauggggaauggaugcuuuaaaaucuaccacaagugugacaacgcuugcaucggcuccauuagaaaugggacauaugaucaugacguguaccgcgacgaggcccugaacaaucgguuccagaucaaaggcguugagcucaagagcggauacaaagauuggauucuguggaucucuuuugccauuuccugcuuccuucuguguguggcucuccugggcuuuaucaugugggccugccaaaaggggaacaucagauguaauauuugcaucuga

SEQ ID NO: 195680 - RNA, 1701 nt, Artificial Sequence; identical to SEQ ID NO: 195660
  derived and/or modified CDS sequence (opt5) from hemagglutinin__InfluenzaA__ACZ05458

SEQ ID NO: 195681 - RNA, 1701 nt, Artificial Sequence; identical to SEQ ID NO: 195660
  derived and/or modified CDS sequence (opt5) from hemagglutinin__InfluenzaA__ACZ05469

SEQ ID NO: 195682 - RNA, 1701 nt, Artificial Sequence; identical to SEQ ID NO: 195679
  derived and/or modified CDS sequence (opt5) from hemagglutinin__InfluenzaA__ACZ05480

SEQ ID NO: 195683 - RNA, 1701 nt, Artificial Sequence; identical to SEQ ID NO: 195483
  derived and/or modified CDS sequence (opt5) from hemagglutinin__InfluenzaA__ACZ05513

SEQ ID NO: 195684 - RNA, 1701 nt, Artificial Sequence; identical to SEQ ID NO: 195660
  derived and/or modified CDS sequence (opt5) from hemagglutinin__InfluenzaA__ACZ05524

SEQ ID NO: 195685 - RNA, 1701 nt, Artificial Sequence
  derived and/or modified CDS sequence (opt5) from hemagglutinin__InfluenzaA__ACZ05535
augaagaccaucauugcccugagcuacauccucugccugguguucgcucagaaacuucccggcaacgacaauuccacagccacgcugugucucgggcaccaugcggucccuaacggaaccauuguuaagacaaucaccaaugaucaaauugaggugacaaacgcuaccgaacuggugcagucuagcuccacaggcgagaucugcgacucuccgcaccagauccuugaugggaaaaauuguacccugauugacgcccuccugggagauccccagugcgacggcuuucaaaacaagaaaugggaucuguucgucgaaagaagcaaggccuauuccaauuguuacccuuaugacgugcccgauuacgcuucucuccggagccugguugccuccagcgggacgcuugaguuuaacaaugaaucuuucaacuggaccggagugacacagaauggcaccuccagcgcuugcauccgcagaucuaagaacuccuuuuucagccggcugaauuggcucacacaucugaacuuuaaauauccugcccuuaaugucaccaugcccaacaacgagcaguucgacaagcuguacauuuggggcgugcaccauccugggacggauaaagaccagaucuuucucuaugcgcaagccucuggacgcauuacaguuuccaccaagagaagccagcagacagcuaucccgaauauuggcucccggccccgcgugagaaacaucccuucucggaucagcauuuacuggaccaucgucaaacccggggauauucugcugaucaauuccaccggaaaccucauugccccucgcggcuacuucaagaucagaagcgggaagucuuccaucaugcggagcgacgcucccauuggaaaauguaauucugagugcaucacaccgaacggcagcauuccuaaugacaagcccuuucagaacgugaaucgcaucacguauggcgccuguccuagauacgugaaacaaaacacccugaaacuugcgacagggaugcggaauguccccgaaaaacagacccgcggaauuuucggcgccaucgcuggguuuaucgagaacggaugggaaggcaugguugaugggugguauggauucagacaccaaaauuccgagggccggggccaggccgcugaccugaagucuacacaggccgccauugaucagaucaacgggaaacucaauagacugauuggaaagaccaacgagaaguuccaccagaucgaaaaagaguuuagcgaaguggagggccgcauucaagaccuugaaaaguacguggaggauacgaaaaucgaccugugguccuauaacgcugagcuccuggucgcgcuggaaaaucagcauacaauugaucucaccgacagcgagaugaacaagcuguucgaaaagaccaagaagcagcuucgggagaaugccgaagauauggggaacggaugcuuuaaaaucuaccacaagugugacaaugcuugcaucggcucuauuagaaacgggacauaugaucaugacguguaccgcgacgaggcccugaauaaccgguuccagaucaaaggcguugagcucaaguccggauacaaagauuggauucuguggaucagcuuugccauuucuugcuuccuucuguguguggcucuccugggcuuuaucaugugggccugccaaaaggggaauaucagauguaacauuugcaucuga

SEQ ID NO: 195686 - RNA, 1701 nt, Artificial Sequence; identical to SEQ ID NO: 195685
  derived and/or modified CDS sequence (opt5) from hemagglutinin__InfluenzaA__ACZ05546

SEQ ID NO: 195687 - RNA, 1701 nt, Artificial Sequence; identical to SEQ ID NO: 195660
  derived and/or modified CDS sequence (opt5) from hemagglutinin__InfluenzaA__ACZ05557

SEQ ID NO: 195688 - RNA, 1698 nt, Artificial Sequence
  derived and/or modified CDS sequence (opt5) from hemagglutinin__InfluenzaA__ACZ05579
augaaggugaaacugcucguccugcuuugcaccuucacagccacguacgcugacaccaucuguauuggcuaucacgccaacaauagcacagauaccguugacacagugcuggagaagaacgugaccgucacacauuccgugaaucuccuggaaaacucucacaaugggaaacuuugccugcucaagggaaucgcgccccugcagcugggcaacuguagcguugcuggguggauucucggaaauccugagugcgaacugcuuaucuccaaagagucuuggagcuacauuguggaaaagccgaaccccgagaauggcaccuguuauccugggcauuuugccgauuacgaggaacugagagagcaacucuccucugucagcuccuucgaacgguuugagaucuuccccaaggagagcucuuggccuaaccacacggugaccggaguuuccgccagcugcucucauaauggcgaauccagcuuuuaucgcaaccugcuuuggcugacagugaaaaauggccucuaccccaaccugucuaaguccuaugcuaauaacaaagagaaggaaguccuggugcucuggggagugcaccacccuccgaacaucgucgaccagaaaacccuguacagaacagagaaugccuacguuagcgugguguccucucauuauagccggaaguucacccccgaaauugcuaagcgcccuaaagucagagaucaggaggggcggaucaacuacuauuggacgcuucuggagcccggcgacacaauuaucuuugaagccaaugggaaccucauugcgccucgcuacgccuucgcucuguccagaggauuuggcagcgggaucauuaauucuaacgcccccauggauaagugugacgcuaaaugccagaccccgcggggagccaucaauuccagccuuccuuuccaaaacgugcaccccguuacaaucggcgaguguccuaaguaugugcgcucugcgaaacugagaauggucaccggccuccggaauauucccagcauccagucccgcgggcuguuuggagccauugcuggcuucaucgaagggggauggaccggcaugguggaugggugguacggauaucaucaccagaacgagcagggcucuggcuacgccgcugaccaaaagagcacacagaaugccauuaacgggaucacgaauaaaguuaacuccgugaucgaaaagaugaauacccaguuuacagccgucggaaaggaguucaacaaacuggagagacggauggaaaaccucaauaagaaaguggaugacggcuucauugauaucuggaccuacaacgcugagcugcuuguccugcucgaaaaugagcgcacacuggacuuucacgacagcaacgugaagaaucuuuaugaaaaaguuaagucucagcugaagaacaaugcgaaagagauugggaacggaugcuucgaguuuuaccauaaguguaaugaugaaugcauggaguccgugaaaaacggcaccuaugacuaccccaaguauagcgaagagucuaaacucaauagagagaagaucgauggggucaagcuggaauccaugggcguguaccaaauucuggccaucuauagcacgguugcuuccucucucgugcugcuugucagccugggagccaucuccuucuggaugugcucuaacggcagccuccagugucggauuugcaucuga

SEQ ID NO: 195689 - RNA, 1698 nt, Artificial Sequence
  derived and/or modified CDS sequence (opt5) from hemagglutinin__InfluenzaA__ACZ05590
augaaggugaaacugcucguccugcuuugcaccuucacagccacguacgcugacaccaucuguauuggcuaucacgccaacaauagcacagauaccguugacacagugcuggagaagaacgugaccgucacacauuccgugaaucuccuggaaaacucucacaaugggaaacuuugccugcucaagggaaucgcgccccugcagcugggcaacuguagcguugcuggguggauucucggaaauccugagugcgaacugcuuaucuccaaagagucuuggagcuacauuguggaaaagccgaaccccgagaauggcaccuguuauccugggcauuuugccgauuacgaggaacugagagagcaacucuccucugucagcuccuucgaacgguuugagaucuuccccaaggagagcucuuggccuaaccacacggugaccggaguuuccgccagcugcucucauaauggcgaauccagcuuuuaucgcaaccugcuuuggcugacaggcaaaaaugggcucuaccccaaccugucuaaguccuaugcuaauaacaaagagaaggaagugcugguccucuggggagugcaccacccuccgagcaucuccgaccagaaaacccuguaccauacagaggaugccuacgugucugucguuagcucccacuauagcagaaaguucacccccgaaauugcuaagcggccuaaagugcgcgaccaggagggcagaaucaacuacuauuggacgcuucuggagcccggggauacaauuaucuuugaagccaauggaaaccucauugcgccucgguacgccuucgcucugucucgcggcuuuggguccggaaucauuaauagcaacgcccccaugggcaagugugacgcuaaaugccagaccccgcaaggcgccaucaauucuagccuuccuuuccagaacgugcaucccgucacaaucggggaguguccuaaguaugugagauccgcgaaacugcggaugguuaccggacuccgcaauauucccucuauccagagcagaggccuguuuggggccauugcuggauucaucgaaggcggguggaccggaaugguggauggcugguacggcuaucaccaccagaacgagcaaggguccggauacgccgcugaccaaaagagcacacagaaugccauuaacggcaucacgaauaaagucaacucugugaucgaaaagaugaauacccaguuuacagccguugggaaggaguucaacaaacuggagcggcgcauggaaaaucucaacaagaaaguggaugacggauucauugauaucuggaccuacaacgcugagcugcuuguccugcucgaaaaugagagaacacuggacuuucaugacuccaacgugaagaaucuuuaugaaaaagucaagagccagcugaagaacaaugcgaaagagauuggcaacgggugcuucgaguuuuaccacaaguguaaugaugaaugcauggagucugugaaaaacggcaccuaugacuaccccaaguauuccgaagagagcaaacucaaucgggagaagaucgauggaguuaagcuggaauccaugggcguguaccagauucuggccaucuauucuacggucgcuagcucccucgugcugcuuguuucucugggggccaucagcuucuggaugugcuccaacggaagccuccagugucgcauuugcaucuga

SEQ ID NO: 195690 - RNA, 1701 nt, Artificial Sequence; identical to SEQ ID NO: 195685
  derived and/or modified CDS sequence (opt5) from hemagglutinin__InfluenzaA__ACZ05950

SEQ ID NO: 195691 - RNA, 1701 nt, Artificial Sequence; identical to SEQ ID NO: 195660
  derived and/or modified CDS sequence (opt5) from hemagglutinin__InfluenzaA__ACZ05961

SEQ ID NO: 195692 - RNA, 1701 nt, Artificial Sequence
  derived and/or modified CDS sequence (opt5) from hemagglutinin__InfluenzaA__ACZ05972
augaagaccaucauugcccugagcuacauccucugccugguguucgcucagaaacuucccggcaacgacaauuccacagccacgcugugucucgggcaccaugcggucccuaacggaaccauuguuaagacaaucaccaaugaucaaauugaggugacaaacgcuaccgaacuggugcagucuagcuccacaggcgagaucugcgacucuccgcaccagauccuugaugggaaaaauuguacccugauugacgcccuccugggagauccccagugcgacggcuuucaaaacaagaaaugggaucuguucgucgaaagaagcaaggccuauuccaauuguuacccuuaugacgugcccgauuacgcuucucuccggagccugguugccuccagcgggacgcuugaguuuaacaaugaaucuuucaacuggaccggagugacacagaauggcaccuccagcgcuugcauccgcagaucuaagaacuccuuuuucagccggcugaauuggcucacacaucugaacuuuaaauauccugcccuuaaugucaccaugcccaacaacgagcaguucgacaagcuguacauuuggggcgugcaccauccugggacggauaaagaccagaucuuucucuaugcgcaagccucuggacgcauuacaguuuccaccaagagaagccagcagacagcuaucccgaauauuggcucccggccccgcgugagaaacaucccuucucggaucagcauuuacuggaccaucgucaaacccggggauauucugcugaucaauuccaccggaaaccucauugccccucgcggcuacuucaagaucagaagcgggaagucuuccaucaugcggagcgacgcucccauuggaaaauguaauucugagugcaucacaccgaacggcagcauuccuaaugacaagcccuuucagaacgugaaucgcaucacguauggcgccuguccuagauacgugaaacaaaacacccugaaacuugcgacagggaugcggaauguccccgaaaaacagacccgcggaauuuucggcgccaucgcuggguuuaucgagaacggaugggaaggcaugguugaugggugguauggauucagacaccaaaauuccgagggccggggccaggccgcugaccugaagucuacacaggccgccauugaucagaucaacgggaaacucaauagacugauuggaaagaccaacgagaaguuccaccagaucgaaaaagaguuuagcgaaguggagggccgcauucaagaccuugaaaaguacguggaggauacgaaaaucgaccugugguccuauaacgcugagcuccuggucgcgcuggaaaaucagcauacaauugaucucaccgacagcgagaugaacaagcuguucgaaaagaccaagaagcagcuucgggagaaugccgaagauauggggaacggaugcuuuaaaaucuaccacaagugugacaaugcuugcaucggcucuauuagaaacgggacauaugaucaugacguguaccgcgacgaggcccugaauaaccgguuccagaucaaaggcguugagcucaaguccggauacaaagauuggauucuguggaucagcuuugccauuucuugcucccuucuguguguggcucuccugggcuucaucaugugggccugccaaaaggggaauaucagauguaacauuugcaucuga

SEQ ID NO: 195693 - RNA, 1701 nt, Artificial Sequence
  derived and/or modified CDS sequence (opt5) from hemagglutinin__InfluenzaA__ACZ05983
augaagaccaucauugcccugagcuacauccucugccugguguucgcucagaaacuucccggcaacgacaauuccacagccacgcugugucucgggcaccaugcggucccuaacggaaccauuguuaagacaaucaccaaugaucaaauugaggugacaaacgcuaccgaacuggugcagucuagcuccacaggcgagaucugcgacucuccgcaccagauccuugaugggaaaaauuguacccugauugacgcccuccugggagauccccagugcgacggcuuucaaaacaagaaaugggaucuguucgucgaaagaagcaaggccuauuccaauuguuacccuuaugacgugcccgauuacgcuucucuccggagccugguugccuccagcgggacgcuugaguuuaacaaugaaucuuucaacuggaccggagugacacagaauggcaccuccagcgcuugcauccgcagaucuaagaacuccuuuuucagccggcugaauuggcucacacaucugaacuuuaaauauccugcccuuaaugucaccaugcccaacaacgagcaguucgacaagcuguacauuuggggcgugcaccauccugggacggauaaagaccagaucuuucucuaugcgcaagccucuggacgcauuacaguuuccaccaagagaagccagcagacagcuaucccgaauauuggcucccggccccgcgugagaaacaucccuucucggaucagcauuuacuggaccaucgucaaacccggggauauucugcugaucaauuccaccggaaaccucauugccccucgcggcuacuucaagaucagaagcgggaagucuuccaucaugcggagcgacgcucccauuggaaaauguaauucugagugcaucacaccgaacggcagcauuccuaaugacaagcccuuucagaacgugaaucgcaacacguauggcgccuguccuagauacgugaaacaaaauacccugaaacuugcgacagggaugcggaacguccccgaaaaacagacccgcggaaucuucggcgccauugcuggguuuaucgagaauggaugggaaggcaugguugaugggugguauggauucagacaccagaacuccgagggccggggccaagccgcugaccugaagucuacacaggccgccaucgaucagauuaaugggaaacucaacagacugaucggaaagaccaacgagaaguuccaccagauugaaaaagaguuuagcgaaguggagggccgcauccaagaccuugaaaaguacguggaggauacgaaaauugaccugugguccuauaaugcugagcuccuggucgcgcuggaaaaccagcauacaaucgaucucaccgacagcgagaugaauaagcuguucgaaaagaccaagaagcagcuucgggagaacgccgaagauauggggaauggaugcuuuaaaauuuaccacaagugugacaacgcuugcaucggcucuaucagaaaugggacauaugaucaugacguguaccgcgacgaggcccugaacaaucgguuccagauuaaaggcguugagcucaaguccggauacaaagauuggauccuguggauuagcuuugccaucucuugcuuccuucuguguguggcucuccugggcuuuauuaugugggccugccaaaaggggaacaucagauguaauaucugcauuuga

SEQ ID NO: 195694 - RNA, 1701 nt, Artificial Sequence
  derived and/or modified CDS sequence (opt5) from hemagglutinin__InfluenzaA__ACZ05994
augaagaccaucauugcccugagcuacauccucugccugguguucgcucagaaacuucccggcaacgacaauuccacagccacgcugugucucgggcaccaugcggucccuaacggaaccauuguuaagacaaucaccaaugaucaaauugaggugacaaacgcuaccgaacuggugcagucuagcuccacaggcgagaucugcgacucuccgcaccagauccuugaugggaaaaauuguacccugauugacgcccuccugggagauccccagugcgacggcuuucaaaacaagaaaugggaucuguucgucgaaagaagcaaggccuauuccaauuguuacccuuaugacgugcccgauuacgcuucucuccggagccugguugccuccagcgggacgcuugaguuuaacaaugaaucuuucaacuggaccggagugacacagaauggcaccuccagcgcuugcauccgcagaucuaagaacuccuuuuucagccggcugaauuggcucacacaucugaacuuuaaauauccugcccuuaaugucaccgugcccaacaacgagcaguucgacaagcuguacauuuggggcguucaccauccugggacggauaaagaccagaucuuucucuaugcgcaagccucuggacgcauuacaguguccaccaagagaagccagcagacagcuaucccgaauauuggcucccggccccgcgucagaaacaucccuucucggaucagcauuuacuggaccaucgugaaacccggggauauucugcugaucaauuccaccggaaaccucauugccccucgcggcuacuucaagaucagaagcgggaagucuuccaucaugcggagcgacgcucccauuggaaaauguaauucugagugcaucacaccgaacggcagcauuccuaaugacaagcccuuucagaacgugaaucgcaucacguauggcgccuguccuagauacgucaaacaaaacacccugaaacuugcgacagggaugcggaauguucccgaaaaacagacccgcggaauuuucggcgccaucgcuggguuuaucgagaacggaugggaaggcaugguggaugggugguauggauucagacaccaaaauuccgagggccggggccaggccgcugaccugaagucuacacaggccgccauugaucagaucaacgggaaacucaauagacugauuggaaagaccaacgagaaguuccaccagaucgaaaaagaguuuagcgaaguggagggccgcauucaagaccuugaaaaguacgucgaggauacgaaaaucgaccugugguccuauaacgcugagcuccugguggcgcuggaaaaucagcauacaauugaucucaccgacagcgagaugaacaagcuguucgaaaagaccaagaagcagcuucgggagaaugccgaagauauggggaacggaugcuuuaaaaucuaccacaagugugacaaugcuugcaucggcucuauuagaaacgggacauaugaucaugacguuuaccgcgacgaggcccugaauaaccgguuccagaucaaaggcguggagcucaaguccggauacaaagauuggauucuguggaucagcuuugccauuucuugcuuccuucugugugucgcucuccugggcuuuaucaugugggccugccaaaaggggaauaucagauguaacauuugcaucuga

SEQ ID NO: 195695 - RNA, 1701 nt, Artificial Sequence; identical to SEQ ID NO: 195660
  derived and/or modified CDS sequence (opt5) from hemagglutinin__InfluenzaA__ACZ06005

SEQ ID NO: 195696 - RNA, 1701 nt, Artificial Sequence; identical to SEQ ID NO: 195660
  derived and/or modified CDS sequence (opt5) from hemagglutinin__InfluenzaA__ACZ06016

SEQ ID NO: 195697 - RNA, 1698 nt, Artificial Sequence
  derived and/or modified CDS sequence (opt5) from hemagglutinin__InfluenzaA__ACZ16013
augaaggugaaacugcucguccugcuuugcaccuucacagccacguacgcugacaccaucuguauuggcuaucacgccaacaauagcacagauaccguugacacagugcuggagaagaacgugaccgucacacauuccgugaaucuccuggaaaacucucacaaugggaaacuuugccugcucaagggaaucgcgccccugcagcugggcaacuguagcguugcuggguggauucucggaaauccugagugcgaacugcuuaucuccaaagagucuuggagcuacauuguggaaaagccgaaccccgagaauggcaccuguuauccugggcauuuugccgauuacgaggaacugagagagcaacucuccucugucagcuccuucgaacgguuugagaucuuccccaaggagagcucuuggccuaaccacacggugaccggaguuuccgccagcugcucucauaauggcgaaaacuccuuuuaucgcaaucugcuuuggcugacaggcaaaaacgggcucuaccccaaucugagcaagucuuaugcuaacaacaaagagaaggaagugcugguccucuggggagugcaccacccuccgaauaucgccgaccagaaaacccuguaccauacagagaaggcuuacguguccgucguuagcucccacuauucuagaaaguucacccccgaaauugccaaacggccuaaggugcgcgaucaggagggcagaaucaacuacuauuggacgcuucuggagcccggggacacaauuaucuuugaagcgaauggaaaccucauugccccucgguacgcuuucgcccugagccgcggcuuuggguccggaaucauuaauagcaacgcucccauggauaaaugugacgccaagugccagaccccgcaaggcgcgaucaauucuucccuuccuuuccagaacgugcaucccgucacaaucggcgaguguccuaaauaugugagaagcgccaagcugcggaugguuaccgggcuccgcaauauucccucuauccagagcagaggacuguuuggcgcuauugccggguucaucgaaggaggcuggaccgggaugguggauggaugguacggcuaucaccaccagaacgagcaaggcuccggguacgcugccgaccagaaaucuacacagaaugccauuaacggaaucacgaauaaggucaacagcgugaucgaaaagaugaauacccaguuuacagcuguuggcaaagaguucaacaagcuggagcggcgcauggaaaaccucaauaaaaagguggaugacggguucauugauaucuggaccuacaacgcggagcugcuuguccugcucgaaaaugagagaacacuggacuuucaugacuccaacgugaaaaaucuuuaugaaaaggucaagagccaacugaaaaacaaugccaaggagauuggaaacggcugcuucgaguuuuaccacaaauguaaugaugaaugcauggagucugugaagaacgggaccuaugacuaccccaaauauuccgaagagagcaagcucaaucgggagaagaucgauggcguuaaacuggaaucuaugggaguguaccagauucuggcuaucuauuccacggucgccagcucccucgugcugcuuguuucucugggcgccaucagcuucuggaugugcuccaacgggucucuccagugucgcauuugcaucuga

SEQ ID NO: 195698 - RNA, 1698 nt, Artificial Sequence
  derived and/or modified CDS sequence (opt5) from hemagglutinin__InfluenzaA__ACZ16023
augaaggugaaacugcucguccugcuuugcaccuucacagccacguacgcugacaccaucuguauuggcuaucacgccaacaauagcacagauaccguugacacagugcuggagaagaacgugaccgucacacauuccgugaaucuccuggaaaacucucacaaugggaaacuuugccugcucaagggaaucgcgccccugcagcugggcaacuguagcguugcuggguggauucucggaaauccugagugcgaacugcuuaucuccaaagagucuuggagcuacauuguggaaaagccgaaccccgagaauggcaccuguuauccugggcauuuugccgauuacgaggaacugagagagcaacucuccucugucagcuccuucgaacgguuugagaucuuccccaaggagagcucuuggccuaaccacacggugaccggaguuuccgccagcugcucucauaauggcgaaaacuccuuuuaucgcaaucugcuuuggcugacaggcaaaaacgggcucuaccccaaucugagcaagucuuaugcuaacaacaaagagaaggaagugcugguccucuggggagugcaccacccuccgaauaucgccgaccagaaaacccuguaccauacagagaacgcuuacguguccgucguuagcucccacuauucuagaaaguucacccccgaaauugccaagcggccuaaagugcgcgaucaggagggcagaaucaauuacuauuggacgcuucuggagcccggggacacaauuaucuuugaagcgaacggaaaucucauugccccucgguacgcuuucgcccugagccgcggcuuuggguccggaaucauuaacagcaaugcucccauggauaagugugacgccaaaugccagaccccgcaaggcgcgaucaacucuucccuuccuuuccagaaugugcaucccgucacaaucggcgaguguccuaaguaugugagaagcgccaaacugcggaugguuaccgggcuccgcaacauucccucuauccagagcagaggacuguuuggcgcuauugccggguucaucgaaggaggcuggaccgggaugguggauggaugguacggcuaucaccaccagaaugagcaaggcuccggguacgcugccgaccagaagucuacacagaacgccauuaauggaaucacgaacaaagucaauagcgugaucgaaaagaugaacacccaguuuacagcuguuggcaaggaguucaacaaacuggagcggcgcauggaaaaucucaacaagaaaguggaugacggguucauugauaucuggaccuacaaugcggagcugcuuguccugcucgaaaacgagagaacacuggacuuucaugacuccaaugugaagaaccuuuaugaaaaagucaagagccaacugaagaauaacgccaaagagauuggaaauggcugcuucgaguuuuaccacaaguguaacgaugaaugcauggagucugugaaaaaugggaccuaugacuaccccaaguauuccgaagagagcaaacucaaccgggagaagaucgauggcguuaagcuggaaucuaugggaguguaccagauucuggcuaucuauuccacggucgccagcucccucgugcugcuuguuucucugggcgccaucagcuucuggaugugcuccaaugggucucuccagugucgcauuugcaucuga

SEQ ID NO: 195699 - RNA, 1698 nt, Artificial Sequence
  derived and/or modified CDS sequence (opt5) from hemagglutinin__InfluenzaA__ACZ16033
augaaggugaaacugcucguccugcuuugcaccuucacagccacguacgcugacaccaucuguauuggcuaucacgccaacaauagcacagauaccguugacacagugcuggagaagaacgugaccgucacacauuccgugaaucuccuggaaaacucucacaaugggaaacuuugccugcucaagggaaucgcgccccugcagcugggcaacuguagcguugcuggguggauucucggaaauccugagugcgaacugcuuaucuccaaagagucuuggagcuacauuguggaaaagccgaaccccgagaauggcaccuguuauccugggcauuuugccgauuacgaggaacugagagagcaacucuccucugucagcuccuucgaacgguuugagaucuuccccaaggagagcucuuggccuaaccacacggugaccggagccuccgcuagcugcucucauaauggcgaaaacuccuuuuaucgcaaucugcuuuggcugacaggcaaaaacgggcucuaccccaaucugagcaagucuuaugccaacaacaaagagaaggaaguucuggugcucuggggaguccaccacccuccgaauaucgcugaccagaaaacccuguaccauacagagaacgccuacguguccguggucagcucccacuauucuagaaaguucacccccgaaauugcgaagcggccuaaaguucgcgaucaggagggcagaaucaauuacuauuggacgcuucuggagcccggggacacaauuaucuuugaagccaacggaaaucucauugcuccucgguacgccuucgcucugagccgcggcuuuggguccggaaucauuaacagcaaugcccccauggauaagugugacgcgaaaugccagaccccgcaaggcgccaucaacucuucccuuccuuuccagaauauccaucccgugacaauuggcgaguguccuaaguaugugagaagcgcuaaacugcggauggucaccgggcuccgcaacauccccucuauucagagcagaggacuguuuggcgccaucgcuggguucauugaaggaggcuggaccgggaugguggauggaugguacggcuaucaccaccagaaugagcaaggcuccggguacgccgccgaccagaagucuacacagaacgcuaucaauggaaucacgaacaaaguuaauagcgugauugaaaagaugaacacccaguuuacagcggucggcaaggaguucaacaaacuggagcggcgcauggaaaaucucaacaagaaaguggaugacggguucaucgauauuuggaccuacaaugccgagcugcuuguucugcucgaaaacgagagaacacuggacuuucaugacuccaaugugaagaaccuuuaugaaaaagucaagagccaacugaagaauaacgcuaaagagaucggaaauggcugcuucgaguuuuaccacaaguguaacgaugaaugcauggagucugugaaaaaugggaccuaugacuaccccaaguauuccgaagagagcaaacucaacaaggagaagauugauggcgucaaacuggaaucuaugggaguguaccagauccuggccaucuauuccacgguugccagcucccucgugcugcuugucucucugggcgcuauuagcuucuggaugugcuccaaugggucucuccagugucggaucugcauuuga

SEQ ID NO: 195700 - RNA, 1701 nt, Artificial Sequence; identical to SEQ ID NO: 194728
  derived and/or modified CDS sequence (opt5) from hemagglutinin__InfluenzaA__ACZ16040

SEQ ID NO: 195701 - RNA, 1701 nt, Artificial Sequence; identical to SEQ ID NO: 194728
  derived and/or modified CDS sequence (opt5) from hemagglutinin__InfluenzaA__ACZ16050

SEQ ID NO: 195702 - RNA, 1701 nt, Artificial Sequence; identical to SEQ ID NO: 194728
  derived and/or modified CDS sequence (opt5) from hemagglutinin__InfluenzaA__ACZ16060

SEQ ID NO: 195703 - RNA, 1701 nt, Artificial Sequence
  derived and/or modified CDS sequence (opt5) from hemagglutinin__InfluenzaA__ACZ16070
augaaggccauccuggugguccuccuguacaccuucgcuacagccaacgcggacacgcuuugcauuggcuaucacgcuaauaacagcaccgauacaguugacaccgugcuggagaagaaugugacagucacccauuccgugucucuccuggaagauaagcacaacgggaaacuuuguaagcugagaggaguugcuccccuccaucugggcaaaugcaauaucgccggguggauucugggaaacccugagugugaaagccucuccacagccucuagcugguccuacaucguggagaccucuagcuccgacaauggcacgugcuauccgggggauuuuauugacuacgaagaacugcgggagcagcuuagcucugucuccagcuucgaacgcuuugagaucuuccccaagaccucuuccuggccuaaccacgauagcaauaagggagugacagccgcuuguccccaugccggcgcgaaaucuuuuuauaagaaccugaucuggcucguuaaaaagggcaauuccuacccuaaacugagcaaguccuauauuaacgacaaggggaaagaagugcuuguccuguggggaauccaccaccccucuaccagcgccgaucaacagucccucuaccagaaugcugacgccuacguguucgugggcagcucuagauauuccaagaaauuuaagccugagauugcuauccggccgaaaguccgcgaucaggaggggagaaugaacuacuauuggacacugguugaacccggagacaagauuaccuucgaggccacgggcaaucugguggugccucgguacgcguuugccauggaacgcaacgcugggagcggaaucauuaucucugauacacccguccaugacugcaacaccacaugucaaaccccuaaaggcgccaucaauaccagccuccccuuccagaacauucacccgaucacaauuggcaagugcccuaaguaugugaaauccacgaagcugagacuugcuaccgggcugcggaauguucccucuauccagagccgcggacucuuuggcgccauugccggguucaucgagggaggcuggacagggaugguggacggaugguacggcuaucaucaccagaacgaacaaggcuccggguacgcugcggaucugaaaagcacccagaaugccaucgacgagauuacaaacaaggucaauucugugaucgagaaaaugaacacccaguuuacggcuguuggaaaggaguucaaucaccuugagaagagaauugaaaaccugaauaaaaagguggaugacggcuuccucgauaucuggacauacaacgccgagcugcugguccuccuggaaaaugagcggacccuugacuaucaugauuccaacgugaaaaaucuguacgagaagguccgcagccagcucaaaaacaacgccaaggaaauugggaauggauguuuugaguucuaucacaagugcgacaacaccuguauggaaucugugaaaaauggcacauacgauuauccuaaguacuccgaggaagcuaaacugaacagagaggagaucgacgggguuaaacuugaaagcacccggaucuaucaaauucuggccaucuacuccacaguggcgucuagccucguccuggugguuucccugggcgcuauuucuuuuuggaugugcagcaauggaucccuccagugccgcaucuguauuuga

SEQ ID NO: 195704 - RNA, 1701 nt, Artificial Sequence
  derived and/or modified CDS sequence (opt5) from hemagglutinin__InfluenzaA__ACZ16080
augaaggccauccuggugguccuccuguacaccuucgcuacagccaacgcggacacgcuuugcauuggcuaucacgcuaauaacagcaccgauacaguugacaccgugcuggagaagaaugugacagucacccauuccgugaaccuccuggaagauaagcacaaugggaaacuuuguaagcugagaggaguugcuccccuccaucugggcaaaugcaacaucgccggguggauucugggaaauccugagugugaaucucucagcacagccuccucuuggagcuacaucguggagaccuccucuagcgacaacggcacgugcuauccgggggauuuuauugacuacgaagaacugcgggagcagcuuuccagcgucucuuccuucgaacgcuuugagaucuuccccaagaccagcucuuggccuaaucacgauuccaacaagggagugacagccgcuuguccccaugccggcgcgaaaucuuuuuauaagaaucugaucuggcucguuaaaaagggcaacagcuacccuaaacuguccaagagcuauauuaaugacaaggggaaagaagugcuuguccuguggggaauccaccaccccuccaccucugccgaucaacagagccucuaccagaacgcugacgccuacguguucgugggcuccagcagauauucuaagaaauuuaagccugagauugcuauccggccgaaaguccgcgaucaggaggggagaaugaauuacuauuggacacugguugaacccggagacaagauuaccuucgaggccacgggcaaccugguggugccucgguacgcguuugccauggaacgcaacgauggguccggaaucauuaucagcgacacacccguccaugacugcaauaccacaugucaaaccccuaaaggcgcuaucaacaccucucuccccuuccagaauauucacccgaucacaauuggcaagugcccuaaguaugugaaaagcacgaagcugagacuugccaccgggcugcggaacguucccuccauccagucucgcggacucuuuggcgcuauugccggguucaucgagggaggcuggacagggaugguggauggaugguacggcuaucaucaccagaaugaacaaggcagcggguacgccgcugaccugaaauccacccagaacgcgaucgaugagauuacaaauaaggucaacagcgugaucgagaaaaugaauacccaguuuacggccguuggaaaggaguucaaccaccuugagaagagaauugaaaaucugaacaaaaagguggacgauggcuuccucgacaucuggacauacaaugcugagcugcugguccuccuggaaaacgagcggacccuugauuaucaugacucuaaugugaaaaaccuguacgagaagguccgcucccagcucaaaaacaaugccaaggaaauugggaacggauguuuugaguucuaucacaagugcgauaauaccuguauggaaagcgugaaaaacggcacauacgacuauccuaaguacucugaggaagccaaacugaauagagaggagaucgaugggguuaaacuugaauccacccggaucuaucaaauucuggcuaucuacagcacaguggccuccucucucguccuggugguuagccugggcgcgauuuccuuuuggaugugcucuaacggaagccuccagugccgcaucuguauuuga

SEQ ID NO: 195705 - RNA, 1701 nt, Artificial Sequence
  derived and/or modified CDS sequence (opt5) from hemagglutinin__InfluenzaA__ACZ16090
augaaggccauccugcucgugcugcuuuacaccuucgcuacagccaacgcggacacgcugugcauuggcuaucacgcuaauaacagcaccgauacagucgacaccguucucgagaaaaaugugacagugacccauuccgucaaccugcuugaagauaagcacaaugggaaacuguguaagcucagaggaguggcuccccugcaucugggcaaaugcaacaucgccggguggauucucggaaauccugagugugaaucucugagcacagccuccucuuggagcuacaucguugagaccuccucuagcgacaacggcacgugcuauccgggggauuuuauugacuacgaagaacuucgggagcagcuguccagcaugucuuccuucgaacgcuuugagaucuuccccaagaccagcucuuggccuaaucacgauuccaacaagggagugacagccgcuuguccccaugccggcgcgaaaucuuuuuauaagaaucucaucuggcuggucaaaaagggcaacagcuacccuaaacuuuccaagagcuauauuaaugacaaggggaaagaagugcugguucucuggggaauccaccaccccuccaccucugccgaucaacagagccuguaccagaacgcugacgccuacguguucgucggcuccagcagauauucuaagaaauuuaagccugagauugcuauccggccgaaagugcgcgaucaggaggggagaaugaauuacuauuggacacugguggaacccggagacaagauuaccuucgaggccacgggcaaccucgucguuccucgguacgcguuugccauggaacgcaacgcuggguccggaaucauuaucagcgauacacccgugcaugacugcaauaccacaugucaaaccccuaaaggcgccaucaacaccucucugcccuuccagaauauucacccgaucacaauuggcaagugcccuaaguaugugaaaagcacgaaacuuagacuggcuaccgggcuccggaacguccccuccauccagucucgcggacuguuuggcgccauugccggguucaucgagggaggcuggacagggaugguggacggaugguacggcuaucaucaccagaaugaacaaggcagcggguacgcugcggaucuuaaguccacccagaacgccaucgacgagauuacaaauaagguuaacagcgugaucgagaaaaugaauacccaguuuacggcugucggaaaggaguucaaccaccuggagaagagaauugaaaaucucaacaaaaagguggaugacggcuuccuggauaucuggacauacaaugccgagcugcucguucugcuugaaaacgagcggacccuggacuaucaugauucuaaugugaaaaaccucuacgagaagguccgcucccagcugaaaaacaaugccaaggaaauugggaacggauguuuugaguucuaucacaagugcgacaauaccuguauggaaagcgugaaaaacggcacauacgauuauccuaaguacucugaggaagcuaaacuuaauagagaggagaucgacggggucaagcuggaauccacccggaucuaucaaauucucgccaucuacagcacaguggcguccucucugguucugguggucagccucggcgcuauuuccuuuuggaugugcucuaacggaagccugcagugccgcaucuguauuuga

SEQ ID NO: 195706 - RNA, 1701 nt, Artificial Sequence; identical to SEQ ID NO: 194728
  derived and/or modified CDS sequence (opt5) from hemagglutinin__InfluenzaA__ACZ16100

SEQ ID NO: 195707 - RNA, 1701 nt, Artificial Sequence; identical to SEQ ID NO: 194728
  derived and/or modified CDS sequence (opt5) from hemagglutinin__InfluenzaA__ACZ16110

SEQ ID NO: 195708 - RNA, 1701 nt, Artificial Sequence; identical to SEQ ID NO: 194728
  derived and/or modified CDS sequence (opt5) from hemagglutinin__InfluenzaA__ACZ16120

SEQ ID NO: 195709 - RNA, 1701 nt, Artificial Sequence; identical to SEQ ID NO: 195476
  derived and/or modified CDS sequence (opt5) from hemagglutinin__InfluenzaA__ACZ16130

SEQ ID NO: 195710 - RNA, 1701 nt, Artificial Sequence; identical to SEQ ID NO: 194728
  derived and/or modified CDS sequence (opt5) from hemagglutinin__InfluenzaA__ACZ16140

SEQ ID NO: 195711 - RNA, 1701 nt, Artificial Sequence; identical to SEQ ID NO: 194728
  derived and/or modified CDS sequence (opt5) from hemagglutinin__InfluenzaA__ACZ16150

SEQ ID NO: 195712 - RNA, 1701 nt, Artificial Sequence; identical to SEQ ID NO: 194728
  derived and/or modified CDS sequence (opt5) from hemagglutinin__InfluenzaA__ACZ16160

SEQ ID NO: 195713 - RNA, 1701 nt, Artificial Sequence; identical to SEQ ID NO: 194921
  derived and/or modified CDS sequence (opt5) from hemagglutinin__InfluenzaA__ACZ16170

SEQ ID NO: 195714 - RNA, 1701 nt, Artificial Sequence
  derived and/or modified CDS sequence (opt5) from hemagglutinin__InfluenzaA__ACZ16180
augaaggccauccuggugguccuccuguacaccuucgcuacagccaacgcggacacgcuuugcauuggcuaucacgcuaauaacagcaccgauacaguugacaccgugcuggagaagaaugugacagucacccauuccgugaaccuccuggaagauaagcacaaugggaaacuuuguaagcugagaggaguugcuccccuccaucugggcaaaugcaacaucgccggguggauucugggaaauccugagugugaaucucucuacacagccagcuccuggucuuauaucguggagaccagcuccucugacaacggcacgugcuacccgggggauuuuauugacuaugaagaacugcgggagcagcuuagcuccgucagcucuuucgaacgcuuugagaucuuccccaagaccuccagcuggccuaaucacgauucuaacaagggagugacagccgcuuguccccaugccggcgcgaaauccuuuuacaagaaucugaucuggcucguuaaaaagggcaacagcuauccuaaacugucuaaguccuacauuaaugacaaggggaaagaagugcuuguccuguggggaauccaccaccccagcaccuccgccgaucaacagucucucuaccagaacgcugacgccuauguguucgugggcagcuccagauacagcaagaaauuuaagccugagauugcuauccggccgaaaguccgcgaucaggaggggagaaugaauuauuacuggacacugguugaacccggagacaagauuaccuucgaggccacgggcaaccugguggugccucgguaugcguuugccauggaacgcaacgcugggucuggaaucauuaucuccgauacacccguccaugacugcaauaccacaugucaaaccccuaaaggcgccaucaacaccagccuccccuuccagaauauucacccgaucacaauuggcaagugcccuaaguacgugaaaucuacgaagcugagacuugcuaccgggcugcggaacguucccagcauccagucccgcggacucuuuggcgccauugccggguucaucgagggaggcuggacagggaugguggacggaugguauggcuaccaucaccagaaugaacaaggcucuggguacgcugcggaucugaaaagcacccagaacgccaucgacgagauuacaaauaaggucaacuccgugaucgagaaaaugaauacccaguuuacggcuguuggaaaggaguucaaccaccuugagaagagaauugaaaaucugaacaaaaagguggaugacggcuuccucgauaucuggacauauaaugccgagcugcugguccuccuggaaaacgagcggacccuugacuaccaugauagcaaugugaaaaaccuguaugagaagguccgcucucagcucaaaaacaaugccaaggaaauugggaacggauguuuugaguucuaccacaagugcgacaauaccuguauggaauccgugaaaaacggcacauaugauuacccuaaguauagcgaggaagcuaaacugaauagagaggagaucgacgggguuaaacuugaaucuacccggaucuaccaaauucuggccaucuacuccacaguggcgagcucccucguccuggugguuucucugggcgcuauuagcuuuuggaugugcuccaacggaucucuccagugccgcaucuguauuuga

SEQ ID NO: 195715 - RNA, 1701 nt, Artificial Sequence; identical to SEQ ID NO: 194728
  derived and/or modified CDS sequence (opt5) from hemagglutinin__InfluenzaA__ACZ16190

SEQ ID NO: 195716 - RNA, 1701 nt, Artificial Sequence
  derived and/or modified CDS sequence (opt5) from hemagglutinin__InfluenzaA__ACZ16200
augaaggccauccuggugguccuccuguacaccuucgcuacagccaaccccgacacgcuuugcauuggcuaucacgcgaauaacagcaccgauacaguugacaccgugcuggagaaaaaugugacagucacccauuccgugaaccuccuggaagauaagcacaaugggaaacuuuguaagcugagaggaguugcuccucuccaucugggcaaaugcaacaucgccggguggauucugggaaauccggagugugaaucucucagcacagccuccucuuggagcuacaucguggagaccuccucuagcgacaacggcacgugcuaucccggggauuuuauugacuacgaagaacugcgggagcagcuuuccagcgucucuuccuucgaacgcuuugagaucuucccuaagaccagcucuuggcccaaucacgauuccaacaagggagugacagcugccuguccucaugcuggcgccaagagcuuuuauaagaaucugaucuggcucguuaaaaagggcaacucuuaccccaaacuguccaagagcuauauuaaugacaaggggaaagaagugcuuguccuguggggaauccaccacccuuccaccucugcggaucaacagagccucuaccagaacgccgacgcuuacguguucgugggcuccagcagauauucuaagaaauuuaagccggagauugccauccggcccaaaguccgcgaucaggaggggagaaugaauuacuauuggacacugguugaaccuggagacaagauuaccuucgaggcuacgggcaaccugguggugccccgguacgccuuugcgauggaacgcaacgccggguccggaaucauuaucagcgauacaccuguccaugacugcaauaccacaugucaaacccccaaaggcgcuaucaacaccucucucccguuccagaauauucacccuaucacaauuggcaagugccccaaguaugugaaaagcacgaagcugagacuugccaccgggcugcggaacguuccuuccauccagucucgcggacucuuuggcgcuauugccggguucaucgagggaggcuggacagggaugguggacggaugguacggcuaucaucaccagaaugaacaaggcagcggguacgccgcugaucugaaauccacccagaacgcgaucgacgagauuacaaauaaggucaacagcgugaucgagaaaaugaauacccaguuuacggccguuggaaaggaguucaaccaccuugagaagagaauugaaaaucugaacaaaaagguggaugacggcuuccucgauaucuggacauacaaugcugagcugcugguccuccuggaaaacgagcggacccuugacuaucaugauucuaaugugaaaaaccuguacgagaagguccgcucccagcucaaaaacaaugccaaggaaauugggaacggauguuuugaguucuaucacaagugcgacaauaccuguauggaaagcgugaaaaacggcacauacgauuaucccaaguacucugaggaagccaaacugaauagagaggagaucgacgggguuaaacuugaauccacccggaucuaucaaauucuggcuaucuacagcacaguggccuccucucucguccuggugguuagccugggcgcgauuuccuuuuggaugugcucuaacggaagccuccagugccgcaucuguauuuga

SEQ ID NO: 195717 - RNA, 1701 nt, Artificial Sequence; identical to SEQ ID NO: 194728
  derived and/or modified CDS sequence (opt5) from hemagglutinin__InfluenzaA__ACZ16210

SEQ ID NO: 195718 - RNA, 1701 nt, Artificial Sequence; identical to SEQ ID NO: 194728
  derived and/or modified CDS sequence (opt5) from hemagglutinin__InfluenzaA__ACZ16220

SEQ ID NO: 195719 - RNA, 1701 nt, Artificial Sequence; identical to SEQ ID NO: 195476
  derived and/or modified CDS sequence (opt5) from hemagglutinin__InfluenzaA__ACZ16230

SEQ ID NO: 195720 - RNA, 1701 nt, Artificial Sequence
  derived and/or modified CDS sequence (opt5) from hemagglutinin__InfluenzaA__ACZ16240
augaaggccauccuggugguccuccuguacaccuucgcuacagccaacgcggacacgcuuugcauuggcuaucacgcuaauaacagcaccgauacaguugacaccgugcuggagaagaaugugacagucacccauuccgugaacauccucgaagauaagcacaaugggaaacuguguaaacuuagaggaguugcuccccugcaucucggcaagugcaacauugccggguggauccugggaaauccugagugugaaucucugagcacagccuccucuuggagcuacauuguggagaccuccucuagcgacaacggcacgugcuauccgggggauuuuaucgacuacgaagaacuccgggagcagcuguccagcgucucuuccuucgaacgcuuugagaucuuccccaagaccagcucuuggccuaaucacgauuccaacaagggagugacagccgcuuguccccaugccggcgcgaaaucuuuuuauaagaaucuuauuuggcugguuaaaaagggcaacagcuacccuaaacucuccaagagcuauaucaaugacaaggggaaagaagugcugguccuuuggggcauucaccaccccuccaccucugccgaucaacagagccuguaccagaacgcugacgccuacguguucgugggauccagcagauauucuaagaaauuuaagccugagaucgcuauucggccgaaaguccgcgaucaggaggggagaaugaauuacuauuggacacucguugaacccggagacaagaucaccuucgaggccacgggcaaccugguggugccucgguacgcguuugccauggaacgcaacgcuggguccggaauuaucaucagcgauacacccguccaugacugcaauaccacaugucaaaccccuaaaggcgccauuaacaccucucugcccuuccagaauauccacccgauuacaaucggcaagugcccuaaguaugugaaaagcacgaagcucagacuggcuaccgggcuucggaacguucccuccauucagucucgcggacuguuuggcgccaucgccggguucaucgagggaggcuggacagggaugguggacggaugguacggcuaucaucaccagaaugaacaaggcagcggguacgcugcggaucucaaauccacccagaacgcccuggacgagauuacaaauaaggucaacagcgugaucgagaaaaugaauacccaguuuacggcuguuggaaaggaguucaaccaccuugagaagagaauugaaaaucugaacaaaaagguggaugacggcuuccucgauaucuggacauacaaugccgagcugcugguccuccuggaaaacgagcggacccuugacuaucaugauucuaaugugaaaaaccuguacgagaagguccgcucccagcucaaaaacaaugccaaggaaauugggaacggauguuuugaguucuaucacaagugcgacaauaccuguauggaaagcgugaaaaacggcacauacgauuauccuaaguacucugaggaagcuaaacugaauagagaggagaucgacgggguuaaacuugaauccacccggaucuaucaaauucuggccaucuacagcacaguggcguccucucucguccuggugguuagccugggcgcuauuuccuuuuggaugugcucuaacggaagccuccagugccgcaucuguauuuga

SEQ ID NO: 195721 - RNA, 1701 nt, Artificial Sequence; identical to SEQ ID NO: 194728
  derived and/or modified CDS sequence (opt5) from hemagglutinin__InfluenzaA__ACZ16260

SEQ ID NO: 195722 - RNA, 1701 nt, Artificial Sequence
  derived and/or modified CDS sequence (opt5) from hemagglutinin__InfluenzaA__ACZ16270
augaaggccauccuggugguccuccuguacaccuucgcuacagccaacgcggacacgcuuugcauuggcuaucacgcuaauaacagcaccgauacaguugacaccgugcuggagaagaaugugacagucacccauuccgugaaccuccuggaagauaagcacaaugggaaacuuuguaagcugagaggaguugcuccccuccaucugggcaaaugcaacaucgccggguggauucugggaaauccugagugugaaucucucagcacagccuccucuuggagcuacaucguggagaccuccucuagcgacaacggcacgugcuauccgggggauuuuauugacuacgaagaacugcgggagcagcuuuccagcgucucuuccuucgaacgcuuugagaucuuccccaagaccagcucuuggccuaaucacgauuccaacaagggagugacagccgcuuguccccaugccggcgcgaaaucuuuuuauaagaaucugaucuggcucguuaaaaagggcaacagcuacccuaaacuguccaagagcuauauuaaugacaaggggaaagaagugcuuguccuguggggaauccaccaccccuccaccucugccgaucaacagaaccucuaccagaaugcugacgccuacguguucgugggcagcuccagauauagcaagaaauuuaagccugagauugcuauccggccgaaaguccgcgaucaggaggggagaaugaacuacuauuggacacugguugaacccggagacaagauuaccuucgaggccacgggcaaccugguggugccucgguacgcguuugccauggaacgcaaugcugggucuggaaucauuaucuccgauacacccguccaugacugcaacaccacaugucaaaccccuaaaggcgccaucaauaccagccuccccuuccagaacauucacccgaucacaauuggcaagugcccuaaguaugugaaaucuacgaagcugagacuugcuaccgggcugcggaauguucccagcauccagucccgcggacucuuuggcgccauugccggguucaucgagggaggcuggacagggaugguggacggaugguacggcuaucaucaccagaacgaacaaggcucuggguacgcugcggaucugaaaagcacccagaaugccaucgacgagauuacaaacaaggucaauuccgugaucgagaaaaugaacacccaguuuacggcuguuggaaaggaguucaaucaccuugagaagagaauugaaaaccugaauaaaaagguggaugacggcuuccucgauaucuggacauacaacgccgagcugcugguccuccuggaaaaugagcggacccuugacuaucaugauagcaacgugaaaaaccuguacgagaagguccgcucucagcucaaaaauaacgccaaggaaauugggaauggauguuuugaguucuaucacaagugcgacaacaccuguauggaauccgugaaaaauggcacauacgauuauccuaaguacagcgaggaagcuaaacugaacagagaggagaucgacgggguuaaacuugaaucuacccggaucuaucaaauucuggccaucuacuccacaguggcgagcucccucauucuggucgugucucugggcgcuaucagcuuuuggaugugcuccaauggaucucuccagugccgcauuuguaucuga

SEQ ID NO: 195723 - RNA, 1701 nt, Artificial Sequence; identical to SEQ ID NO: 195403
  derived and/or modified CDS sequence (opt5) from hemagglutinin__InfluenzaA__ACZ16280

SEQ ID NO: 195724 - RNA, 1701 nt, Artificial Sequence; identical to SEQ ID NO: 194728
  derived and/or modified CDS sequence (opt5) from hemagglutinin__InfluenzaA__ACZ16290

SEQ ID NO: 195725 - RNA, 1701 nt, Artificial Sequence
  derived and/or modified CDS sequence (opt5) from hemagglutinin__InfluenzaA__ACZ16300
augaaggccauccuggugguccuccuguacaccuucgcuacagccaacgcggacacgcuuugcauuggcuaucacgcuaauaacagcaccgauacaguugacaccgugcuggagaaaaaugugaucgucacacauuccgugaaccuccuggaagauaagcacaaugggaaacuuuguaagcugagaggaguugcuccccuccaucugggcaaaugcaacauugccggguggauccugggaaauccugagugugaaucucucagcaccgccuccucuuggagcuacauuguggagacauccucuagcgacaacggaaccugcuauccgggggauuuuaucgacuacgaagaacugcgggagcagcuuuccagcgucucuuccuucgaacgcuuugagaucuuccccaagacgagcucuuggccuaaucacgauuccaacaagggagugaccgccgcuuguccccaugccggcgcgaaaucuuuuuauaagaaucugauuuggcucguuaaaaagggcaacagcuacccuaaacuguccaagagcuauaucaaugacaaggggaaagaagugcuuguccuguggggcauucaccaccccuccacaucugccgaucaacagagccucuaccagaacgcugacgccuacguguucgugggcuccagcagauauucuaagaaauuuaagccugagaucgcuauucggccgaaaguccgcgaucaggaggggagaaugaauuacuauuggacccugguugaacccggagacaagaucacauucgaggccaccggcaaccugcucgugccucgguacgcguuugccauggaacgcaacgcuggguccggaauuaucaucagcgauacgcccgugcaugacugcaauacaaccugucaaacaccuaaaggcgccauuaacaccucucugcccuuccagaauauccacccgauuaccaucggcaagugcccuaaguaugucaaaagcacaaaacuuagacuggcuacggggcuccggaacgugcccuccauucagucucgcggacuguuuggcgccaucgccggguucaucgagggaggcuggaccgggaugguugacggaugguacggcuaucaucaccagaaugaacaaggcagcggguacgcugcggaucuuaaguccacacagaacgccauugacgagaucaccaauaaggugaacagcgucauugagaaaaugaauacacaguuuaccgcugugggaaaggaguucaaccaccuggagaagagaaucgaaaaucucaacaaaaagguugaugacggcuuccuggauauuuggacguacaaugccgagcugcucgugcugcuugaaaacgagcggacacuggacuaucaugauucuaaugucaaaaaccucuacgagaaggugcgcucccagcugaaaaacaaugccaaggaaaucgggaacggauguuuugaguucuaucacaagugcgacaauaccuguauggaaagcgucaaaaacggcaccuacgauuauccuaaguacucugaggaagcuaaacuuaauagagaggagaucgacggggugaagcuggaauccacacggauuuaucaaauccucgccauuuacagcaccguugcguccucucuggugcuggucgugagccucggcgcuaucuccuuuuggaugugcucuaacggaagccugcagugccgcauuuguaucuga

SEQ ID NO: 195726 - RNA, 1701 nt, Artificial Sequence; identical to SEQ ID NO: 195471
  derived and/or modified CDS sequence (opt5) from hemagglutinin__InfluenzaA__ACZ16310

SEQ ID NO: 195727 - RNA, 1701 nt, Artificial Sequence
  derived and/or modified CDS sequence (opt5) from hemagglutinin__InfluenzaA__ACZ16320
augaaggccauccuggugguccuccuguacaccuucgcuacagccaacgcggacacgcuuugcauuggcuaucacgcuaauaacagcaccgauacaguugacaccgugcuggagaaaaaugugacagucacccauuccgugaaccuccuggaagauaagcacaaugggaaacuuuguaagcugagaggaguugcuccccuccaucugggcaaaugcaacaucgccggguggauucugggaaauccugagugugaaucucucagcacagccuccucuuggagcuacaucguggagaccuccucuagcgacaacggcacgugcuauccgggggauuuuauugacuacgaagaacugcgggagcagcuuuccagcgucucuuccuucgaacgcuuugagaucuuccccaagaccagcucuuggccuaaucacgauuccaacaagggagugacagccgcuuguccccaugccggcgcgaaaucuuuuuauaagaaucugaucuggcucguuaaaaagggcaacagcuacccuaaacuguccaagagcuauauuaaugacaaggggaaagaagugcuuguccuguggggaauccaccaccccuccaccucugccgaucaacagagccucuaccagaacgcugacgccuacguguucgugggcuccagcagauauucuaagaaauuuaagccugagauugcuauccggccgaaaguccgcgaucaggaggggagaaugaauuacuauuggacacugguugaacccggagacaagauuaccuucgaggccacgggcaaccugguggugccucgguacgcguuugccauggaacgcaacgcuggguccggaaucauuaucagcgauacacccguccaugacugcaauaccacaugucaaaccccuaaaggcgccaucaacaccucucuccccuuccagaauauucacccgaucacaauuggcaagugcccuaaguaugugaaaagcacgagacugcggcuugcuaccgggcugcgcaacguucccuccauccagucuagaggacucuuuggcgccauugccggguucaucgagggaggcuggacagggaugguggacggaugguacggcuaucaucaccagaaugaacaaggcagcggguacgcugcggaucugaaguccacccagaacgccaucgacgagauuacaaauaaagucaacagcgugaucgagaagaugaauacccaguuuacggcuguuggaaaagaguucaaccaccuugagaagcggauugaaaaucugaacaagaaaguggaugacggcuuccucgauaucuggacauacaaugccgagcugcugguccuccuggaaaacgagcgcacccuugacuaucaugauucuaaugugaagaaccuguacgagaaagucagaucccagcucaagaacaaugccaaagaaauugggaacggauguuuugaguucuaucacaagugcgacaauaccuguauggaaagcgugaagaacggcacauacgauuauccuaaauacucugaggaagcuaagcugaaucgggaggagaucgacgggguuaaacuugaauccacccgcaucuaucaaauucuggccaucuacagcacaguggcguccucucucguccuggugguuagccugggcgcuauuuccuuuuggaugugcucuaacggaagccuccagugcagaaucuguauuuga

SEQ ID NO: 195728 - RNA, 1701 nt, Artificial Sequence; identical to SEQ ID NO: 195471
  derived and/or modified CDS sequence (opt5) from hemagglutinin__InfluenzaA__ACZ16330

SEQ ID NO: 195729 - RNA, 1701 nt, Artificial Sequence; identical to SEQ ID NO: 194921
  derived and/or modified CDS sequence (opt5) from hemagglutinin__InfluenzaA__ACZ16340

SEQ ID NO: 195730 - RNA, 1701 nt, Artificial Sequence; identical to SEQ ID NO: 194728
  derived and/or modified CDS sequence (opt5) from hemagglutinin__InfluenzaA__ACZ16350

SEQ ID NO: 195731 - RNA, 1701 nt, Artificial Sequence; identical to SEQ ID NO: 194728
  derived and/or modified CDS sequence (opt5) from hemagglutinin__InfluenzaA__ACZ16360

SEQ ID NO: 195732 - RNA, 1701 nt, Artificial Sequence; identical to SEQ ID NO: 194921
  derived and/or modified CDS sequence (opt5) from hemagglutinin__InfluenzaA__ACZ16370

SEQ ID NO: 195733 - RNA, 1701 nt, Artificial Sequence; identical to SEQ ID NO: 194728
  derived and/or modified CDS sequence (opt5) from hemagglutinin__InfluenzaA__ACZ16380

SEQ ID NO: 195734 - RNA, 1701 nt, Artificial Sequence; identical to SEQ ID NO: 194728
  derived and/or modified CDS sequence (opt5) from hemagglutinin__InfluenzaA__ACZ16390

SEQ ID NO: 195735 - RNA, 1701 nt, Artificial Sequence; identical to SEQ ID NO: 194728
  derived and/or modified CDS sequence (opt5) from hemagglutinin__InfluenzaA__ACZ16400

SEQ ID NO: 195736 - RNA, 1701 nt, Artificial Sequence; identical to SEQ ID NO: 194728
  derived and/or modified CDS sequence (opt5) from hemagglutinin__InfluenzaA__ACZ16410

SEQ ID NO: 195737 - RNA, 1701 nt, Artificial Sequence; identical to SEQ ID NO: 195365
  derived and/or modified CDS sequence (opt5) from hemagglutinin__InfluenzaA__ACZ16420

SEQ ID NO: 195738 - RNA, 1701 nt, Artificial Sequence; identical to SEQ ID NO: 194728
  derived and/or modified CDS sequence (opt5) from hemagglutinin__InfluenzaA__ACZ16430

SEQ ID NO: 195739 - RNA, 1701 nt, Artificial Sequence; identical to SEQ ID NO: 194728
  derived and/or modified CDS sequence (opt5) from hemagglutinin__InfluenzaA__ACZ16440

SEQ ID NO: 195740 - RNA, 1701 nt, Artificial Sequence
  derived and/or modified CDS sequence (opt5) from hemagglutinin__InfluenzaA__ACZ16450
augaaggccauccuggugguccuccuguacaccuucgcuacagccaacgcggacacgcuuugcauuggcuaucacgcuaauaacagcaccgauacaguugacaccgugcuggagaaaaaugugacagucacccauuccgugaaccuccuggaagauaagcacaaugggaaacuuuguaagcugagaggaguugcuccccuccaucugggcaaaugcaacaucgccggguggauucugggaaauccugagugugaaucucucagcacagccuccucuuggagcuacaucguggagaccuccucuagcgacaacggcacgugcuauccgggggauuuuauugacuacgaagaacugcgggagcagcuuuccagcgucucuuccuucgaacgcuuugagaucuuccccaagaccagcucuuggccuaaucacgauuccaacaagggagugacagccgcuuguccccaugccggcgcgaaaucuuuuuauaagaaucugaucuggcucguuaaaaagggcaacagcuacccuaaacuguccaagagcuauauuaaugacaaggggaaagaagugcuuguccuguggggaauccaccaccccuccaccucugccgaucaacagagccucuaccagaacgcugacgccuacguguucgugggcuccagcagauauucuaagaaauuuaagccugagauugcuauccggccgaaaguccgcgaucaggaggggagaaugaauuacuauuggacacugguuaagcccggagacaaaauuaccuucgaagccacgggcaaccugguggugccucgguacgcguuugccauggagcgcaacgcuggguccggaaucauuaucagcgauacacccguccaugacugcaauaccacaugucaaaccccuaagggcgccaucaacaccucucuccccuuccagaauauucacccgaucacaauuggcaagugcccuaaauaugugaaaagcacgaaacugagacuugcuaccgggcugcggaacguucccuccauccagucucgcggacucuuuggcgccauugccggguucaucgaaggaggcuggacagggaugguggacggaugguacggcuaucaucaccagaaugagcaaggcagcggguacgcugcggaucugaaguccacccagaacgccaucgacgaaauuacaaauaaagucaacagcgugaucgagaagaugaauacccaguuuacggcuguuggaaaggaguucaaccaccuugaaaagagaauugagaaucugaacaagaaaguggaugacggcuuccucgauaucuggacauacaaugccgaacugcugguccuccuggagaacgaacggacccuugacuaucaugauucuaaugugaagaaccuguacgagaaaguccgcucccagcucaagaacaaugccaaggagauugggaacggauguuuugaguucuaucacaaaugcgacaauaccuguauggagagcgugaagaacggcacauacgauuauccuaaauacucugaagaggcuaagcugaauagagaagagaucgacgggguuaaacuugaguccacccggaucuaucaaauucuggccaucuacagcacaguggcguccucucucguccuggugguuagccugggcgcuauuuccuuuuggaugugcucuaacggaagccuccagugccgcaucuguauuuga

SEQ ID NO: 195741 - RNA, 1701 nt, Artificial Sequence; identical to SEQ ID NO: 194921
  derived and/or modified CDS sequence (opt5) from hemagglutinin__InfluenzaA__ACZ16460

SEQ ID NO: 195742 - RNA, 1701 nt, Artificial Sequence; identical to SEQ ID NO: 194728
  derived and/or modified CDS sequence (opt5) from hemagglutinin__InfluenzaA__ACZ16470

SEQ ID NO: 195743 - RNA, 1701 nt, Artificial Sequence; identical to SEQ ID NO: 194728
  derived and/or modified CDS sequence (opt5) from hemagglutinin__InfluenzaA__ACZ16480

SEQ ID NO: 195744 - RNA, 1701 nt, Artificial Sequence; identical to SEQ ID NO: 195476
  derived and/or modified CDS sequence (opt5) from hemagglutinin__InfluenzaA__ACZ16490

SEQ ID NO: 195745 - RNA, 1701 nt, Artificial Sequence; identical to SEQ ID NO: 194728
  derived and/or modified CDS sequence (opt5) from hemagglutinin__InfluenzaA__ACZ16500

SEQ ID NO: 195746 - RNA, 1701 nt, Artificial Sequence; identical to SEQ ID NO: 194921
  derived and/or modified CDS sequence (opt5) from hemagglutinin__InfluenzaA__ACZ16510

SEQ ID NO: 195747 - RNA, 1701 nt, Artificial Sequence; identical to SEQ ID NO: 194728
  derived and/or modified CDS sequence (opt5) from hemagglutinin__InfluenzaA__ACZ16530

SEQ ID NO: 195748 - RNA, 1701 nt, Artificial Sequence
  derived and/or modified CDS sequence (opt5) from hemagglutinin__InfluenzaA__ACZ16540
augaaggccauccuggugguccuccuguacaccuucgcuacagccaacgcggacacgcuuugcauuggcuaucacgcuaauaacagcaccgauacaguugacaccgugcuggagaagaaugugacagucacccauuccgugaacauccucgaagauaagcacaaugggaaacuguguaaacuuagaggaguugcuccccugcaucucggcaagugcaacauugccggguggauccugggaaauccugagugugaaucucugagcacagccuccucuuggagcuacauuguggagaccuccucuagcgacaacggcacgugcuauccgggggauuuuaucgacuacgaggaacuccgggagcagcuguccagcgucucuuccuucgaacgcuuugagaucuuccccaagaccagcucuuggccuaaucacgauuccaacaagggagugacagccgcuuguccccaugccggcgcgaaaucuuuuuauaagaaucuuauuuggcugguuaaaaagggcaacagcuacccuaaacucuccaagagcuauaucaaugacaaggggaaagaagugcugguccuuuggggcauucaccaccccuccaccucugccgaucaacagagccuguaccagaacgcugacgccuacguguucgugggauccagcagauauucuaagaaauuuaagccugagaucgcuauucggccgaaaguccgcgaucaggaggggagaaugaauuacuauuggacacucguugaacccggagacaagaucaccuucgaggccacgggcaaccugguggugccucgguacgcguuugccauggaacgcaacgcuggguccggaauuaucaucagcgauacacccguccaugacugcaauaccacaugucaaaccccuaaaggcgccauuaacaccucucugcccuuccagaauauccacccgauuacaaucggcaagugcccuaaguaugugaaaagcacgaagcucagacuggcuaccgggcuucggaacguucccuccauucagucucgcggacugcucggcgccaucgccggguuuaucgagggaggcuggacagggaugguggacggaugguacggcuaucaucaccagaaugaacaaggcagcggguacgcugcggaucugaaauccacccagaacgccauugacgagaucacaaauaaggucaacagcgugauugagaaaaugaauacccaguucacggcuguuggaaaggaauuuaaccaccuugagaagagaaucgaaaaucugaacaaaaagguggaugacggcuuccucgauauuuggacauacaaugccgagcugcugguccuccuggaaaacgagcggacccuugacuaucaugauucuaaugugaaaaaccuguacgagaagguccgcucccagcucaaaaacaaugccaaggaaaucgggaacggauguuucgaguuuuaucacaagugcgacaauaccuguauggaaagcgugaaaaacggcacauacgauuauccuaaguacucugaggaagcuaaacugaauagagaggagaucgacgggguuaaacuugaauccacccggauuuaucaaauccuggccauuuacagcacaguggcguccucucucguccuggugguuagccugggcgcuaucuccuucuggaugugcucuaacggaagccuccagugccgcauuuguaucuga

SEQ ID NO: 195749 - RNA, 1701 nt, Artificial Sequence; identical to SEQ ID NO: 195471
  derived and/or modified CDS sequence (opt5) from hemagglutinin__InfluenzaA__ACZ16550

SEQ ID NO: 195750 - RNA, 1701 nt, Artificial Sequence; identical to SEQ ID NO: 194728
  derived and/or modified CDS sequence (opt5) from hemagglutinin__InfluenzaA__ACZ16583

SEQ ID NO: 195751 - RNA, 1701 nt, Artificial Sequence; identical to SEQ ID NO: 195471
  derived and/or modified CDS sequence (opt5) from hemagglutinin__InfluenzaA__ACZ16593

SEQ ID NO: 195752 - RNA, 1701 nt, Artificial Sequence; identical to SEQ ID NO: 194728
  derived and/or modified CDS sequence (opt5) from hemagglutinin__InfluenzaA__ACZ16603

SEQ ID NO: 195753 - RNA, 1701 nt, Artificial Sequence; identical to SEQ ID NO: 195471
  derived and/or modified CDS sequence (opt5) from hemagglutinin__InfluenzaA__ACZ16630

SEQ ID NO: 195754 - RNA, 1701 nt, Artificial Sequence; identical to SEQ ID NO: 194728
  derived and/or modified CDS sequence (opt5) from hemagglutinin__InfluenzaA__ACZ16640

SEQ ID NO: 195755 - RNA, 1701 nt, Artificial Sequence; identical to SEQ ID NO: 194728
  derived and/or modified CDS sequence (opt5) from hemagglutinin__InfluenzaA__ACZ16650

SEQ ID NO: 195756 - RNA, 1701 nt, Artificial Sequence; identical to SEQ ID NO: 194728
  derived and/or modified CDS sequence (opt5) from hemagglutinin__InfluenzaA__ACZ16660

SEQ ID NO: 195757 - RNA, 1701 nt, Artificial Sequence; identical to SEQ ID NO: 194728
  derived and/or modified CDS sequence (opt5) from hemagglutinin__InfluenzaA__ACZ16670

SEQ ID NO: 195758 - RNA, 1701 nt, Artificial Sequence; identical to SEQ ID NO: 194728
  derived and/or modified CDS sequence (opt5) from hemagglutinin__InfluenzaA__ACZ16680

SEQ ID NO: 195759 - RNA, 1701 nt, Artificial Sequence; identical to SEQ ID NO: 194728
  derived and/or modified CDS sequence (opt5) from hemagglutinin__InfluenzaA__ACZ16690

SEQ ID NO: 195760 - RNA, 1701 nt, Artificial Sequence; identical to SEQ ID NO: 194728
  derived and/or modified CDS sequence (opt5) from hemagglutinin__InfluenzaA__ACZ16700

SEQ ID NO: 195761 - RNA, 1701 nt, Artificial Sequence; identical to SEQ ID NO: 194728
  derived and/or modified CDS sequence (opt5) from hemagglutinin__InfluenzaA__ACZ16710

SEQ ID NO: 195762 - RNA, 1701 nt, Artificial Sequence; identical to SEQ ID NO: 194728
  derived and/or modified CDS sequence (opt5) from hemagglutinin__InfluenzaA__ACZ16720

SEQ ID NO: 195763 - RNA, 1701 nt, Artificial Sequence; identical to SEQ ID NO: 195471
  derived and/or modified CDS sequence (opt5) from hemagglutinin__InfluenzaA__ACZ16730

SEQ ID NO: 195764 - RNA, 1701 nt, Artificial Sequence; identical to SEQ ID NO: 195471
  derived and/or modified CDS sequence (opt5) from hemagglutinin__InfluenzaA__ACZ16740

SEQ ID NO: 195765 - RNA, 1701 nt, Artificial Sequence; identical to SEQ ID NO: 194728
  derived and/or modified CDS sequence (opt5) from hemagglutinin__InfluenzaA__ACZ16750

SEQ ID NO: 195766 - RNA, 1701 nt, Artificial Sequence; identical to SEQ ID NO: 194728
  derived and/or modified CDS sequence (opt5) from hemagglutinin__InfluenzaA__ACZ16760

SEQ ID NO: 195767 - RNA, 1701 nt, Artificial Sequence; identical to SEQ ID NO: 194921
  derived and/or modified CDS sequence (opt5) from hemagglutinin__InfluenzaA__ACZ16770

SEQ ID NO: 195768 - RNA, 1701 nt, Artificial Sequence; identical to SEQ ID NO: 194728
  derived and/or modified CDS sequence (opt5) from hemagglutinin__InfluenzaA__ACZ16780

SEQ ID NO: 195769 - RNA, 1701 nt, Artificial Sequence; identical to SEQ ID NO: 194728
  derived and/or modified CDS sequence (opt5) from hemagglutinin__InfluenzaA__ACZ16790

SEQ ID NO: 195770 - RNA, 1701 nt, Artificial Sequence; identical to SEQ ID NO: 194728
  derived and/or modified CDS sequence (opt5) from hemagglutinin__InfluenzaA__ACZ16800

SEQ ID NO: 195771 - RNA, 1701 nt, Artificial Sequence; identical to SEQ ID NO: 194728
  derived and/or modified CDS sequence (opt5) from hemagglutinin__InfluenzaA__ACZ16810

SEQ ID NO: 195772 - RNA, 1701 nt, Artificial Sequence; identical to SEQ ID NO: 195403
  derived and/or modified CDS sequence (opt5) from hemagglutinin__InfluenzaA__ACZ16820

SEQ ID NO: 195773 - RNA, 1701 nt, Artificial Sequence; identical to SEQ ID NO: 194728
  derived and/or modified CDS sequence (opt5) from hemagglutinin__InfluenzaA__ACZ16830

SEQ ID NO: 195774 - RNA, 1701 nt, Artificial Sequence
  derived and/or modified CDS sequence (opt5) from hemagglutinin__InfluenzaA__ACZ16840
augaaggccauccuggugguccuccuguacaccuucgcuacagccaacgcggacacgcuuugcauuggcuaucacgcuaauaacagcaccgauacaguugacaccgugcuggagaagaaugugacagucacccauuccgugaaccuccuggaagauaagcacaaugggaaacuuuguaagcugagaggaguugcuccccuccaucugggcaaaugcaacaucgccggguggauucugggaaauccugagugugaaucucucagcacagccuccucuuggagcuacaucguggagaccuccucuagcgacaacggcacgugcuauccgggggauuuuauugacuacgaagaacugcgggagcagcuuuccagcgucucuuccuucgaacgcuuugagaucuuccccaagaccagcucuuggccuaaucacgauuccaacaagggagugacagccgcuuguccccaugccggcgcgaaaucuuuuuauaagaaucugaucuggcucguuaaaaagggcaacagcuacccuaaacuguccaagagcuauauuaaugacaaggggaaagaagugcuuguccuguggggaauccaccaccccuccaccucugccgaucaacagagccucuaccagaacgcugacgccuacguguucgugggcuccagcagauauucuaagaaauuuaagccugagauugcuauccggacaaaaguccgcgaucaggaggggagaaugaauuacuauuggacccugguugaaccgggagacaagauuacguucgaggccacaggcaaccugguggugccccgguacgcguuugccauggaacgcaacgcuggguccggaaucauuaucagcgauaccccuguccaugacugcaauacaaccugucaaacccccaaaggcgccaucaacacaucucucccuuuccagaauauucaccccaucacgauuggcaagugcccgaaguaugugaaaagcaccaagcugagacuugcuacagggcugcggaacguuccuuccauccagucucgcggacucuuuggcgccauugccggguucaucgagggaggcuggaccgggaugguggacggaugguacggcuaucaucaccagaaugaacaaggcagcggguacgcugcggaucugaaauccacacagaacgccaucgacgagauuaccaauaaggucaacagcgugaucgagaaaaugaauacgcaguuuacagcuguuggaaaggaguucaaccaccuugagaagagaauugaaaaucugaacaaaaagguggaugacggcuuccucgauaucuggaccuacaaugccgagcugcugguccuccuggaaaacgagcggacccuugacuaucaugauucuaaugugaaaaaccuguacgagaagguccgcucccagcucaaaaacaaugccaaggaaauugggaacggauguuuugaguucuaucacaagugcgacaauacauguauggaaagcgugaaaaacggcaccuacgauuaucccaaguacucugaggaagcuaaacugaauagagaggagaucgacgggguuaaacuugaauccacacggaucuaucaaauucuggccaucuacagcacgguggcguccucucucguccuggugguuagccugggcgcuauuuccuuuuggaugugcucuaacggaagccuccagugccgcaucuguauuuga

SEQ ID NO: 195775 - RNA, 1701 nt, Artificial Sequence; identical to SEQ ID NO: 194728
  derived and/or modified CDS sequence (opt5) from hemagglutinin__InfluenzaA__ACZ16850

SEQ ID NO: 195776 - RNA, 1701 nt, Artificial Sequence
  derived and/or modified CDS sequence (opt5) from hemagglutinin__InfluenzaA__ACZ16860
augaaggccauccuggugguccuccuguacaccuucgcuacagccaacgcggacacgcuuugcauuggcuaucacgcuaauaacagcaccgauacaguugacaccgugcuggagaagaaugugacagucacccauuccgugaaccuccuggaagauaagcacaaugggaaacuuuguaagcugagaggaguugcuccccuccaucugggcaaaugcaacaucgccggguggauucugggaaauccugagugugaaucucucagcacagccuccucuuggagcuacaucguggagaccuccucuagcgacaacggcacgugcuauccgggggauuuuauugacuacgaagaacugcgggagcagcuuuccagcgucucuuccuucgaacgcuuugagaucuuccccaagaccagcucuuggccuaaucacgauuccaacaagggagugacagccgcuuguccccaugccggcgcgaaaucuuuuuauaagaaucugaucuggcucguuaaaaagggcaacagcuacccuaaacuguccaagagcuauauuaaugacaaggggaaagaagugcuuguccuguggggaauccaccaccccuccaccucugccgaucaacagagccucuaccagaacgcugacgccuacguguucgugggcuccagcagauauucuaagaaauuuaagccugagauugcuauccggccgaaaguccgcgaucaggaggggagaaugaauuacuauuggacacugguugaacccggagacaagauuaccuucgaggccacgggcaaccugguggcgccucgguacgccuuugcuauggaacgcaacgccggguccggaaucauuaucagcgauacacccgugcaugacugcaauaccacaugucaaaccccuaaaggcgcuaucaacaccucucuccccuuccagaauauucacccgaucacaauuggcaagugcccuaaguaugucaaaagcacgaagcugagacuugccaccgggcugcggaacgugcccuccauccagucucgcggacucuuuggcgccauugcuggguucaucgagggaggcuggacagggaugguugacggaugguacggcuaucaucaccagaaugaacaaggcagcggguacgcggccgaucugaaauccacccagaacgcuaucgacgagauuacaaauaaggugaacagcgucaucgagaaaaugaauacccaguuuacggccgugggaaaggaguucaaccaccuugagaagagaauugaaaaucugaacaaaaagguugaugacggcuuccucgauaucuggacauacaaugccgagcugcuggugcuccuggaaaacgagcggacccuugacuaucaugauucuaaugucaaaaaccuguacgagaaggugcgcucccagcucaaaaacaaugcuaaggaaauugggaacggauguuuugaguucuaucacaagugcgacaauaccuguauggaaagcgucaaaaacggcacauacgauuauccuaaguacucugaggaagccaaacugaauagagaggagaucgacggggugaaacuugaauccacccggaucuaucaaauucuggcgaucuacagcacaguugcuuccucucucgugcuggucgugagccugggcgccauuuccuuuuggaugugcucuaacggaagccuccagugccgcaucuguauuuga

SEQ ID NO: 195777 - RNA, 1701 nt, Artificial Sequence; identical to SEQ ID NO: 195471
  derived and/or modified CDS sequence (opt5) from hemagglutinin__InfluenzaA__ACZ16870

SEQ ID NO: 195778 - RNA, 1701 nt, Artificial Sequence
  derived and/or modified CDS sequence (opt5) from hemagglutinin__InfluenzaA__ACZ16880
augaaggccauccuggugguccuccuguacaccuucgcuacagccaacgcggacacgcuuugcauuggcuaucacgcuaauaacagcaccgauacaguugacaccgugcuggagaagaaugugacagucacccauuccgugaaccuccuggaagauaagcacaaugggaaacuuuguaagcugagaggaguugcuccccuccaucugggcaaaugcaacaucgccggguggauucugggaaauccugagugugaaucucucagcacagccuccucuuggagcuacaucguggagaccuccucuagcgacaacggcacgugcuauccgggggauuuuauugacuacgaagaacugcgggagcagcuuuccagcgucucuuccuucgaacgcuuugagaucuuccccaagaccagcucuuggccuaaucacgauuccaacaagggagugacagccgcuuguccccaugccggcgcgaaaucuuuuuauaagaaucugaucuggcucguuaaaaagggcaacagcuacccuaaacuguccaagagcuauauuaaugacaaggggaaagaagugcuuguccuguggggaauccaccaccccuccaccucugccgaucaacagagccucuaccagaacgcugacgccuacguguucgugggcuccagcagauauucuaagaaauuuaagccugagauugcuauccggccgaaaguccgcgaucaggaggggagaaugaauuacuauuggacacugguugaacccggagacaagauuaccuucgaggccacgggcaaccugguggugccucgguacgcguuugccauggaacgcaacgauggguccggaaucauuaucagcgacacacccguccaugacugcaauaccacaugucaaaccccuaaaggcgcuaucaacaccucucuccccuuccagaauauucacccgaucacaauuggcaagugcccuaaguaugugaaaagcacgaagcugagacuugccaccgggcugcggaacguucccuccauccagucucgcggacucuuuggcgcuauugccggguucaucgagggaggcuggacagggaugguggauggaugguacggcuaucaucaccagaaugaacaaggcagcggguacgccgcugaccugaaauccacccagaacgcgaucgaugagauuacaaauaaggucaacagcgugaucgagaaaaugaauacccaguuuacggccguuggaaaggaguucaaccaccuugagaagagaauugaaaaucugaacaaaaagguggacgauggcuuccucgacaucuggacauacaaugcugagcugcugguccuccuggaaaacgagcggacccuugauuaucaugacucuaaugugaaaaaccuguacgagaagguccgcucccagcucaaaaacaaugccaaggaaauugggaacggauguuuugaguucuaucacaagugcaauaacaccuguauggaaagcgugaaaaauggcacauacgauuauccuaaguacucugaggaagccaaacugaacagagaggagaucgacgggguuaaacuugaauccacccggaucuaucaaauucuggcuaucuacagcacaguggccuccucucucguccuggugguuagccugggcgcgauuuccuuuuggaugugcucuaauggaagccuccagugccgcaucuguauuuga

SEQ ID NO: 195779 - RNA, 1701 nt, Artificial Sequence; identical to SEQ ID NO: 195476
  derived and/or modified CDS sequence (opt5) from hemagglutinin__InfluenzaA__ACZ16890

SEQ ID NO: 195780 - RNA, 1701 nt, Artificial Sequence; identical to SEQ ID NO: 194728
  derived and/or modified CDS sequence (opt5) from hemagglutinin__InfluenzaA__ACZ16900

SEQ ID NO: 195781 - RNA, 1701 nt, Artificial Sequence; identical to SEQ ID NO: 194728
  derived and/or modified CDS sequence (opt5) from hemagglutinin__InfluenzaA__ACZ16910

SEQ ID NO: 195782 - RNA, 1701 nt, Artificial Sequence; identical to SEQ ID NO: 194728
  derived and/or modified CDS sequence (opt5) from hemagglutinin__InfluenzaA__ACZ16920

SEQ ID NO: 195783 - RNA, 1701 nt, Artificial Sequence; identical to SEQ ID NO: 194741
  derived and/or modified CDS sequence (opt5) from hemagglutinin__InfluenzaA__ACZ16930

SEQ ID NO: 195784 - RNA, 1701 nt, Artificial Sequence; identical to SEQ ID NO: 194741
  derived and/or modified CDS sequence (opt5) from hemagglutinin__InfluenzaA__ACZ16940

SEQ ID NO: 195785 - RNA, 1701 nt, Artificial Sequence; identical to SEQ ID NO: 194728
  derived and/or modified CDS sequence (opt5) from hemagglutinin__InfluenzaA__ACZ16950

SEQ ID NO: 195786 - RNA, 1701 nt, Artificial Sequence; identical to SEQ ID NO: 194983
  derived and/or modified CDS sequence (opt5) from hemagglutinin__InfluenzaA__ACZ16960

SEQ ID NO: 195787 - RNA, 1701 nt, Artificial Sequence
  derived and/or modified CDS sequence (opt5) from hemagglutinin__InfluenzaA__ACZ16970
augaaggccauccuggugguccuccuguacaccuucgcuacagccaacgcggacacgcuuugcauuggcuaucacgcuaauaacagcaccgauacaguugacaccgugcuggagaaaaaugugacagucacccauuccgugaaccuccuggaagauaagcacaaugggaaacuuuguaagcugagaggaguugcuccccuccaucugggcaaaugcaacaucgccggguggauucugggaaauccugagugugaaucucucagcacagccuccucuuggagcuacaucguggagaccuccucuagcgacaacggcacgugcuauccgggggauuuuauugacuacgaagaacugcgggagcagcuuuccagcgucucuuccuucgaacgcuuugagaucuuccccaagaccagcucuuggccuaaucacgauuccaacaagggagugacagccgcuuguccccaugccggcgcgaaaucuuuuuauaagaaucugaucuggcucguuaaagaaggcaacagcuacccuaagcuguccaaaagcuauauuaaugacaaggggaaggaggugcuuguccuguggggaauccaccaccccuccaccucugccgaucaacagagccucuaccagaacgcugacgccuacguguucgugggcacauccagauauagcaaaaaguuuaaaccugagauugcuauccggccgaagguccgcgaucaggaagggagaaugaauuacuauuggacccugguugagcccggagacaaaauuacguucgaagccacaggcaaccugguggugccucgguacgcguuugccauggagcgcaacgcugggucuggaaucauuaucuccgauacccccguccaugacugcaauacaaccugucaaaccccuaagggcgccaucaacacaagccuccccuuccagaauauucacccgaucacgauuggcaaaugcccuaaguaugugaagucuaccaaacugagacuugcuacagggcugcggaacguucccagcauccagucccgcggacucuuuggcgccauugccggguucaucgaaggaggcuggaccgggaugguggacggaugguacggcuaucaucaccagaaugagcaaggcucuggguacgcugcggaucuuaagagcacacagaacgccaucgacgagauuaccaauaaagucaacuccgugaucgaaaagaugaauacgcaguuuacagcuguuggaaaagaguucaaccaccuggaaaagagaauugagaaucugaacaagaaaguggaugacggcuuccucgauaucuggaccuacaaugccgaacugcugguccuccuggagaacgagcggacccuugacuaucaugauagcaaugugaagaaccuguacgaaaaaguccgcucucagcucaagaacaaugccaaagagauugggaacggauguuuugaguucuaucacaagugcgacaauacauguauggaguccgugaagaacggcaccuacgauuauccuaaauacagcgaagaggcuaagcugaauagagaggaaaucgacgggguuaaacuugagucuacacggaucuaucaaauucuggccaucuacuccacgguggcgagcucccucguccuggugguuucucugggcgcuauuagcuuuuggaugugcuccaacggaucucuccagugccgcaucuguauuuga

SEQ ID NO: 195788 - RNA, 1701 nt, Artificial Sequence; identical to SEQ ID NO: 194741
  derived and/or modified CDS sequence (opt5) from hemagglutinin__InfluenzaA__ACZ16980

SEQ ID NO: 195789 - RNA, 1701 nt, Artificial Sequence; identical to SEQ ID NO: 194741
  derived and/or modified CDS sequence (opt5) from hemagglutinin__InfluenzaA__ACZ17000

SEQ ID NO: 195790 - RNA, 1701 nt, Artificial Sequence
  derived and/or modified CDS sequence (opt5) from hemagglutinin__InfluenzaA__ACZ17010
augaaggccauccuggugguccuccuguacaccuucgcuacagccaacgcggacacgcuuugcauuggcuaucacgcuaauaacagcaccgauacaguugacaccgugcuggagaagaaugugacagucacccauuccgugaaccuccuggaagauaagcacaaugggaaacuuuguaagcugagaggaguugcuccccuccaucugggcaaaugcaacaucgccggguggauucugggaaauccugagugugaaucucucagcacagccuccucuuggagcuacaucguggagaccuccucuagcgacaacggcacgugcuauccgggggauuuuauugacuacgaagaacugcgggagcagcuuuccagcgucucuuccuucgaacgcuuugagaucuuccccaagaccagcucuuggccuaaucacgauuccaacaagggagugacagccgcuuguccccaugccggcgcgaaaucuuuuuauaagaaucugaucuggcucguuaaaaagggcaacagcuacccuaaacuguccaagagcuauauuaaugacaaggggaaagaagugcuuguccuguggggaauccaccaccccuccaccucugccgaucaacagagccucuaccagaacgcugacgccuacguguucgugggcuccagcaaguauucuaaaaaguuuaaaccugagauugcuaucagaccgaagguccgggaucaggaggggcgcaugaauuacuauuggacacugguugaacccggagacaaaauuaccuucgaggccacgggcaaccugguggugccuagauacgcguuugccauggaacggaacgcuggguccggaaucauuaucagcgauacacccguccaugacugcaauaccacaugucaaaccccuaagggcgccaucaacaccucucuccccuuccagaauauucacccgaucacaauuggcaagugcccuaaauauguuaagagcacgaaacugcgccuugcuaccgggcugagaaacgugcccuccauccagucucggggacucuuuggcgccauugccggguucaucgagggaggcuggacagggaugguggacggaugguacggcuaucaucaccagaaugaacaaggcagcggguacgcugcggaucugaaguccacccagaacgccaucgacaaaauuacaaauaaggucaacagcgugaucgagaagaugaauacccaguuuacggcuguuggaaaagaguucaaccaccuugaaaagcgcauugagaaucugaacaaaaagguggaugacggcuuccucgauaucuggacauacaaugccgaacugcugguccuccuggagaacgaaagaacccuugacuaucaugauucuaaugugaaaaaccuguacgagaagguccggucccagcucaagaacaaugccaaagagauugggaacggauguuuugaguucuaucacaagugcgacaauaccuguauggagagcgugaaaaacggcacauacgauuauccuaaguacucugaagaggcuaaacugaaucgcgaagagaucgacgggguuaaacuugaguccaccagaaucuaucaaauucuggccaucuacagcacaguggcguccucucucguccuggugguuagccugggcgcuauuuccuuuuggaugugcucuaacggaagccuccagugccggaucuguauuuga

SEQ ID NO: 195791 - RNA, 1701 nt, Artificial Sequence; identical to SEQ ID NO: 194741
  derived and/or modified CDS sequence (opt5) from hemagglutinin__InfluenzaA__ACZ17020

SEQ ID NO: 195792 - RNA, 1701 nt, Artificial Sequence
  derived and/or modified CDS sequence (opt5) from hemagglutinin__InfluenzaA__ACZ17030
augaaggccacccuggugguccuccuguacacauucgcuacggccaacgcggacacccuuugcaucggcuaucacgcuaauaacagcacagauaccguugacacagugcuggagaaaaaugugaccgucacacauuccgugaaccuccuggaagauaagcacaaugggaaacuuuguaagcugagaggaguugcuccccuccaucugggcaaaugcaacauugccggguggauccugggaaauccugagugugaaucucucagcaccgccuccucuuggagcuacauuguggaggccuccucuagcgacaacggcacgugcuauccgggggauuuuaucgacuacgaagaacugcgggagcagcuuuccagcgucucuuccuucgaacgcuuugagauuuuccccaagaccagcucuuggccuaaucacgauuccaacaagggagugacagcugccuguccccaugcgggcgccaagagcuuuuauaagaaucugaucuggcucguuaaaaagggcaacucuuacccuaaacuguccaagagcuauaucaaugacaaggggaaagaagugcuuguccuguggggcauucaccaccccuccaccucugcugaucaacagagccucuaccagaacgccgacgcuuacguguucgugggaacauccagauauagcaagaaauuuaagccugagaucgccauucggccgaaaguccgcgaucaggaggggagaaugaauuacuauuggacccugguugaacccggagacaagaucacguucgaggcgacaggcaaccugguggugccucgguacgccuuugcuauggaacgcaacgccgggucuggaauuaucauuuccgauacccccguccaugacugcaauacaaccugucaaaccccuaaaggcgcuaucaacacaagccuccccuuccagaauauccacccgauuacgaucggcaagugcccuaaguaugugaaaucuaccaagcugagacuugccacagggcugcggaacguucccagcauucagucccgcggacucuuuggcgccaucgcuggguucauugagggaggcuggaccgggaugguggacggaugguacggcuaucaucaccagaaugaacaaggcucuggguacgcggccgaucugaaaagcacacagaacgcuaucgacgagaucaccaauaaggucaacuccgugauugagaaaaugaauacgcaguuuacagccguuggaaaggaguucaaccaccuugagaagagaaucgaaaaucugaacaaaaagguggaugacggcuuccucgauauuuggaccuacaaugccgagcugcugguccuccuggaaaacgagcggacccuugacuaucaugauagcaaugugaaaaaccuguacgagaagguccgcucucagcucaaaaacaaugcuaaggaaaucgggaacggauguuuugaguucuaucacaagugcgacaauacauguauggaauccgugaaaaacggcaccuacgauuauccuaaguacagcgaggaagccaaacugaauagagaggagauugacgggguuaaacuugaaucuacacggaucuaucaaauccuggcgauuuacuccacgguggcuagcucccucguccuggugguuucucugggcgccaucagcuuuuggaugugcuccaacggaucucuccagugccgcauuuguaucuga

SEQ ID NO: 195793 - RNA, 1701 nt, Artificial Sequence
  derived and/or modified CDS sequence (opt5) from hemagglutinin__InfluenzaA__ACZ17040
augaaggccauccuggugguccuccuguacaccuucgcuacagccaacgcggacacgcuuugcauuggcuaucacgcuaauaacagcaccgauacaguugacaccgugcuggagaaaaaugugacagucacccauuccgugaaccuccuggaagauaagcacaaugggaaacuuuguaagcugagaggaguugcuccccuccaucugggcaaaugcaacaucgccggguggauucugggaaauccugagugugaaucucucagcacagccuccucuuggagcuacaucguggagaccuccucuagcgacaacggcacgugcuauccgggggauuuuauugacuacgaagaacugcgggagcagcuuuccagcgucucuuccuucgaacgcuuugagaucuuccccaagaccagcucuuggccuaaucacgauuccaacaagggagugacagccgcuuguccccaugccggcgcgaaaucuuuuuauaagaaucugaucuggcucguuaaaaagggcaacagcuacccuaaacuguccaagagcuauauuaaugacaaggggaaagaagugcuuguccuguggggaauccaccaccccuccaccucugccgaucaacagagccucuaccagaacgcugacgccuacguguucgugggcacauccagauauagcaagaaauuuaagccugagauugcuauccggccgaaaguccgcgaucaggaggggagaaugaauuacuauuggacccugguugaacccggagacaagauuacguucgaggccacaggcaaccugguggugccucgguacgcguuugccauggaacgcaacgcugggucuggaaucauuaucuccgauacccccguccaugacugcaauacaaccugucaaaccccuaaaggcgccaucaacacaagccuccccuuccagaauauucacccgaucacgauuggcaagugcccuaaguaugugaaaucuaccaagcugagacuugcuacagggcugcggaacguucccagcauccagucccgcggacucuuuggcgccauugccggguucaucgagggaggcuggaccgggaugguggacggaugguacggcuaucaucaccagaaugaacaaggcucuggguacgcugcggaucugaaaagcacacagaacgccaucgacgagauuaccaauaaggucaacuccgugaucgagaaaaugaauacgcaguuuacagcuguuggaaaggaguucaaccaccuugagaagagaauugaaaaucugaacaaaaagguggaugacggcuuccucgauaucuggaccuacaaugccgagcugcugguccuccuggaaaacgagcggacccuugacuaucaugauagcaaugugaaaaaccuguacgagaagguccgcucucagcucaaaaacaaugccaaggaaauugggaacggauguuuugaguucuaucacaagugcgacaauacauguauggaauccgugaaaaacggcaccuacgauuauccuaaguacagcaaagaggcuaagcugaauagagaagagaucgacgggguuaaacuugagucuacacggaucuaucaaauucuggccaucuacuccacgguggcgagcucccucguccuggugguuucucugggcgcuauuagcuuuuggaugugcuccaacggaucucuccagugccgcaucuguauuuga

SEQ ID NO: 195794 - RNA, 1701 nt, Artificial Sequence; identical to SEQ ID NO: 194741
  derived and/or modified CDS sequence (opt5) from hemagglutinin__InfluenzaA__ACZ17050

SEQ ID NO: 195795 - RNA, 1701 nt, Artificial Sequence; identical to SEQ ID NO: 194741
  derived and/or modified CDS sequence (opt5) from hemagglutinin__InfluenzaA__ACZ17060

SEQ ID NO: 195796 - RNA, 1701 nt, Artificial Sequence; identical to SEQ ID NO: 194741
  derived and/or modified CDS sequence (opt5) from hemagglutinin__InfluenzaA__ACZ17070

SEQ ID NO: 195797 - RNA, 1701 nt, Artificial Sequence; identical to SEQ ID NO: 194921
  derived and/or modified CDS sequence (opt5) from hemagglutinin__InfluenzaA__ACZ17080

SEQ ID NO: 195798 - RNA, 1701 nt, Artificial Sequence
  derived and/or modified CDS sequence (opt5) from hemagglutinin__InfluenzaA__ACZ17090
augaaggccauccuggugguccuccuguacaccuucgcuacagccaacgcggacacgcuuugcauuggcuaucacgcuaauaacagcaccgauacaguugacaccgugcuggagaaaaaugugacagucacccauuccgugaaccuccugggggauaagcacaauggaaaacuuuguaagcugagaggcguugcuccccuccaucuggggaaaugcaacaucgccggauggauucugggcaauccugaaugugagucucucagcacagccuccucuuggagcuacaucguggaaaccuccucuagcgacaacgggacgugcuauccgggagauuuuauugacuacgaggaacugcgggagcagcuuuccagcgucucuuccuucgagcgcuuugaaaucuuccccaagaccagcucuuggccuaaucacgauuccaacaagggcgugacagccgcuuguccccaugccggcgcgaaaucuuuuuauaagaaucugaucuggcucguuaaaaaggggaacagcuacccuaaacuguccaagagcuauauuaaugacaagggaaaagaggugcuuguccuguggggcauccaccaccccuccaccucugccgaucaacagagccucuaccagaacgcugacgccuacguguucguggggacauccagauauagcaagaaauuuaagccugaaauugcuauccggccgaaaguccgcgaucaggagggaagaaugaauuacuauuggacccugguugagcccggcgacaagauuacguucgaagccacagggaaccugguggugccucgguacgcguuugccauggagcgcaacgcuggaucuggcaucauuaucuccgauacccccguccaugacugcaauacaaccugucaaaccccuaaaggcgccaucaacacaagccuccccuuccagaauauucacccgaucacgauugggaagugcccuaaguaugugaaaucuaccaagcugagacuugcuacaggacugcggaacguucccagcauccagucccgcggccucuuuggggccauugccggauucaucgaaggcggguggaccggaaugguggacggcugguacggcuaucaucaccagaaugagcaagggucuggauacgcugcggaucugaaaagcacacagaacgccaucgacgaaauuaccaauaaggucaacuccgugaucgagaaaaugaauacgcaguuuacagcuguuggcaaggaguucaaccaccuugaaaagagaauugagaaucugaacaaaaagguggaugacggguuccucgauaucuggaccuacaaugccgaacugcugguccuccuggagaacgaacggacccuugacuaucaugauagcaaugugaaaaaccuguacgagaaggucaaaucucagcucaagaacaaugccaaggagauuggaaacggcuguuuugaguucuaucacaaaugcgacaauacauguauggaauccgugaagaacgggaccuacgauuauccuaaauacagcgaagaggcuaagcugaaucgcgaagagaucgacggcguuaaacuugagucuacaagaaucuaucaaauucuggccaucuacuccacgguggcgagcucccucguccuggugguuucucugggagcuauuagcuuuuggaugugcuccaacggcucucuccagugccggaucuguauuuga

SEQ ID NO: 195799 - RNA, 1701 nt, Artificial Sequence; identical to SEQ ID NO: 194728
  derived and/or modified CDS sequence (opt5) from hemagglutinin__InfluenzaA__ACZ17100

SEQ ID NO: 195800 - RNA, 1701 nt, Artificial Sequence
  derived and/or modified CDS sequence (opt5) from hemagglutinin__InfluenzaA__ACZ17110
augaaggccauccuggugguccuccuguacaccuucgcuacagccaacgcggacacgcuuugcauuggcuaucacgcuaauaacagcaccgauacaguugacaccgugcuggagaaaaaugugacagucacccauuccgugaaccuccuggaagauaagcacaaugggaaacuuuguaagcugagaggaguugcuccccuccaucugggcaaaugcaacaucgccggguggauucugggaaauccugagugugaaucucucagcacagccuccucuuggagcuacaucguggagaccuccucuagcgacaacggcacgugcuauccgggggauuuuauugacuacgaagaacugcgggagcagcuuuccagcgucucuuccuucgaacgcuuugagaucuuccccaagaccagcucuuggccuaaucacgauuccaacaagggagugacagccgcuuguccccaugccggcgcgaaaucuuuuuauaagaaucugaucuggcucguuaaaaagggcaacagcuacccugaacuguccaaaagcuauauuaaugacaaggggaaggaggugcuuguccuguggggaauccaccaccccuccaccucugccgaucaacagagccucuaccagaacgcugacgccuacguguucgugggcacauccagauauagcaaaaaguuuaaaccugagauugcuauccggccgaagguccgcgaucaggaagggagaaugaauuacuauuggacccugguugagcccggagacaaaauuacguucgaagccacaggcaaccugguggugccucgguacgcguuugccauggagcgcaacgcugggucuggaaucauuaucuccgauacccccguccaugacugcaauacaaccugucaaaccccuaagggcgccaucaacacaagccuccccuuccagaauauucacccgaucacgauuggcaaaugcccuaaguaugugaagucuaccaaacugagacuugcuacagggcugcggaacguucccagcauccagucccgcggacucuuuggcgccauugccggguucaucgaaggaggcuggaccgggaugguggacggaugguacggcuaucaucaccagaaugagcaaggcucuggguacgcugcggaucuuaagagcacacagaacgccaucgacgagauuaccaauaaagucaacuccgugaucgaaaagaugaauacgcaguuuacagcuguuggaaaagaguucaaccaccuggaaaagagaauugagaaucugaacaagaaaguggaugacggcuuccucgauaucuggaccuacaaugccgaacugcugguccuccuggagaacgagcggacccuugacuaucaugauagcaaugugaagaaccuguacgaaaaaguccgcucucagcucaagaacaaugccaaagagauugggaacggauguuuugaguucuaucacaagugcgacaauacauguauggaguccgugaagaacggcaccuacgauuauccuaaauacagcgaagaggcuaagcugaauagagaggaaaucgacgggguuaaacuugagucuacacggaucuaucaaauucuggccaucuacuccacgguggcgagcucccucguccuggugguuucucugggcgcuauuagcuuuuggaugugcuccaacggaucucuccagugccgcaucuguauuuga

SEQ ID NO: 195801 - RNA, 1701 nt, Artificial Sequence
  derived and/or modified CDS sequence (opt5) from hemagglutinin__InfluenzaA__ACZ17120
augaaggccauccuggugguccuccuguacaccuucgcuacagccaacgcggacacgcuuugcauuggcuaucacgcuaauaacagcaccgauacaguugacaccgugcuggagaagaaugugacagucacccauuccgugaaccuccuggaagauaagcacaaugggaaacuuuguaagcugagaggaguugcuccccuccaucugggcaaaugcaacaucgccggguggauucugggaaauccugagugugaaucucucagcacagccuccucuuggagcuacaucguggagaccuccucuagcgacaacggcacgugcuauccgggggauuuuauugacuacgaagaacugcgggagcagcuuuccagcgucucuuccuucgaacgcuuugagaucuuccccaagaccagcucuuggccuaaucacgauuccaacaagggagugacagccgcuuguccccaugccggcgcgaaaucuuuuuauaagaaucugaucuggcucguuaaaaagggcaacagcuacccuaaacuguccaagagcuauauuaaugacaaggggaaagaagugcuuguccuguggggaauccaccaccccuccaccucugccgaucaacagagccucuaccagaacgcugacgccuacguguucgugggcacauccagauauagcaagaaauuuaagccugagauugcuauccggccgaaaguccgcgaucaggaggggagaaugaauuacuauuggacccugguugaacccggagacaagauuacguucgaggccacaggcaaccugguggugccucgguacgcguuugccauggaacgcaacgcugggucuggaaucauuaucuccgauacccccguccaugacugcaauacaaccugucaaaccccuaaaggcgccaucaacacaagccuccccuuccagaauauucacccgaucacgauuggcaagugcccuaaguaugugaaaucuaccaagcugagacuugcuacagggcugcggaacguucccagcauccagucccgcggacucuuuggcgccauugccggguucaucgagggaggcuggaccgggaugguggacggaugguacggcuaucaucaccagaaugaacaaggcucuggguacgcugcggaucugaaaagcacacagaacgccaucgacgagauuaccaauaaggucaacuccgugaucgagaaaaugaauacgcaguuuacagcuguuggaaaggaguucaaccaccuugagaagagaauugaaaaucugaacaaaaagguggaugacggcuuccucgauaucuggaccuacaaugccgagcugcugguccuccuggaaaacgagcggacccuugacuaucaugauagcaaugugaaaaaccuguacgagaagguccgcucucagcucaaaacaaacgccaaggaaauugggaauggauguuuugaguucuaucacaagugcgacaacaccuguauggaauccgugaaaaauggcacauacgauuauccuaaguacagcgaggaagcuaaacugaacagagaggagaucgacgggguuaaacuugaaucuacgcggaucuaucaaauucuggccaucuacuccaccguggcgagcucccucguccuggugguuucucugggcgcuauuagcuuuuggaugugcuccaauggaucucuccagugccgcaucuguauuuga

SEQ ID NO: 195802 - RNA, 1701 nt, Artificial Sequence
  derived and/or modified CDS sequence (opt5) from hemagglutinin__InfluenzaA__ACZ17130
augaaggccauccuggugguccuccuguacaccuucgcuacagccaacgcggacacgcuuugcauuggcuaucacgcuaauaacagcaccgauacaguugacaccgugcuggagaagaaugugacagucacccauuccgugaaccuccuggaagauaagcacaaugggaaacuuuguaagcugagaggaguugcuccccuccaucugggcaaaugcaacaucgccggguggauucugggaaauccugagugugaaucucucagcacagccuccucuuggagcuacaucguggagaccuccucuagcgacaacggcacgugcuauccgggggauuuuauugacuacgaagaacugcgggagcagcuuuccagcgucucuuccuucgaacgcuuugagaucuuccccaagaccagcucuuggccuaaucacgauuccaacaagggagugacagccgcuuguccccaugccggcgcgaaaucuuuuuauaagaaucugaucuggcucguuaaaaagggcaacagcuacccuaaacuguccaagagcuauauuaaugacaaggggaaagaagugcuuguccuguggggaauccaccaccccuccaccucugccgaucaacagagccucuaccagaacgcugacgccuacguguucgugggcacauccagauauagcaagaaauuuaagccugagauugcuauccggccgaaaguccgcgaucaggaggggagaaugaauuacuauuggacccugguugaacccggagacaagauuacguucgaggccacaggcaaccugguggugccucgguacgcguuugccauggaacgcaacgcugggucuggaaucauuaucuccgauacccccguccaugacugcaauacaaccugucaaaccccuaaaggcgccaucaacacaagccuccccuuccagaauauucacccgaucacgauuggcaagugcccuaaguaugugaaaucuaccaagcugagacuugcuacagggcugcggaacguucccagcauccagucccgcggacucuuuggcgccauugccggguucaucgagggaggcuggaccgggaugguggacggaugguacggcuaucaucaccagaaugaacaaggcucuggguacgcugcggaucugaaaagcacacagaacgccaucgacgagauuaccaauaaggucaacuccgugaucgagaaaaugaaugcucaguuuacggccguuggaaaggaguucaaccaccuugagaagagaauugaaaaucugaacaaaaagguggaugacggcuuccucgauaucuggacauacaaugccgagcugcugguccuccuggaaaacgagcggacccuugacuaucaugauagcaaugugaaaaaccuguacgagaagguccgcucucagcucaaaaacaaugcuaaggaaauugggaacggauguuuugaguucuaucacaagugcgacaauaccuguauggaauccgugaaaaacggcacauacgauuauccuaaguacagcgaggaagccaaacugaauagagaggagaucgacgggguuaaacuugaaucuacccggaucuaucaaauucuggcgaucuacuccacaguggcuagcucccucguccuggugguuucucugggcgccauuagcuuuuggaugugcuccaacggaucucuccagugccgcaucuguauuuga

SEQ ID NO: 195803 - RNA, 1701 nt, Artificial Sequence; identical to SEQ ID NO: 195539
  derived and/or modified CDS sequence (opt5) from hemagglutinin__InfluenzaA__ACZ17140

SEQ ID NO: 195804 - RNA, 1701 nt, Artificial Sequence; identical to SEQ ID NO: 195370
  derived and/or modified CDS sequence (opt5) from hemagglutinin__InfluenzaA__ACZ17150

SEQ ID NO: 195805 - RNA, 1701 nt, Artificial Sequence; identical to SEQ ID NO: 195370
  derived and/or modified CDS sequence (opt5) from hemagglutinin__InfluenzaA__ACZ17160

SEQ ID NO: 195806 - RNA, 1701 nt, Artificial Sequence; identical to SEQ ID NO: 195370
  derived and/or modified CDS sequence (opt5) from hemagglutinin__InfluenzaA__ACZ17170

SEQ ID NO: 195807 - RNA, 1701 nt, Artificial Sequence
  derived and/or modified CDS sequence (opt5) from hemagglutinin__InfluenzaA__ACZ17190
augaaggccauccuggugguccuccuguacaccuucgcuacagccaacgcggacacgcuuugcauuggcuaucacgcuaauaacagcaccgauacaguugacaccgugcuggagaaaaaugugacagucacccauuccgugaaccuccuggaagauaagcacaaugggaaacuuuguaagcugagaggaguugcuccccuccaucugggcaaaugcaacaucgccggguggauucugggaaauccugagugugaaucucucagcacagccuccucuuggagcuacaucguggagaccuccucuagcgacaacggcacgugcuauccgggggauuuuauugacuacgaagaacugcgggagcagcuuuccagcgucucuuccuucgaacgcuuugagaucuuccccaagaccagcucuuggccuaaucacgauuccaacaagggagugacagccgcuuguccccaugccggcgcgaaaucuuuuuauaagaaucugaucuggcucguuaaaaagggcaacagcuacccuaaacuguccaagagcuauauuaaugacaaggggaaagaagugcuuguccuguggggaauccaccaccccuccaccucugccgaucaacagagccucuaccagaacgcugacgccuacguguucgugggcacauccagauauagcaagaaauuuaagccugagauugcuauccggccgaaaguccgcgaucaggaggggagaaugaauuacuauuggacccugguugaacccggagacaagauuacguucgaggccacaggcaaccugguggugccucgguacgcguuugccauggaacgcaacgcugggucuggaaucauuaucuccgauacccccguccaugacugcagcacaaccugucaaaccccugagggcgccaucaauacaucucuccccuuccagaacauucacccgaucacgauuggcaaaugcccuaaguauguuaagagcaccaaacugagacuugcuacagggcugcggaaugugcccuccauccagucucgcggacucuuuggcgccauugccggguucaucgaaggaggcuggaccgggaugguggacggaugguacggcuaucaucaccagaacgagcaaggcagcggguacgcugcggaucugaaguccacacagaaugccaucgacgagauuaccaacaaagucaauagcgugaucgaaaagaugaacacgcaguuuacagcuguuggaaaagaguucaaucaccuugaaaagagaauugagaaccugaauaagaaaguggaugacggcuuccucgauaucuggaccuacaacgccgaacugcugguccuccuggagaaugagcggacccuugacuaucaugauucuaacgugaagaaucuguacgaaaaaguccgcucccagcucaagaacaacgccaaagagauugggaauggauguuuugaguucuaucacaagugcgacaacacauguauggagagcgugaagaauggcaccuacgauuauccuaaauacucugaagaggcuaagcugaacagagaggaaaucgacgggguuaaacuugaguccacacggaucuaucaaauucuggccaucuacagcacgguggcguccucucucguccuggugguuagccugggcgcuauuuccuuuuggaugugcucuaauggaagccuccagugccgcaucuguauuuga

SEQ ID NO: 195808 - RNA, 1701 nt, Artificial Sequence; identical to SEQ ID NO: 195807
  derived and/or modified CDS sequence (opt5) from hemagglutinin__InfluenzaA__ACZ17200

SEQ ID NO: 195809 - RNA, 1701 nt, Artificial Sequence; identical to SEQ ID NO: 194741
  derived and/or modified CDS sequence (opt5) from hemagglutinin__InfluenzaA__ACZ17220

SEQ ID NO: 195810 - RNA, 1701 nt, Artificial Sequence
  derived and/or modified CDS sequence (opt5) from hemagglutinin__InfluenzaA__ACZ17230
augaaggccauccuggugguccuccuguacaccuucgcuacagccaacgcggacacgcuuugcauuggcuaucacgcuaauaacagcaccgauacaguugacaccgugcuggagaaaaaugugacagucacccauuccgugaaccuccuggaagauaagcacaaugggaaacuuuguaagcugagaggaguugcgccccuccaucugggcaaaugcaacaucgccggguggauucugggaaauccugagugugaaucucucagcacagcuuccucuuggagcuacaucguggagaccuccucuagcgacaacggcacgugcuauccgggggauuuuauugacuacgaagaacugaaggagcagcuuuccagcgucucuuccuucgaacgguuugagaucuuccccaagaccagcucuuggccuaaucacgauuccaacaaaggagugacagccgcuuguccccaugccggcgccaagagcuuuuauaaaaaucugaucuggcucguuaagaaaggcaacucuuacccuaagcuguccaagagcuauauuaaugacaaagggaaggaagugcuuguccuguggggaauccaccaccccuccaccucugccgaucaacagagccucuaccagaacgcugacgccuacguguucgugggcacaucccgcuauagcaaaaaguuuaaaccugagauugcuaucagaccgaagguccgggaucaggaggggcgcaugaauuacuauuggacccugguugaacccggagacaaaauuacguucgaggccacaggcaaccugguggugccuagauacgcguuugccauggaacggaacgcugggucuggaaucauuaucuccgauacccccguccaugacugcaauacaaccugucaaaccccuaagggcgccaucaacacaagccuccccuuccagaauauucacccgaucacgauuggcaagugcccuaaauaugugaagucuaccaaacugcgccuugcuacagggcugagaaacguucccagcauccagucccggggacucuuuggcgccauugccggguucaucgagggaggcuggaccgggaugguggacggaugguacggcuaucaucaccagaaugaacaaggcucuggguacgcugcggaucuuaagagcacacagaacgccaucgacgagauuaccaauaaagucaacuccgugaucgagaagaugaauacgcaguuuacagcuguuggaaaggaguucaaccaccuggagaaacgcauugaaaaucugaacaagaaaguggaugacggcuuccucgauaucuggaccuacaaugccgagcugcugguccuccuggaaaacgagagaacccuugacuaucaugauagcaaugugaagaaccuguacgagaaaguccggucucagcucaagaacaaugccaaggaaauugggaacggauguuuugaguucuaucacaaaugcgacaauacauguauggaauccgugaagaacggcaccuacgauuauccuaaauacagcgaggaagcuaagcugaaucgcgaggagaucgacgggguuaaacuugaaucuacaagaaucuaucaaauucuggccaucuacuccacgguggcgagcucccucguccuggugguuucucugggcgcuauuagcuuuuggaugugcuccaacggaucucuccagugccggaucuguauuuga

SEQ ID NO: 195811 - RNA, 1701 nt, Artificial Sequence; identical to SEQ ID NO: 194741
  derived and/or modified CDS sequence (opt5) from hemagglutinin__InfluenzaA__ACZ17240

SEQ ID NO: 195812 - RNA, 1701 nt, Artificial Sequence; identical to SEQ ID NO: 194741
  derived and/or modified CDS sequence (opt5) from hemagglutinin__InfluenzaA__ACZ17250

SEQ ID NO: 195813 - RNA, 1701 nt, Artificial Sequence; identical to SEQ ID NO: 194741
  derived and/or modified CDS sequence (opt5) from hemagglutinin__InfluenzaA__ACZ17260

SEQ ID NO: 195814 - RNA, 1701 nt, Artificial Sequence
  derived and/or modified CDS sequence (opt5) from hemagglutinin__InfluenzaA__ACZ17270
augaaggccauccuggugguccuccuguacaccuucgcuacagccaacgcggacacgcuuugcauuggcuaucacgcuaauaacagcaccgauacaguugacaccgugcuggagaaaaaugugacagucacccauuccgugaaccuccuggaagauaagcacaaugggaaacuuuguaagcugagaggaguugcgccccuccaucugggccggugcaacaucgccggguggauucugggaaauccugagugugaaucucucagcacagcuuccucuuggagcuacaucguggagaccuccucuagcgacaacggcacgugcuauccgggggauuuuauugacuacgaagaacugcgcgagcagcuuuccagcgucucuuccuucgaaagauuugagaucuuccccaaaaccagcucuuggccuaaucacgauuccaacaagggagugacagccgcuuguccccaugccggcgccaagagcuuuuauaaaaaucugaucuggcucguuaagaaaggcaacucuuacccuaagcuguccaaaagcuauauuaaugacaaggggaaggaagugcuuguccuguggggaauccaccaccccuccaccucugccgaucaacagagccucuaccagaacgcugacgccuacguguucgugggcacaucccgguauagcaaaaaguuuaaaccugagauugcuauccgcccgaaggucagagaucaggaggggcggaugaauuacuauuggacccugguugaacccggagacaaaauuacguucgaggccacaggcaaccugguggugccucgcuacgcguuugccauggaaagaaacgcugggucuggaaucauuaucuccgauacccccguccaugacugcaauacaaccugucaaaccccuaagggcgccaucaacacaagccuccccuuccagaauauucacccgaucacgauuggcaaaugcccuaaguaugugaagucuaccaaacugcggcuugcuacagggcugcgcaacguucccagcauccaguccagaggacucuuuggcgccauugccggguucaucgagggaggcuggaccgggaugguggacggaugguacggcuaucaucaccagaaugaacaaggcucuggguacgcugcggaucuuaagagcacacagaacgccaucgacgagauuaccaauaaagucaacuccgugaucgagaagaugaauacgcaguuuacagcuguuggaaaagaguucaaccaccuugagaagcggauugaaaaucugaacaagaaaguggaugacggcuuccucgauaucuggaccuacaaugccgagcugcugguccuccuggaaaacgagcgcacccuugacuaucaugauagcaaugugaagaaacuguacgagaaggucagaucucagcucaaaaacaacgccaaggaaauugggaauggauguuuugaguucuaucacaagugcgacaacacauguauggaauccgugaaaaauggcaccuacgauuauccuaaguacagcgaggaagcuaaacugaaccgggaggagaucgacgggguuaagcuggaaucuacacgcguguaucaaauccuggccauuuacuccacggucgcgagcucccucgugcugguugugucucugggcgcuaucagcuuuuggaugugcuccaauggaucucuccagugcagaauuuguaucuga

SEQ ID NO: 195815 - RNA, 1701 nt, Artificial Sequence; identical to SEQ ID NO: 194921
  derived and/or modified CDS sequence (opt5) from hemagglutinin__InfluenzaA__ACZ17290

SEQ ID NO: 195816 - RNA, 1701 nt, Artificial Sequence; identical to SEQ ID NO: 194921
  derived and/or modified CDS sequence (opt5) from hemagglutinin__InfluenzaA__ACZ17300

SEQ ID NO: 195817 - RNA, 1701 nt, Artificial Sequence; identical to SEQ ID NO: 194921
  derived and/or modified CDS sequence (opt5) from hemagglutinin__InfluenzaA__ACZ17310

SEQ ID NO: 195818 - RNA, 1701 nt, Artificial Sequence; identical to SEQ ID NO: 194741
  derived and/or modified CDS sequence (opt5) from hemagglutinin__InfluenzaA__ACZ17398

SEQ ID NO: 195819 - RNA, 1701 nt, Artificial Sequence; identical to SEQ ID NO: 194741
  derived and/or modified CDS sequence (opt5) from hemagglutinin__InfluenzaA__ACZ17408

SEQ ID NO: 195820 - RNA, 1701 nt, Artificial Sequence; identical to SEQ ID NO: 194741
  derived and/or modified CDS sequence (opt5) from hemagglutinin__InfluenzaA__ACZ17418

SEQ ID NO: 195821 - RNA, 1701 nt, Artificial Sequence
  derived and/or modified CDS sequence (opt5) from hemagglutinin__InfluenzaA__ACZ17438
augaaggccauccuggugguccuccuguacaccuucgcuacagccaacgcggacacgcuuugcauuggcuaucacgcuaauaacagcaccgauacaguugacaccgugcuggagaagaaugugacagucacccauuccgugaaccuccuggaagauaagcacaaugggaaacuuuguaagcugagaggaguugcuccccuccaucugggcaaaugcaacaucgccggguggauucugggaaauccugagugugaaucucucagcacagccuccucuuggagcuacaucguggagaccuccucuagcgacaacggcacgugcuauccgggggauuuuauugacuacgaagaacugcgggagcagcuuuccagcgucucuuccuucgaacgcuuugagaucuuccccaagaccagcucuuggccuaaucacgauuccaacaagggagugacagccgcuuguccccaugccggcgcgaaaucuuuuuauaagaaucugaucuggcucguuaaaaagggcaacagcuacccuaaacuguccaagagcuauauuaaugacaaggggaaagaagugcuuguccuguggggaauccaccaccccuccaccucugccgaucaacagagccucuaccagaacgcugacuccuacguguucgugggcagcucuagauauuccaagaaauuuaagccugagauugccauccggccgaaaguccgcgaucaggaggggagaaugaauuacuauuggacacugguugaacccggagacaagauuaccuucgaggcuacgggcaaccugguggugccucgguacgccuuugcgauggaacgcaacgccgggagcggaaucauuaucucugauacacccguccaugacugcaauaccacaugucaaaccccuaaaggcgcuaucaacaccagccuccccuuccagaauauucacccgaucacaauuggcaagugcccuaaguaugugaaauccacgaagcugagacuugccaccgggcugcggaacguucccucuauccagagccgcggacucuuuggcgcuauugccggguucaucgagggaggcuggacagggaugguggacggaugguacggcuaucaucaccagaaugaacaaggcuccggguacgccgcugaucugaaaagcacccagaacgcgaucgacgagauuacaaauaaggucaacucugugaucgagaaaaugaauacccaguuuacggccguuggaaaggaguucaaccaccuugagaagagaauugaaaaucugaacaaaaagguggaugacggcuuccucgauaucuggacauacaaugcugagcugcugguccuccuggaaaacgagcggacccuugacuaucaugauuccaaugugaaaaaccuguacgagaagguccgcagccagcucaaaaacaaugccaaggaaauugggaacggauguuuugaguucuaucacaagugcgacaauaccuguauggaaucugugaaaaacggcacauacgauuauccuaaguacuccgaggaagccaaacugaauagagaggagaucgacgggguuaaacuugaaagcacccggaucuaucaaauucuggcuaucuacuccacaguggccucuagccucguccuggugguuucccugggcgcgauuucuuuuuggaugugcagcaacggaucccuccagugccgcaucuguauuuga

SEQ ID NO: 195822 - RNA, 1701 nt, Artificial Sequence; identical to SEQ ID NO: 194728
  derived and/or modified CDS sequence (opt5) from hemagglutinin__InfluenzaA__ACZ17448

SEQ ID NO: 195823 - RNA, 1701 nt, Artificial Sequence; identical to SEQ ID NO: 194741
  derived and/or modified CDS sequence (opt5) from hemagglutinin__InfluenzaA__ACZ17458

SEQ ID NO: 195824 - RNA, 1701 nt, Artificial Sequence; identical to SEQ ID NO: 194728
  derived and/or modified CDS sequence (opt5) from hemagglutinin__InfluenzaA__ACZ17478

SEQ ID NO: 195825 - RNA, 1701 nt, Artificial Sequence; identical to SEQ ID NO: 194741
  derived and/or modified CDS sequence (opt5) from hemagglutinin__InfluenzaA__ACZ17488

SEQ ID NO: 195826 - RNA, 1701 nt, Artificial Sequence
  derived and/or modified CDS sequence (opt5) from hemagglutinin__InfluenzaA__ACZ18240
augaaggccauccuggugguccuccuguacaccuucgcuacagccaacgcggacacgcuuugcauuggcuaucacgcuaauaacagcaccgauacaguugacaccgugcuggagaagaaugugacagucacccauuccgugaaccuccuggaagauaagcacaaugggaaacuuuguaagcugagaggaguugcuccccuccaucugggcaaaugcaacaucgccggguggauucugggaaauccugagugugaaucucucagcacaaccuccucuuggagcuacaucguggagacguccucuagcgacaacgggaccugcuauccgggcgauuuuauugacuacgaagaacugcgggagcagcuuuccagcgucucuuccuucgaacgcuuugagaucuuccccaagacaagcucuuggccuaaucacgaucccaacaagggagugaccgccgccuguccucaugcuggcgccaaauccuuuuauaagaaucugaucuggcucguuaaaaagggcaacagcuaccccaaacugucuaaguccuauauuaaugacaaggggaaagaagugcuuguccuguggggaauccaccacccuagcacauccgcggaucaacagucucucuaccagaacgccgacgcuuacguguucgugggcaccagcagauauuccaagaaauuuaagccggagauugccauccggcccaaaguccgcgaucaggaggggagaaugaauuacuauuggacgcugguugaaccuggagacaagauuacauucgaggcuaccggcaaccugguggugccccgguacgccuuugcgauggaacgcaacgccgggagcggaaucauuaucucugauacaccuguccaugacugcaauaccaccugucaaacacccaaaggcgcuaucaacacgucccucccguuccagaauauucacccuaucaccauuggcaagugccccaaguaugugaaaagcacaaagcugagacuugccaccgggcugcggaacguuccuucuauccagagccgcggacucuuuggcgcuauugccggguucaucgagggaggcuggacagggaugguggacggaugguacggcuaucaucaccagaaugaacaaggcuccggguacgccgcugaucugaaaucuacccagaacgcgaucgacgagauuacgaauaaggucaacagcgugaucgagaaaaugaauacacaguuuaccgccguuggaaaggaguucaaccaccuugagaagagaauugaaaaucugaacaaaaagguggaugacggcuuccucgauaucuggaccuacaaugcugagcugcugguccuccuggaaaacgagcggacacuugacuaucaugauuccaaugugaaaaaccuguacgagaagguccgcagccagcucaaaaacaaugccaaggaaauugggaacggauguuuugaguucuaucacaagugcgacaauaccuguauggaaucugugaaaaacggcacauacgauuaucccaaguacuccgaggaagccaaacugaauagagaggagaucgacgggguuaaacuugaaagcacgcggaucuaucaaauucuggcuaucuacucuaccguggccuccagccucguccuggugguuucccugggcgcgauuucuuuuuggaugugcagcaacggaucccuccagugccgcaucuguauuuga

SEQ ID NO: 195827 - RNA, 1701 nt, Artificial Sequence; identical to SEQ ID NO: 194741
  derived and/or modified CDS sequence (opt5) from hemagglutinin__InfluenzaA__ACZ18241

SEQ ID NO: 195828 - RNA, 1701 nt, Artificial Sequence
  derived and/or modified CDS sequence (opt5) from hemagglutinin__InfluenzaA__ACZ27800
augaaggccauccuggugguccuccuguacaccuucgcuacagccaacgcggacacgcuuugcauuggcuaucacgcuaauaacagcaccgauacaguugacaccgugcuggagaaaaaugugacagucacccauuccgugaaccuccuggaagauaagcacaaugggaaacuuuguaagcugagaggaguugcuccccuccaucugggcaaaugcaacaucgccggguggauucugggaaauccugagugugaaucucucagcacagccuccucuuggagcuacaucguggagaccuccucuagcgacaacggcacgugcuauccgggggauuuuauugacuacgaagaacugcgggagcagcuuuccagcgucucuuccuucgaacgcuuugagaucuuccccaagaccagcucuuggccuaaucacgauuccaacaagggagugacagccgcuuguccccaugccggcgcgaaaucuuuuuauaagaaucugaucuggcucguuaaaaagggcaacagcuacccuaaacuguccaagagcuauauuaaugacaaggggaaagaagugcuuguccuguggggaauccaccaccccuccaccucugccgaucaacagagccucuaccagaacgcugacgccuacguguucgugggcuccagcagauauucuaaggaguuuaaaccugagauugcuauccggccgaagguccgcgggcaggaaggaagaaugaauuacuauuggacacugguugagcccggcgauaaaauuaccuucgaagccacggggaaccugguggugccucgguacgcguuugccauggagcgcaacgcuggauccggcaucauuaucagcgacacacccguccaugauugcaauaccacaugucaaaccccuaagggcgccaucaacaccucucuccccuuccagaauauucacccgaucacaauugggaaaugcccuaaguauguuaagagcacgaaacugagacuugcuaccggacugcggaacgugcccuccauccagucucgcggccucuuuggggccauugccggauucaucgaaggcggguggacaggaaugguggacggcugguacggcuaucaucaccagaaugagcaagggagcggauacgcugcggaccugaaguccacccagaacgccaucgaugagauuacaaauaaagucaacagcgugaucgaaaagaugaauacccaguuuacggcuguuggcaaagaguucaaccaccuugaaaagagaauugagaaucugaacaagaaaguggacgauggguuccucgacaucuggacauacaaugccgaacugcugguccuccuggagaacgagcggacccuugauuaucaugacucuaaugugaagaaccuguacgaaaaaguccgcucccagcucaagaacaaugccaaagagauuggaaacggcuguuuugaguucuaucacaagugcgauaauaccuguauggagagcgugaagaacgggacauacgacuauccuaaauacucugaagaggcuaagcugaauagagaggaaaucgauggcguuaaacuugaguccacccggaucuaucaaauucuggccaucuacagcacaguggcguccucucucguccuggugguuagccugggagcuauuuccuuuuggaugugcucuaacggcagccuccagugccgcaucuguauuuga

SEQ ID NO: 195829 - RNA, 1701 nt, Artificial Sequence; identical to SEQ ID NO: 194741
  derived and/or modified CDS sequence (opt5) from hemagglutinin__InfluenzaA__ACZ27810

SEQ ID NO: 195830 - RNA, 1701 nt, Artificial Sequence; identical to SEQ ID NO: 194741
  derived and/or modified CDS sequence (opt5) from hemagglutinin__InfluenzaA__ACZ27820

SEQ ID NO: 195831 - RNA, 1701 nt, Artificial Sequence; identical to SEQ ID NO: 194741
  derived and/or modified CDS sequence (opt5) from hemagglutinin__InfluenzaA__ACZ27830

SEQ ID NO: 195832 - RNA, 1701 nt, Artificial Sequence; identical to SEQ ID NO: 195094
  derived and/or modified CDS sequence (opt5) from hemagglutinin__InfluenzaA__ACZ27840

SEQ ID NO: 195833 - RNA, 1701 nt, Artificial Sequence; identical to SEQ ID NO: 194728
  derived and/or modified CDS sequence (opt5) from hemagglutinin__InfluenzaA__ACZ45006

SEQ ID NO: 195834 - RNA, 1701 nt, Artificial Sequence
  derived and/or modified CDS sequence (opt5) from hemagglutinin__InfluenzaA__ACZ45007
augaaggccauccuggugguccuccuguacaccuucgcuacagccaacgcggacacgcuuugcauuggcuaucacgcuaauaacagcaccgauacaguugacaccgugcuggagaagaaugugacagucacccauuccgugaaccuccuggaagauaagcacaaugggaaacuuuguaagcugagaggaguugcuccccuccaucugggcaaaugcaacaucgccggguggauucugggaaauccugagugugaaucucucagcacagccuccucuuggagcuacaucguggagaccuccucuagcgacaacggcacgugcuauccgggggauuuuauugacuacgaagaacugcgggagcagcuuuccagcgucucuuccuucgaacgcuuugagaucuuccccaagaccagcucuuggccuaaucacgauuccaacaagggagugacagccgcuuguccccaugccggcgcgaaaucuuuuuauaagaaucugaucuggcucguuaaaaagggcaacagcuacccuaaacuguccaagagcuauauuaaugacaaggggaaagaagugcuuguccuguggggaauccaccaccccuccaccucugccgaucaacagagccucuaccagaacgcugacgccuacguguucgugggcacauccagauauagcaagaaauuuaagccugagauugcuauccggccgaaaguccgcgaucaggaggggagaaugaauuacuauuggacccugguugaacccggagacaagauuacguucgaggccacaggcaaccugguggugccucgguacgcguuugccauggaacgcaacgcugggucuggaaucauuaucuccgauacccccguccaugacugcaauacaaccugucaaaccccuaaaggcgccaucaacacaagccuccccuuccagaauauucacccgaucacgauuggcaagugcccuaaguaugugaaaucuaccaagcugagacuugcuacagggcugcggaacguucccagcauccagucccgcggacucuuuggcgccauugccggguucaucgagggaggcuggaccgggaugguggacggaugguacggcuaucaucaccagaaugaacaaggcucuggggaugcugcggaccugaaaagcacacagaacgccaucgaugagauuaccaauaaggucaacuccgugaucgagaaaaugaauacgcaguuuacagcuguuggaaaggaguucaaccaccuugagaagagaauugaaaaucugaacaaaaagguggacgauggcuuccucgacaucuggaccuacaaugccgagcugcugguccuccuggaaaacgagcggacccuugauuaccaugacagcaaugugaaaaaccuguaugagaagguccgcucucagcucaaaaacaaugccaaggaaauugggaacggauguuuugaguucuaccacaagugcgauaauacauguauggaauccgugaaaaacggcaccuaugacuacccuaaguauagcgaggaagcuaaacugaauagagaggagaucgaugggguuaaacuugaaucuacacggaucuaccaaauucuggccaucuauuccacgguggcgagcucccucguccuggugguuucucugggcgcuauuagcuuuuggaugugcuccaacggaucucuccagugccgcaucuguauuuga

SEQ ID NO: 195835 - RNA, 1701 nt, Artificial Sequence; identical to SEQ ID NO: 195094
  derived and/or modified CDS sequence (opt5) from hemagglutinin__InfluenzaA__ACZ45008

SEQ ID NO: 195836 - RNA, 1701 nt, Artificial Sequence; identical to SEQ ID NO: 195094
  derived and/or modified CDS sequence (opt5) from hemagglutinin__InfluenzaA__ACZ45009

SEQ ID NO: 195837 - RNA, 1701 nt, Artificial Sequence; identical to SEQ ID NO: 194983
  derived and/or modified CDS sequence (opt5) from hemagglutinin__InfluenzaA__ACZ45010

SEQ ID NO: 195838 - RNA, 1701 nt, Artificial Sequence; identical to SEQ ID NO: 194741
  derived and/or modified CDS sequence (opt5) from hemagglutinin__InfluenzaA__ACZ45012

SEQ ID NO: 195839 - RNA, 1701 nt, Artificial Sequence
  derived and/or modified CDS sequence (opt5) from hemagglutinin__InfluenzaA__ACZ45013
augaaggccauccuggugguccuccuguacaccuucgcuacagccaacgcggacacgcuuugcauuggcuaucacgcuaauaacagcaccgauacaguugacaccgugcuggagaaaaaugugacagucacccauuccgugaaccuccuggaagauaagcacaaugggaaacuuuguaagcugagaggaguugcuccccuccaucugggcaaaugcaacaucgccggguggauucugggaaauccugagugugaaucucucagcacagccuccucuuggagcuacaucguggagaccuccucuagcgacaacggcacgugcuauccgggggauuuuauugacuacgaagaacugcgggagcagcuuuccagcgucucuuccuucgaacgcuuugagaucuuccccaagaccagcucuuggccuaaucacgauuccagcaagggagugacagccgcuuguccccaugccggcgcgaaaucuuuuuauaagaaccugaucuggcucguuaaaaagggcaauuccuacccuaaacugagcaaguccuauauuaacgacaaggggaaagaagugcuuguccuguggggaauccaccaccccucuaccagcgccgaucaacagucccucuaccagaaugcugacgccuacguguucgugggcacaagcagauauucuaagaaauuuaagccugagauugcuauccggccgaaaguccgcgagcaggaagggagaaugaacuacuauuggacccugguugagcccggagauaagauuacguucgaagccacaggcaaucugguggugccucgguacgcguuugccauggagcgcaacgcuggguccggaaucauuaucagcgacacccccguccaugauugcaacacaaccugucaaaccccuaaaggcgccaucaauacaucucuccccuuccagaacauucacccgaucacgauuggcaagugcccuaaguaugugaaaagcaccaagcugagacuugcuacagggcugcggaauguucccuccauccagucucgcggacucuuuggcgccauugccggguucaucgaaggaggcuggaccgggaugguggacggaugguacggcuaucaucaccagaacgagcaaggcagcggguacgcugcggaccugaaauccacacagaaugccaucgaugagauuaccaacaaggucaauagcgugaucgaaaagaugaacacgcaguuuacagcuguuggaaaggaguucaaucaccuugaaaagagaauugagaaccugaauaaaaagguggacgauggcuuccucgacaucuggaccuacaacgccgaacugcugguccuccuggagaaugagcggacccuugauuaucaugacucuaacgugaaaaaucuguacgaaaagguccgcucccagcucaaaaacaacgccaaggagauugggaauggauguuuugaguucuaucacaagugcgauaacacauguauggagagcgugaaaaauggcaccuacgacuauccuaaguacucugaagaggcuaaacugaacagagaggaaaucgaugggguuaaacuugaguccacacggaucuaucaaauucuggccaucuacagcacgguggcguccucucucguccuggugguuagccugggcgcuauuuccuuuuggaugugcucuaauggaagccuccagugccgcaucuguauuuga

SEQ ID NO: 195840 - RNA, 1701 nt, Artificial Sequence; identical to SEQ ID NO: 194741
  derived and/or modified CDS sequence (opt5) from hemagglutinin__InfluenzaA__ACZ45014

SEQ ID NO: 195841 - RNA, 1701 nt, Artificial Sequence; identical to SEQ ID NO: 194741
  derived and/or modified CDS sequence (opt5) from hemagglutinin__InfluenzaA__ACZ45016

SEQ ID NO: 195842 - RNA, 1701 nt, Artificial Sequence
  derived and/or modified CDS sequence (opt5) from hemagglutinin__InfluenzaA__ACZ45028
augaaggccauccuggugguccuccuguacaccuucgcuacagccaacgcggacacgcuuugcauuggcuaucacgcuaauaacagcaccgauacaguugacaccgugcuggagaagaaugugacagucacccauuccgugaaccuccuggaagauaagcacaaugggaaacuuuguaagcugagaggaguugcuccccuccaucugggcaaaugcaacaucgccggguggauucugggaaauccugagugugaaucucucagcacagccuccucuuggagcuacaucguggagaccuccucuagcgacaacggcacgugcuauccgggggauuuuauugacuacgaagaacugcgggagcagcuuuccagcgucucuuccuucgaacgcuuugagaucuuccccaagaccagcucuuggccuaaucacgauuccaacaagggagugacagccgcuuguccccaugccggcgcgaaaucuuuuuauaagaaucugaucuggcucguuaaaaagggcaacagcuacccuaaacuguccaagagcuauauuaaugacaaggggaaagaagugcuuguccuguggggaauccaccaccccuccaccucugccgaucaacagagccucuaccagaacgcugacgccuacguguucgugggcacauccagauauagcaagaaauuuaagccugagauugcuauccggccgaaaguccgcgaucaggaggggagaaugaauuacuauuggacccugguugaacccggagacaagauuacguucgaggccacaggcaaccugguggugccucgguacgcguuugccauggaacgcaacgcugggucuggaaucauuaucuccgauacccccguccaugacugcaauacaaccugucaaaccccuaaaggcgccaucaacacaagccuccccuuccagaauauucacccgaucacgauuggcaagugcccuaaguaugugaaaucuaccaagcugagacuugcuacagggcugcggaacauccccagcauucagucccgcggacucuuuggcgccaucgccggguucaucgagggaggcuggaccgggaugguugacggaugguacggcuaucaucaccagaaugaacaaggcucuggguacgcugcggaucugaaaagcacacagaacgccauugacgagaucaccaauaaggugaacuccgucauugagaaaaugaauacgcaguuuacagcugugggaaaggaguucaaccaccuugagaagagaaucgaaaaucugaacaaaaagguugaugacggcuuccucgauauuuggaccuacaaugccgagcugcuggugcuccuggaaaacgagcggacccuugacuaucaugauagcaaugucaaaaaccuguacgagaaggugcgcucucagcucaaaaacaaugccaaggaaaucgggaacggauguuuugaguucuaucacaagugcgacaauacauguauggaauccgucaaaaacggcaccuacgauuauccuaaguacagcgaggaagcuaaacugaauagagaggagaucgacggggugaaacuugaaucuacacggauuuaucaaauccuggccauuuacuccacgguugcgagcucccucgugcuggucgugucucugggcgcuaucagcuuuuggaugugcuccaacggaucucuccagugccgcauuuguaucuga

SEQ ID NO: 195843 - RNA, 1701 nt, Artificial Sequence
  derived and/or modified CDS sequence (opt5) from hemagglutinin__InfluenzaA__ACZ45029
augaaggccauccuggugguccuccuguacaccuucgcuacagccaacgcggacacgcuuugcauuggcuaucacgcuaauaacagcaccgauacaguugacaccgugcuggagaagaaugugacagucacccauuccgugaaccuccuggaagauaagcacaaugggaaacuuuguaagcugagaggaguugcuccccuccaucugggcaaaugcaacaucgccggguggauucugggaaauccugagugugaaucucucagcacagccuccucuuggagcuacaucguggagaccuccucuagcggcaacgggacgugcuauccgggagacuuuauugauuacgaagaacugcgggagcagcuuuccagcgucucuuccuucgaacgcuuugagaucuuccccaagaccagcucuuggccuaaucacgacuccaacaagggcgugacagccgcuuguccccaugccggcgcgaaaucuuuuuauaagaaucugaucuggcucguuaaaaaggggaacagcuacccuaaacuguccaagagcuauauuaaugauaagggaaaagaagugcuuguccuguggggcauccaccaccccuccaccucugccgaccaacagagccucuaccagaacgcugaugccuacguguucguggggacauccagauauagcaagaaauuuaagccugagauugcuauccggccgaaaguccgcgaccaggagggaagaaugaauuacuauuggacccugguugaacccggcgauaagauuacguucgaggccacagggaaccugguggugccucgguacgcguuugccauggaacgcaacgcuggaucuggcaucauuaucuccgacacccccguccaugauugcaauacaaccugucaaaccccuaaaggcgccaucaacacaagccuccccuuccagaauauucacccgaucacgauugggaagugcccuaaguaugugaaaucuaccaagcugagacuugcuacaggacugcggaacguucccagcauccagucccgcggccucuuuggggccauugccggauucaucgagggcggguggaccggaaugguggacggcugguacggcuaucaucaccagaaugaacaagggucuggauacgcugcggaccugaaaagcacacagaacgccaucgaugagauuaccaauaaggucaacuccgugaucgagaaaaugaauacgcaguuuacagcuguuggcaaggaguucaaccaccuugagaagagaauugaaaaucugaacaaaaagguggacgauggguuccucgacaucuggaccuacaaugccgagcugcugguccuccuggaaaacgagcggacccuugauuaucaugacagcaaugugaaaaaccuguacgagaagguccgcucucagcucaaaaacaaugccaaggaaauuggaaacggcuguuuugaguucuaucacaagugcgauaauacauguauggaauccgugaaaaacgggaccuacgacuauccuaaguacagcgaggaagcuaaacugaauagagaggagaucgauggcguuaaacuugaaucuacacggaucuaucaaauucuggccaucuacuccacgguggcgagcucccucguccuggugguuucucugggagcuauuagcuuuuggaugugcuccaacggcucucuccagugccgcaucuguauuuga

SEQ ID NO: 195844 - RNA, 1701 nt, Artificial Sequence
  derived and/or modified CDS sequence (opt5) from hemagglutinin__InfluenzaA__ACZ45030
augaaggccauccuggugguccuccuguacaccuucgcuacagccaacgcggacacgcuuugcauuggcuaucacgcuaauaacagcaccgauacaguugacaccgugcuggagaagaaugugacagucacccauuccgugaaccuccuggaagauaagcacaaugggaaacuuuguaagcugagaggaguugcuccccuccaucugggcaaaugcaacaucgccggguggauucugggaaauccugagugugaaucucucagcacagccuccucuuggagcuacaucguggagaccuccucuagcgacaacggcacgugcuauccgggggauuuuauugacuacgaagaacugcgggagcagcuuuccagcgucucuuccuucgaacgcuuugagaucuuccccaagaccagcucuuggccuaaucacgauuccaacaagggagugacagccgcuuguccccaugccggcgcgaaaucuuuuuauaagaaucugaucuggcucguuaaaaagggcaacagcuacccuaaacuguccaagagcuauauuaaugacaaggggaaagaagugcuuguccuguggggaauccaccaccccuccaccucugccgaucaacagagccucuaccagaacgcugacgccuacguguucgugggcacauccaccuauagcaagaaauuuaagccugagauugcuaucagaccgaaaguccgggaucaggaggggcgcaugaauuacuauuggacgcugguugaacccggagacaagauuacauucgaggccaccggcaaccugguggugccuagauacgcguuuacaauggaacggaacgccgggucuggaaucauuaucuccgauacccccguccaugacugcaauaccacaugucaaacgccuaaaggcgcuaucaacaccagccuccccuuccagaauauucacccgaucacaauuggcaagugcccuaaguaugugaaaucuaccaagcugcgccuugccacagggcugagaaacauccccagcauucagucccggggacucuuuggcgcuaucgccggguucaucgagggaggcuggaccgggaugguugacggaugguacggcuaucaucaccagaaugaacaaggcucuggguacgccgcugaucugaaaagcacgcagaacgcgauugacgagaucacaaauaaggugaacuccgucauugagaaaaugaauacccaguuuaccgccgugggaaaggaguucaaccaccuugagaagcgcaucgaaaaucugaacaaaaagguugaugacggcuuccucgauauuuggacauacaaugcugagcugcuggugcuccuggaaaacgagagaacccuugacuaucaugauagcaaugucaaaaaccuguacgagaaggugcggucucagcucaaaaacaaugccaaggaaaucgggaacggauguuuugaguucuaucacaagugcgacaauacauguauggaauccgucaaaaacggcacguacgauuauccuaaguacagcgaggaagccaaacugaaucgcgaggagaucgacggggugaaacuugaaucuaccagaauuuaucaaauccuggcuauuuacuccacaguugccagcucccucgugcuggucgugucucugggcgcgaucagcuuuuggaugugcuccaacggaucucuccagugccggauuuguaucuga

SEQ ID NO: 195845 - RNA, 1701 nt, Artificial Sequence
  derived and/or modified CDS sequence (opt5) from hemagglutinin__InfluenzaA__ACZ45031
augaaggccauccuggugguccuccuguacaccuucgcuacagccaacgcggacacgcuuugcauuggcuaucacgcuaauaacagcaccgauacaguugacaccgugcuggagaaaaaugugacagucacccauuccgugaaccuccuggaagauaagcacaaugggaaacuuuguaagcugagaggaguugcuccccuccaucugggcaaaugcaacaucgccggguggauucugggaaauccugagugugaaucucucagcacagccuccucuuggagcuacaucguggagaccuccucuagcgacaacggcacgugcuauccgggggauuuuauugacuacgaagaacugcgggagcagcuuuccagcgucucuuccuucgaacgcuuugagaucuuccccaagaccagcucuuggccuaaucacgauuccaacaagggagugacagccgcuuguccccaugccggcgcgaaaucuuuuuauaagaaucugaucuggcucguuaaaaagggcaacagcuacccuaaacuguccaagagcuauauuaaugacaaggggaaagaagugcuuguccuguggggaauccaccaccccuccaccucugccgaucaacagagccucuaccagaacgcugacgccuacguguucgugggcacauccagauauagcaagaaauuuaagccugagauugcuauccggccgaaaguccgcgagcaggaagggagaaugaauuacuauuggacccugguugagcccggagauaagauuacguucgaagccacaggcaaccugguggugccucgguacgcguuuaccauggagcgcaacgucgggucuggaaucauuaucuccgacacacccgugcaugauugcaauaccaccugucaaacaccuaaaggcgccaucaacacgagccuccccuuccagaauauucacccgaucaccauuggcaagugcccuaaguauguuaaaucuacaaagcugagacuugcuaccgggcugcggaacgugcccagcauccagucccgcggacucuuuggcgccauugcuggguucaucgaaggaggcuggacagggauggucgacggaugguacggcuaucaucaccagaaugagcaaggcucuggguacgccgccgaccugaaaagcacccagaacgcuaucgaugagauuacgaauaaggugaacuccguuaucgaaaagaugaauacacaguuuaccgcggugggaaaggaguucaaccaccuugaaaagagaauugagaaucugaacaaaaaggucgacgauggcuuccucgacaucuggaccuacaaugccgaacugcuggugcuccuggagaacgagcggacacuugauuaucaugacagcaaugucaaaaaccuguacgaaaaggugcgcucucagcucaaaaacaaugcuaaggagauugggaacggauguuuugaguucuaucacaagugcgauaauaccuguauggaguccguuaaaaacggcacauacgacuauccuaaguacagcgaagaggccaaacugaauagagaggaaaucgauggggugaaacuugagucuacgcggaucuaucaaauucuggccaucuacuccaccgucgcuagcucccucgugcugguugugucucugggcgccauuagcuuuuggaugugcuccaacggaucucuccagugccgcaucuguauuuga

SEQ ID NO: 195846 - RNA, 1701 nt, Artificial Sequence
  derived and/or modified CDS sequence (opt5) from hemagglutinin__InfluenzaA__ACZ45034
augaaggccauccuggugguccuccuguacaccuucgcuacagccaacgcggacacgcuuugcauuggcuaucacgcuaauaacagcaccgauacaguugacaccgugcuggagaagaaugugacagucacccauuccgugaaccuccuggaagauaagcacaaugggaaacuuuguaagcugagaggaguugcuccccuccaucugggcaaaugcaacaucgccggguggauucugggaaauccugagugugaaucucucagcacagccuccucuuggagcuacaucguggagaccuccucuagcgacaacggcacgugcuauccgggggauuuuauugacuacgaagaacugcgggagcagcuuuccagcgucucuuccuucgaacgcuuugagaucuuccccaagaccagcucuuggccuaaucacgauuccaacaagggagugacagccgcuuguccccaugccggcgcgaaaucuuuuuauaagaaucugaucuggcucguuaaaaagggcaacagcuacccuaaacuguccaagagcuauauuaaugacaaggggaaagaagugcuuguccuguggggaauccaccaccccuccaccucugccgaucaacagagccucuaccagaacgcugacgccuacguguucgugggcacauccagauauagcaagaaauuuaagccugagauugcuauccggccgaaaguccgcgaucaggaggggagaaugaauuacuauuggacccugguugaacccggagacaagauuacguucgaggccacaggcaaccugguggugccucgguacgcguuugccauggaacgcaacgcugggucuggaaucauuaucuccgauacccccguccaugacugcaauacaaccugucaaaccccuaaaggcgccaucaacacaagccuccccuuccagaaugugcacccgauuacgaucggcaagugcccuaaguauguuaaaucuaccaagcugagacuugcuacagggcugcggaacgugcccccuauucagagccgcggacucuuuggcgccaucgccggguucauugagggaggcuggaccgggauggucgacggaugguacggcuaucaucaccagaaugaacaaggcuccggguacgcugcggaucugaaaucuacacagaacgccaucgacgagaucaccaauaaggugaacagcguuauugagaaaaugaauacgcaguuuacagcugugggaaaggaguucaaccaccuugagaagagaaucgaaaaucugaacaaaaaggucgaugacggcuuccucgauauuuggaccuacaaugccgagcugcuggugcuccuggaaaacgagcggacccuugacuaucaugauuccaaugucaaaaaccuguacgagaaggugcgcagccagcucaaaaacaaugccaaggaaaucgggaacggauguuuugaguucuaucacaagugcgacaauacauguauggaaucuguuaaaaacggcaccuacgauuaucccaaguacuccgaggaagcuaaacugaauagagaggagauugacggggugaaacuugaaagcacacggaucuaucaaauccuggccauuuacucuacggucgcguccagccucgugcugguugugucccugggcgcuaucucuuuuuggaugugcagcaacggaucccuccagugccgcauuuguaucuga

SEQ ID NO: 195847 - RNA, 1701 nt, Artificial Sequence; identical to SEQ ID NO: 194741
  derived and/or modified CDS sequence (opt5) from hemagglutinin__InfluenzaA__ACZ45036

SEQ ID NO: 195848 - RNA, 1701 nt, Artificial Sequence; identical to SEQ ID NO: 194741
  derived and/or modified CDS sequence (opt5) from hemagglutinin__InfluenzaA__ACZ45037

SEQ ID NO: 195849 - RNA, 1701 nt, Artificial Sequence; identical to SEQ ID NO: 195842
  derived and/or modified CDS sequence (opt5) from hemagglutinin__InfluenzaA__ACZ45038

SEQ ID NO: 195850 - RNA, 1701 nt, Artificial Sequence; identical to SEQ ID NO: 195094
  derived and/or modified CDS sequence (opt5) from hemagglutinin__InfluenzaA__ACZ45039

SEQ ID NO: 195851 - RNA, 1701 nt, Artificial Sequence; identical to SEQ ID NO: 194741
  derived and/or modified CDS sequence (opt5) from hemagglutinin__InfluenzaA__ACZ45040

SEQ ID NO: 195852 - RNA, 1701 nt, Artificial Sequence; identical to SEQ ID NO: 194741
  derived and/or modified CDS sequence (opt5) from hemagglutinin__InfluenzaA__ACZ52567

SEQ ID NO: 195853 - RNA, 1701 nt, Artificial Sequence; identical to SEQ ID NO: 194741
  derived and/or modified CDS sequence (opt5) from hemagglutinin__InfluenzaA__ACZ52568

SEQ ID NO: 195854 - RNA, 1701 nt, Artificial Sequence; identical to SEQ ID NO: 195310
  derived and/or modified CDS sequence (opt5) from hemagglutinin__InfluenzaA__ACZ52569

SEQ ID NO: 195855 - RNA, 1701 nt, Artificial Sequence
  derived and/or modified CDS sequence (opt5) from hemagglutinin__InfluenzaA__ACZ53956
augaagaccaucauugcccugagcuacaucuucugccucgcucuggcccagaaacuucccggcaacgacaauuccacagcgacgcugugucucgggcaccaugcugugccuaacggaacccuggucaagacaauuaccaaugaucaaaucgagguuacaaacgccaccgaacuugugcagucuagcuccacaggcagaauuugcgacucuccgcaccagauccuggauggggagaauuguacccucaucgacgcccugcugggagauccccauugcgacggcuuucagaacaaagaaugggaucucuucguggagcggagcaaggcuuauuccaauuguuacccuuaugacguccccgauuacgccucucugcgcagccuuguggcuuccagcgggacgcuggaauuuaacaaugagucuuucaacuggaccggaguugcccaaaauggcacauccagcgcgugcaaaagacggucuauuaaguccuuuuucagcacccucaacuggcugcaccagcuucagaaucgcuauccugcccugaacgugacaaugcccaauaacgacaaguuugauaaacucuacaucuggggcguccaucacccuucuaccgacuccgaucagauuagcguguaugcucaagccuccgggagaguuacggugucuacaaagcggagccagcagaccgucaucccgaacauuggaucccgccccugggugagaggcgugagcucucggaucuccauuuacuggacaaucgucaaaccuggggacauccugcugauuaauagcaccggaaaccucaucgcuccccgcggcuacuucaagauuagaucugggaaaagcuccaucaugcggucugacgccccuauuggaaaguguaauagcgagugcaucacccccaacggcuccaucccgaaugauaagccuuuucagaacguuaaucgcauuacauauggcgcgugucccagauacgugaaacaaaacacgcugaaacuugccaccgggaugcggaaugugccugaaaagcagacacgcggaaucuucggcgcuauugccggguuuaucgagaacggaugggaaggcaugauggacgggugguauggauucagacaccagaauagcgagggcaccggccaagcugccgaucugaagucuacacaggccgcuauuaaccagaucaaugggaaacucaaccggcugaucgagaagaccaaugaaaaauuucaucagauugagaaggaguucuccgaagucgaaggaagaauccaagaccuugagaaguacguggaggauacgaaaauugaccuguggagcuauaacgcggaacuccugguugcccuggagaaccagcacacaaucgaucucaccgacucugaaaugaauaagcuguucgagcgcacccggaaacagcuuagagaaaacgcugaggauaugggcaaugggugcuuuaagauuuaccauaaaugugacaacgccugcaucggauccauucgcaauggcacauaugaucacgacguguaccgggacgaggcccugaacaauagauuccagaucaagggggucgaacucaagagcggcuacaaagauuggauccuguggauuuccuuugcuaucucuugcuuccuucugugugugguucuccugggauuuauuaugugggccugccaacgcggcaacauccgguguaauauuugcaucuga

SEQ ID NO: 195856 - RNA, 1701 nt, Artificial Sequence
  derived and/or modified CDS sequence (opt5) from hemagglutinin__InfluenzaA__ACZ53967
augaagaccaucauugcccugagcuacaucuucugccucgcucuggcccagaaacuucccggcaacgacaauuccacagcgacgcugugucucgggcaccaugcugugccuaacggaacccuggucaagacaauuaccaaugaucaaaucgagguuacaaacgccaccgaacuugugcagucuagcuccacaggcagaauuugcgacucuccgcaccagauccuggauggggagaauuguacccucaucgacgcccugcugggagauccccauugcgacggcuuucagaacaaagaaugggaucucuucguggagcggagcaaggcuuauuccaauuguuacccuuaugacguccccgauuacgccucucugcgcagccuuguggcuuccagcgggacgcuggaauuuaacaaugagucuuucaacuggaccggaguugcccaaaauggcacauccagcgcgugcaaaagacggucuauuaaguccuuuuucagcacccucaacuggcugcaccagcuucagaaucgcuauccugcccugaacgugacaaugcccaauaacgacaaguuugauaaacucuacaucuggggcguccaucacccuucuaccgacuccgaucagacgagccuguaugcucaagccuccgggagagugacaguuucuaccaagcggagccagcagacagugauuccgaacaucggaucccgccccugggucagaggcgugagcucucggauuuccaucuacuggaccauugugaaaccuggggacguccugguuaucaauagcaacggaaaucucaucgcuccccgcggcuacuucaagaugagaucugggaaaagcuccauuaugcggucugacgccccuaucggaaaguguaacagcgagugcauuacccccaauggcuccaucccgaacgauaagccuuuucagaaugugaaccgcauuacauauggcgcgugucccagauacgugaaacaaaauacgcugaaacuugccaccgggaugcggaacgucccugaaaagcagacacgcggaaucuucggcgcuaucgccggguuuauugagaauggaugggaaggcaugauggacgggugguauggauucagacaccagaacagcgagggcaccggccaagcugccgaucugaagucuacacaggccgcuaucaaucagauuaacgggaaacucaauaagcugaucgagaaaaccaacgaaaaguuucaucagauugagaaggaguucuccgaaguggaaggacggauccaagaccuugagaaauacguugaggauacgaagaucgaccuguggagcuauaacgcggaacuccugguggcccuggagaaucagcacacaauugaucucaccgacucugaaaugaacaaacuguucgagagaacccgcaagcagcuucgggaaaaugcugaggauaugggcaacgggugcuuuaaaaucuaccauaagugugacaaugccugcauuggauccaucagaaacggcacauaugaucacgacgucuaccgcgacgaggcccugaauaaccgguuccagauuaaggggguggaacucaaaagcggcuacaaggauuggauccuguggauuuccuuugcuaucucuugcuuccuucuguguguugugcuccugggaagcaucaugugggccugccaaagaggcaauauucgcuguaacaucugcauuuga

SEQ ID NO: 195857 - RNA, 1701 nt, Artificial Sequence
  derived and/or modified CDS sequence (opt5) from hemagglutinin__InfluenzaA__ACZ53978
augaagaccaucauugcccugagcuacaucuucugccucgcucuggcccagaaacuucccggcaacgacaauuccacagcgacgcugugucucgggcaccaugcugugccuaacggaacccuggucaagacaauuaccaaugaucaaaucgagguuacaaacgccaccgaacuugugcagucuagcuccacaggcagaauuugcgacucuccgcaccagauccuggauggggagaauuguacccucaucgacgcccugcugggagauccccauugcgacggcuuucagaacaaagaaugggaucucuucguggagcggagcaaggcuuauuccaauuguuacccuuaugacguccccgauuacgccucucugaaaagccuuauugcuuccagcgggacgcuggaauuuaacaaugagucuuucaacuggaucggagugucccaaaauggcaccagcucugccugcaagcgcauuuccaucacaguuagcuuuaacaagcucaauuggcugcaccagcuuaaauauagauacccugcgcugaacgugaccaugcccaauaacgacaaguucgauaaacucuauauuuggggcguccaucacccuucuacagacuccgaucagaccagccuguacgcccaggcuuccgggcgggugacgguuucuacaaagcgcagccaacagaccgugaucccgaacauuggauccagacccuggguccggggcgugagcucucgcaucuccaucuacuggacaauugugaaaccuggggacguccugguuaucaauagcaacggaaaucucauugcccccagaggcuauuuuaagaugcggucuggaaagagcuccaucaugcgcucugacgcuccuauugggaaauguaacagcgagugcaucacccccaauggcuccaucccgaacgauaagccuuuccagaaugugaacagaauuaccuacggcgccuguccccgguaugugaaacagaauacacugaaacuugcgacggggaugcgcaacgucccugaaaagcaaaccagaggaaucuuuggcgccauugcuggguucaucgagaauggaugggaaggcaugguggacgggugguacggauuucggcaccagaacagcgagggcacaggccaggccgcugaucugaagucuacccaagccgccauuaaucagaucacagggaaacucaacaagcugaucgagaagaccaaugaaaaauuccaucagauugagaaggaauuuuccgagguugaaggacgcauccaggaccuugagaaauauguggaggauacgaagauugaccuguggagcuacaacgcugaacuccuggucgcgcuggagaaccaacacacaaucgaucucaccgacucugaaaugaauaaacuguucgagagaacccggaagcagcuuagagaaaacgccgaggauaugggcaaugggugcuucaagauuuaucauaaaugugacaacgcuugcaucggauccauucgcaauggcacauacgaucacgacguguaccgggacgaggcccugaacaauagauuucagaucaaggggguugaacucaaaagcggcuauaaggauuggauccuguggauuuccuucgccaucucuugcuuucuucugugugugguccuccugggauucauuaugugggcuugccagcgcggcaacauccgguguaauauuugcaucuga

SEQ ID NO: 195858 - RNA, 1701 nt, Artificial Sequence
  derived and/or modified CDS sequence (opt5) from hemagglutinin__InfluenzaA__ACZ56080
augaaggccauccuggugguccuccuguacaccuucgcuacagccaacgcggacacgcuuugcauuggcuaucacgcuaauaacagcaccgauacaguugacaccgugcuggagaagaaugugacagucacccauuccgugaaccuccuggaagauaagcacaaugggaaacuuuguaagcugagaggaguugcuccccuccaucugggcaaaugcaacaucgccggguggauucugggaaauccugagugugaaucucucagcacagccuccucuuggagcuacaucguggagaccuccucuagcgacaacggcacgugcuauccgggggauuuuauugacuacgaagaacugcgggagcagcuuuccagcgucucuuccuucgaacgcuuugagaucuuccccaagaccagcucuuggccuaaucacgauuccaacaagggagugacagccgcuuguagccaugccggcgcgaaaucuuuuuauaagaaucugaucuggcucguuaaaaagggcaacuccuaccccaaacugagcaaguccuauauuaaugacaaggggaaagaagugcuuguccuguggggaauccaccacccuucuaccagcgccgaucaacagucccucuaccagaacgcugacgccuacguguucgugggcacaagcagauauucuaagaaauuuaagcccgagauugcuauccggccuaaaguccgcgggcaggagggaagaaugaauuacuauuggacccugguugaaccgggcgauaagauuacguucgaggccacagggaaccugguggugccccgguacgcguuugccauggaacgcaacgcuggauccggcaucauuaucagcgacaccccuguccaugauugcaauacaaccugucaaacccccaaaggcgccaucaacacaucucucccuuuccagaauauucaccccaucacgauugggaagugcccgaaguaugugaaaagcaccaagcugagacuugcuacaggacugcggaacguuccuuccauccagucucgcggccucuuuggggccauugccggauucaucgagggcggguggaccggaaugguggacggcugguacggcuaucaucaccagaaugaacaagggagcggauacgcugcggaccugaaauccacacagaacgccaucgaugagauuaccaauaaggucaacagcgugaucgagaaaaugaauacgcaguuuacagcuguuggcaaggaguucaaccaccuugagaagagaauugaaaaucugaacaaaaagguggacgauggguuccucgacaucuggaccuacaaugccgagcugcugguccuccuggaaaacgagcggacccuugauuaucaugacucuaaugugaaaaaccuguacgagaagguccgcucccagcucaaaaacaaugccaaggaaauuggaaacggcuguuuugaguucuaucacaagugcgauaauacauguauggaaagcgugaaaaacgggaccuacgacuaucccaaguacucugaggaagcuaaacugaauagagaggagaucgauggcguuaaacuugaauccacacggaucuaucaaauucuggccaucuacagcacgguggcguccucucucguccuggugguuagccugggagcuauuuccuuuuggaugugcucuaacggcagccuccagugccgcaucuguauuuga

SEQ ID NO: 195859 - RNA, 1701 nt, Artificial Sequence
  derived and/or modified CDS sequence (opt5) from hemagglutinin__InfluenzaA__ACZ61118
augaaggccauccuggugguccuccuguacaccuucgcuacagccaacgcggacacgcuuugcauuggcuaucacgcuaauaacagcaccgauacaguugacaccgugcuggagaagaaugugacagucacccauuccgugaaccuccuggaagauaagcacaaugggaaacuuuguaagcugagaggaguugcuccccuccaucugggcaaaugcaacaucgccggguggauucugggaaauccugagugugaaucucucagcacagccuccucuuggagcuacaucguggagaccuccucuagcgacaacggcacgugcuauccgggggauuuuauugacuacgaagaacugcgggagcagcuuuccagcgucucuuccuucgaacgcuuugagaucuuccccaagaccagcucuuggccuaaucacgauuccaacaagggagugacagccgcuuguccccaugccggcgcgaaaucuuuuuauaagaaucugaucuggcucguuaaaaagggcaacagcuacccuaaacuguccaagagcuauauuaaugacaaggggaaagaagugcuuguccuguggggaauccaccaccaauccaccucugccgaucagcagagccucuaccagaacgcugacgccuacguguucgugggcuccagcagauauucuaagaaauuuaagcccgagauugcuauccggccuaaaguccgcgaucaagaggggagaaugaauuacuauuggacacugguugaaccgggagacaagauuaccuucgaggccacgggcaaccugguggugccccgguacgcguuugccauggaacgcaacgcuggguccggaaucauuaucagcgauacaccuguccaugacugcaauaccacaugucagacccccaaaggcgccaucaacaccucucucccuuuccagaauauucaccccaucacaauuggcaagugcccgaaguaugugaaaagcacgaagcugagacuugcuaccgggcugcggaacguuccuuccauccagucucgcggacucuuuggcgccauugccggguucaucgagggaggcuggacagggaugguggacggaugguacggcuaucaucaccaaaaugaacagggcagcggguacgcugcggaucugaaauccacccagaacgccaucgacgagauuacaaauaaggucaacagcgugaucgagaaaaugaauacccaguuuacggcuguuggaaaggaguucaaccaccuugagaagagaauugaaaaucugaacaaaaagguggaugacggcuuccucgauaucuggacauacaaugccgagcugcugguccuccuggaaaacgagcggacccuugacuaucaugauucuaaugugaaaaaccuguacgagaagguccgcucccaacucaaaaacaaugccaaggaaauugggaacggauguuuugaguucuaucacaagugcgacaauaccuguauggaaagcgugaaaaacggcacauacgauuaucccaaguacucugaggaagcuaaacugaauagagaggagaucgacgggguuaaacuugaauccacccggaucuaucagauucuggccaucuacagcacaguggcguccucucucguccuggugguuagccugggcgcuauuuccuuuuggaugugcucuaacggaagccuccagugccgcaucuguauuuga

SEQ ID NO: 195860 - RNA, 1701 nt, Artificial Sequence
  derived and/or modified CDS sequence (opt5) from hemagglutinin__InfluenzaA__ACZ61119
auggaggccauccuggugguccuccuguacaccuucgcuacagccaacgcggacacgcuuugcauuggcuaucacgcuaauaacagcaccgauacaguugacaccgugcuggaaaagaaugugacagucacccauuccgugaaccuccuggaggauaaacacaaugggaaacuuuguaagcugagaggaguugcgccccuccaucugggcaagugcaacaucgccggguggauucugggaaauccugaaugugagucucucagcacagcuuccucuuggagcuacaucguggaaaccuccucuagcgacaacggcacgugcuauccgggggauuuuauugacuacgaggagcugcgggaacagcuuuccagcgucucuuccuucgagcgcuuugaaaucuuccccaaaaccagcucuuggccuaaucacgauuccaacaagggagugacagccgcuuguccccaugccggcgccaagagcuuuuauaaaaaucugaucuggcucguuaagaaaggcaacucuuacccuaagcuguccaaaagcuauauuaaugacaaggggaaggaggugcuuguccuguggggaauccaccaccccuccaccucugccgaucaacagagccucuaccagaacgcugacgccuacguguucgugggcuccagcagauauucuaaaaaguuuaaaccugagauugcuauccggccgaagguccgcgaucaggaagggagaaugaauuacuauuggacacugguugagcccggagacaaaauuaccuucgaagccacgggcaaccugguggugccucgguacgcguuugccauggagcgcaacgcuggguccggaaucauuaucagcgauacacccguccaugacugcaauaccacaugucaaaccccuaagggcgccaucaacaccucucuccccuuccacaauauucauccgaucacaauuggcaaaugcccuaaguauguuaagagcacgaaacugagacuugcuaccgggcugcggaacgugcccuccauccagucucgcggacucuuuggcgccauugccggguucaucgaaggaggcuggacagggaugguggacggaugguacggcuaucaccaccagaaugagcagggcagcggguacgcugcggaucugaaguccacccaaaacgccaucgacgagauuacaaauaaagucaacagcgugaucgaaaagaugaauacccaguuuacggcuguuggaaaagaguucaaccaucuugaaaagagaauugagaaucugaacaagaaaguggaugacggcuuccucgauaucuggacauacaaugccgaacugcugauucuccuggagaacgagcggacccuugacuaucacgauucuaaugucaagaaccuguacgaaaaagugcgcucccagcucaagaacaaugccaaagagaucgggaacggauguuuugaguucuaucauaagugcgacaauaccuguauggaaagcgucaagaacggcacauacgauuauccuaaauacucugaagaggcuaagcugaauagagaggaaaucgacggggugaaacuugaguccacccggauuuaucagauccuggccauuuacagcacaguugcguccucucucgugcuggucgugagccugggcgcuaucuccuuuuggaugugcucuaacggaagccuccaaugccgcauuuguaucuga

SEQ ID NO: 195861 - RNA, 1701 nt, Artificial Sequence; identical to SEQ ID NO: 194741
  derived and/or modified CDS sequence (opt5) from hemagglutinin__InfluenzaA__ACZ61122

SEQ ID NO: 195862 - RNA, 1701 nt, Artificial Sequence; identical to SEQ ID NO: 194741
  derived and/or modified CDS sequence (opt5) from hemagglutinin__InfluenzaA__ACZ61123

SEQ ID NO: 195863 - RNA, 1701 nt, Artificial Sequence; identical to SEQ ID NO: 195539
  derived and/or modified CDS sequence (opt5) from hemagglutinin__InfluenzaA__ACZ74627

SEQ ID NO: 195864 - RNA, 1698 nt, Artificial Sequence
  derived and/or modified CDS sequence (opt5) from hemagglutinin__InfluenzaA__ACZ81554
augaaggugaaacugcucguccugcuuugcaccuucacagccacguacgcugacaccaucuguauuggcuaucacgccaacaauagcacagauaccguugacacagugcuggagaagaacgugaccgucacacauuccgugaaucuccuggaaaacaaucacaacgggaaacuuugccugcucaagggaaucgcgccccugcagcugggcaauuguaccguugcuggguggauucucggaaacccugagugcgaacugcuuaucucuaaagagagcugguccuacauuguggaaaagccgaaucccgagaacggcacguguuauccugggcauuuugccgauuacgaggaacugagagagcaacucucuagcgucuccucuuucgaacgguuugagaucuuccccaaggagagcuccuggccuaaucacaccgugacaggaguuagcgccucuugcucccauaacggcgaaaauagcuuuuaucgcaaccugcuuuggcugaccggcaaaaaugggcucuaccccaaccugucuaaguccuaugcuaacaauaaagagaaggaagugcugguccucuggggagugcaccacccuccgaacaucgccgaccagaaaacacuguaccauaccgagaaugcuuacgugagcgucguuucuucccacuauagcagaaaguucacgcccgaaauugccaagcggccuaaaauccgcgaucaggagggcagaauuaacuacuauuggacacuucuggagcccggggacaccaucauuuuugaagcgaauggaaaccucaucgccccucgguacgcuuucgcccugucccgcggcuuugggucuggaauuaucaauagcaacgcucccauggauaagugugacgccaaaugccagacaccgcaaggcgcgaucaauuccagccuuccuuuccagaacgugcaucccgugaccauuggcgaguguccuaaguaugucagaucugccaaacugcggauggugaccgggcuccgcaauauccccuccauucagagcagaggacuguuuggcgcuaucgccggguucauugaaggaggcuggacagggaugguugauggaugguacggcuaucaccaccagaacgagcaaggcucuggguacgcugccgaccaaaagagcacgcagaaugccaucaacggaaucaccaauaaagugaacuccgucauugaaaagaugaacacacaguuuaccgcugugggcaaggaguucaauaaacuggagcggcgcauggaaaaccucaauaagaaaguugaugacggguucaucgauauuuggacauacaacgcggagcugcuugugcugcucgaaaaugagagaacccuggacuuucaugacucuaacgucaagaaucuuuaugaaaaagucaagagccagcugaagaacaaugccaaagagaucggaaacggcugcuucgaguuuuaccacaaguguaaugaugaaugcauggaguccgugaaaaacgggacguaugacuaccccaaguauagcgaagagucuaaacucaaucgggagaagauugauggcgugaagcuggaauccaugggaguuuaccagauccuggcuaucuauagcacaguggccucuucccucguccugcuugugagccugggcgccauuuccuucuggaugugcucuaacgggagccuccagugucgcaucugcauuuga

SEQ ID NO: 195865 - RNA, 1698 nt, Artificial Sequence
  derived and/or modified CDS sequence (opt5) from hemagglutinin__InfluenzaA__ACZ81555
augaaggugaaacugcucguccugcuuugcaccuucacagccacguacgcugacaccaucuguauuggcuaucacgccaacaauagcacagauaccguugacacagugcuggagaagaacgugaccgucacacauuccgugaaucuccuggaaaacucucacaaugggaaacuuugccugcucaagggaaucgcgccccugcagcugggcaacuguagcguugcuggguggauucucggaaauccugagugcgaacugcuuaucuccaaagagucuuggagcuacauuguggaaaagccgaaccccgagaauggcaccuguuauccugggcauuuugccgauuacgaggaacugagagagcaacucuccucugucagcuccuucgaacgguuugagaucuuccccaaggagagcucuuggccuaaccacacggugaccggaguuuccgccagcugcucucauaauggcgaaaacuccuuuuaucgcaaucugcuuuggcugacaggcaaaaacgggcucuaccccaaucugagcaagucuuaugcuaacaacaaagagaaggaagugcugguccucuggggagugcaccacccuccgaauaucggcgaccagaaaacccuguaccauacagagaacgccuacguguccgucguuagcucccacuauucuagaaaguucacccccgaaauugcuaagcggccuaaagugcgcgaucaggaggggagaaucaauuacuauugggcccuucuggagcccggagacacgauuaucuuugaagcgaacggcaaucucauugccccucgguacgcuuucgcccugagccgcggguuuggauccggcaucauuaacagcaaugcucccauggauaagugugacgccaaaugccagacaccgcaaggcgcgaucaacucuucccuuccuuuccagaaugugcaucccgucaccaucggggaguguccuaaguaugugagaagcgccaaacugcggaugguuacaggacuccgcaacauucccucuauccagagcagaggccuguuuggggcuauugccggauucaucgaaggcggguggaccggaaugguggauggcugguacggcuaucaccaccagaaugagcaaggguccggauacgcugccgaccagaagucuacccagaacgccauuaauggcaucacaaacaaagucaauagcgugaucgaaaagaugaacacgcaguuuaccgcuguugggaaggaguucaacaaacuggagcggcgcauggaaaaucucaacaagaaaguggaugacggauucauugauaucuggacauacaaugcggagcugcuuguccugcucgaaaacgagagaacccuggacuuucaugacuccaaugugaagaaccuuuaugaaaaagucaagagccaacugaagaauaacgccaaagagauuggcaaugggugcuucgaguuuuaccacaaguguaacgaugaaugcauggagucugugaaaaauggcacauaugacuaccccaaguauuccgaagagagcaaacucaaccgggagaagaucgauggaguuaagcuggaaucuaugggcguguaccagauucuggcuaucuauuccaccgucgccagcucccucgugcugcuuguuucucugggggccaucagcuucuggaugugcuccaauggaucucuccagugucgcauuugcaucuga

SEQ ID NO: 195866 - RNA, 1698 nt, Artificial Sequence
  derived and/or modified CDS sequence (opt5) from hemagglutinin__InfluenzaA__ACZ81556
augaaggugaaacugcucguccugcuuugcaccuucacagccacguacgcugacaccaucuguauuggcuaucacgccaacaauagcacagauaccguugacacagugcuggagaagaacgugaccgucacacauuccgugaaucuccuggaaaacucucacaaugggaaacuuugccugcucaagggaaucgcgccccugcagcugggcaacuguagcguugcuggguggauucucggaaauccugagugcgaacugcuuaucuccaaagagucuuggagcuacauuguggaaaagccgaaccccgagaauggcaccuguuauccugggcauuuugccgauuacgaggaacugagagagcaacucuccucugucagcuccuucgaacgguuugagaucuuccccaaggagagcucuuggccuaaccacacggugaccggagccuccgcuagcugcucucauaauggcgaaaacuccuuuuaucgcaaucugcuuuggcugacaggcaaaaacgggcucuaccccaaucugagcaagucuuaugccaacaacaaagagaaggaaguucuggugcucuggggaguccaccacccuccgaauaucgcugaccagaaaacccuguaccauacagagaacgccuacguguccguggucagcucccacuauucuagaaaguucacccccgaaauugcgaagcggccuaaaguucgcgaucaggagggcagaaucaauuacuauuggacgcuucuggagcccggggacacaauuaucuuugaagccaacggaaaucucauugcuccucgguacgccuucgcucugagccgcggcuuuggguccggaaucauuaacagcaaugcccccauggauaagugugacgcgaaaugccagaccccgcaaggcgccaucaacucuucccuuccuuuccagaaugugcaucccgugacaaucggcgaguguccuaaguaugucagaagcgcuaaacugcggauggugaccgggcuccgcaacauucccucuauccagagcagaggacuguuuggcgccauugcuggguucaucgaaggaggcuggaccgggaugguugauggaugguacggcuaucaccaccagaaugagcaaggcuccggguacgccgccgaccagaagucuacacagaacgcuauuaauggaaucacgaacaaagugaauagcgucaucgaaaagaugaacacccaguuuacagcggugggcaaggaguucaacaaacuggagcggcgcauggaaaaucucaacaagaaaguugaugacggguucauugauaucuggaccuacaaugccgagcugcuugugcugcucgaaaacgagagaacacuggacuuucaugacuccaaugucaagaaccuuuaugaaaaagucaagagccaacugaagaauaacgcuaaagagauuggaaauggcugcuucgaguuuuaccacaaguguaacgaugaaugcauggagucugugaaaaaugggaccuaugacuaccccaaguauuccgaagagagcaaacucaacaaggagaagaucgauggcgugaaacuggaaucuaugggaguuuaccagauucuggccaucuauuccacgguggccagcucccucguccugcuugugucucugggcgcuaucagcuucuggaugugcuccaaugggucucuccagugucggauuugcaucuga

SEQ ID NO: 195867 - RNA, 1701 nt, Artificial Sequence
  derived and/or modified CDS sequence (opt5) from hemagglutinin__InfluenzaA__ACZ81557
augaagaccaucauugcccugagcuacauccucugccugguguucgcucagaaacuucccggcaacgacaauuccacagccacgcugugucucgggcaccaugcggucccuaacggaaccauuguuaagacaaucaccaaugaucaaauugaggugacaaacgcuaccgaacuggugcagucuagcuccacaggcgagaucugcgggucuccgcaccagauccuugacgggaaaaauuguacccugauugaugcccuccugggcgacccccagugcgauggguuucaaaacaagaaaugggaccuguucgucgaaagaagcaaggccuauuccaauuguuacccuuaugaugugcccgacuacgcuucucuccggagccugguugccuccagcggaacgcuugaguuuaacaaugaaucuuucaacuggaccggcgugacacagaauggcaccuccagcgcuugcauccgcagaucuaagaacuccuuuuucagccggcugaauuggcucacacaucugaacuuuaaauaucaggcccuuaaugucaccaugccuaacaacgagcaguucgauaagcuguacauuuggggagugcaccaucccggaacggacaaagaucaaaucuuucucuaugcgcaggccucuggccgcauuacaguuuccaccaagagaagccagcagacagugaucccuaauauugggucccggccgcgcgucagaaacauccccucucggaucagcauuuacuggaccaucgugaaaccuggagacauucugcugaucaauuccaccggcaaccucauugcuccccgcggguacuucaagauccaaagcggaaagucuuccaucaugagaagcgaugccccuauuggcaaauguaauucugagugcaucacacccaacggcagcauuccgaaugacaagccuuuucagaacgugaaucggaucacguauggggcuuguccccgcuacgucaaacagaacacccugaaacuugccacaggaaugagaaauguuccugaaaaacaaacccggggcauuuucggggcgaucgccggauuuaucgagaacggcugggaagggaugguggacggaugguauggcuuccgccaccaaaauuccgagggcagagggcaggcugccgaucugaagucuacacaggcugccauugaccagaucaacggaaaacucaaucggcugauuggcaagaccaacgagaaguuccaccagaucgaaaaagaguuuagcgaaguggaggggcgcauucaggaucuugaaaaguacgucgaggacacgaaaaucgaucugugguccuauaacgccgagcuccugguggcucuggaaaaucagcauacaauugaccucaccgauagcgagaugaacaagcuguucgaaaagaccaagaagcaacuuagagagaaugcggaagacaugggaaacggcugcuuuaaaaucuaccacaagugugauaaugccugcaucgggucuauucggaacggcacauaugaccaugauguuuacagagacgaggcucugaauaaccgcuuccagaucaaaggaguggagcucaaguccggcuacaaagacuggauucuguggaucagcuuugccauuucuugcuuccuucugugugucgcccuccugggguuuaucaugugggcuugccagaagggaaauauccgguguaacauuugcaucuga

SEQ ID NO: 195868 - RNA, 1701 nt, Artificial Sequence
  derived and/or modified CDS sequence (opt5) from hemagglutinin__InfluenzaA__ACZ81558
augaagaccaucauugcccugagcuacauccucugccugguguucgcucagaaacuucccggcaacgacaauuccacagccacgcugugucucgggcaccaugcggucccuaacggaaccauuguuaagacaaucaccaaugaucaaauugaggugacaaacgcuaccgaacuggugcagucuagcuccacaggcgagaucugcgacucuccgcaccagauccuugaugggaaaaauuguacccugauugacgcccuccugggagauccccauugcgacggcuuucagaacaagaaaugggaucuguucgucgaaagaagcaaggccuauuccaauuguuacccuuaugacgugcccgauuacgcuucucuccggagccugguugccuccagcgggacgcuugaguuuaacaaugaaucuuucaacuggaccggagugacacaaaauggcaccuccagcgcuugcauccgcagaucuaagaacuccuuuuucagccggcugaauuggcucacacaccugaacuuuaaauauccugcccuuaaugucaccaugcccaacaacgagcaguucgacaagcuguacauuuggggcgugcaucacccugggacggauaaagaccagaucuuucucuaugcgcaggccucuggacgcauuacaguuuccaccaagagaagccaacagacagcuaucccgaauauuggcucccggccccgcgugagaaacaucccuucucggaucagcauuuacuggaccaucgucaaacccggggauauucugcugaucaauuccaccggaaaccucauugccccucgcggcuacuucaagaucagaagcgggaagucuuccaucaugcggagcgacgcucccauuggaaaauguaauucugagugcaucacaccgaacggcagcauuccuaaugacaagcccuuucagaacgugaaucgcaucacguauggcgccuguccuagauacgugaaacagaacacccugaaacuugcgacagggaugcggaauguccccgaaaagcaaacccgcggaauuuucggcgccaucgcuggguuuaucgagaacggaugggaaggcaugguugaugggugguauggauucagacaccaaaauuccgagggccggggccaggccgcugaccugaagucuacacaggccgccauugaucagaucaacgggaaacucaauagacugauugagaagaccaacgaaaaguuccaucagaucgagaaagaauuuagcgagguggaaggacgcauucaggaccuugagaaguacguggaggauacgaaaaucgaccugugguccuauaacgcugaacuccuggucgcgcuggagaaucaacacacaauugaucucaccgacagcgaaaugaacaagcuguucgagaaaaccaagaagcagcuucgggaaaaugccgaggauaugggcaacgggugcuuuaaaaucuaccauaagugugacaaugcuugcaucggaucuauuagaaacggcacauaugaucacgacguguaccgcgacgaggcccugaauaaccgguuccagaucaaagggguugaacucaaguccggcuacaaagauuggauucuguggaucagcuuugccauuucuugcuuccuucuguguguggcucuccugggauuuaucaugugggccugccagaagggcaauaucagauguaacauuugcaucuga

SEQ ID NO: 195869 - RNA, 1701 nt, Artificial Sequence
  derived and/or modified CDS sequence (opt5) from hemagglutinin__InfluenzaA__ACZ81559
augaagaccaucauugcccugagcuacauccucugccugguguucgcucagaaacuucccggcaacgacaauuccacagccacgcugugucucgggcaccaugcggucccuaacggaaccauuguuaagacaaucaccaaugaucaaauugaggugacaaacgcuaccgaacuggugcagucuagcuccacaggcgagaucugcgacucuccgcaccagauccuugaugggaaaaauuguacccugauugacgcccuccugggagauccccauugcgacggcuuucagaacaagaaaugggaucuguucgucgaaagaagcaaggccuauuccaauuguuacccuuaugacgugcccgauuacgcuucucuccggagccugguugccuccagcgggacgcuugaguuuaacaaugaaucuuucaacuggaccggagugacacaaaauggcaccuccagcgcuugcauccgcagaucuaagaacuccuuuuucagccggcugaauuggcucacacaccugaacuuuaaauauccugcccuuaaugucaccaugcccaacaacgagcaguucgacaagcuguacauuuggggcgugcaucacccugggacggauaaagaccagaucuuucucuaugcgcaggccucuggacgcauuacaguuuccaccaagagaagccaacagacagcuaucccgaauauuggcucccggccccgcgugagaaacaucccuucucggaucagcauuuacuggaccaucgucaaacccggggauauucugcugaucaauuccaccggaaaccucauugccccucgcggcuacuucaagaucagaagcgggaagucuuccaucaugcggagcgacgcucccauuggaaaauguaauucugagugcaucacaccgaacggcagcauuccuaaugacaagcccuuucagaacgugaaucgcaucacguauggcgccuguccuagauacgugaaacagaacacccugaaacuugcgacagggaugcggaauguccccgaaaaacaaacccgcggaauuuucggcgccaucgcuggguuuaucgagaacggaugggaaggcaugguugaugggugguauggauucagacaccaaaauuccgagggccggggccaggccgcugaccugaagucuacacaggccgccauugaucagaucaacgggaaacucaauagacugauuggaaagaccaacgagaaguuccaucagaucgaaaaagaguuuagcgaaguggagggccgcauucaggaccuugaaaaguacguggaggauacgaaaaucgaccugugguccuauaacgcugagcuccuggucgcgcuggaaaaucaacacacaauugaucucaccgacagcgagaugaacaagcuguucgaaaagaccaagaagcagcuucgggagaaugccgaagauauggggaacggaugcuuuaaaaucuaccauaagugugacaaugcuugcaucggcucuauuagaaacgggacauaugaucacgacguguaccgcgacgaggcccugaauaaccgguuccagaucaaaggcguugagcucaaguccggauacaaagauuggauucuguggaucagcuuugccauuucuugcuuccuucuguguguggcucuccugggcuuuaucaugugggccugccagaaggggaauaucagauguaacauuugcaucuga

SEQ ID NO: 195870 - RNA, 1701 nt, Artificial Sequence; identical to SEQ ID NO: 194741
  derived and/or modified CDS sequence (opt5) from hemagglutinin__InfluenzaA__ACZ81632

SEQ ID NO: 195871 - RNA, 1701 nt, Artificial Sequence; identical to SEQ ID NO: 194741
  derived and/or modified CDS sequence (opt5) from hemagglutinin__InfluenzaA__ACZ81642

SEQ ID NO: 195872 - RNA, 1701 nt, Artificial Sequence
  derived and/or modified CDS sequence (opt5) from hemagglutinin__InfluenzaA__ACZ81652
augaaggccauccuggugguccuccuguacaccuucgcuacagccaacgcggacacgcuuugcauuggcuaucacgcuaauaacagcaccgauacaguugacaccgugcuggagagaaaugugacagucacccauuccgugaaccuccuggaagauaaacacaaugggaagcuguguaaacugcggggaguugcgccccuccaucugggcaagugcaacaucgccggguggauucugggaaauccugagugugaaucucucagcacagcuuccucuuggagcuacaucguggagaccuccucuagcgacaacggcacgugcuauccgggggauuuuauugacuacgaagaacugcgcgagcagcuuuccagcgucucuuccuucgaaagauuugagaucuuccccaaaaccagcucuuggccuaaucacgauuccaacaagggagugacagccgcuuguccccaugccgaagccaagagcuuuuauaaaaaucugaucuggcucguuaagaaaggcaacucuuacccuaagcuguccaaaagcuauauuaaugacaagggcaaggaggugcuuguccugugggggauccaccaccccuccaccucugccgaucaacagagccucuaccagaacgcugacgccuacguguucgugggaacaucccgguauagcaaaaaguuuaaaccugagauugcuauccgcccgaaggucagaggccaggaagggcggaugaauuacuauuggacccugguugagcccggagauaaaauuacguucgaagccacaggcaaccugguggugccucgcuacgcguuugccauggagagaaacgcugggucuggaaucauuaucuccgacacccccguccaugauugcaauacaaccugucaaaccccuaagggcgccaucaacacaagccuccccuuccagaauauucacccgaucacgauuggcaaaugcccuaaguaugugaagucuaccaaacugcggcuugcuacagggcugcgcaacguucccagcauccaguccagaggacucuuuggcgccauugccggguucaucgaaggaggcuggaccgggaugguggacggaugguacggcuaucaucaccagaaugagcaaggcucuggguacgcugcggaccuuaagagcacacagaacgccaucgaugagauuaccaauaaagucaacuccgugaucgaaaagaugaauacgcaguuuacagcuguuggaaaagaguucaaccaccuugaaaagcggauugagaaucugaacaagaaaguggacgauggcuuccucgacaucuggaccuacaaugccgaacugcugguccuccuggagaacgagcgcacccuugauuaucaugacagcaaugugaagaaccuguacgaaaaagucagaucucagcucaagaacaaugccaaagagauugggaacggauguuuugaguucuaucacaagugcgauaauacauguauggaguccgugaagaacggcaccuacgacuauccuaaauacagcgaagaggcuaagcugaaucgggaggaaaucgaugggguuaaacuugagucuacacgcaucuaucaaauucuggccaucuacuccacgguggcgagcucccucguccuggugguuucucugggcgcuauuagcuuuuggaugugcuccaacggaucucuccagugcagaaucuguauuuga

SEQ ID NO: 195873 - RNA, 1701 nt, Artificial Sequence
  derived and/or modified CDS sequence (opt5) from hemagglutinin__InfluenzaA__ACZ92130
auggaggccauccuggugguccuccuguacaccuucgcuacagccaacgcggacacgcuuugcauuggcuaucacgcuaauaacagcaccgauacaguugacaccgugcuggaaaagaaugugacagucacccauuccgugaaccuccuggaggauaaacacaaugggaaacuuuguaagcugagaggaguugcgccccuccaucugggcaagugcaacaucgccggguggauucugggaaauccugaaugugagucucucagcacagcuuccucuuggagcuacaucguggaaaccuccucuagcgacaacggcacgugcuauccgggggauuuuauugacuacgaggagcugcgggaacagcuuuccagcgucucuuccuucgagcgcuuugaaaucuuccccaaaaccagcucuuggccuaaucacgauuccaacaagggagugacagccgcuuguccccaugccggcgccaagagcuuuuauaaaaaucugaucuggcucguuaagaaaggcaacucuuacccuaagcuguccaaaagcuauauuaaugacaaggggaaggaggugcuuguccuguggggaauccaccaccccuccaccucugccgaucaacagagccucuaccagaacgcugacgccuacguguucgugggcuccagcagauauucuaaaaaguuuaaaccugagauugcuauccggccgaagguccgcgaucaggaagggagaaugaauuacuauuggacacugguugagcccggagacaaaauuaccuucgaagccacgggcaaccugguggugccucgguacgcguuugccauggagcgcaacgcuggguccggaaucauuaucagcgauacacccguccaugacugcaauaccacaugucaaaccccuaagggcgccaucaacaccucucuccccuuccacaauauucauccgaucacaauuggcaaaugcccuaaguauguuaagagcacgaaacugagacuugcuaccgggcugcggaacgugcccuccauccagucucgcggacucuuuggcgccauugccggguucaucgaaggaggcuggacagggaugguggacggaugguacggcuaucaccaccagaaugagcagggcagcggguacgcugcggaucugaaguccacccaaaacgccaucgacgagauuacaaauaaagucaacagcgugaucgaaaagaugaauacccaguuuacggcuguuggaaaagaguucaaccaucuugaaaagagaauugagaaucugaacaagaaaguggaugacggcuuccucgauaucuggacauacaaugccgaacugcugguccuccuggagaacgagcggacccuugacuaucacgauucuaaugugaagaaccuguacgaaaaaguccgcucccagcucaagaacaaugccaaagagauugggaacggauguuuugaguucuaucauaagugcgacaauaccuguaucgaaagcgugaagaacggcacauacgauuauccuaaauacucugaagaggcuaagcugaauagagaggaaaucgacgggguuaaacuugaguccacccggauuuaucagauccuggccauuuacagcacaguggcguccucucucguccuggugguuagccugggcgcuaucuccuuuuggaugugcucuaacggaagccuccaaugccgcauuuguaucuga

SEQ ID NO: 195874 - RNA, 1701 nt, Artificial Sequence; identical to SEQ ID NO: 194983
  derived and/or modified CDS sequence (opt5) from hemagglutinin__InfluenzaA__ACZ92131

SEQ ID NO: 195875 - RNA, 1701 nt, Artificial Sequence; identical to SEQ ID NO: 194983
  derived and/or modified CDS sequence (opt5) from hemagglutinin__InfluenzaA__ACZ92132

SEQ ID NO: 195876 - RNA, 1701 nt, Artificial Sequence; identical to SEQ ID NO: 194983
  derived and/or modified CDS sequence (opt5) from hemagglutinin__InfluenzaA__ACZ92133

SEQ ID NO: 195877 - RNA, 1701 nt, Artificial Sequence; identical to SEQ ID NO: 194741
  derived and/or modified CDS sequence (opt5) from hemagglutinin__InfluenzaA__ACZ92134

SEQ ID NO: 195878 - RNA, 1701 nt, Artificial Sequence; identical to SEQ ID NO: 194741
  derived and/or modified CDS sequence (opt5) from hemagglutinin__InfluenzaA__ACZ95465

SEQ ID NO: 195879 - RNA, 1701 nt, Artificial Sequence; identical to SEQ ID NO: 194728
  derived and/or modified CDS sequence (opt5) from hemagglutinin__InfluenzaA__ACZ95837

SEQ ID NO: 195880 - RNA, 1701 nt, Artificial Sequence; identical to SEQ ID NO: 194741
  derived and/or modified CDS sequence (opt5) from hemagglutinin__InfluenzaA__ACZ95847

SEQ ID NO: 195881 - RNA, 1701 nt, Artificial Sequence
  derived and/or modified CDS sequence (opt5) from hemagglutinin__InfluenzaA__ACZ95857
augaaggccauccuggugguccuccuguacaccuucgcuacagccaacgcggacacgcuuugcauuggcuaucacgcuaauaacagcaccgauacaguugacaccgugcuggagaagaaugugacagucacccauuccgugaaccuccuggaagauaagcacaaugggaaacuuuguaagcugagaggaguugcuccccuccaucugggcaaaugcaacaucgccggguggauucugggaaauccugagugugaaucucucagcacagccuccucuuggagcuacaucguggagaccuccucuagcgacaacggcacgugcuauccgggggauuuuauugacuacgaagaacugcgggagcagcuuuccagcgucucuuccuucgaacgcuuugagaucuuccccaagaccagcucuuggccuaaucacgauuccaacaagggagugacagccgcuuguccccaugccggcgcgaaaucuuuuuauaagaaucugaucuggcucguuaaaaagggcaacagcuacccuaaacuguccaagagcuauauuaaugacaaggggaaagaagugcuuguccuguggggaauccaccaccccuccaccucugccgaucaacagagccucuaccagaacgcugacgccuacguguucgugggcacauccagauauagcaagaaauuuaagccugagauugcuauccggccgaaaguccgcgaucaggaggggagaaugaauuacuauuggacccugguugaacccggagacaagauuacguucgaggccacaggcaaccugguggugccucgguacgcguuugccauggaacgcaacgcugggucuggaaucauuaucuccgauacccccguccaugacugcaauacaaccugucaaaccagcaaaggcgccaucaacacaucucucccuuuccagaauauucaccccaucacgauuggcaagugcccgaaguaugugaaaagcaccaagcugagacuugcuacagggcugcggaacguuccuuccauccagucucgcggacucuuuggcgccauugccggguucaucgagggaggcuggaccgggaugguggacggaugguacggcuaucaucaccagaaugaacaaggcagcggguacgcugcggaucugaaauccacacagaacgccaucgacgagauuaccaauaaggucaacagcgugaucgagaaaaugaauacgcaguuuacagcuguuggaaaggaguucaaccaccuugagaagagaauugaaaaucugaacaaaaagguggaugacggcuuccucgauaucuggaccuacaaugccgagcugcugguccuccuggaaaacgagcggacccuugacuaucaugauucuaaugugaaaaaccuguacgagaagguccgcucccagcucaaaaacaaugccaaggaaauugggaacggauguuuugaguucuaucacaagugcgacaauacauguauggaaagcgugaaaaacggcaccuacgauuaucccaaguacucugaggaagcuaaacugaauagagaggagaucgacgggguuaaacuugaauccacacggaucuaucaaauucuggccaucuacagcacgguggcguccucucucguccuggugguuagccugggcgcuauuuccuuuuggaugugcucuaacggaagccuccagugccgcaucuguauuuga

SEQ ID NO: 195882 - RNA, 1701 nt, Artificial Sequence; identical to SEQ ID NO: 194741
  derived and/or modified CDS sequence (opt5) from hemagglutinin__InfluenzaA__ACZ95867

SEQ ID NO: 195883 - RNA, 1701 nt, Artificial Sequence
  derived and/or modified CDS sequence (opt5) from hemagglutinin__InfluenzaA__ACZ95887
auggaggccauccuggugguccuccuguacaccuucgcuacagccaacgcggacacgcuuugcauuggcuaucacgcuaauaacagcaccgauacaguugacaccgugcuggaaaagaaugugacagucacccauuccgugaaccuccuggaggauaaacacaaugggaaacuuuguaagcugagaggaguugcgccccuccaucugggcaagugcaacaucgccggguggauucugggaaauccugaaugugagucucucagcacagcuuccucuuggagcuacaucguggaaaccuccucuagcgacaacggcacgugcuauccgggggauuuuauugacuacgaggagcugcgggaacagcuuuccagcgucucuuccuucgagcgcuuugaaaucuuccccaaaaccagcucuuggccuaaucacgauuccaacaagggagugacagccgcuuguccccaugccggcgccaagagcuuuuauaaaaaucugaucuggcucguuaagaaaggcaacucuuacccuaagcuguccaaaagcuauauuaaugacaaggggaaggaggugcuuguccuguggggaauccaccaccccuccaccucugccgaucaacagagccucuaccagaacgcugacgccuacguguucgugggcuccagcagauauucuaaaaaguuuaaaccugagauugcuauccggccgaagguccgcaaucaggaagggagaaugaacuacuauuggacacugguugagcccggagauaaaauuaccuucgaagccacgggcaaccugguggugccucgguacgcguuugccauggagcgcaaugcuggguccggaaucauuaucagcgacacacccguccaugauugcaacaccacaugucaaaccccuaagggcgccaucaauaccucucuccccuuccacaacauucauccgaucacaauuggcaaaugcccuaaguauguuaagagcacgaaacugagacuugcuaccgggcugcggaaugugcccuccauccagucucgcggacucuuuggcgccauugccggguucaucgaaggaggcuggacagggaugguggacggaugguacggcuaucaccaccagaacgagcagggcagcggguacgcugcggaccugaaguccacccaaaaugccaucgaugagauuacaaacaaagucaauagcgugaucgaaaagaugaacacccaguuuacggcuguuggaaaagaguucaaucaucuugaaaagagaauugagaaccugaauaagaaaguggacgauggcuuccucgacaucuggacauacaacgccgaacugcugguccuccuggagaaugagcggacccuugauuaucacgacucuaacgugaagaaccuguacgaaaaaguccgcucccagcucaagaauaacgccaaagagauugggaauggauguuuugaguucuaucauaagugcgauaacaccuguauggaaagcgugaagaauggcacauacgacuauccuaaauacucugaagaggcuaagcugaacagagaggaaaucgaugggguuaaacuugaguccacccggaucuaucagauucuggccaucuacagcacaguggcguccucucucguccuggugguuagccugggcgcuauuuccuuuuggaugugcucuaauggaagccuccaaugccgcaucuguauuuga

SEQ ID NO: 195884 - RNA, 1701 nt, Artificial Sequence; identical to SEQ ID NO: 194741
  derived and/or modified CDS sequence (opt5) from hemagglutinin__InfluenzaA__ACZ95897

SEQ ID NO: 195885 - RNA, 1701 nt, Artificial Sequence
  derived and/or modified CDS sequence (opt5) from hemagglutinin__InfluenzaA__ACZ95907
augaaggccauccuggugguccuccuguacaccuucgcuacagccaacgcggacacgcuuugcauuggcuaucacgcuaauaacagcaccgauacaguugacaccgugcuggagaagaaugugacagucacccauuccgugaaccuccuggaagauaagcacaaugggaaacuuuguaagcugagaggaguugcuccccuccaucugggcaaaugcaacaucgccggguggauucugggaaauccugagugugaaucucucagcacagccuccucuuggagcuacaucguggagaccuccucuagcgacaacggcacgugcuauccgggggauuuuauugacuacgaagaacugcgggagcagcuuuccagcgucucuuccuucgaacgcuuugagaucuuccccaagaccagcucuuggccuaaucacgauuccaacaagggagugacagccgcuuguccccaugccggcgcgaaaucuuuuuauaagaaucugaucuggcucguuaaaaagggcaacagcuacccuaaacuguccaagagcuauauuaaugacaaggggaaagaagugcuuguccuguggggaauccaccaccccuccaccucugccgaucaacagagccucuaccagaacgcugacgccuacguguucgugggcacauccagauauagcaagaaauuuaagccugagauugcuauccggccgaaaguccgcgaucaggaggggagaaugaauuacuauuggacccugguugaacccggagacaagauuacguucgaggccacaggcaaccugguggugccucgguacgcguuugccauggaacgcaacgcugggucuggaaucauuaucuccgauacccccgucuaugacugcaauacaaccugucaaaccccuaaaggcgccaucaacacaagccuccccuuccagaauauucauccgaucacgauuggcaagugcccuaaguacgugaaaucuaccaagcugagacuugcuacagggcugcggaacguucccagcauccagucccgcggacucuuuggcgccauugccggguucaucgagggaggcuggaccgggaugguggacggaugguauggcuaccaccaucagaaugaacaaggcucuggguacgcugcggaucugaaaagcacacagaacgccaucgacgagauuaccaauaaggucaacuccgugaucgagaaaaugaauacgcaguuuacagcuguuggaaaggaguucaaccaccuugagaagagaauugaaaaucugaacaaaaagguggaugacggcuuccucgauaucuggaccuauaaugccgagcugcugguccuccuggaaaacgagcggacccuugacuaccacgauagcaaugugaaaaaccuguaugagaagguccgcucucagcucaaaaacaaugccaaggaaauugggaacggauguuuugaguucuaccauaagugcgacaauacauguauggaauccgugaaaaacggcaccuaugauuacccuaaguauagcgaggaagcuaaacugaauagagaggagaucgacgggguuaaacuugaaucuacacggaucuaccaaauucuggccaucuacuccacgguggcgagcucccucguccuggugguuucucugggcgcuauuagcuuuuggaugugcuccaacggaucucuccagugccgcaucuguauuuga

SEQ ID NO: 195886 - RNA, 1701 nt, Artificial Sequence; identical to SEQ ID NO: 194741
  derived and/or modified CDS sequence (opt5) from hemagglutinin__InfluenzaA__ACZ95927

SEQ ID NO: 195887 - RNA, 1701 nt, Artificial Sequence
  derived and/or modified CDS sequence (opt5) from hemagglutinin__InfluenzaA__ACZ95937
auggaggccauccuggugguccuccuguacaccuucgcuacagccaacgcggacacgcuuugcauuggcuaucacgcuaauaacagcaccgauacaguugacaccgugcuggaaaagaaugugacagucacccauuccgugaaccuccuggaggauaaacacaaugggaagcuguguaaacugagaggaguugcgccccuccaucugggcaagugcaacaucgccggguggauucugggaaauccugaaugugagucucucagcacagcuuccucuuggagcuacaucguggaaaccuccucuagcgacaacggcacgugcuauccgggggauuuuauugacuacgaggagcugcgggaacagcuuuccagcgucucuuccuucgagcgcuuugaaaucuuccccaaaaccagcucuuggccuaaucacgauuccaacaagggagugacagccgcuuguccccaugccggcgccaagagcuuuuauaaaaaucugaucuggcucguuaagaaaggcaacucuuacccuaagcuguccaaaagcuauauuaaugacaaggggaaggaggugcuuguccuguggggaauccaccaccccuccaccaacgccgaucaacagucucucuaccagaaugcugacgccuacguguucgugggcagcuccagauauagcaaaaaguuuaaaccugagauugcuauccggccgaagguccgcgaucaggaagggagaaugaacuacuauuggacacugguugagcccggagacaaaauuaccuucgaagccacgggcaaccugguggugccucgguacgcguuugccauggagcgcaaugcugggucuggaaucauuaucuccgauacacccguccaugacugcaacaccacaugucaaaccccuaagggcgccaucaauaccagccuccccuuccacaacauucauccgaucacaauuggcaaaugcccuaaguaugugaagucuacgaaacugagacuugcuaccgggcugcggaauguucccagcauccagucccgcggacucuuuggcgccauugccggguucaucgaaggaggcuggacagggaugguggacggaugguacggcuaucaccaccagaacgagcagggcucuggguacgcugcggaucuuaagagcacccaaaaugccaucgacgagauuacaaacaaagucaauuccgugaucgaaaagaugaacacccaguuuacggcuguuggaaaagaguucaaucaucuugaaaagagaauugagaaccugaauaagaaaguggaugacggcuuccucgauaucuggacauacaacgccgaacugcugguccuccuggagaaugagcggacccuugacuaucacgauagcaacgugaagaaccuguacgaaaaaguccgcucucagcucaagaauaacgccaaagagauugggaauggauguuuugaguucuaucauaagugcgacaacaccuguauggaauccgugaagaauggcacauacgauuauccuaaauacagcgaagaggcuaagcugaacagagaggaaaucgacgggguuaaacuugagucuacccggaucuaucagauucuggccaucuacuccacaguggcgagcucccucguccuggugguuucucugggcgcuauuagcuuuuggaugugcuccaauggaucucuccaaugccgcaucuguauuuga

SEQ ID NO: 195888 - RNA, 1701 nt, Artificial Sequence; identical to SEQ ID NO: 194983
  derived and/or modified CDS sequence (opt5) from hemagglutinin__InfluenzaA__ACZ95947

SEQ ID NO: 195889 - RNA, 1701 nt, Artificial Sequence; identical to SEQ ID NO: 194741
  derived and/or modified CDS sequence (opt5) from hemagglutinin__InfluenzaA__ACZ95957

SEQ ID NO: 195890 - RNA, 1701 nt, Artificial Sequence; identical to SEQ ID NO: 194983
  derived and/or modified CDS sequence (opt5) from hemagglutinin__InfluenzaA__ACZ95967

SEQ ID NO: 195891 - RNA, 1701 nt, Artificial Sequence; identical to SEQ ID NO: 195887
  derived and/or modified CDS sequence (opt5) from hemagglutinin__InfluenzaA__ACZ95977

SEQ ID NO: 195892 - RNA, 1701 nt, Artificial Sequence
  derived and/or modified CDS sequence (opt5) from hemagglutinin__InfluenzaA__ACZ95987
augaaggccauccuggugguccuccuguacaccuucgcuacagccaacgcggacacgcuuugcauuggcuaucacgcuaauaacagcaccgauacaguugacaccgugcuggagaagaaugugacagucacccauuccgugaaccuccuggaagauaagcacaaugggaaacuuuguaagcugagaggaguugcuccccuccaucugggcaaaugcaacaucgccggguggauucugggaaauccugagugugaaucucucagcacagccuccucuuggagcuacaucguggagaccuccucuagcgacaacggcacgugcuauccgggggauuuuauugacuacgaagaacugcgggagcagcuuuccagcgucucuuccuucgaacgcuuugagaucuuccccaagaccagcucuuggccuaaucacgauuccaacaagggagugacagccgcuuguccccaugccggcgcgaaaucuuuuuauaagaaucugaucuggcucguuaaaaagggcaacagcuacccuaaacuguccaagagcuauauuaaugacaaggggaaagaagugcuuguccuguggggaauccaccaccccuccaccucugccgaucaacagagccucuaccagaacgcugacgccuacguguucgugggcacauccagauauagcaagaaauuuaagccugagauugcuauccggccgaaaguccgcgaucaggaggggagaaugaauuacuauuggacccugguugaacccggagacaagauuacguucgaggccacaggcaaccugguggugccucgguacgcguuugccauggaacgcaacgcugggucuggaaucauuaucuccgauacccccguccaugacugcaauacaaccugucaaaccccuaaaggcgccaucaacacaagccuccccuuccagaauauucacccgaucacgauuggcaagugcccuaaguaugugaaaucuaccaagcugagacuugcuacagggcugcggaacauccccagcauucagucccgcggacucuuuggcgccaucgccggguucaucgagggaggcuggaccgggaugauugacggaugguacggcuaucaucaccagaaugaacaaggcucuggguacgcugcggaucugaaaagcacacagaacgccaucgacgagauuaccaauaagguuaacuccgugaucgagaaaaugaauacgcaguuuacagcugucggaaaggaguucaaccaccuugagaagagaauugaaaaucugaacaaaaagguggaugacggcuuccucgauaucuggaccuacaaugccgagcugcugguucuccuggaaaacgagcggacccuugacuaucaugauagcaaugugaaaaaccuguacgagaagguccgcucucagcucaaaaacaaugccaaggaaaucgggaacggauguuuugaguucuaucacaagugcgacaauacauguauggaauccgugaaaaacggcaccuacgauuauccuaaguacagcgaggaagcuaaacugaauagagaggagauugacggggucaaacuugaaucuacacggaucuaucaaauucuggccaucuacuccacgguggcgagcucccucguucugguggucucucugggcgcuauuagcuuuuggaugugcuccaacggaucucuccagugccgcaucuguauuuga

SEQ ID NO: 195893 - RNA, 1701 nt, Artificial Sequence; identical to SEQ ID NO: 194741
  derived and/or modified CDS sequence (opt5) from hemagglutinin__InfluenzaA__ACZ95997

SEQ ID NO: 195894 - RNA, 1701 nt, Artificial Sequence; identical to SEQ ID NO: 194741
  derived and/or modified CDS sequence (opt5) from hemagglutinin__InfluenzaA__ACZ96007

SEQ ID NO: 195895 - RNA, 1701 nt, Artificial Sequence; identical to SEQ ID NO: 194728
  derived and/or modified CDS sequence (opt5) from hemagglutinin__InfluenzaA__ACZ96017

SEQ ID NO: 195896 - RNA, 1701 nt, Artificial Sequence; identical to SEQ ID NO: 194741
  derived and/or modified CDS sequence (opt5) from hemagglutinin__InfluenzaA__ACZ96027

SEQ ID NO: 195897 - RNA, 1701 nt, Artificial Sequence; identical to SEQ ID NO: 195887
  derived and/or modified CDS sequence (opt5) from hemagglutinin__InfluenzaA__ACZ96047

SEQ ID NO: 195898 - RNA, 1701 nt, Artificial Sequence
  derived and/or modified CDS sequence (opt5) from hemagglutinin__InfluenzaA__ACZ96057
augaaggccauccuggugguccuccuguacaccuucgcuacagccaacgcggacacgcuuugcauuggcuaucacgcuaauaacagcaccgauacaguugacaccgugcuggagaaaaaugugacagucacccauuccgugaaccuccuggaagauaagcacaaugggaaacuuuguaagcugagaggaguugcuccccuccaucugggcaaaugcaacaucgccggguggauucugggaaauccugagugugaaucucucagcacagccuccucuuggagcuacaucguggagaccuccucuagcgacaacggcacgugcuauccgggggauuuuauugacuacgaagaacugcgggagcagcuuuccagcgucucuuccuucgaacgcuuugagaucuuccccaagaccagcucuuggccuaaucacgauuccaacaagggagugacagccgcuugucugcaugccggcgcgaaaucuuuuuauaagaaucucaucuggcugguuaaaaagggcaacagcuaccccaaacuuuccaagagcuauauuaaugacaaggggaaagaagugcugguccucuggggaauccaccacccuuccaccucugccgaucaacagagccuguaccagaacgcugacgccuacguguucgugggcacauccagauauagcaagaaauuuaagcccgagauugcuauccggccuaaaguccgcgaucaggaggggagaaugaauuacuauuggacccugguugaaccgggagacaagauuacguucgaggccacaggcaaccucguggugccccgguacgcguuugccauggaacgcaacgcugggucuggaaucauuaucuccgauaccccuguccaugacugcaauacaaccugucaaacccccaaaggcgccaucaacacaagccugccuuuccagaauauucaccccaucacgauuggcaagugcccgaaguaugugaaaucuaccaaacuuagacuggcuacagggcuccggaacaucccuagcauucagucccgcggacuguuuggcgccaucgccggguucaucgagggaggcuggaccgggaugguugacggaugguacggcuaucaucaccagaaugaacaaggcucuggguacgcugcggaucuuaagagcacacagaacgccauugacgagaucaccaauaaggugaacuccgucauugagaaaaugaauacgcaguuuacagcugugggaaaggaguucaaccaccuggagaagagaaucgaaaaucucaacaaaaagguugaugacggcuuccuggauauuuggaccuacaaugccgagcugcucgugcugcuugaaaacgagcggacccuggacuaucaugauagcaaugucaaaaaccucuacgagaaggugcgcucucagcugaaaaacaaugccaaggaaaucgggaacggauguuuugaguucuaucacaagugcgacaauacauguauggaauccgucaaaaacggcaccuacgauuaucccaaguacagcgaggaagcuaaacuuaauagagaggagaucgacggggugaagcuggaaucuacacggauuuaucaaauccucgccauuuacuccacgguugcgagcucccuggugcuggucgugucucucggcgcuaucagcuuuuggaugugcuccaacggaucucugcagugccgcauuuguaucuga

SEQ ID NO: 195899 - RNA, 1701 nt, Artificial Sequence
  derived and/or modified CDS sequence (opt5) from hemagglutinin__InfluenzaA__ACZ96069
augaaggccauccuggugguccuccuguacaccuucgcuacagccaacgcggacacgcuuugcauuggcuaucacgcuaauaacagcaccgauacaguugacaccgugcuggagaagaaugugacagucacccauuccgugaaccuccuggaagauaagcacaaugggaaacuuuguaagcugagaggaguugcuccccuccaucugggcaaaugcaacaucgccggguggauucugggaaauccugagugugaaucucucagcacagccuccucuuggagcuacaucguggagaccuccucuagcgacaacggcacgugcuauccgggggauuuuauugacuacgaagaacugcgggagcagcuuuccagcgucucuuccuucgaacgcuuugagaucuuccccaagaccagcucuuggccuaaucacgauuccaacaagggagugacagccgcuuguccccaugccggcgcgaaaucuuuuuauaagaaucugaucuggcucguuaaaaagggcaacagcuacccuaaacuguccaagagcuauauuaaugacaaggggaaagaagugcuuguccuguggggaauccaccaccccuccaccucugccgaucaacagagccucuaccagaacgcugacgccuacguguucgugggcacauccagauauagcaagaaauuuaagccugagauugcuauccggccgaaaguccgcgaucaggaggggagaaugaauuacuauuggacccugguugaacccggaaacaagauuacguucgaggccacaggcaaccugguggugccucgguacgcguuugccauggaacgcaaugcugggucuggaaucauuaucuccgacacccccguccaugauugcaacacaaccugucaaaccccuaaaggcgccaucaauacaagccuccccuuccagaacauucacccgaucacgauuggcaagugcccuaaguaugugaaaucuaccaagcugagacuugcuacagggcugcggaauguucccagcauccagucccgcggacucuuuggcgccauugccggguucaucgagggaggcuggaccgggaugguggacggaugguacggcuaucaucaccagaacgaacaaggcucuggguacgcugcggaccugaaaagcacacagaaugccaucgaugagauuaccaacaaggucaauuccgugaucgagaaaaugaacacgcaguuuacagcuguuggaaaggaguucaaucaccuugagaagagaauugaaaaccugaauaaaaagguggacgauggcuuccucgacaucuggaccuacaacgccgagcugcugguccuccuggaaaaugagcggacccuugauuaucaugacagcaacgugaaaaaccuguacgagaagguccgcucucagcucaaaaauaacgccaaggaaauugggaauggauguuuugaguucuaucacaagugcgauaacacauguauggaauccgugaaaaauggcaccuacgacuauccuaaguacagcgaggaagcuaaacugaacagagaggagaucgaugggguuaaacuugaaucuacacggaucuaucaaauucuggccaucuacuccacgguggcgagcucccucguccuggugguuucucugggcgcuauuagcuuuuggaugugcuccaauggaucucuccagugccgcaucuguauuuga

SEQ ID NO: 195900 - RNA, 1701 nt, Artificial Sequence; identical to SEQ ID NO: 195887
  derived and/or modified CDS sequence (opt5) from hemagglutinin__InfluenzaA__ACZ96089

SEQ ID NO: 195901 - RNA, 1701 nt, Artificial Sequence
  derived and/or modified CDS sequence (opt5) from hemagglutinin__InfluenzaA__ACZ96119
augaaggccauccuggugguccuccuguacaccuucgcuacagccaacgcggacacgcuuugcauuggcuaucacgcuaauaacagcaccgauacaguugacaccgugcuggagaagaaugugacagucacccauuccgugaaccuccuggaagauaagcacaaugggaaacuuuguaagcugagaggaguugcuccccuccaucugggcaaaugcaacaucgccggguggauucugggaaauccugagugugaaucucucagcacagccuccucuuggagcuacaucguggagaccuccucuagcgacaacggcacgugcuauccgggggauuuuauugacuacgaagaacugcgggagcagcuuuccagcgucucuuccuucgaacgcuuugagauguuccccaagaccagcucuuggccuaaucacgauuccaacaagggagugacagccgcuuguccccaugccggcgcgaaaucuuuuuauaagaaucugaucuggcucguuaaaaagggcaacagcuacccuaaacuguccaagagcuauaucaaugacaaggggaaagaagugcuuguccuguggggcauucaccaccccuccaccucugccgaucaacagagccucuaccagaacgcugacgccuacguguucgugggaacauccagauauagcaagaaauuuaagccugagaucgcuauucggccgaaaguccgcgaucaggaggggagaaugaauuacuauuggacccugguugaacccggagacaagaucacguucgaggccacaggcaaccugguggugccucgguacgcguuugccauggaacgcaacgcugggucuggaauuaucauuuccgauacccccguccaugacugcaauacaaccugucaaaccccuaaaggcgccaucaacacaagccuccccuuccagaauauccacccgauuacgaucggcaagugcccuaaguaugugaaaucuaccaagcugagacuugcuacagggcugcggaacguucccagcauucagucccgcggacucuuuggcgccaucgccggguucauugagggaggcuggaccgggaugguggacggaugguacggcuaucaucaccagaaugaacaaggcucuggguacgcugcggaucugaaaagcacacagaacgccaucgacgagaucaccaauaaggucaacuccgugauugagaaaaugaauacgcaguuuacagcuguuggaaaggaguucaaccaccuugagaagagaaucgaaaaucugaacaaaaagguggaugacggcuuccucgauauuuggaccuacaaugccgagcugcugguccuccuggaaaacgagcggacccuugacuaucaugauagcaaugugaaaaaccuguacgagaagguccgcucucagcucaaaaacaaugccaaggaaaucgggaacggauguuuugaguucuaucacaagugcgacaauacauguauggaauccgugaaaaacggcaccuacgauuauccuaaguacagcgaggaagcuaaacugaauagagaggagauugacgggguuaaacuugaaucuacacggaucuaucaaauccuggccauuuacuccacgguggcgagcucccucguccuggugguuucucugggcgcuaucagcuuuuggaugugcuccaacggaucucuccagugccgcauuuguaucuga

SEQ ID NO: 195902 - RNA, 1701 nt, Artificial Sequence
  derived and/or modified CDS sequence (opt5) from hemagglutinin__InfluenzaA__ACZ96129
augaaggccauccuggugguccuccuguacaccuucgcuacagccaacgcggacacgcuuugcauuggcuaucacgcuaauaacagcaccgauacaguugacaccgugcuggagaaaaaugugacagucacccauuccgugaaccuccuggaagauaagcacaaugggaaacuuuguaagcugagaggaguugcuccccuccaucugggcaaaugcaacaucgccggguggauucugggaaauccugagugugaaucucucagcacagccuccucuuggagcuacaucguggagaccuccucuagcgacaacggcacgugcuauccgggggaauuuauugauuacgaggagcugcgggaacagcuuuccagcgucucuuccuucgagcgcuuugaaaucuuccccaagaccagcucuuggccuaaucacgacuccaacaagggagugacagccgcuuguccccaugccggcgcgaaaucuuuuuauaagaaucugaucuggcucguuaaaaagggcaacagcuacccuaaacuguccaagagcuauauuaaugauaaggggaaagaggugcuuguccuguggggaauccaccaccccuccaccucugccgaccaacagagccucuaccagaacgcugaugccuacguguucgugggcacauccagauauagcaagaaauuuaagccugagauugcuauccggccgaaaguccgcgaccaggaagggagaaugaauuacuauuggacccugguugagcccggagauaagauuacguucgaagccacaggcaaccugguggugccucgguacgcguuugccauggagcgcaacgcugggucuggaaucauuaucuccgacacccccguccaugauugcaauacaaccugucaaaccccuaaaggcgccaucaacacaagccuccccuuccagaauauucacccgaucacgauuggcaagugcccuaaguaugugaaaucuaccaagcugagacuugcuacagggcugcggaacguucccagcauccagucccgcggacucuuuggcgccauugccggguucaucgaaggaggcuggaccgggaugguggacggaugguacggcuaucaucaccagaaugagcaaggcucuggguacgcugcggaccugaaaagcacacagaacgccaucgaugagauuaccaauaaggucaacuccgugaucgaaaagaugaauacgcaguuuacagcuguuggaaaggaguucaaccaccuugaaaagagaauugagaaucugaacaaaaagguggacgauggcuuccucgacaucuggaccuacaaugccgaacugcugguccuccuggagaacgagcggacccuugauuaucaugacagcaaugugaaaaaccuguacgaaaagguccgcucucagcucaaaaacaaugccaaggagauugggaacggauguuuugaguucuaucacaagugcgauaauacauguauggaauccgugaaaaacggcaccuacgacuauccuaaguacagcgaagaggcuaaacugaauagagaggaaaucgaugggguuaaacuugagucuacacggaucuaucaaauucuggccaucuacuccacgguggcgagcucccucguccuggugguuucucugggcgcuauuagcuuuuggaugugcuccaacggaucucuccagugccgcaucuguauuuga

SEQ ID NO: 195903 - RNA, 1701 nt, Artificial Sequence; identical to SEQ ID NO: 194741
  derived and/or modified CDS sequence (opt5) from hemagglutinin__InfluenzaA__ACZ96149

SEQ ID NO: 195904 - RNA, 1701 nt, Artificial Sequence; identical to SEQ ID NO: 194741
  derived and/or modified CDS sequence (opt5) from hemagglutinin__InfluenzaA__ACZ96159

SEQ ID NO: 195905 - RNA, 1701 nt, Artificial Sequence
  derived and/or modified CDS sequence (opt5) from hemagglutinin__InfluenzaA__ACZ96179
augaaggccauccuggugguccuccuguacaccuucgcuacagccaacgcggacacgcuuugcauuggcuaucacgcuaauaacagcaccgauacaguugacaccgugcuggagaaaaaugugacagucacccauuccgugaaccuccuggaagauaagcacaaugggaaacuuuguaagcugagaggaguugcuccccuccaucugggcaaaugcaacaucgccggguggauucugggaaauccugagugugaaucucucagcacagccuccucuuggagcuacaucguggagaccuccucuagcgacaacggcacgugcuauccgggggauuuuauugacuacgaagaacugcgggagcagcuuuccagcgucucuuccuucgaacgcuuugagaucuuccccaagaccagcucuuggccuaaucacgauuccaacaagggagugacagccgcuuguccccaugccggcgcgaaaucuuuuuauaagaaucugaucuggcucguuaaaaagggcaacagcuacccuaaacuguccaagagcuauauuaaugacaaggggaaagaagugcuuguccuguggggaauccaccaccccuccaccucugccgaucaacagagccucuaccagaacgcugacgccuacguguucgugggcacauccagauauagcaagaaauuuaagccugagauugcuauccggccgaaaguccgcgaucaggaggggagaaugaauuacuauuggacccugguugaacccggagacaagauuacguucgaggccacaggcaaccugguggugccucgguacgcguuugccauggaacgcaacgcugggucuggaaucauuaucuccgauacccccguccaugacugcaauacaaccugucaaaccccuaaaggcgccaucaacacaagccuccccuuccagaauauucacccgaucacgauuggcaagugcccuaaguaugugaaaucuaccaagcugagacuugcuacagggcugcggaacguucccagcauccagucccgcggacucuuuggcgccauugccggguucaucgagggaggcuggaccgggaugguggacggaugguacggcuaucaucaccagaaugaacaaggcucuggguacgcugcggaucugaaaagcacacagaacgccaucgacaagauuaccaauaaagucaacuccgugaucgagaagaugaauacgcaguuuacagcuguuggaaaggaguucaaccaccuugagaaaagaauugagaaucugaacaagaaaguggaugacggcuuccucgauaucuggaccuacaaugccgaacugcugguccuccuggagaacgaacggacccuugacuaucaugauagcaaugugaagaaccuguacgagaaaguccgcucucagcucaagaacaaugccaaggagauugggaacggauguuuugaguucuaucacaaaugcgacaauacauguauggaauccgugaagaacggcaccuacgauuauccuaaauacagcgaagaggcuaagcugaauagagaagagaucgacgggguuaaacuugagucuacacggaucuaucaaauucuggccaucuacuccacgguggcgagcucccucguccuggugguuucucugggcgcuauuagcuuuuggaugugcuccaacggaucucuccagugccgcaucuguauuuga

SEQ ID NO: 195906 - RNA, 1701 nt, Artificial Sequence; identical to SEQ ID NO: 195898
  derived and/or modified CDS sequence (opt5) from hemagglutinin__InfluenzaA__ACZ96189

SEQ ID NO: 195907 - RNA, 1701 nt, Artificial Sequence; identical to SEQ ID NO: 195905
  derived and/or modified CDS sequence (opt5) from hemagglutinin__InfluenzaA__ACZ96199

SEQ ID NO: 195908 - RNA, 1701 nt, Artificial Sequence; identical to SEQ ID NO: 194741
  derived and/or modified CDS sequence (opt5) from hemagglutinin__InfluenzaA__ACZ96209

SEQ ID NO: 195909 - RNA, 1701 nt, Artificial Sequence
  derived and/or modified CDS sequence (opt5) from hemagglutinin__InfluenzaA__ACZ96219
augaaggccauccuggugguccuccuguacaccuucgcuacagccaacgcggacacgcuuugcauuggcuaucacgcuaauaacagcaccgauacaguugacaccgugcuggagaaaaaugugacagucacccauuccgugaaccuccuggaagauaagcacaaugggaaacuuuguaagcugagaggaguugcuccccuccaucugggcaaaugcaacaucgccggguggauucugggaaauccugagugugaaucucucagcacagccuccucuuggagcuacaucguggagaccuccucuagcgacaacggcacgugcuauccgggggauuuuauugacuacgaagaacugcgggagcagcuuuccagcgucucuuccuucgaacgcuuugagaucuuccccaagaccagcucuuggccuaaucacgauuccaacaagggagugacagccgcuuguccccaugccggcgcgaaaucuuuuuauaagaaucugaucuggcucguuaaaaagggcaacagcuacccuaaacuguccaagagcuauauuaaugacaaggggaaagaagugcuuguccuguggggaauccaccaccccuccaccucugccgaucaacagagccucuaccagaacgcugacgccuacguguucgugggcacauccagauauagcaagaaauuuaagccugagauugcuauccggccgaaaguccgcgaucaggaggggagaaugaauuacuauuggacccugguugaacccggagacaagauuaaauucgaggccacgggcaaccugguggugccucgguacgcguuugccauggaacgcaacgcugggucuggaaucauuaucuccgauacacccguccaugacugcaauaccacaugucaaaccagcaagggcgccaucaacaccucucucccuuuccagaauauucaccccaucacaauuggcaagugcccgaaauauguuaagagcacgaaacugagacuugcuaccgggcugcggaacgugccuuccauccagucucgcggacucuuuggcgccauugccggguucaucgagggaggcuggacagggaugguggacggaugguacggcuaucaucaccagaaugaacaaggcagcggguacgcugcggaucugaaguccacccagaacgccaucgacgagauuacaaauaaagucaacagcgugaucgagaagaugaauacccaguuuacggcuguuggaaaggaguucaaccaccuugagaaaagaauugaaaaucugaacaagaaaguggaugacggcuuccucgauaucuggacauacaaugccgagcugcugguccuccuggaaaacgagcggacccuugacuaucaugauucuaaugugaagaaccuguacgagaaaguccgcucccagcucaagaacaaugccaaggaaauugggaacggauguuuugaguucuaucacaaaugcgacaauaccuguauggaaagcgugaagaacggcacauacgauuaucccaaauacucugaggaagcuaagcugaauagagaggagaucgccgggguuaaacuugaauccacccggaucuaucaaauucuggcgaucuacagcacaguggcuuccucucucguccuggugguuagccugggcgccauuuccuuuuggaugugcucuaacggaagccuccagugccgcaucuguauuuga

SEQ ID NO: 195910 - RNA, 1701 nt, Artificial Sequence; identical to SEQ ID NO: 194741
  derived and/or modified CDS sequence (opt5) from hemagglutinin__InfluenzaA__ACZ96229

SEQ ID NO: 195911 - RNA, 1701 nt, Artificial Sequence; identical to SEQ ID NO: 195905
  derived and/or modified CDS sequence (opt5) from hemagglutinin__InfluenzaA__ACZ96239

SEQ ID NO: 195912 - RNA, 1701 nt, Artificial Sequence; identical to SEQ ID NO: 194741
  derived and/or modified CDS sequence (opt5) from hemagglutinin__InfluenzaA__ACZ96249

SEQ ID NO: 195913 - RNA, 1701 nt, Artificial Sequence
  derived and/or modified CDS sequence (opt5) from hemagglutinin__InfluenzaA__ACZ96269
augaaggccauccuggugguccuccuguacaccuucgcuacagccaacgcggacacgcuuugcauuggcuaucacgcuaauaacagcaccgauacaguugacaccgugcuggagagaaaugugacagucacccauuccgugaaccuccuggaagauaaacacaaugggaagcuguguaaacugcggggaguugcgccccuccaucugggcaagugcaacaucgccggguggauucugggaaauccugagugugaaucucucagcacagcuuccucuuggagcuacaucguggagaccuccucuagcgacaacggcacgugcuauccgggggauuuuauugacuacgaagaacugcgcgagcagcuuuccagcgucucuuccuucgaaagauuugagaucuuccccaaaaccagcucuuggccuaaucacgauuccaacaagggagugacagccgcuuguccccaugccggcgccaagagcuuuuauaaaaaucugaucuggcucguuaagaaaggcaacucuuacccuaagcuguccaaaagcuauauuaaugacaaggggaaggaagugcuuguccuguggggaauccaccaccccuccaccucugccgaucaacagagccucuaccagaacgcugacgccuacguguucgugggcacaucccgguauagcaaaaaguuuaaaccugagauugcuauccgcccgaaggucagagaucaggaggggcggaugaauuacuauuggacccugguugaacccggagacaaaauuacguucgaggccacaggcaaccugguggugccucgcuacgcguuugccauggaaagaaacgcugggucuggaaucauuaucuccgauacccccguccaugacugcaauacaaccugucaaaccccuaagggcgccaucaacacaagccuccccuuccagaauauucacccgaucacgauuggcaaaugcccuaaguaugugaagucuaccaaacugcggcuugcuacagggcugcgcaacguucccagcauccaguccagaggacucuuuggcgccauugccggguucaucgagggaggcuggaccgggaugguggacggaugguacggcuaucaucaccagaaugaacaaggcucuggguacgcugcggaucuuaagagcacacagaacgccaucgacgagauuaccaauaaagucaacuccgugaucgagaagaugaauacgcaguuuacagcuguuggaaaagaguucaaccaccuugagaagcggauugaaaaucugaacaagaaaguggaugacggcuuccucgauaucuggaccuacaaugccgagcugcugguccuccuggaaaacgagcgcacccuugacuaucaugauagcaaugugaagaaccuguacgagaaagucagaucucagcucaagaacaaugccaaagaaauugggaacggauguuuugaguucuaucacaagugcgacaauacauguauggaauccgugaagaacggcaccuacgauuauccuaaauacagcgaggaagcuaagcugaaucgggaggagaucgacgggguuaaacuugaaucuacacgcaucuaucaaauucuggccaucuacuccacgguggcgagcucccucguccuggugguuucucugggcgcuauuagcuuuuggaugugcuccaacggaucucuccagugcagaaucuguauuuga

SEQ ID NO: 195914 - RNA, 1701 nt, Artificial Sequence; identical to SEQ ID NO: 194741
  derived and/or modified CDS sequence (opt5) from hemagglutinin__InfluenzaA__ACZ96299

SEQ ID NO: 195915 - RNA, 1701 nt, Artificial Sequence; identical to SEQ ID NO: 194741
  derived and/or modified CDS sequence (opt5) from hemagglutinin__InfluenzaA__ACZ96309

SEQ ID NO: 195916 - RNA, 1701 nt, Artificial Sequence
  derived and/or modified CDS sequence (opt5) from hemagglutinin__InfluenzaA__ACZ96319
augaaggccauccuggugguccuccuguacaccuucgcuacagccaacgcggacacgcuuugcauuggcuaucacgcuaauaacagcaccgauacaguugacaccgugcuggagaaaaaugugacagucacccauuccgugaaccuccuggaagauaagcacaaugggaaacuuuguaagcugagaggaguugcgccccuccaucugggcaucugcaacauugccggguggauccugggaaauccugagugugaaucucucagcacagcuuccucuuggagcuacauuguggagaccuccucuagcgacaacggcacgugcuauccgggggauuuuaucgacuacgaagaacugcgggagcagcuuuccagcgucucuuccuucgaacgcuuugagaucuuccccaaaaccagcucuuggccuaaucacgauuccaacaagggagugacagccgcuuguccccaugccggcgccaagagcuuuuauaaaaaucugauuuggcucguuaagaaaggcaacucuuacccuaagcuguccaaaagcuauaucaaugacaaggggaaggaagugcuuguccuguggggcauucaccaccccuccaccucugccgaucaacagagccucuaccagaacgcugacgccuacguguucgugggaacauccagauauagcaaaaaguuuaaaccugagaucgcuauucggccgaagguccgcgaucaggaggggagaaugaauuacuauuggacccugguugaacccggagacaaaaucacguucgaggccacaggcaaccugguggugccucgguacgcguuugccauggaacgcaacgcugggucuggaauuaucaucuccgauacccccguccaugacugcaauacaaccugucaaaccccuaagggcgccauuaacacaagccuccccuuccagaauauccacccgauuacgaucggcaaaugcccuaaguaugugaagucuaccaaacugagacuugcuacagggcugcggaacguucccagcauucagucccgcggacucuuuggcgccaucgccggguucaucgagggaggcuggaccgggaugguggacggaugguacggcuaucaucaccagaaugaacaaggcucuggguacgcugcggaucuuaagagcacacagaacgccauugacgagaucaccaauaaagucaacuccgugauugagaagaugaauacgcaguuuacagcuguuggaaaagaguucaaccaccuggagaagagaaucgaaaaucugaacaagaaaguggaugacggcuuccucgauauuuggaccuacaaugccgagcugcugguccuccuggaaaacgagcggacccuugacuaucaugauagcaaugugaagaaccuguacgagaaaguccgcucucagcucaagaacaaugccaaagaaaucgggaacggauguuuugaguucuaucacaagugcgacaauacauguauggaauccgugaagaacggcaccuacgauuauccuaaauacagcgaggaagcuaagcugaauagagaggagaucgacgggguuaaacuugaaucuacacggauuuaucaaauccuggccauuuacuccacgguggcgagcucccucguccuggugguuucucugggcgcuaucagcuuuuggaugugcuccaacggaucucuccagugccgcauuuguaucuga

SEQ ID NO: 195917 - RNA, 1701 nt, Artificial Sequence; identical to SEQ ID NO: 195916
  derived and/or modified CDS sequence (opt5) from hemagglutinin__InfluenzaA__ACZ96329

SEQ ID NO: 195918 - RNA, 1701 nt, Artificial Sequence
  derived and/or modified CDS sequence (opt5) from hemagglutinin__InfluenzaA__ACZ96339
augaaggccauccuggugguccuccuguacaccuucgcuacagccaacgcggacacgcuuugcauuggcuaucacgcuaauaacagcaccgauacaguugacaccgugcuggagaagaaugugacagucacccauuccgugaaccuccuggaagauaagcacaaugggaaacuuuguaagcugagaggaguugcuccccuccaucugggcaaaugcaacaucgccggguggauucugggaaauccugagugugaaucucucagcacagccuccucuuggagcuacaucguggagaccuccucuagcgacaacggcacgugcuauccgggggauuuuauugacuacgaagaacugcgggagcagcuuuccagcgucucuuccuucgaacgcuuugagaucuuccccaagaccagcucuuggccuaaucacgauuccaacaagggagugacagccgcuuguccccaugccggcgcgaaaucuuuuuauaagaaucugaucuggcucguuaaaaagggcaacagcuacccuaaacuguccaagagcuauauuaaugacaaggggaaagaagugcuuguccuguggggaauccaccaccccuccaccucugccgaucaacagagccucuaccagaacgcugacuccuacguguucgugggcacaagcagauauucuaagaaauuuaagccugagauugccauccggccgaaaguccgcgaucaggaggggagaaugaauuacuauuggacccugguugaacccggagacaagauuacguucgaggcuacaggcaaccugguggugccucgguacgccuuugcgauggaacgcaacgccggguccggaaucauuaucagcgauacccccguccaugacugcaauacaaccugucaaaccccugagggcgcuaucaacacaucucuccccuuccagaauauucacccgaucacgauuggcaaaugcccuaaguauguuaagagcaccaaacugagacuugccacagggcugcggaacgugcccuccauccagucucgcggacucuuuggcgcuauugccggguucaucgaaggaggcuggaccgggaugguggacggaugguacggcuaucaucaccagaaugagcaaggcagcggguacgccgcugaucugaaguccacacagaacgcgaucgacgagauuaccaauaaagucaacagcgugaucaagaaaaugaauacgcaguuuacagccguuggaaaggaguucaaccaccuugagaagagaauugaaaaucugaacaaaaagguggaugacggcuuccucgauaucuggaccuacaaugcugagcugcugguccuccuggaaaacgagcggacccuugacuaucaugauucuaaugugaaaaaccuguacgagaagguccgcucccagcucaaaaacaaugccaaggaaauugggaacggauguuuugaguucuaucacaagugcgacaauacauguauggaaagcgugaaaaacggcaccuacgauuauccuaaguacucugaggaagccaaacugaauagagaggagaucgacgggguuaaacuugaauccacacggaucuaucaaauucuggcuaucuacagcacgguggccuccucucucguccuggugguuagccugggcgcgauuuccuuuuggaugugcucuaacggaagccuccagugccgcaucuguauuuga

SEQ ID NO: 195919 - RNA, 1701 nt, Artificial Sequence; identical to SEQ ID NO: 194741
  derived and/or modified CDS sequence (opt5) from hemagglutinin__InfluenzaA__ACZ96349

SEQ ID NO: 195920 - RNA, 1701 nt, Artificial Sequence; identical to SEQ ID NO: 195916
  derived and/or modified CDS sequence (opt5) from hemagglutinin__InfluenzaA__ACZ96359

SEQ ID NO: 195921 - RNA, 1701 nt, Artificial Sequence; identical to SEQ ID NO: 194741
  derived and/or modified CDS sequence (opt5) from hemagglutinin__InfluenzaA__ACZ96372

SEQ ID NO: 195922 - RNA, 1701 nt, Artificial Sequence; identical to SEQ ID NO: 195916
  derived and/or modified CDS sequence (opt5) from hemagglutinin__InfluenzaA__ACZ96382

SEQ ID NO: 195923 - RNA, 1701 nt, Artificial Sequence; identical to SEQ ID NO: 194728
  derived and/or modified CDS sequence (opt5) from hemagglutinin__InfluenzaA__ACZ96392

SEQ ID NO: 195924 - RNA, 1701 nt, Artificial Sequence; identical to SEQ ID NO: 194983
  derived and/or modified CDS sequence (opt5) from hemagglutinin__InfluenzaA__ACZ96405

SEQ ID NO: 195925 - RNA, 1701 nt, Artificial Sequence; identical to SEQ ID NO: 194741
  derived and/or modified CDS sequence (opt5) from hemagglutinin__InfluenzaA__ACZ96415

SEQ ID NO: 195926 - RNA, 1701 nt, Artificial Sequence; identical to SEQ ID NO: 194741
  derived and/or modified CDS sequence (opt5) from hemagglutinin__InfluenzaA__ACZ96425

SEQ ID NO: 195927 - RNA, 1701 nt, Artificial Sequence
  derived and/or modified CDS sequence (opt5) from hemagglutinin__InfluenzaA__ACZ96435
augaaggccauccuggugguccuccuguacaccuucgcuacagccaacgcggacacgcuuugcauuggcuaucacgcuaauaacagcaccgauacaguugacaccgugcuggagaagaaugugacagucacccauuccgugaaccuccuggaagauaagcacaaugggaaacuuuguaagcugagaggaguugcccagcuccaucugggcaaaugcaacaucgccggguggauucugggaaaucccgagugugaaucucucagcacagcuuccucuuggagcuacaucguggagaccuccucuagcgacaacggcacgugcuauccuggggauuuuauugacuacgaagaacugcgggagcaacuuuccagcgucucuuccuucgaacgcuuugagaucuucccgaagaccagcucuuggcccaaucacgauuccaacaagggagugacagccgcuuguccucaugccggcgcgaaaucuuuuuauaagaaucugaucuggcucguuaaaaagggcaacagcuaccccaaacuguccaagagcuauauuaaugacaaggggaaagaagugcuuguccuguggggaauccaccacccuuccaccucugccgaucagcagagccucuaccagaacgcugacgccuacguguucgugggcacauccagauauagcaagaaauuuaagcccgagauugcuauccggccuaaaguccgcgaucaagaggggagaaugaauuacuauuggacccugguugaaccgggagacaagauuacguucgaggccacaggcaaccugauggugccccgguacgcguuugccauggaacgcaacgcugggucuggaaucauuaucuccgauaccccugugcaugacugcaauacaaccugucagacccccaaaggcgccaucaacacaagccucccuuuccagaauauucaccccaucacgauuggcaagugcccgaaguaugucaaaucuaccaagcugagacuugcuacagggcugcggaacgugccuagcauccagucccgcggacucuuuggcgccauugccggguucaucgagggaggcuggaccgggaugguugacggaugguacggcuaucaucaccaaaaugaacagggcucuggguacgcugcggaucugaaaagcacacagaacgccaucgacgagauuaccaauaaggugaacuccgucaucgagaaaaugaauacgcaguuuacagcugugggaaaggaguucaaccaccuugagaagagaauugaaaaucugaacaaaaagguugaugacggcuuccucgauaucuggaccuacaaugccgagcugcuggugcuccuggaaaacgagcggacccuugacuaucaugauagcaaugucaaaaaccuguacgagaaggugcgcucucaacucaaaaacaaugccaaggaaauugggaacggauguuuugaguucuaucacaagugcgacaauacauguauggaauccgucaaaaacggcaccuacgauuaucccaaguacagcgaggaagcuaaacugaauagagaggagaucgacggggugaaacuugaaucuacacggaucuaucagauucuggccaucuacuccacgguugcgagcucccucgugcuggucgugucucugggcgcuauuagcuuuuggaugugcuccaacggaucucuccagugccgcaucuguauuuga

SEQ ID NO: 195928 - RNA, 1701 nt, Artificial Sequence; identical to SEQ ID NO: 194741
  derived and/or modified CDS sequence (opt5) from hemagglutinin__InfluenzaA__ACZ96445

SEQ ID NO: 195929 - RNA, 1701 nt, Artificial Sequence
  derived and/or modified CDS sequence (opt5) from hemagglutinin__InfluenzaA__ACZ96476
augaaggccauccuggugguccuccuguacaccuucgcuacagccuaugcggacacgcuuugcauuggcuaccacgcuaacaauagcaccgauacaguugacaccgugcuggagaagaacgugacagucacccauuccgugaaucuccuggaagauaagcacaacgggaaacuuuguaagcugagaggaguugcuccccuccaucugggcaaaugcaauaucgccggguggauucugggaaacccugagugugaaucucucagcacagccuccucuuggagcuauaucguggagaccuccucuagcgacaauggcacgugcuacccgggggauuuuauugacuaugaagaacugcgggagcagcuuuccagcgucucuuccuucgaacgcuuugagaucuuccccaagaccagcucuuggccuaaccacgauuccaauaagggagugacagccgcuuguccccaugccggcgcgaaaucuuuuuacaagaaccugaucuggcucguuaaaaagggcaauagcuauccuaaacuguccaagagcuacauuaacgacaaggggaaagaagugcuuguccuguggggaauccaccaccccuccaccucugccgaucaacagagccucuaccagaaugcugacgccuauguguucgugggcacauccagauacagcaagaaauuuaagccugagauugcuauccggccgaaaguccgcgaucaggaggggagaaugaacuauuacuggacccugguugaacccggagacaagauuacguucgaggccacaggcaaucugguggugccucgguaugcguuugccauggaacgcaacgcugggucuggaaucauuaucuccgauacccccguccaugacugcaacacaaccugucaaaccccuaaaggcgccaucaauacaagccuccccuuccagaacauucacccgaucacgauuggcaagugcccuaaguacgugaaaucuaccaagcugagacuugcuacagggcugcggaauguucccagcauccagucccgcggacucuuuggcgccauugccggguucaucgagggaggcuggaccgggaugguggacggaugguauggcuaccaucaccagaacgaacaaggcucuggguacgcugcggaucugaaaagcacacagaaugccaucgacgagauuaccaacaaggucaauuccgugaucgagaaaaugaacacgcaguuuacagcuguuggaaaggaguucaaucaccuugagaagagaauugaaaaccugaauaaaaagguggaugacggcuuccucgauaucuggaccuauaacgccgagcugcugguccuccuggaaaaugagcggacccuugacuaccaugauagcaacgugaaaaaucuguaugagaagguccgcucucagcucaaaaacaacgccaaggaaauugggaauggauguuuugaguucuaccacaagugcgacaacacauguauggaauccgugaaaaauggcaccuaugauuacccuaaguauagcgaggaagcuaaacugaacagagaggagaucgacgggguuaaacuugaaucuacacggaucuaccaaauucuggccaucuacuccacgguggcgagcucccucguccuggugguuucucugggcgcuauuagcuuuuggaugugcuccaauggaucucuccagugccgcaucuguauuuga

SEQ ID NO: 195930 - RNA, 1701 nt, Artificial Sequence; identical to SEQ ID NO: 194741
  derived and/or modified CDS sequence (opt5) from hemagglutinin__InfluenzaA__ACZ96496

SEQ ID NO: 195931 - RNA, 1701 nt, Artificial Sequence; identical to SEQ ID NO: 194741
  derived and/or modified CDS sequence (opt5) from hemagglutinin__InfluenzaA__ACZ96506

SEQ ID NO: 195932 - RNA, 1701 nt, Artificial Sequence; identical to SEQ ID NO: 194741
  derived and/or modified CDS sequence (opt5) from hemagglutinin__InfluenzaA__ACZ96526

SEQ ID NO: 195933 - RNA, 1701 nt, Artificial Sequence
  derived and/or modified CDS sequence (opt5) from hemagglutinin__InfluenzaA__ACZ96536
augaaggccauccuggugguccuccuguacaccuucgcuacagccaacgcggacacgcuuugcauuggcuaucacgcuaauaacagcaccgauacaguugacaccgugcuggagaaaaaugugacagucacccauuccgugaacauccucgaagauaagcacaaugggaaacuguguaaacuuaagggaguugcgccccugcaucucggcaagugcaacauugccggguggauccugggaaauccugagugugaaucucugagcacagcuuccucuuggagcuacauuguggagaccuccucuagcgacaacggcacgugcuauccgggggauuuuaucgacuacgaagaacucagagagcagcuguccagcgucucuuccuucgaacgguuugagaucuuccccaagaccagcucuuggccuaaucacgauuccaacaaaggagugacagccgcuuguccccaugccggcgccaagagcuuuuauaaaaaucuuauuuggcugguuaagaaaggcaacucuuacccuaagcucuccaagagcuauaucaaugacaaagggaaggaagugcugguccuuuggggcauucaccaccccuccaccucugccgaucaacagagccuguaccagaacgcugacacauacguguucgugggauccagcaaauauucuaagaaauuuaagccugagaucgccauucgcccgaaagucagagaucaggaggggcggaugaauuacuauuggacccucguugaacccggagacaagaucacguucgaggcuacaggcaaccugguggugccucgcuacgccuuugcgauggaaagaaacgccggguccggaauuaucaucagcgauacccccguccaugacugcaauacaaccugucaaaccccuaagggcgcuauuaacacaucucugcccuuccagaauauccacccgauuacgaucggcaaaugcccuaagcaugugaaaagcaccaagcuccggcuggccacagggcuucgcaacguucccuccauucagucuagaggacuguuuggcgcuaucgccggguucaucgagggaggcuggaccgggaugguggacggaugguauggcuaccaccaccagaaugaacaaggcagcggguaugccgcugaucucaaauccacacagaacgcgauugacgagaucaccaauaaggucaacagcgugauugagaagaugaauacgcaguuuacagccguuggaaaagaguucaaccaucuggagaagcggaucgaaaaucuuaacaaaaagguggaugacggcuuccuggauauuuggaccuacaaugcugagcuccugguccugcucgaaaacgagcgcacccuggacuaccacgauucuaaugugaaaaaccuuuaugagaaggucagaucccagcugaagaacaaugccaaagaaaucgggaacggauguuuugaguucuaccauaagugcgacaauacauguauggaaagcgugaaaaacggcaccuaugauuacccuaaguauucugaggaagccaaacucaaucgggaggagaucgacgggguuaagcuggaauccacacgcauuuaccaaauccuugcuauuuauagcacgguggccuccucucugguccucgugguuagccugggcgcgaucuccuuuuggaugugcucuaacggaagccugcagugcagaauuuguaucuga

SEQ ID NO: 195934 - RNA, 1701 nt, Artificial Sequence; identical to SEQ ID NO: 194741
  derived and/or modified CDS sequence (opt5) from hemagglutinin__InfluenzaA__ACZ96549

SEQ ID NO: 195935 - RNA, 1701 nt, Artificial Sequence
  derived and/or modified CDS sequence (opt5) from hemagglutinin__InfluenzaA__ACZ96559
augaaggccauccuggugguccuccuguacaccuucgcuacagccaacgcggacacgcuuugcauuggcuaucacgcuaauaacagcaccgauacaguugacaccgugcuggagaagaaugugacagucacccauuccgugaaccuccuggaagauaagcacaaugggaaacuuuguaagcugagaggaguugcuccccuccaucugggcaaaugcaacaucgccggguggauucugggaaauccugagugugaaucucucagcacagccuccucuuggagcuacaucguggagaccuccucuagcgacaacggcacgugcuauccgggggauuuuauuaauuacgaagaacugcgggagcagcuuuccagcgucucuuccuucgaacgcuuugagaucuuccccaagaccagcucuuggccuaaccacgacuccaauaagggagugacagccgcuuguccccaugccggcgcgaaaucuuuuuauaagaaccugaucuggcucguuaaaaagggcaauagcuacccuaaacuguccaagagcuauauuaacgauaaggggaaagaagugcuuguccuguggggaauccaccaccccuccaccucugccgaccaacagagccucuaccagaaugcugaugccuacguguucgugggcacauccagauauagcaagaaauuuaagccugagauugcuauccggccgaaaguccgcgaccaggaggggagaaugaacuacuauuggacccugguugaacccggagauaagauuacguucgaggccacaggcaaccugguggugccucgguacgcguuugccauggaacgcaaugcugggucuggaaucauuaucuccgacacccccguccaugauugcaacacaaccugucaaaccccuaaaggcgccaucaauacaagccuccccuuccagaacauucacccgaucacgauuggcaagugcccuaaguaugugaaaucuaccaagcugagacuugcuacagggcugcggaauguucccagcauccagucccgcggacucuuuggcgccauugccggguucaucgagggaggcuggaccgggaugguggacggaugguacggcuaucaucaccagaacgaacaaggcucuggguacgcugcggaccugaaaagcacacagaaugccaucgaugagauuaccaacaaggucaauuccgugaucgagaaaaugaacacgcaguuuacagcuguuggaaaggaguucaaucaccuugagaagagaauugaaaaccugaauaaaaagguggacgauggcuuccucgacaucuggaccuacaacgccgagcugcugguccuccuggaaaaugagcggacccuugauuaucaugacagcaacgugaaaaaccuguacgagaagguccgcucucagcucaaaaauaacgccaaggaaauugggaauggauguuuugaguucuaucacaagugcgauaacacauguauggaauccgugaaaaauggcaccuacgacuauccuaaguacagcgaggaagcuaaacugaacagagaggagaucgaugggguuaaacuugaaucuacacggaucuaucaaauucuggccaucuacuccacgguggcgagcucccucguccuggugguuucucugggcgcuauuagcuuuuggaugugcuccaauggaucucuccagugccgcaucuguauuuga

SEQ ID NO: 195936 - RNA, 1701 nt, Artificial Sequence
  derived and/or modified CDS sequence (opt5) from hemagglutinin__InfluenzaA__ACZ96569
auggaggccauccuggugguccuccuguacaccuucgcuacagccaacgcggacacgcuuugcauuggcuaucacgcuaauaacagcaccgauacaguugacaccgugcuggaaaagaaugugacagucacccauuccgugaaccuccuggaggauaaacacaaugggaaacuuuguaagcugagaggaguugcgccccuccaucugggcaagugcaacaucgccggguggauucugggaaauccugaaugugagucucucagcacagcuuccucuuggagcuacaucguggaaaccuccucuagcgacaacggcacgugcuauccgggggauuuuauuaauuacgaggagcugcgggaacagcuuuccagcgucucuuccuucgagcgcuuugaaaucuuccccaaaaccagcucuuggccuaaccacgacuccaauaagggagugacagccgcuuguccccaugccggcgccaagagcuuuuauaaaaaccugaucuggcucguuaagaaaggcaauucuuacccuaagcuguccaaaagcuauauuaacgauaaggggaaggaggugcuuguccuguggggaauccaccaccccuccaccucugccgaccaacagagccucuaccagaaugcugaugccuacguguucgugggcuccagcagauauucuaaaaaguuuaaaccugagauugcuauccggccgaagguccgcgaccaggaagggagaaugaacuacuauuggacacugguugagcccggagauaaaauuaccuucgaagccacgggcaaccugguggugccucgguacgcguuugccauggagcgcaaugcuggguccggaaucauuaucagcgacacacccguccaugauugcaacaccacaugucaaaccccuaagggcgccaucaauaccucucuccccuuccacaacauucauccgaucacaauuggcaaaugcccuaaguauguuaagagcacgaaacugagacuugcuaccgggcugcggaaugugcccuccauccagucucgcggacucuuuggcgccauugccggguucaucgaaggaggcuggacagggaugguggacggaugguacggcuaucaccaccagaacgagcagggcagcggguacgcugcggaccugaaguccacccaaaaugccaucgaugagauuacaaacaaagucaauagcgugaucgaaaagaugaacacccaguuuacggcuguuggaaaagaguucaaucaucuugaaaagagaauugagaaccugaauaagaaaguggacgauggcuuccucgacaucuggacauacaacgccgaacugcugguccuccuggagaaugagcggacccuugauuaucacgacucuaacgugaagaaccuguacgaaaaaguccgcucccagcucaagaauaacgccaaagagauugggaauggauguuuugaguucuaucauaagugcgauaacaccuguauggaaagcgugaagaauggcacauacgacuauccuaaauacucugaagaggcuaagcugaacagagaggaaaucgaugggguuaaacuugaguccacccggaucuaucagauucuggccaucuacagcacaguggcguccucucucguccuggugguuagccugggcgcuauuuccuuuuggaugugcucuaauggaagccuccaaugccgcaucuguauuuga

SEQ ID NO: 195937 - RNA, 1701 nt, Artificial Sequence
  derived and/or modified CDS sequence (opt5) from hemagglutinin__InfluenzaA__ACZ96579
auggaggccauccuggugguccuccuguacaccuucgcuacagccaacgcggacacgcuuugcauuggcuaucacgcuaauaacagcaccgauacaguugacaccgugcuggaaaagaaugugacagucacccauuccgugaaccuccuggaggauaaacacaaugggaagcuguguaaacugagaggaguugcgccccuccaucugggcaagugcaacaucgccggguggauucugggaaauccugaaugugagucucucagcacagcuuccucuuggagcuacaucguggaaaccuccucuagcgacaacggcacgugcuauccgggggauuuuauugacuacgaggagcugcgggaacagcuuuccagcgucucuuccuucgagcgcuuugaaaucuuccccaaaaccagcucuuggccuaaucacgauuccaacaagggagugacagccgcuuguccccaugccggcgccaagagcuuuuauaaaaaucugaucuggcucguuaagaaaggcaacucuuacccuaagcuguccaaaagcuauauuaaugacaaggggaaggaggugcuuguccuguggggaauccaccaccccuccucuagcgccgaucaacagucccucuaccagaacgcugacgccuacguguucgugggcagcucuagauauuccaaaaaguuuaaaccugagauugcuauccggccgaagguccgcgaucaggaagggagaaugaauuacuauuggacccugguugagcccggagacaaaauuacauucgaagccaccggcaaccugguggugccucgguacgcguuugccauggagcgcaacgcugggagcggaaucauuaucucugauacgcccguccaugacugcaauacaaccugucaaacaccuaagggcgccaucaacaccagccuccccuuccacaauauucauccgaucaccauuggcaaaugcccuaaguaugugaaguccacaaaacugagacuugcuacggggcugcggaacguucccucuauccagagccgcggacucuuuggcgccauugccggguucaucgaaggaggcuggaccgggaugguggacggaugguacggcuaucaccaccagaaugagcagggcuccggguacgcugcggaucuuaagagcacacaaaacgccaucgacgagauuaccaauaaagucaacucugugaucgaaaagaugaauacacaguuuaccgcuguuggaaaagaguucaaccaucuugaaaagagaauugagaaucugaacaagaaaguggaugacggcuuccucgauaucuggacguacaaugccgaacugcugguccuccuggagaacgagcggacacuugacuaucacgauuccaaugugaagaaccuguacgaaaaaguccgcagccagcucaagaacaaugccaaagagauugggaacggauguuuugaguucuaucauaagugcgacaauaccuguauggaaucugugaagaacggcaccuacgauuauccuaaauacuccgaagaggcuaagcugaauagagaggaaaucgacgggguuaaacuugagagcacacggaucuaucagauucuggccaucuacuccaccguggcgucuagccucguccuggugguuucccugggcgcuauuucuuuuuggaugugcagcaacggaucccuccaaugccgcaucuguauuuga

SEQ ID NO: 195938 - RNA, 1701 nt, Artificial Sequence; identical to SEQ ID NO: 194741
  derived and/or modified CDS sequence (opt5) from hemagglutinin__InfluenzaA__ACZ96589

SEQ ID NO: 195939 - RNA, 1701 nt, Artificial Sequence
  derived and/or modified CDS sequence (opt5) from hemagglutinin__InfluenzaA__ACZ96599
augaaggccauccuggugguccuccuguacaccuucgcuacagccaacgcggacacgcuuugcauuggcuaucacgcuaauaacagcaccgauacaguugacaccgugcuggagaaaaaugugacagucacccauuccgugaaccuccuggaagauaagcacaaugggaaacuuuguaagcugagaggaguugcuccccuccaucugggcaaaugcaacaucgccggguggauucugggaaauccugagugugaaucucucagcacagccuccucuuggagcuacaucguggagaccuccucuagcgacaacggcacgugcuauccgggggauuuuauugacuacgaagaacugcgggagcagcuuuccagcgucucuuccuucgaacgcuuugagaucuuccccaagaccagcucuuggccuaaucacgauuccaacaagggagugacagccgcuuguccccaugccggcgcgaaaucuuuuuauaagaaucugaucuggcucguuaaaaagggcaacagcuacccuaaacuguccaagagcuauauuaaugacaaggggaaagaagugcuuguccuguggggaauccaccaccccuccaccucugccgaucaacagagccucuaccagaacgcugacgccuacguguucgugggcacauccagauauagcaagaaauuuaagccugagauugcuauccggccgaaaguccgcgagcaggaagggagaaugaauuacuauuggacccugguugagcccggagauaagauuacguucgaagccacaggcaaccugguggugccucgguacgcguuugccauggagcgcaacaccgggucuggaaucauuaucuccgacacacccguccaugauugcaauaccaccugucaaacaccuaaaggcgcuaucaacacgagccuccccuuccagaauauucacucuaucaccauuggcaagugcccgaaguaugugaaaagcacaaagcugagacuugccaccgggcugcggaacguuccuuccauccagucucgcggacucuuuggcgcuauugccggguucaucgaaggaggcuggacagggaugguggacggaugguacggcuaucaucaccagaaugagcaaggcagcggguacgccgcugaccugaaauccacccagaacgcgaucgaugagauuacgaauaaggucaacagcgugaucgaaaagaugaauacacaguuuaccgccguuggaaaggaguucaaccaccuugaaaagagaauugagaaucugaacaaaaagguggacgauggcuuccucgacaucuggaccuacaaugcugaacugcugguccuccuggagaacgagcggacacuugauuaucaugacucuaaugugaaaaaccuguacgaaaagguccgcucccagcucaaaaacaaugccaaggagauugggaacggauguuuugaguucuaucacaagugcgauaauaccuguauggagagcgugaaaaacggcacauacgacuaucccaaguacucugaagaggccaaacugaauagagaggaaaucgaugggguuaaacuugaguccacgcggaucuaucaaauucuggcuaucuacagcaccguggccuccucucucguccuggugguuagccugggcgcgauuuccuuuuggaugugcucuaacggaagccuccagugccgcaucuguauuuga

SEQ ID NO: 195940 - RNA, 1701 nt, Artificial Sequence
  derived and/or modified CDS sequence (opt5) from hemagglutinin__InfluenzaA__ACZ96609
augaaggccauccuggugguccuccuguacaccuucgcuacagccaacgcggacacgcuuugcauuggcuaucacgcuaauaacagcaccgauacaguugacaccgugcuggagaaaaaugugacagucacccauuccgugaaccuccuggaagauaagcacaaugggaaacuuuguaagcugagaggaguugcuccccuccaucugggcaaaugcaacaucgccggguggauucugggaaauccugagugugaaucucucagcacagccuccucuuggagcuacaucguggagaccuccucuagcgacaacggcacgugcuauccgggggauuuuauuaauuacgaagaacugcgggagcagcuuuccagcgucucuuccuucgaacgcuuugagaucuuccccaagaccagcucuuggccuaaccacgacuccaauaagggagugacagccgcuuguccccaugccggcgcgaaaucuuuuuauaagaaccugaucuggcucguuaaaaagggcaauagcuacccuaaacuguccaagagcuauauuaacgauaaggggaaagaagugcuuguccuguggggaauccaccaccccuccaccucugccgaccaacagagccucuaccagaaugcugaugccuacguguucgugggcuccagcagauauucuaagaaauuuaagccugagauugcuauccggccgaaaguccgcgaccaggaggggagaaugaacuacuauuggacacugguugaacccggagauaagauuaccuucgaggccacgggcaaccugguggugccucgguacgcguuugccauggaacgcaaugcuggguccggaaucauuaucagcgacacacccguccaugauugcaacaccacaugucaaaccccuaaaggcgccaucaauaccucucuccccuuccagaacauucacccgaucacaauuggcacgugcccuaaguauguuaagagcaccaaacugagacuugcuacagggcugcggaaugugcccuccauccagucucgcggacucuuuggcgccauugccggguucaucgagggaggcuggaccgggaugguggacggaugguacggcuaucaucaccagaacgaacaaggcagcggguacgcugcggaccugaaguccacacagaaugccaucgaugagauuaccaacaaagucaauagcgugaucgagaagaugaacacgcaguuuacagcuguuggaaaagaguucaaucaccuugagaagagaauugaaaaccugaauaagaaaguggacgauggcuuccucgacaucuggaccuacaacgccgagcugcugguccuccuggaaaaugagcggacccuugauuaucaugacucuaacgugaagaaccuguacgagaaaguccgcucccagcucaagaauaacgccaaagaaauugggaauggauguuuugaguucuaucacaagugcgauaacacauguauggaaagcgugaagaauggcaccuacgacuauccuaaauacucugaggaagcuaagcugaacagagaggagaucgaugggguuaaacuugaauccacacggaucuaucaaauucuggccaucuacagcacgguggcguccucucucguccuggugguuagccugggcgcuauuuccuuuuggaugugcucuaauggaagccuccagugccgcaucuguauuuga

SEQ ID NO: 195941 - RNA, 1701 nt, Artificial Sequence; identical to SEQ ID NO: 194921
  derived and/or modified CDS sequence (opt5) from hemagglutinin__InfluenzaA__ACZ96619

SEQ ID NO: 195942 - RNA, 1701 nt, Artificial Sequence; identical to SEQ ID NO: 194921
  derived and/or modified CDS sequence (opt5) from hemagglutinin__InfluenzaA__ACZ96629

SEQ ID NO: 195943 - RNA, 1701 nt, Artificial Sequence; identical to SEQ ID NO: 194921
  derived and/or modified CDS sequence (opt5) from hemagglutinin__InfluenzaA__ACZ96639

SEQ ID NO: 195944 - RNA, 1701 nt, Artificial Sequence; identical to SEQ ID NO: 194921
  derived and/or modified CDS sequence (opt5) from hemagglutinin__InfluenzaA__ACZ96649

SEQ ID NO: 195945 - RNA, 1701 nt, Artificial Sequence; identical to SEQ ID NO: 194921
  derived and/or modified CDS sequence (opt5) from hemagglutinin__InfluenzaA__ACZ96659

SEQ ID NO: 195946 - RNA, 1701 nt, Artificial Sequence; identical to SEQ ID NO: 194921
  derived and/or modified CDS sequence (opt5) from hemagglutinin__InfluenzaA__ACZ96669

SEQ ID NO: 195947 - RNA, 1701 nt, Artificial Sequence; identical to SEQ ID NO: 194921
  derived and/or modified CDS sequence (opt5) from hemagglutinin__InfluenzaA__ACZ96679

SEQ ID NO: 195948 - RNA, 1701 nt, Artificial Sequence; identical to SEQ ID NO: 194921
  derived and/or modified CDS sequence (opt5) from hemagglutinin__InfluenzaA__ACZ96689

SEQ ID NO: 195949 - RNA, 1701 nt, Artificial Sequence; identical to SEQ ID NO: 194921
  derived and/or modified CDS sequence (opt5) from hemagglutinin__InfluenzaA__ACZ96699

SEQ ID NO: 195950 - RNA, 1701 nt, Artificial Sequence; identical to SEQ ID NO: 194921
  derived and/or modified CDS sequence (opt5) from hemagglutinin__InfluenzaA__ACZ96719

SEQ ID NO: 195951 - RNA, 1701 nt, Artificial Sequence; identical to SEQ ID NO: 194921
  derived and/or modified CDS sequence (opt5) from hemagglutinin__InfluenzaA__ACZ96729

SEQ ID NO: 195952 - RNA, 1701 nt, Artificial Sequence; identical to SEQ ID NO: 194921
  derived and/or modified CDS sequence (opt5) from hemagglutinin__InfluenzaA__ACZ96739

SEQ ID NO: 195953 - RNA, 1701 nt, Artificial Sequence
  derived and/or modified CDS sequence (opt5) from hemagglutinin__InfluenzaA__ACZ96749
augaagaccauccuggugguccuccuguacacauucgccacggcuaacgccgacacccuuugcauuggcuaucacgcgaauaacagcacagauaccguugacacagugcuggagaaaaaugugaccgucacacauuccgugaaccuccuggaagauaagcacaaugggaaacuuuguaagcugagaggaguugcuccccuccaucugggcaaaugcaacaucgccggguggauucugggaaauccugagugugaaucucucagcaccgccuccucuuggagcuacaucguggagacguccucuagcgacaacgggaccugcuauccgggcgauuuuauugacuacgaagaacugcgggagcagcuuuccagcgucucuuccuucgaacgcuuugagaucuuccccaagacaagcucuuggccuaaucacgauuccaacaagggagugaccgcugccuguccccaugcuggcgccaagagcuuuuauaagaaucugaucuggcucguuaaaaagggcaacucuuacccuaaacuguccaagagcuauauuaaugacaaggggaaagaagugcuuguccuguggggaauccaccaccccuccacaucugcggaucaacagagccucuaccagaacgccgacgcuuacguguucgugggcuccagcagauauucuaagaaauuuaagccugagauugccauccggccgaaaguccgcgaucaggaggggagaaugaauuacuauuggacccugguugaacccggagacaagauuacguucgaggcuacaggcaaccugguggugccucgguacgccuuugcgauggaacgcaacgccggguccggaaucauuaucagcgauacccccguccaugacugcaauacaaccugucaaaccccuaaaggcgcuaucaacacaucucuccccuuccagaauauucacccgaucacgauuggcaagugcccuaaguaugugaaaagcaccaagcugagacuugccacagggcugcggaacguucccuccauccagucucgcggacucuuuggcgcuauugccggguucaucgagggaggcuggaccgggaugguggacggaugguacggcuaucaucaccagaaugaacaaggcagcggguacgccgcugaucugaaauccacacagaacgcgaucgacgagauuaccaauaaggucaacagcgugaucgagaaaaugaauacgcaguuuacagccguuggaaaggaguucaaccaccuugagaagagaauugaaaaucugaacaaaaagguggaugacggcuuccucgauaucuggaccuacaaugcugagcugcugguccuccuggaaaacgagcggacccuugacuaucaugauucuaaugugaaaaaccuguacgagaagguccgcucccagcucaaaaacaaugccaaggaaauugggaacggauguuuugaguucuaucacaagugcgacaauacauguauggaaagcgugaaaaacggcaccuacgauuauccuaaguacucugaggaagccaaacugaauagagaggagaucgacgggguuaaacuugaauccacacggaucuaucaaauucuggcuaucuacagcacgguggccuccucucucguccuggugguuagccugggcgcgauuuccuuuuggaugugcucuaacggaagccuccagugccgcaucuguauuuga

SEQ ID NO: 195954 - RNA, 1701 nt, Artificial Sequence; identical to SEQ ID NO: 194728
  derived and/or modified CDS sequence (opt5) from hemagglutinin__InfluenzaA__ACZ96759

SEQ ID NO: 195955 - RNA, 1701 nt, Artificial Sequence; identical to SEQ ID NO: 194728
  derived and/or modified CDS sequence (opt5) from hemagglutinin__InfluenzaA__ACZ96769

SEQ ID NO: 195956 - RNA, 1701 nt, Artificial Sequence; identical to SEQ ID NO: 194728
  derived and/or modified CDS sequence (opt5) from hemagglutinin__InfluenzaA__ACZ96779

SEQ ID NO: 195957 - RNA, 1701 nt, Artificial Sequence; identical to SEQ ID NO: 194728
  derived and/or modified CDS sequence (opt5) from hemagglutinin__InfluenzaA__ACZ96789

SEQ ID NO: 195958 - RNA, 1701 nt, Artificial Sequence
  derived and/or modified CDS sequence (opt5) from hemagglutinin__InfluenzaA__ACZ96809
augaaggccauccuggugguccuccuguacaccuucgcuacagccaacgcggacacgcuuugcauuggcuaucacgcuaauaacagcaccgauacaguugacaccgugcuggagaagaaugugacagucacccauuccgugaaccuccuggaagauaagcacaaugggaaacuuuguaagcugagaggaguugcuccccuccaucugggcaaaugcaacaucgccggguggauucugggaaauccugagugugaaucucucagcacagccuccucuuggagcuacaucguggagaccuccucuagcgacaacggcacgugcuauccgggggauuuuauugacuacgaagaacugcgggagcagcuuuccagcgucucuuccuucgaacgcuuugagaucuuccccaagaccagcucuuggccuaaucacgauuccaacaagggagugacagccgcuuguccccaugccggcgcgaaaucuuuuuauaagaaucugaucuggcucguuaaaaagggcaacagcuacccuaaacuguccaagagcuauauuaaugacaaggggaaagaagugcuuguccuguggggaauccaccaccccuccaccaacgccgaucaacagucucucuaccagaaugcugacgccuacguguucgugggcacaagcagauauuccaagaaauuuaagccugagauugcuauccggccgaaaguccgcgaucaggaggggagaaugaacuacuauuggacccugguugaacccggagacaagauuacguucgaggccacaggcaaccugguggugccucgguacgcguuugccauggaacgcaaugcugggagcggaaucauuaucucugauacccccguccaugacugcaacacaaccugucaaaccccuaaaggcgccaucaauacaucccuccccuuccagaacauucacccgaucacgauuggcaagugcccuaaguaugugaaaagcaccaagcugagacuugcuacagggcugcggaauguucccucuauccagagccgcggacucuuuggcgccauugccggguucaucgagggaggcuggaccgggaugguggacggaugguacggcuaucaucaccagaacgaacaaggcuccggguacgcugcggaucugaaaucuacacagaaugccaucgacgagauuaccaacaaggucaauagcgugaucgagaaaaugaacacgcaguuugcugccguuggaaaggaguucaaucaccuugagaagagaauugaaaaccugaauaaaaagguggaugacggcuuccucgauaucuggacauacaacgccgagcugcugguccuccuggaaaaugagcggacccuugacuaucaugauuccaacgugaaaaaccuguacgagaagguccgcagccagcucaaaaauaacgcuaaggaaauugggaauggauguuuugaguucuaucacaagugcgacaacaccuguauggaaucugugaaaaauggcacauacgauuauccuaaguacuccgaggaagccaaacugaacagagaggagaucgacgggguuaaacuugaaagcacccggaucuaucaaauucuggcgaucuacucuacaguggcuuccagccucguccuggugguuucccugggcgccauuucuuuuuggaugugcagcaauggaucccuccagugccgcaucuguauuuga

SEQ ID NO: 195959 - RNA, 1701 nt, Artificial Sequence; identical to SEQ ID NO: 194728
  derived and/or modified CDS sequence (opt5) from hemagglutinin__InfluenzaA__ACZ96819

SEQ ID NO: 195960 - RNA, 1701 nt, Artificial Sequence; identical to SEQ ID NO: 194728
  derived and/or modified CDS sequence (opt5) from hemagglutinin__InfluenzaA__ACZ96829

SEQ ID NO: 195961 - RNA, 1701 nt, Artificial Sequence; identical to SEQ ID NO: 194728
  derived and/or modified CDS sequence (opt5) from hemagglutinin__InfluenzaA__ACZ96839

SEQ ID NO: 195962 - RNA, 1701 nt, Artificial Sequence; identical to SEQ ID NO: 195881
  derived and/or modified CDS sequence (opt5) from hemagglutinin__InfluenzaA__ACZ96849

SEQ ID NO: 195963 - RNA, 1701 nt, Artificial Sequence; identical to SEQ ID NO: 194741
  derived and/or modified CDS sequence (opt5) from hemagglutinin__InfluenzaA__ACZ96859

SEQ ID NO: 195964 - RNA, 1701 nt, Artificial Sequence; identical to SEQ ID NO: 194728
  derived and/or modified CDS sequence (opt5) from hemagglutinin__InfluenzaA__ACZ96869

SEQ ID NO: 195965 - RNA, 1701 nt, Artificial Sequence; identical to SEQ ID NO: 194728
  derived and/or modified CDS sequence (opt5) from hemagglutinin__InfluenzaA__ACZ96879

SEQ ID NO: 195966 - RNA, 1701 nt, Artificial Sequence
  derived and/or modified CDS sequence (opt5) from hemagglutinin__InfluenzaA__ACZ96899
augaaggccauccuggugguccuccuguacaccuucgcuacagccaacgcggacacgcuuugcauuggcuaucacgcuaauaacagcaccgauacaguugacaccgugcuggagaagaaugugacagucacccauuccgugaaccuccuggaagauaagcacaaugggaaacuuuguaagcugagaggaguugcuccccuccaucugggcaaaugcaacaucgccggguggauucugggaaauccugagugugaaucucucagcacagccuccucuuggagcuacaucguggagaccuccucuagcgacaacggcacgugcuauccgggggauuuuauugacuacgaagaacugcgggagcagcuuuccagcgucucuuccuucgaacgcuuugagaucuuccccaagaccagcucuuggccuaaucacgauuccaacaagggagugacagccgcuuguccccaugccggcgcgaaaucuuuuuauaagaaucugaucuggcucguuaaaaagggcaacagcuacccuaaacuguccaagagcuauauuaaugacaaggggaaagaagugcuuguccuguggggaauccaccacuccucuaccagcgccgaucaacagucccucuaccagaacgcugacgccuacguguucgugggcagcucuagauauuccaagaaauuuaagcccgagauugcuauccggccuaaaguccgcgaucaggaggggagaaugaauuacuauuggacacugguugaaccgggagacaagauuaccuucgaggccacgggcaaccugguggugccccgguacgcguuugccauggaacgcaacgcugggagcggaaucauuaucucugauacaccuguccaugacugcaauaccacaugucaaacccccaaaggcgccaucaacaccagccucccuuuccagaauauucaccccaucacaauuggcaagugcccgaaguaugugaaauccacgaagcugagacuugcuaccgggcugcggaacguuccuucuauccagagccgcggacucuuuggcgccauugccggguucaucgagggaggcuggacagggaugguggacggaugguacggcuaucaucaccagaaugaacaaggcuccggguacgcugcggaucugaaaagcacccagaacgccaucgacgagauuacaaauaaggucaacucugugaucgagaaaaugaauacccaguuuacggcuguuggaaaggaguucaaccaccuugagaagagaauugaaaaucugaacaaaaagguggaugacggcuuccucgauaucuggacauacaaugccgagcugcugguccuccuggaaaacgagcggacccuugacuaucaugauuccaaugugaaaaaccuguacgagaagguccgcagccagcucaaaaacaaugccaaggaaauugggaacggauguuuugaguucuaucacaagugcgacaauaccuguauggaaucugugaaaaacggcacauacgauuaucccaaguacuccgaggaagcuaaacugaauagagaggagaucgacgggguuaaacuugaaagcacccggaucuaucaaauucuggccaucuacuccacaguggcgucuagccucguccuggugguuucccugggcgcuauuucuuuuuggaugugcagcaacggaucccuccagugccgcaucuguauuuga

SEQ ID NO: 195967 - RNA, 1701 nt, Artificial Sequence; identical to SEQ ID NO: 194728
  derived and/or modified CDS sequence (opt5) from hemagglutinin__InfluenzaA__ACZ96909

SEQ ID NO: 195968 - RNA, 1701 nt, Artificial Sequence; identical to SEQ ID NO: 194728
  derived and/or modified CDS sequence (opt5) from hemagglutinin__InfluenzaA__ACZ96919

SEQ ID NO: 195969 - RNA, 1701 nt, Artificial Sequence; identical to SEQ ID NO: 194728
  derived and/or modified CDS sequence (opt5) from hemagglutinin__InfluenzaA__ACZ96929

SEQ ID NO: 195970 - RNA, 1701 nt, Artificial Sequence; identical to SEQ ID NO: 194728
  derived and/or modified CDS sequence (opt5) from hemagglutinin__InfluenzaA__ACZ96939

SEQ ID NO: 195971 - RNA, 1701 nt, Artificial Sequence
  derived and/or modified CDS sequence (opt5) from hemagglutinin__InfluenzaA__ACZ96949
augaaggccauccuggugguccuccuguacaccuucgcuacagccaacgcggacacgcuuugcauuggcuaucacgcuaauaacagcaccgauacaguugacaccgugcuggagaaaaaugugacagucacccauuccgugaaccuccuggaagauaagcacaaugggaaacuuuguaagcugagaggaguugcuccccuccaucugggcaaaugcaacaucgccggguggauucugggaaauccugagugugaaucucucagcacagccuccucuuggagcuacaucguggagaccuccucuagcgacaacggcacgugcuauccgggggauuuuauugacuacgaagaacugcgggagcagcuuuccagcgucucuuccuucgaacgcuuugagaucuuccccaagaccagcucuuggccuaaucacgauuccaacaagggagugacagccgcuuguccccaugccggcgcgaaaucuuuuuauaagaaucugaucuggcucguuaaaaagggcaacagcuacccuaaacuguccaagagcuauauuaaugacaaggggaaagaagugcuuguccuguggggaauccaccaccccuccaccucugccgaucaacagagccucuaccagaacgcugacgccuacguguucgugggcuccagcagauauucuaagaaauuuaagccugagauugcuauccggccgaaaguccgcgaucaggaggggagaaugaauuacuauuggacacugguugaacccggagacaagauuaccuucgaggccacgggcaaccugguggugccucgguacgcguuugccauggaacgcaacgcuggguccggaaucauuaucagcgauacacccguccaugacugcaauaccacaugucaaaccccuaaaggcgccaucaacaccucucuccccuuccagaauauucacccgaucacaauuggcaagugcccuaaguaugugaaaagcacgaagcugagacuugcuaccgggcugcggaacguucccuccauccagucucgcggacucuuuggcgccauugccggguucaucgagggaggcuggacagggaugguggacggaugguacggcuaucaucaccagaaugaacaaggcagcggguacgcugcggaucugaaauccacccagaacgccaucgacgagauuacaaauaaggucaacagcgugaucgagaaaaugaauacccaguuuacggcuguuggaaaggaguucaaccaccuugagaagagaauugaaaaucugaacaaaaagguggaugacggcuuccucgauaucuggacauacaaugccgagaugcugguccugcucgaaaacgagcggacccuggacuaucaugauucuaaugugaaaaaccuuuacgagaagguccgcucccagcugaaaaacaaugccaaggaaauugggaacggauguuuugaguucuaucacaagugcgacaauaccuguauggaaagcgugaaaaacggcacauacgauuauccuaaguacucugaggaagcuaaacucaauagagaggagaucgacgggguuaagcuggaauccacccggaucuaucaaauucuugccaucuacagcacaguggcguccucucugguccucgugguuagccugggcgcuauuuccuuuuggaugugcucuaacggaagccugcagugccgcaucuguauuuga

SEQ ID NO: 195972 - RNA, 1701 nt, Artificial Sequence; identical to SEQ ID NO: 194728
  derived and/or modified CDS sequence (opt5) from hemagglutinin__InfluenzaA__ACZ97021

SEQ ID NO: 195973 - RNA, 1701 nt, Artificial Sequence; identical to SEQ ID NO: 195095
  derived and/or modified CDS sequence (opt5) from hemagglutinin__InfluenzaA__ACZ97343

SEQ ID NO: 195974 - RNA, 1701 nt, Artificial Sequence; identical to SEQ ID NO: 195095
  derived and/or modified CDS sequence (opt5) from hemagglutinin__InfluenzaA__ACZ97353

SEQ ID NO: 195975 - RNA, 1701 nt, Artificial Sequence; identical to SEQ ID NO: 194728
  derived and/or modified CDS sequence (opt5) from hemagglutinin__InfluenzaA__ACZ97363

SEQ ID NO: 195976 - RNA, 1701 nt, Artificial Sequence
  derived and/or modified CDS sequence (opt5) from hemagglutinin__InfluenzaA__ACZ97383
augaaggccauccuggugguccuccuguacaccuucgcuacagccaacgcggacacgcuuugcauuggcuaucacgcuaauaacagcaccgauacaguugacaccgugcuggagaagaaugugacagucacccauuccgugaaccuccuggaagauaagcacaaugggaaacuuuguaagcugagaggaguugcuccccuccaucugggcaaaugcaacaucgccggguggauucugggaaauccugagugugaaucucucagcacagccuccucuuggagcuacaucguggagaccuccacgucugacaacgggaccugcuauccgggcgauuuuauugacuacgaagaacugcgggagcagcuuagcuccgucagcucuuucgaacgcuuugagaucuuccccaagacauccagcuggccuaaucacgauucuaacaagggagugaccgccgcuuguccccaugccggcgcgaaauccuuuuauaagaaucugaucuggcucguuaaaaagggcaacagcuacccuaaacugucuaaguccuauauuaaugacaaggggaaagaagugcuuguccuguggggaauccaccaccccagcacauccgccgaucaacagucucucuaccagaacgcugacgccuacguguucgugggcagcuccagauauagcaagaaauuuaagccugagauugcuauccggccgaaaguccgcgaucaggaggggagaaugaauuacuauuggacccugguugaacccggagacaagauuacguucgaggccacaggcaaccugguggugccucgguacgcguuugccauggaacgcaacgcugggucuggaaucauuaucuccgauacccccguccaugacugcaauacaaccugucaaaccccuaaaggcgccaucaacacaagccuccccuuccagaauauucacccgaucacgauuggcaagugcccuaaguaugugaaaucuaccaagcugagacuugcuacagggcugcggaacguucccagcauccagucccgcggacucuuuggcgccauugccggguucaucgagggaggcuggaccgggaugguggacggaugguacggcuaucaucaccagaaugaacaaggcucuggguacgcugcggaucugaaaagcacacagaacgccaucgacgagauuaccaauaaggucaacuccgugaucgagaaaaugaauacgcaguuuacagcuguuggaaaggaguucaaccaccuugagaagagaauugaaaaucugaacaaaaagguggaugacggcuuccucgauaucuggaccuacaaugccgagcugcugguccuccuggaaaacgagcggacccuugacuaucaugauagcaaugugaaaaaccuguacgagaagguccgcucucagcucaaaaacaaugccaaggaaauugggaacggauguuuugaguucuaucacaagugcgacaauacauguauggaauccgugaaaaacggcaccuacgauuauccuaaguacagcgaggaagcuaaacugaauagagaggagaucgacgggguuaaacuugaaucuacacggaucuaucaaauucuggccaucuacuccacgguggcgagcucccucguccuggugguuucucugggcgcuauuagcuuuuggaugugcuccaacggaucucuccagugccgcaucuguauuuga

SEQ ID NO: 195977 - RNA, 1701 nt, Artificial Sequence; identical to SEQ ID NO: 194728
  derived and/or modified CDS sequence (opt5) from hemagglutinin__InfluenzaA__ACZ97393

SEQ ID NO: 195978 - RNA, 1701 nt, Artificial Sequence
  derived and/or modified CDS sequence (opt5) from hemagglutinin__InfluenzaA__ACZ98178
augaaggccauccuggugguccuccuguacaccuucgcuacagccaacgcggacacgcuuugcauuggcuaucacgcuaauaacagcaccgauacaguugacaccgugcuggagaaaaaugugacagucacccauuccgugaaccuccuggaagauaagcacuacgggaaacuuuguaagcugagaggaguugcuccccuccaucugggcaaaugcaauaucgccggguggauucugggaaacccugagugugaaucucucagcacagccuccucuuggagcuauaucguggagaccuccucuagcgacaauggcacgugcuacccgggggauuuuauugacuaugaagaacugcgggagcagcuuuccagcgucucuuccuucgaacgcuuugagaucuuccccaagaccagcucuuggccuaaccacgauuccaauaagggagugacaaccgccuguccccaugcuggcgccaagagcuuuuacaagaaccugaucuggcucguuaaaaagggcaauucuuauccuaaacuguccaagagcuacauuaacgacaaggggaaagaagugcuuguccuguggggaauccaccaccccuccacaucugcggaucaacagagccucuaccagaaugccgacgcuuauguguucgugggcaccuccagauacagcaagaaauuuaagccugagauugccauccggccgaaaguccgcgaucaggaggggagaaugaacuauuacuggacgcugguugaacccggagacaagauuacauucgaggcuaccggcaaucugguggugccucgguaugccuuugcgauggaacgcaacgccgggucuggaaucauuaucuccgauacacccguccaugacugcaacaccaccugucaaacaccuaaaggcgcuaucaauacgagccuccccuuccagaacauucacccgaucaccauuggcaagugcccuaaguacgugaaaucuacaaagcugagacuugccaccgggcugcggaauguucccagcauccagucccgcggacucuuuggcgcuauugccggguucaucgagggaggcuggacagggaugguggacggaugguauggcuaccaucaccagaacgaacaaggcucuggguacgccgcugaucugaaaagcacccagaaugcgaucgacgagauuacgaacaaggucaauuccgugaucgagaaaaugaacacacaguuuaccgccguuggaaaggaguucaaucaccuugagaagagaauugaaaaccugaauaaaaagguggaugacggcuuccucgauaucuggaccuauaacgcugagcugcugguccuccuggaaaaugagcggacacuugacuaccaugauagcaacgugaaaaaucuguaugagaagguccgcucucagcucaaaaacaacgccaaggaaauugggaauggauguuuugaguucuaccacaagugcgacaacaccuguauggaauccgugaaaaauggcacauaugauuacccuaaguauagcgaggaagccaaacugaacagagaggagaucgacgggguuaaacuugaaucuacgcggaucuaccaaauucuggcuaucuacuccaccguggccagcucccucguccuggugguuucucugggcgcgauuagcuuuuggaugugcuccaauggaucucuccagugccgcaucuguauuuga

SEQ ID NO: 195979 - RNA, 1701 nt, Artificial Sequence; identical to SEQ ID NO: 194728
  derived and/or modified CDS sequence (opt5) from hemagglutinin__InfluenzaA__ACZ98188

SEQ ID NO: 195980 - RNA, 1701 nt, Artificial Sequence; identical to SEQ ID NO: 194921
  derived and/or modified CDS sequence (opt5) from hemagglutinin__InfluenzaA__ACZ98198

SEQ ID NO: 195981 - RNA, 1701 nt, Artificial Sequence; identical to SEQ ID NO: 194741
  derived and/or modified CDS sequence (opt5) from hemagglutinin__InfluenzaA__ACZ98208

SEQ ID NO: 195982 - RNA, 1701 nt, Artificial Sequence; identical to SEQ ID NO: 194741
  derived and/or modified CDS sequence (opt5) from hemagglutinin__InfluenzaA__ACZ98218

SEQ ID NO: 195983 - RNA, 1701 nt, Artificial Sequence; identical to SEQ ID NO: 194741
  derived and/or modified CDS sequence (opt5) from hemagglutinin__InfluenzaA__ACZ98228

SEQ ID NO: 195984 - RNA, 1701 nt, Artificial Sequence; identical to SEQ ID NO: 194741
  derived and/or modified CDS sequence (opt5) from hemagglutinin__InfluenzaA__ACZ98238

SEQ ID NO: 195985 - RNA, 1701 nt, Artificial Sequence; identical to SEQ ID NO: 195370
  derived and/or modified CDS sequence (opt5) from hemagglutinin__InfluenzaA__ACZ98248

SEQ ID NO: 195986 - RNA, 1701 nt, Artificial Sequence; identical to SEQ ID NO: 194741
  derived and/or modified CDS sequence (opt5) from hemagglutinin__InfluenzaA__ACZ98258

SEQ ID NO: 195987 - RNA, 1701 nt, Artificial Sequence; identical to SEQ ID NO: 194741
  derived and/or modified CDS sequence (opt5) from hemagglutinin__InfluenzaA__ACZ98268

SEQ ID NO: 195988 - RNA, 1701 nt, Artificial Sequence; identical to SEQ ID NO: 195881
  derived and/or modified CDS sequence (opt5) from hemagglutinin__InfluenzaA__ACZ98278

SEQ ID NO: 195989 - RNA, 1701 nt, Artificial Sequence; identical to SEQ ID NO: 195881
  derived and/or modified CDS sequence (opt5) from hemagglutinin__InfluenzaA__ACZ98288

SEQ ID NO: 195990 - RNA, 1701 nt, Artificial Sequence
  derived and/or modified CDS sequence (opt5) from hemagglutinin__InfluenzaA__ACZ98298
augaaggccauccuggugguccuccuguacaccuucgcuacagccaacgcggacacgcuuugcauuggcuaucacgcuaauaacagcaccgauacaguugacaccgugcuggagaaaaaugugacagucacccauuccgugaaccuccuggaagauaagcacaaugggaaacuuuguaagcugagaggaguugcgccccuccaucugggcaaaugcaacaucgccggguggauucugggaaauccugagugugaaucucucagcacagcuuccucuuggagcuacaucguggagaccuccucuagcgacaacggcacgugcuauccgggggauuuuauugacuacgaagaacugcgggagcagcuuuccagcgucucuuccuucgaaaaguuugagaucuuccccaagaccagcucuuggccuaaucacgauuccaacaaaggagugacagccgcuuguccccaugccggcgccaagagcuuuuauaaaaaucugaucuggcucguuaagaaaggcaacucuuacccuaagcuguccaagagcuauauuaaugacaaagggaaggaagugcuuguccuguggggaauccaccaccccuccaccucugccgaucaacagagccucuaccagaacgcugacgccuacguguucgugggcuccagccgcuauucuaaaaaguuuaaaccugagauugcuaucagaccgaagguccgggaucaggaggggcgcaugaauuacuauuggacacugguugaacccggagacaaaauuaccuucgaggccacgggcaaccugguggugccuagauacgcguuugccauggaacggaacgcuggguccggaaucauuaucagcgauacacccguccaugacugcaauaccacaugucaaaccccuaagggcgccaucaacaccucucuccccuuccagaauauucacccgaucacaauuggcaagugcccuaaauauguuaagagcacgaaacugcgccuugcuaccgggcugagaaacgugcccuccauccagucucggggacucuuuggcgccauugccggguucaucgagggaggcuggacagggaugguggacggaugguacggcuaucaucaccagaaugaacaaggcagcggguacgcugcggaucugaaguccacccagaacgccaucgacggaauuacaaauaaagucaacagcgugaucgagaagaugaauacccaguuuacggcuguuggcaaggaguucaaccaccuugaaaaacgcauugagaaucugaacaagaaaguggaugacggguuccucgauaucuggacauacaaugccgaacugcugguccuccuggagaacgaaagaacccuugacuaucaugauucuaaugugaagaaccuguacgagaaaguccggucccagcucaagaacaaugccaaggagauuggaaacggcuguuuugaguucuaucacaaaugcgacaauaccuguauggagagcgugaagaacgggacauacgauuauccuaaauacucugaagaggcuaagcugaaucgcgaagagaucgacggcguuaaacuugaguccaccagaaucuaucaaauucuggccaucuacagcacaguggcguccucucucguccuggugguuagccugggagcuauuuccuuuuggaugugcucuaacggcagccuccagugccggaucuguauuuga

SEQ ID NO: 195991 - RNA, 1701 nt, Artificial Sequence
  derived and/or modified CDS sequence (opt5) from hemagglutinin__InfluenzaA__ACZ98318
augaaggccauccuggugguccuccuguacaccuucgcuacagccaacgcggacacgcuuugcauuggcuaucacgcuaauaacagcaccgauacaguugacaccgugcuggagaagaaugugacagucacccauuccgugaaccuccuggaagauaagcacaaugggaaacuuuguaagcugagaggaguugcuccccuccaucugggcaaaugcaacaucgccggguggauucugggaaauccugagugugaaucucucagcacagccuccucuuggagcuacaucguggagaccuccucuagcgacaacggcacgugcuauccgggggauuuuauugacuacgaagaacugcgggagcagcuuuccagcgucucuuccuucgaacgcuuugagaucuuccccaagaccagcucuuggccuaaucacgauuccaacaagggagugacagccgcuuguccccaugccggcgcgaaaucuuuuuauaagaaucugaucuggcucguuaaaaagggcaacagcuacccuaaacuguccaagagcuauauuaaugacaaggggaaagaagugcuuguccuguggggaauccaccaccccuccaccucugccgaucaacagagccucuaccagaacgcugacgccuacguguucgugggcacauccagauauagcaagaaauuuaagccugagauugcuauccggccgaaaguccgcgaucaggaggggagaaugaauuacuauuggacccugguugaacccggagacaagauuacguucgaggccacaggcaaccugguggugccucgguacgcguuugccauggaacgcaacgcugggucuggaaucauuaucuccgauacccccguccaugacugcaauacaaccugucaaaccccuaaaggcgccaucaacacaagccuccccuuccagaauauucacccgaucacgauuggcaagugcccuaaguaugugaaaucuaccaagcugagacuugcuacagggcugcggaacguucccagcauccagucccgcggacucuuuggcgccauugccggguucaucgagggaggcuggaccgggaugguggacggaugguacggcuaucaucaccagaaugaacaaggcucuggguacgcugcggaucugaaaagcacacagaacgccaucgacgagauuaccaauaaggucaacuccgugaucgagaaaaugaauacgcaguuuacagcuguuggaaaggaguucaaccaccuugagaagagaauugaaaaucugaacaaaaagguggaugacggcuuccucgauaucuggaccuacaaugccgagcugcugguccuccuggaaaacgagcggacccuugacuaucaugauagcaaugugaaaaaccuguacgagaagguccgcucucagcucaaaaacaaugccaaggaaauugggaacggauguuuugaguucuaucacaagugcgacaauacauguauggaauccgugaaaaacggcaccuacgauuauccuaaguacagcgaggaagcuaaacugaauagagaggagaucgacgggguuaaacuugaaucuacacggaucuaucauauucuggccaucuacuccacgguggcgagcucccucguccuggugguuucucugggcgcuauuagcuuuuggaugugcuccaacggaucucuccaaugccgcaucuguauuuga

SEQ ID NO: 195992 - RNA, 1701 nt, Artificial Sequence; identical to SEQ ID NO: 194983
  derived and/or modified CDS sequence (opt5) from hemagglutinin__InfluenzaA__ACZ98328

SEQ ID NO: 195993 - RNA, 1701 nt, Artificial Sequence; identical to SEQ ID NO: 194741
  derived and/or modified CDS sequence (opt5) from hemagglutinin__InfluenzaA__ACZ98338

SEQ ID NO: 195994 - RNA, 1701 nt, Artificial Sequence; identical to SEQ ID NO: 195881
  derived and/or modified CDS sequence (opt5) from hemagglutinin__InfluenzaA__ACZ98348

SEQ ID NO: 195995 - RNA, 1701 nt, Artificial Sequence; identical to SEQ ID NO: 194741
  derived and/or modified CDS sequence (opt5) from hemagglutinin__InfluenzaA__ACZ98358

SEQ ID NO: 195996 - RNA, 1701 nt, Artificial Sequence; identical to SEQ ID NO: 194741
  derived and/or modified CDS sequence (opt5) from hemagglutinin__InfluenzaA__ACZ98368

SEQ ID NO: 195997 - RNA, 1701 nt, Artificial Sequence; identical to SEQ ID NO: 194983
  derived and/or modified CDS sequence (opt5) from hemagglutinin__InfluenzaA__ACZ98388

SEQ ID NO: 195998 - RNA, 1701 nt, Artificial Sequence; identical to SEQ ID NO: 194741
  derived and/or modified CDS sequence (opt5) from hemagglutinin__InfluenzaA__ACZ98398

SEQ ID NO: 195999 - RNA, 1701 nt, Artificial Sequence; identical to SEQ ID NO: 194741
  derived and/or modified CDS sequence (opt5) from hemagglutinin__InfluenzaA__ACZ98408

SEQ ID NO: 196000 - RNA, 1701 nt, Artificial Sequence; identical to SEQ ID NO: 194921
  derived and/or modified CDS sequence (opt5) from hemagglutinin__InfluenzaA__ACZ98418

SEQ ID NO: 196001 - RNA, 1701 nt, Artificial Sequence; identical to SEQ ID NO: 194741
  derived and/or modified CDS sequence (opt5) from hemagglutinin__InfluenzaA__ACZ98428

SEQ ID NO: 196002 - RNA, 1701 nt, Artificial Sequence; identical to SEQ ID NO: 194741
  derived and/or modified CDS sequence (opt5) from hemagglutinin__InfluenzaA__ACZ98438

SEQ ID NO: 196003 - RNA, 1701 nt, Artificial Sequence; identical to SEQ ID NO: 194741
  derived and/or modified CDS sequence (opt5) from hemagglutinin__InfluenzaA__ACZ98448

SEQ ID NO: 196004 - RNA, 1701 nt, Artificial Sequence; identical to SEQ ID NO: 195881
  derived and/or modified CDS sequence (opt5) from hemagglutinin__InfluenzaA__ACZ98458

SEQ ID NO: 196005 - RNA, 1701 nt, Artificial Sequence
  derived and/or modified CDS sequence (opt5) from hemagglutinin__InfluenzaA__ACZ98546
augaaggccauccuggugguccuccuguacaccuucgcuacagccaacgcggacacgcuuugcauuggcuaucacgcuaauaacagcaccgauacaguugacaccgugcuggagaagaaugugacagucacccauuccgugaaccuccuggaagauaagcacaaugggaaacuuuguaagcugagaggaguugcuccccuccaucugggcaaaugcaacaucgccggguggauucugggaaauccugagugugaaucucucagcacagccuccucuuggagcuacaucguggagaccuccucuagcgacaacggcacgugcuauccgggggauuuuauugacuacgaagaacugcgggagcagcuuuccagcgucucuuccuucgaacgcuuugagaucuuccccaagaccagcucuuggccuaaucacgaucccaacaagggagugacagccgcuuguccucaugccggcgcgaaauccuuuuauaagaaucugaucuggcucguuaaaaagggcaacagcuaccccaaacugucuaaguccuauauuaaugacaaggggaaagaagugcuuguccuguggggaauccaccacccuagcaccuccgccgaucaacagucucucuaccagaacgcugacgccuacguguucgugggcacaagcagauauuccaagaaauuuaagccggagauugcuauccggcccaaaguccgcgaucaggaggggagaaugaauuacuauuggacccugguugaaccuggagacaagauuacguucgaggccacaggcaaccugguggugccccgguacgcguuugccauggaacgcaacgcugggagcggaaucauuaucucugauaccccuguccaugacugcaauacaaccugucaaacccccaaaggcgccaucaacacaucccucccguuccagaauauucacccuaucacgauuggcaagugccccaaguaugugaaaagcaccaagcugagacuuacaaccgggcugcggaacguuccuucuauccaguaccgcggacucuuuggcgcuauuacaggguucaucgagggaggcuggaccgggaugguggacggaugguauggcuaccaucaccagaaugaacaaggcagcggguacgccgccgaucugaaauccacgcagaacgcuaucgacgagauuacaaauaaggucaacucugugaucgagaaaaugaauacccaguuuaccgcgguuggaaaggaguucaaccaccuugagaagagaauugaaaaucugaacaaaaagguggaugacggcuuccucgauaucuggacauauaaugccgagcugcugguccuccuggaaaacgagcggacccuugacuaccaugauagcaaugugaaaaaccuguaugagaagguccgcucccagcucaaaaacaaugcuaaggaaauugggaacggauguuuugaguucuaccacaagugcgacaauacauguauggaaagcgugaaaaacggcacguaugauuaccccaaguauucugaggaagccaaacugaauagagaggagaucgacgggguuaaacuugaauccacccggaucuaccaaauucuggccaucuacagcacaguggcuucuucccucguccuggugguuagccugggcgccauuuccuuuuggaugugcucuaacggaagccuccagugccgcaucuguauuuga

SEQ ID NO: 196006 - RNA, 1701 nt, Artificial Sequence
  derived and/or modified CDS sequence (opt5) from hemagglutinin__InfluenzaA__ACZ98560
augaaggccaucagagugguccugcucuacaccuucgcuacagccaacgcggacacgcugugcauuggcuaucacgcuaauaacagcaccgauacaguugacaccgugcuugagaaaaaugugacagucacccauuccgugaaccugcucgaagauaagcacaaugggaaacuguguaaacuucggggaguugcuccccugcaucucggcaagugcaacaucgccggguggauucugggaaauccugagugugaaucucugagcacagccuccucuuggagcuacaucguggagaccuccucuagcgacaacggcacgugcuauccgggggauuuuauugacuacgaagaacuccgcgagcagcuguccagcgucucuuccuucgaaagauuugagaucuuccccaagaccagcucuuggccuaaucacgaucccaacaagggagugacagccgcuuguccucaugccggcgcgaaauccuuuuauaagaaucuuaucuggcugguuaaaaagggcaacagcuaccccaaacucucuaaguccuauauuaaugacaaggggaaagaagugcugguccuuuggggaauccaccacccuagcaccuccgccgaucaacagucucuguaccagaacgcugacgccuacguguucgugggcacaagccgguauuccaagaaauuuaagccggagauugcuauccgccccaaagucagagaucaggaggggcggaugaauuacuauuggacccucguugaaccuggagacaagauuacguucgaggccacaggcaaccugguggugccccgcuacgcguuugccauggaaagaaacgcugggagcggaaucauuaucucugauaccccuguccaugacugcaauacaaccugucaaacccccaaaggcgccaucaacacaucccugccguuccagaauauucacccuaucacgauuggcaagugccccaaguaugugaaaagcccuaagcuccggcuggcuaccgggaugcgcaacguucccuuuauccaguacagaggacuuuucggcgccauuacaggguuuaucgagggaggcuggaccgggaugguggacggaugguauggcuaccaucaccagaaugaacaaggcucuggguacgccgcugaucugaaaagcacacagaacgcgaucgacgagauuaccaauaaggucaacuccgugaucgagaaaaugaauacgcaguucacagccguuggaaaggaguucaaccaccucgagaagcggauugaaaaucugaacaaaaagguggaugacggcuuucuugauaucuggaccuauaaugcugagcugcucguccugcuggaaaacgagcgcacccucgacuaccaugauucuaaugugaaaaaccuguaugagaaggucagaagccagcuuaaaaacaaugccaaggaaauugggaacggauguuucgaguuuuaccacaagugcgacaauacauguauggaauccgugaaaaacggcaccuaugauuaccccaaguauagcgaggaagccaaacugaaucgggaggagaucgacgggguuaagcucgaaucuacacgcaucuaccaaauucuggcuaucuacuccacgguggccagcucucuuguccuggugguuucccucggcgcgauuagcuucuggaugugcuccaacggaucucugcagugcagaaucuguauuuga

SEQ ID NO: 196007 - RNA, 1701 nt, Artificial Sequence
  derived and/or modified CDS sequence (opt5) from hemagglutinin__InfluenzaA__ACZ98567
augaaggccauccuggugguccuccuguacaccuucgcuacagccaacgcggacacgcuuugcauuggcuaucacgcuaauaacagcaccgauacaguugacaccgugcuggagaaaaaugugacagucacccauuccgugaaccuccuggaagauaagcacaaugggaaacuuuguaagcugagaggaguugcuccccuccaucugggcaaaugcaacaucgccggguggauucugggaaauccugagugugaaucucucagcacagccuccucuuggagcuacaucguggagaccuccucuagcgacaacggcacgugcuauccgggggauuuuauugacuacgaagaacugcgggagcagcuuuccagcgucucuuccuucgaacgcuuugagaucuuccccaagaccagcucuuggccuaaucacgaucccaacaagggagugacagccgcuuguccucaugccggcgcgaaauccuuuuauaagaaucugaucuggcucguuaaaaagggcaacagcuaccccaaacugucuaaguccuauauuaaugacaaggggaaagaagugcuuguccuguggggaauccaccacccuagcaccuccgccgaucaacagucucucuaccagaacgcugacgccuacguguucgugggcacaagcagauauuccaagaaauuuaagccggagauugcuauccggcccaaaguccgcgaucaggaggggagaaugaauuacuauuggacccugguugaaccuggagacaagauuacguucgaggccacaggcaaccugguggugccccgguacgcguuugccauggaacgcaacgcugggagcggaaucauuaucucugauaccccuguccaugacugcaauacaaccugucaaacccccaaaggcgccaucaacacaucccucccguuccagaauauucacccuaucacgauuggcaagugccccaaguaugugaaaagcccuaagcugagacuugcuucugggaugcggaacguucccuuuauccagagccgcggacuguucggcgccauuaccggguuuaucgaggaaggauggacaggcaugguggacgggugguacggauuccaucaccagaaugagcaaggcuccggcuaugccgcugaucucaaaucuacccagaacgcgaucgacgagauuacaaauaaggucaacagcgugaucgagaaaaugaauacccaguucacggccguugggaaggaguuuaaccaccuggaaaagagaauugagaaucuuaacaaaaagguggaugacggauuccuggauaucuggacauacaaugcugaacuccugguccugcucgagaacgagcggacccuggacuaccaugauuccaaugugaaaaaccuuuaugaaaagguccgcagccagcugaaaaacaaugccaaggagauuggcaacggguguuuugaguucuaccacaagugcgacaauaccuguauggaaucugugaaaaacggaacauaugauuaccccaaguauuccgaagaggccaaacucaauagagaggaaaucgacggcguuaagcuggagagcacccggaucuaccaaauucuugcuaucuauucuacaguggccuccagccugguccucgugguuucccugggggcgauuucuuuuuggaugugcagcaacggcucccugcagugccgcaucuguauuuga

SEQ ID NO: 196008 - RNA, 1701 nt, Artificial Sequence; identical to SEQ ID NO: 194728
  derived and/or modified CDS sequence (opt5) from hemagglutinin__InfluenzaA__ACZ98671

SEQ ID NO: 196009 - RNA, 1701 nt, Artificial Sequence; identical to SEQ ID NO: 194728
  derived and/or modified CDS sequence (opt5) from hemagglutinin__InfluenzaA__ACZ98681

SEQ ID NO: 196010 - RNA, 1701 nt, Artificial Sequence; identical to SEQ ID NO: 194741
  derived and/or modified CDS sequence (opt5) from hemagglutinin__InfluenzaA__ACZ98691

SEQ ID NO: 196011 - RNA, 1701 nt, Artificial Sequence
  derived and/or modified CDS sequence (opt5) from hemagglutinin__InfluenzaA__ADA60799
augaaggccauccuggugguccuccuguacaccuucgcuacagccaacgcggacacgcuuugcauuggcuaucacgcuaauaacagcaccgauacaguugacaccgugcuggagagaaaugugacagucacccauuccgugaaccuccuggaagauaaacacaaugggaagcuguguaaacugcggggaguugcgccccuccaucugggcaagugcaacaucgccggguggauucugggaaauccugagugugaaucucucagcacagcuuccucuuggagcuacaucguggagaccuccucuagcgacaacggcacgugcuauccgggggauuuuauugacuacgaagaacugcgcgagcagcuuuccagcgucucuuccuucgaaagauuugagaucuuccccaaaaccagcucuuggccuaaucacgauuccaacaagggagugacagccgcuuguccccaugccggcgccaagagcuuuuauaaaaaucugaucuggcucguuaagaaaggcaacucuuacccuaagcuguccaaaagcuauauuaaugacaaggggaaggaagugcuuguccuguggggaauccaccaccccuccaccucugccgaucaacagagccucuaccagaacgcugacgccuacguguucgugggcacaucccgguauagcaaaaaguuuaaaccugagauugcuauccgcccgaaggucagagaucaggaggggcggaugaauuacuauuggacccugguugaacccggagacaaaauuacguucgaggccacaggcaaccugguggugccucgcuacgcguuugccauggaaagaaacgcugggucuggaaucauuaucuccgauacccccguccaugacugcaauacaaccugucaaaccccuaagggcgccaucaacacaagccuccccuuccagaauauucacccgaucacgauuggcaaaugcccuaaguaugugaagucuaccaaacugcggcuugcuacagggcugcgcaacauccccagcauucaguccagaggacucuuuggcgccaucgccggguucaucgagggaggcuggaccgggaugguugacggaugguacggcuaucaucaccagaaugaacaaggcucuggguacgcugcggaucuuaagagcacacagaacgccauugacgagaucaccaauaaagugaacuccgucauugagaagaugaauacgcaguuuacagcugugggaaaagaguucaaccaccuugagaagcggaucgaaaaucugaacaagaaaguugaugacggcuuccucgauauuuggaccuacaaugccgagcugcuggugcuccuggaaaacgagcgcacccuugacuaucaugauagcaaugucaagaaccuguacgagaaagugagaucucagcucaagaacaaugccaaagaaaucgggaacggauguuuugaguucuaucacaagugcgacaauacauguauggaauccgucaagaacggcaccuacgauuauccuaaauacagcgaggaagcuaagcugaaucgggaggagaucgacggggugaaacuugaaucuacacgcauuuaucaaauccuggccauuuacuccacgguugcgagcucccucgugcuggucgugucucugggcgcuaucagcuuuuggaugugcuccaacggaucucuccagugcagaauuuguaucuga

SEQ ID NO: 196012 - RNA, 1701 nt, Artificial Sequence; identical to SEQ ID NO: 195905
  derived and/or modified CDS sequence (opt5) from hemagglutinin__InfluenzaA__ADA69302

SEQ ID NO: 196013 - RNA, 1701 nt, Artificial Sequence; identical to SEQ ID NO: 195905
  derived and/or modified CDS sequence (opt5) from hemagglutinin__InfluenzaA__ADA69312

SEQ ID NO: 196014 - RNA, 1701 nt, Artificial Sequence; identical to SEQ ID NO: 195905
  derived and/or modified CDS sequence (opt5) from hemagglutinin__InfluenzaA__ADA69322

SEQ ID NO: 196015 - RNA, 1701 nt, Artificial Sequence; identical to SEQ ID NO: 195905
  derived and/or modified CDS sequence (opt5) from hemagglutinin__InfluenzaA__ADA69332

SEQ ID NO: 196016 - RNA, 1701 nt, Artificial Sequence; identical to SEQ ID NO: 195842
  derived and/or modified CDS sequence (opt5) from hemagglutinin__InfluenzaA__ADA70329

SEQ ID NO: 196017 - RNA, 1698 nt, Artificial Sequence
  derived and/or modified CDS sequence (opt5) from hemagglutinin__InfluenzaA__ADA71150
augaaggugaaacugcucguccugcuuugcaccuucacagccacguacgcugacaccaucuguauuggcuaucacgccaacaauagcacagauaccguugacacagugcuggagaagaacgugaccgucacacauuccgugaaucucguugaaaacucucacaaugggaaacugugccuucugaagggaaucgcgccccuccagcugggcaacuguagcguggcuggguggauucugggaaauccugagugcgaacuccugaucuccaaagagucuuggagcuacauugucgaaaagccgaaccccgagaauggcaccuguuauccugggcauuuugccgauuacgaggaacuuagagagcaacuguccucugugagcuccuucgaacgguuugagaucuuccccaaggagagcucuuggccuaaccacacgguuaccggaguguccgccagcugcucucauaauggcgaauccagcuuuuaucgcaaccuccuguggcuuacaggcaaaaaugggcuguaccccaaccucucuaaguccuaugcuaauaacaaagagaaggaaguccuggugcuguggggagugcaccacccuccgagcaucuccaaccagaaaacccucuaccauacagagaaugccuacgucucuguugugagcucccacuauagcagaaaguucacccccgaaauugcuaagcggccuaaagugcgcgaccaggagggcagaaucaacuacuauuggacgcugcuugagcccggggauacaauuaucuuugaagccaauggaaaccugauugcgccucgguacgccuucgcucucucucgcggcuuuggguccggaaucauuaauagcaacgcccccauggacaagugugaugcuaaaugccagaccccgcaaggcgccaucaauucuagccugccuuuccagaacguccaucccgugacaaucggcgaguguccuaaguauguuagauccgcgaaacuucggauggugaccgggcugcgcaauauucccucuauccagagcagaggacucuuuggcgccauugcuggguucaucgaaggaggcuggaccgggauggucgacggaugguacggcuaucaccaccagaacgagcaaggcuccggguacgccgcugaucagaagucuacacagaaugccauuaacggaaucacgaaaaaggugaauagcguuaucgaaaagaugaacacccaguuuacagccgugggcaaagaguucaauaagcuggagcggcgcauggaaaaccugaacaaaaaggucgacgauggguucauugacaucuggaccuacaaugcugagcuccuggugcuucuggaaaacgagagaacacucgauuuucaugacuccaaugucaaaaaccuguaugaaaagguuaagagccaacuuaaaaauaacgcgaaggagauuggaaauggcugcuucgaguuuuaccacaaauguaacgacgaaugcauggagucugugaagaaugggaccuaugauuaccccaaauauuccgaagagagcaagcugaaccgggagaagaucgacggcgugaaacucgaauccaugggagucuaccagauucuggccaucuauucuacgguggcuagcucccugguucuccuggugucucuuggcgccaucagcuucuggaugugcuccaaugggagccugcagugucgcauuugcaucuga

SEQ ID NO: 196018 - RNA, 1701 nt, Artificial Sequence
  derived and/or modified CDS sequence (opt5) from hemagglutinin__InfluenzaA__ADA71152
augaagaccaucauugcccugagcuacauccucugccugguguucgcucagaaacuucccggcaacgacaauuccacagccacgcugugucucgggcaccaugcggucccuaacggaaccauuguuaagacaaucaccaaugaucaaauugaggugacaaacgcuaccgaacuggugcagucuagcuccacaggcgagaucugcgacucuccgcaccagauccuugaugggggaaauuguacccugauugacgcccuccugggcgauccccagugcgacggguuucaaaacaaaaagugggaucuguucgucgaaagaagcaaagccuauuccaauuguuacccuuaugacgugcccgauuacgcuucucuccggagccugguugccuccagcggaacgcuugaguuuaacaaugaaucuuucaacuggaccggcgugacacagaauggcaccuccagcgcuugcauccgcagaucuaacaauuccuuuuucagccggcugaacuggcucacacaucugaaguuuaaguauccugcccuuaaugucaccaugcccaacaacgagcaguucgacaaacuguacauuuggggagugcaccauccugggacggauaaugaccagaucuuucucuaugcgcaagccucuggccgcauuacaguuuccaccaagagaagccagcagacagugaucccgaacauugggucccggccccgcgucagaaauaucccuucucggaucagcauuuacuggaccaucgugaaacccggagauauucugcugaucaacuccaccggcaaucucauugcuccucgcggguacuucaagaucagaagcggaaaaucuuccaucaugcggagcgacgcccccauuggcaaguguaacucugagugcaucacaccgaauggcagcauuccuaacgacaagcccuuucagaaugugaaccgcaucacguauggggcuuguccuagauacgucaaacaaaauacccugaaacuugccacaggaaugcggaacguucccgaaaaacagacccgcggcauuuucggggcgaucgccggauuuaucgagaauggcugggaagggaugguggauggaugguauggcuucagacaccagaacuccgagggccgggggcaagcugccgaccugaagucuacacaggcugccauugaucagaucaauggaaaacucaacagacugauuggcaagaccaacgagaaauuccaccagaucgaaaaggaguuuagcgaaguggaggggcgcauucaagaccuugaaaaguacgucgaggauacgaaaaucgaccugugguccuauaaugccgagcuccugguggcucuggaaaaccagcauacaauugaucucaccgacagcgagaugaauaagcuguucgaaaagaccaagaaacagcuucgggagaacgcggaagauaugggaaauggcugcuuuaagaucuaccacaagugugacaacgccugcaucgggucuauuagaaauggcacauaugaucaugacguuuaccgcgacgaggcucugaacaaucgguuccagaucaaaggaguggagcucaaguccggcuacaaagauuggauucuguggaucagcuuugccauuucuugcuuccuucugugugucgcccuccugggguuuaucaugugggcuugccaaaagggaaacaucagauguaauauuugcaucuga

SEQ ID NO: 196019 - RNA, 1698 nt, Artificial Sequence
  derived and/or modified CDS sequence (opt5) from hemagglutinin__InfluenzaA__ADA71154
augaaggugaaacugcucguccugcuuugcaccuucacagccacguacgcugacaccaucuguauuggcuaucacgccaacaauagcacagauaccguugacacagugcuggagaagaacgugaccgucacacauuccgugaaucuccuggaaaacucucacaaugggaaacuuugccugcucaagggaaucgcgccccugcagcugggcaacuguagcguugcuggguggauucucggaaauuccgagugcgaacugcuuaucucuaaagagagcugguccuacauuguggaaaagccuaacccggagaauggcaccuguuauuuugggcauuucgccgauuacgaggaacugagagagcaauuuggaucugucagcuccuucgaacgguuugagaucuuccccaaggagagcucuuggccuaaccacacggugaccggcguuuccgccagcugcucucauaauggcgaauccagcuuuuaucgcaaccuccuguggcuuacagggaaaaauggacuguaccccaaccucucuaaguccuaugcuaauaacaaagagaaggaagugcugguccuguggggcgugcaccacccucccagcaucaacgaccagaaaacccucuaccauacagagaaugccuacguguccgucguuucuagccacuauuccagaaaguucaccccugaaauugcuaagcggccgaaagugcgcgaucaggaggggagaaucaacuacuauuggacgcugcuugagccccgggacacaauuaucuuugaagccaauggaaaccugauugcgccucgcuacgccuucgcucucagcagaggcuuugggucuggaaucauuaauuccaacgcccccauggauaagugugacgcuaaaugccagaccccucaaggcgccaucaauagcucucugcccuuccagaacgugcauccggucacaaucggcgaguguccuaaguaugugcggagcgcgaaacuucgcaugguuaccgggcugagaaauauucccuccauccagucucggggacucuuuggcgccauugcuggguucaucgaaggaggcuggaccgggaugguggauggaugguacggcuaucaccaccagaacgagcaaggcagcggguacgccgcugaccagaaguccacacagaaugccauuaacggaaucacgaauaaagucaacagcgugaucgaaaagaugaauacccaguucacagccguuggcaaggaguuuaacaaacuggagcgcagaauggaaaaccugaauaagaaaguggaugacggguucauugauaucuggaccuacaacgcugagcuccugguccuucuggaaaaugagcggacacucgacuuucaugacucuaacgugaagaaucuguaugaaaaagucaagucccaacuuaagaacaaugcgaaagagauuggaaacggcugcuucgaguuuuaccacaaguguaaugaugaaugcauggagagcgugaaaaacgggaccuaugacuacccuaaguauucugaagaguccaaacugaaucgcgagaagaucgauggcguuaagcucgaaagcaugggaguguaccagauucuggccaucuauuccacggucgcuucuagccuggugcuccugguuucccuuggcgccaucucuuucuggaugugcagcaacgggucccugcaguguagaauuugcaucuga

SEQ ID NO: 196020 - RNA, 1698 nt, Artificial Sequence
  derived and/or modified CDS sequence (opt5) from hemagglutinin__InfluenzaA__ADA71158
augaaggugaaacugcucguccugcuuugcaccuucacagccacguacgcugacaccaucuguauuggcuaucacgccaacaauagcacagauaccguugacacagugcuggagaagaacgugaccgucacacauuccgugaaucuccuggaaaacucucacaaugggaaacuuugccugcucaagggaaucgcgccccugcagcugggcaacuguagcguugcuggguggauucucggaaauccugagugcgaacugcuuaucuccaaagagaccuggucuuacauuguggaaaagccgaaccccgagaauggcacguguuauccugggcauuuugccgauuacgaggaacugagagagcaacucagcuccgucucuagcuucgaacgguuugagaucuuccccaaggaguccagcuggccuaaccacaccgugacaggaguuucugccuccugcagccauaauggcgaaucuuccuuuuaucgcaaccugcuuuggcugaccggcaaaaaugggcucuaccccaaccugagcaagucuuaugcuaauaacaaagagaaggaagugcugguccucuggggagugcaccacccuccguccaucaacgaccagagaacacuguaccauaccgagaaugccuacgugagcgucguuuccucucacuauagccggaaauucacgcccgaaauugcuaagcgcccuaaggugagagaucaggagggccggaucaacuacuauuggacacuucuggagccccgcgacaccauuaucuuugaagccaaugggaaccucauugcgccuagauacgccuucgcucugucccggggauuuggcagcgggaucauuaauucuaacgcccccauggauaaaugugacgcuaagugccagacaccgcaaggagccaucaauuccagccuuccuuuccagaacgugcaucccgucaccaucggcgaguguccuaaauaugugcgcucugcgaagcugagaaugguuaccggccuccggaauacacccagcauucagucccgcgggcuguuuggagccaucgcuggcuucauugaagggggauggacgggcaugguggaugggugguacggauaucaccaccagaacgagcaaggcucuggcuacgccgcugaccagaaaagcacccagaaugccaucaacgggauuacaaauaaggucaacuccgugaucgaaaagaugaauacccaguuuacagccguuggaaaagaguucaacaagcuggagagccucauggauauccugaacaaaaagguggacgauggcuucauugacaucuggaccuacaaugcugaacuucugguccuccuggagaacgaaagaacgcuugacuuucaugauucuaaugugaaaaaccuguaugagaaggucaaaucccaacucaagaauaacgcgaaggaaauugggaauggaugcuucgaguuuuaccacaaauguaacgacgagugcauggaaagcgugaagaauggcacauaugauuaccccaaauauucugaggaauccaagcugaaccgggagaaaaucgacgggguuaagcuggagagcaugggcguguaccagauucucgccaucuauuccaccgucgcuucuagccuggugcuucugguuucccucggagccaucucuuucuggaugugcagcaauggcucccugcagugucgcauuugcaucuga

SEQ ID NO: 196021 - RNA, 1701 nt, Artificial Sequence; identical to SEQ ID NO: 194506
  derived and/or modified CDS sequence (opt5) from hemagglutinin__InfluenzaA__ADA71162

SEQ ID NO: 196022 - RNA, 1698 nt, Artificial Sequence
  derived and/or modified CDS sequence (opt5) from hemagglutinin__InfluenzaA__ADA71164
augaaggugaaacugcucguccugcuuugcaccuucacagccacguacgcugacaccaucuguauuggcuaucacgccaacaauagcacagauaccguugacacagugcuggagaagaacgugaccgucacacauuccgugaaucuccuggaaaacucucacaaugggaaacuuugccugcucaagggaaucgcgccccugcagcugggcaacuguagcguugcuggguggauucucggaaauccugagugcgaacugcuuguguccaaagagucuuggagcuacaucgucgaaaagccgaaccccgagaauggcaccuguuauccugggcauuuugccgauuacgaggaacugagagagcaacucuccucugugagcuccuucgaacgguuugagauuuuccccaaggagagcucuuggccuaaccacacgguuaccggagccuccgcuagcugcucucauaauggcgaaaacuccuuuuaucgcaaucugcuuuggcugacaggcaaaaacgggcucuaccccaaucugagcaagucuuaugccaacaacaaagagaaggaagugcugguccucuggggagugcaccacccuccguccaucgcugaccagaaaacccuguaccauacagagaaugccuacgugagcgucguuuccucucacuauagcagaaaguucacccccgaaaucgcgaagcggccuaaagugcgcgaucaggagggccggauucauuacuauuggacgcuucuggagcccggggacacaaucauuuuugaagccaacggaaaucucaucgcuccuagauacgccuucgcucugucccgcggcuuugggagcggaauuaucaacucuaaugcccccauggauaagugugacgcgaccugccagacaccgcaaggcgccauuaacuccagccuuccuuuccagaaugugcaccccgucaccaucggcgaguguccuaaauaugugagaucugcuaagcugcggaugguuaccgggcuccgcaacauccccagcauucaguccagaggacuguuuggcgccaucgcuggguucauugaaggaggcuggacagggaugguggauggaugguacggcuaucaccaucagaaugagcaaggcucuggguacgccgccgaccagaaaagcacgcagaacgcuaucaauggaauuaccaacaaggucaauuccgugaucgaaaagaugaacacacaguuuaccgcgguuggcaaagaguucaauaagcuggagcggcgcauggaaaaccucaacaaaaagguggaugacggguucaucgauauuuggacauacaaugccgagcugcuuguccugcucgaaaacgagagaacccuggacuuucacgacagcaaugugaaaaaccuuuaugaaaaggucaucucucaacugaaaauuaaugcuaaggaucucggauacggcugcuucgaguuuuaucauaaguguaacgacgagugcauggaauccgugaaaaaugggacguacgauuaucccaaguacagcgaggaaucuaaacugaaccgggagaagaucgacggcguuaaacuggaguccaugggaguguaucagauucucgccaucuacagcacagucgccuccucucuggugcuucugguuagccucggcgcuaucuccuucuggaugugcucuaaugggagccugcagugucgcauuugcaucuga

SEQ ID NO: 196023 - RNA, 1698 nt, Artificial Sequence
  derived and/or modified CDS sequence (opt5) from hemagglutinin__InfluenzaA__ADA71168
augaaggugaaacugcucguccugcuuugcaccuucacagccacguacgcugacaccaucuguauuggcuaucacgccaacaauagcacagauaccguugacacagugcuggagaagaacgugaccgucacacauuccgugaaucuccuggaagauaaccacaaugggaaacuuugccugcucaagggaaaagcgccccugcagcugggcaacuguucuguugcuggguggauccucggaaauccugagugcggccugcuuauuagcaaggaauccuggucuuacaucguggagagaccgaaccccgaaaaugggaccuguuauccuggacauuuugccgacuacgaggagcugcgggaacaacucagcuccgucucuagcuucgagcgcuuugaaauuuuccccaaggaguccagcuggccuaaccacacggugaccggcguuucugccuccugcagccauaauggcgagucuuccuuuuauaaaaaccugcuuuggcugacagggaagaauggacucuaccccaaccugagcaaaucuuaugcuaauaacaaggaaaaagaggugcugguccucuggggcgugcaccacccuccgaacaucggggugcagaugacccuguaccauaaggaaaaugccuacgucuccguugugagcucccacuauucuagaaaguucacacccgagaucgugaaacggccuaagguccgcgaucaggaaggaagaauuaacuacuauuggacccuucuggagcccggcgacacgaucauuuuugaggcuaaugggaaccucaucgccccucgguacgcguucgcccugagccgcggauuuggcuccggcauuaucaauagcaacgcucccauggaugaaugugacgccaaaugccagacaccgcaaggggcuauuaauucuucccuuccuuuccagaacgugcaucccguuaccaucggagaguguccuaaguaugugagaagcgccaaacugcggauggucacaggccuccgcaauauccccucuauucagagcagagggcuguuuggagcgaucgccggcuucauugaagggggauggaccggcaugguggauggcugguacggguaucaccaccagaacgagcaaggauccggcuacgcugccgaccagaagucuacccagaaugcuaucaacgggauuacaaauaaaguuaacagcgugaucgaaaagaugaauacgcaguuuaccgccgucggaaaggaguucaacaaacuggagcggcgcauggaaaaccucaauaagaaaguggaugacggcuucaucgauauuuggacauacaacgccgagcugcuuguccugcucgaaaaugagagaacccuggacuuucaugacuccaacgugaagaaucuuuaugaaaaaguuaagagccaacugaagaacaaugcuaaagagaucgggaacggcugcuucgaguuuuaccacaaguguaaugaugaaugcauggagucugugaaaaacggaacauaugacuaccccaaguauuccgaagagagcaaacucaaucgggagaagauugauggcgucaagcuggaaucuauggggguguaccagauccuggcgauuuauuccaccguugccagcucccucgugcugcuugucucucugggagcuaucagcuucuggaugugcuccaacggcucucuccagugucgcaucugcauuuga

SEQ ID NO: 196024 - RNA, 1698 nt, Artificial Sequence
  derived and/or modified CDS sequence (opt5) from hemagglutinin__InfluenzaA__ADA71170
augaaggugaaacugcucguccugcuuugcaccuucacagccacguacgcugacaccaucuguauuggcuaucacgccaacaauagcacagauaccguugacacagugcuggagaagaacgggaccgugacacccuccggaaaucucgucgaaaacucuccuaauggcaaacugugccuucugaaggggaucaccccgcuccagcugggaaaauguagcguggcgggcuggauucuggggaaccccaagugggagcuccugguuuccaaggaaucuuggagcuacaucggaaagaagccuaaucccgagaacggcacgugcuauccuggccauuuucccuacuaugaggagcuuagagagcaacuguccucugugagcuccuucgaacgguuugagauuuucccuaaagaaagcucuuggccgaaucacaccgucacaggggcuuccgccagcuguucucauaacggagaaaauuccuuuuaccgcaaccuccuguggcuuaccggcaagaaugggcuguaucccaaccucagcaaaucuuacgccaauaacaaggagaaggaagugcugguucuguggggagugcaccauccucccaacaucgcugaucagaaaacacucuaccacaccgagaaugccuaugucuccguggugagcucccacuacucuagaaaguucacgccugaaaucgcuaaacggcccaagguccgcgaccaggagggcagaauuaacuauuacuggacacugcuugaaccgggggauaccaucauuuuugaggccaauggaaaccugaucgcgccucgguaugccuucgcucucagccgcggcuuuggcuccgggauuaucaauagcaacgcccccauggacaaaugcgaugcuaagugucagacaccucaaggagccauuaauucuucccugcccuuccagaacguucaucccgugaccaucggcgagugcccuaaauacgugagaagcgcgaaacuucggauggucaccgggcugcgcaauaucccgucuauucagagcagaggacucuuuggcgccaucgcuggguucauugaaggaggcuggacaggcaugguggacgggugguauggauaccaccaucagaacgagcaaggcuccggguacgccgcugaucagaagucuacgcagaaugccaucaacggaauuaccaauaaaguuaacagcgugaucgaaaagaugaauacacaguuuaccgccgucggcaaagaguucaacaagcuggaacggcgcauggagaaccugaauaaaaagguggacgauggguucaucgacauuuggacauauaacgcugagcuccugguucuucuggaaaaugagagaacccucgauuuucacgacuccaacgugaagaaucuguacgaaaaagucaagagccaacuuaaaaacaaugcgaaggagaucggcaacggauguuucgaauuuuaucacaaaugcaaugacgaguguauggagucugugaagaacggcacguacgauuaucccaaguacuccgaagagagcaaacugaaucgggaaaagauugacggggucaaacucgagucuaugggaguguaucagauccuggccauuuacuccacaguugcuagcucccuggugcuccuggucucucuuggcgccaucagcuucuggaugugcuccaacgggucucugcagugccgcaucuguauuuga

SEQ ID NO: 196025 - RNA, 1701 nt, Artificial Sequence
  derived and/or modified CDS sequence (opt5) from hemagglutinin__InfluenzaA__ADA71172
augaagaccaucauugcccugagcuacauccucugccugguguucacacagaaacuucccggcaacgacaauuccacggcuacccugugucucgggcaccaugccgucccuaacggaacaauuguuaagaccaucacaaaugaucaaauugaggugaccaacgcgacagaacuggugcagucuagcuccaccggcgagaucugcgacucuccgcaccagauccuugauggggaaaauuguacgcugauugacgcucuccugggagauccccagugcgacggcuuucaaaacaaaaagugggaucuguucgucgagagaagcaaagccuauuccaauuguuacccuuaugacgugcccgauuacgccucucuccggagccugguugcuuccagcgggacccuugaauuuaacaaugagucuuucaacuggacaggagugacccagaauggcacauccagcgccugcauccgcagaucuaacaauuccuuuuucagccggcugaacuggcucacccaucugaaguuuaaguauccugcucuuaaugucacgaugcccaacaacgagcaguucgacaaacuguacauuuggggcgugcaccauccugggacagauaaugaccagaucuuucucuaugcccaagcgucuggacgcauuaccguuuccacaaagagaagccagcagaccgugaucccgaacauuggcucccggccccgcgucagaaauaucccuucucggaucagcauuuacuggaccaucgugaaacccggggauauucugcugaucaacuccacaggaaaucucauugccccucgcggcuacuucaagaucagaagcgggaaaucuuccaucaugcggagcgacgcucccauuggaaaguguaacucugaaugcaucacgccgaauggcagcauuccuaacgacaagcccuuucagaaugugaaccgcaucaccuauggcgccuguccuagauacgucaaacaaaauacacugaaacuugcuaccgggaugcggaacguucccgagaagcagacacgcggaauuuucggcgccaucgcgggguuuaucgaaaauggaugggagggcaugguggaugggugguauggauucagacaccagaacuccgagggccggggccaagccgcugaccugaagucuacccaggccgcuauugaucagaucaaugggaaacucaacagacugauuggaaagacgaacgaaaaauuccaccagaucgagaaggaauuuagcgagguggaaggccgcauucaagaccuugagaaguacgucgaggauacaaaaaucgaccugugguccuauaaugccgaacuccugguggcccuggagaaccagcauaccauugaucucaccgacagcgaaaugaauaagcuguucgagaaaacaaagaaacagcuucgggaaaacgcugaggauauggggaauggaugcuuuaagaucuaccacaagugugacaacgcgugcaucggcucuauuagaaaugggaccuaugaucaugacguuuaccgcgacgaggcccugaacaaucgguuccagaucaaaggcguggaacucaaguccggauacaaagauuggauucuguggaucagcuuugcuauuucuugcuuccuucugugugucgcccuccugggcuuuaucaugugggccugccaaaaggggaacaucagauguaauauuugcaucuga

SEQ ID NO: 196026 - RNA, 1698 nt, Artificial Sequence
  derived and/or modified CDS sequence (opt5) from hemagglutinin__InfluenzaA__ADA71176
augaaggugaaacugcucguccugcuuugcaccuucacagccacguacgcugacaccaucuguauuggcuaucacgccaacaauagcacagauaccguugacacagugcuggagaagaacgugaccgucacacauuccgugaaucuccuggaaaacucucacaaugggaaacuuugccugcucaagggaaucgcgccccugcagcugggcaacuguagcguugcuggguggauucucggaaauccugagugcgaacugcuuaucuccaaagagucuuggagcuacauuguggaaaagccgaaccccgagaauggcaccuguuauccugggcauuuugccgauuacgaggaacugagagagcaacucuccucugucagcuccuucgaacgguuugagaucuuccccaaggagagcucuuggccuaaccacacggugaccggagccuccgcuagcugcucucauaauggcgaaaacuccuuuuaucgcaaucugcuuuggcugacaggcaaaaacgggcucuaccccaaucugagcaagucuuaugccaacaacaaagagaaggaaguucuggugcucuggggaguccaccacccuccgaauaucgcuaaccagaaaacccuguaccauacagagaaugccuacguguccguggucagcucccacuauucuagaaaguucacccccgaaauugcgaagcggccuaaaguucgcgaccaggagggcagaaucaacuacuauuggacgcuucuggagcccggggauacaauuaucuuugaagccaauggaaaccucauugcuccucgguacgccuucgcucugagccgcggcuuuggguccggaaucauuaauagcaacgcccccauggacaagugugaugcgaccugccagacaccgcaaggcgccaucaauucuucccuuccuuuccagaacgugcaucccgugaccaucggcgaguguccuaaauaugucagaagcgcuaagcugcggauggugaccgggcuccgcaauauucccucuauccagagcagaggacuguuuggcgccauugcuggguucaucgaaggaggcuggacagggaugguugacggaugguacggcuaucaccaccagaacgagcaaggcuccggguacgccgccgaucagaaaucuacgcagaaugcuauuaacggaaucaccaauaaggugaacagcgucaucgaaaagaugaacacacaguuuaccgcggugggcaaagaguucaauaagcuggagcggcgcauggaaaaccucaauaaaaagguugacgauggguucauugacaucuggacauacaacgccgagcugcuugugcugcucgaaaaugagagaacccuggauuuucaugacuccaacgucaaaaaucuuuaugaaaaggugaaaagccaacugaagaacaaugcuaaggagauuggaaacggcugcuucgaguuuuaccacaaauguaaugacgaaugcauggagucugucaagaacgggacguaugauuaccccaaauauuccgaagagagcaagcucaaucgggagaaaaucgacggcgugaagcuggaaucuaugggaguuuaccagauucuggccaucuauuccacaguggccagcucccucguccugcuugugucucugggcgcuaucagcuucuggaugugcuccaacgggucucuccagugucgcauuugcaucuga

SEQ ID NO: 196027 - RNA, 1701 nt, Artificial Sequence; identical to SEQ ID NO: 195842
  derived and/or modified CDS sequence (opt5) from hemagglutinin__InfluenzaA__ADA71181

SEQ ID NO: 196028 - RNA, 1701 nt, Artificial Sequence; identical to SEQ ID NO: 195842
  derived and/or modified CDS sequence (opt5) from hemagglutinin__InfluenzaA__ADA71191

SEQ ID NO: 196029 - RNA, 1701 nt, Artificial Sequence
  derived and/or modified CDS sequence (opt5) from hemagglutinin__InfluenzaA__ADA79587
augaaggccauccuggugguccuccuguacaccuucgcuacagccaacgcggacacgcuuugcauuggcuaucacgcuaauaacagcaccgauacaguugacaccgugcuggagaagaaugugacagucacccauuccgugaaccuccuggaagauaagcacaaugggaaacuuuguaagcugagaggaguugcuccccuccaucugggcaaaugcaacaucgccggguggauucugggaaauccugagugugaaucucucagcacagccaacuccuggucuuacaucguggagaccagcuccucugacaauggcacgugcuauccgggggauuuuauugacuacgaagaacugcgggagcagcuuagcuccgucagcucuuucgaacgcuuugagaucuuccccaagaccuccagcuggccuaaccacgauucuaauaagggagugacagccgcuuguccccaugccggcgcgaaauccuuuuauaagaaccugaucuggcucguuaaaaagggcaauagcuacccuaaacugucuaaguccuauauuaacgacaaggggaaagaagugcuuguccuguggggaauccaccaccccagcaccuccgccgaucaacagucucucuaccagaaugcugacgccuacguguucgugggcacaagcagauauuccaagaaauuuaagccugagauugcuauccggccgaaaguccgcgaucaggaggggagaaugaacuacuauuggacccugguugaacccggagacaagauuacguucgaggccacaggcaaccugguggugccucgguacgcguuugccauggaacgcaaugcugggagcggaaucauuaucucugauacccccguccaugacugcaacacaaccugucaaaccccuaaaggcgccaucaauacaucccuccccuuccagaacauucacccgaucacgauuggcaagugcccuaaguaugugaaaagcaccaagcugagacuugcuacagggcugcggaauauccccucuauucagagccgcggacucuuuggcgccaucgccggguucaucgagggaggcuggaccgggaugguugacggaugguacggcuaucaucaccagaacgaacaaggcuccggguacgcugcggaucugaaaucuacacagaaugccauugacgagaucaccaacaaggugaauagcgucauugagaaaaugaacacgcaguuuacagcugugggaaaggaguucaaucaccuugagaagagaaucgaaaaccugaauaaaaagguugaugacggcuuccucgauauuuggaccuacaacgccgagcugcuggugcuccuggaaaaugagcggacccuugacuaucaugauuccaacgucaaaaaccuguacgagaaggugcgcagccagcucaaaaauaacgccaaggaaaucgggaauggauguuuugaguucuaucacaagugcgacaacacauguauggaaucugucaaaaauggcaccuacgauuauccuaaguacuccgaggaagcuaaacugaacagagaggagaucgacggggugaaacuugaaagcacacggauuuaucaaauccuggccauuuacucuacgguugcguccagccucgugcuggucgugucccugggcgcuaucucuuuuuggaugugcagcaauggaucccuccagugccgcauuuguaucuga

SEQ ID NO: 196030 - RNA, 1701 nt, Artificial Sequence
  derived and/or modified CDS sequence (opt5) from hemagglutinin__InfluenzaA__ADA79607
augaaggccauccuggugguccuccuguacaccuucgcuacagccaacgcggacacgcuuugcauuggcuaucacgcuaauaacagcaccgauacaguugacaccgugcuggagaagaaugugacagucacccauuccgugaaccuccuggaagauaagcacaaugggaaacuuuguaagcugagaggaguugcuccccuccaucugggcaaaugcaacaucgccggguggauucugggaaauccugagugugaaucucucagcacagccuccucuuggagcuacaucguggagaccuccucuagcgacaacggcacgugcuauccgggggauuuuauugacuacgaagaacugcgggagcagcuuuccagcgucucuuccuucgaacgcuuugagaucuuccccaagaccagcucuuggccuaaucacgauuccaacaagggagugacagccgcuuguccccaugccggcgcgaaaggcuuuuauaagaaucugaucuggcucguuaaaaaggggaacagcuacccuaaacugucuaaguccuauauuaaugacaagggaaaagaagugcuuguccuguggggcauccaccaccccagcaccuccgccgaucaacagucucucuaccagaacgcugacgccuacguguucguggggacaagcagauauuccaagaaauuuaagccugagauugcuauccggccgaaaguccgcgaucaggagggaagaaugaauuacuauuggacccugguugaacccggcgacaagauuacguucgaggccacagggaaccugguggugccucgguacgcguuugccauggaacgcaacgcuggaagcggcaucauuaucucugauacccccguccaugacugcaauacaaccugucaaaccccuaaaggcgccaucaacacaucccuccccuuccagaauauucacccgaucacgauugggaagugcccuaaguaugugaaaagcaccaagcugagacuugcuacaggacugcggaacguucccucuauccagagccgcggccucuuuggggccauugccggauucaucgagggcggguggaccggaaugguggacggcugguacggcuaucaucaccagaaugaacaaggguccggauacgcugcggaucugaaaucuacacagaacgccaucgacgagauuaccaauaaggucaacagcgugaucgagaaaaugaauacgcaguuuacagcuguuggcaaggaguucaaccaccuugagaagagaauugaaaaucugaacaaaaagguggaugacggguuccucgauaucuggaccuacaaugccgagcugcugguccuccuggaaaacgagcggacccuugacuaucaugauuccaaugugaaaaaccuguacgagaagguccgcagccagcucaaaaacaaugccaaggaaauuggaaacggcuguuuugaguucuaucacaagugcgacaauacauguauggaaucugugaaaaacgggaccuacgauuauccuaaguacuccgaggaagcuaaacugaauagagaggagaucgacggcguuaaacuugaaagcacacggaucuaucaaauucuggccaucuacucuacgguggcguccagccucguccuggugguuucccugggagcuauuucuuuuuggaugugcagcaacggcucccuccagugccgcaucuguauuuga

SEQ ID NO: 196031 - RNA, 1701 nt, Artificial Sequence
  derived and/or modified CDS sequence (opt5) from hemagglutinin__InfluenzaA__ADA83043
augaaggccauccuggugguccuccuguacaccuucgcuacagccaacgcggacacgcuuugcauuggcuaucacgcuaauaacagcaccgauacaguugacaccgugcuggagaaaaaugugacagucacccauuccgugaaccuccuggaagauaagcacaaugggaaacuuuguaagcugagaggaguugcuccccuccaucugggcaaaugcaacaucgccggguggauucugggaaauccugagugugaaucucucagcacagccuccucuuggagcuacaucguggagaccuccucuagcgacaacggcacgugcuauccgggggauuuuauugacuacgaagaacugcgggagcagcuuuccagcgucucuuccuucgaacgcuuugagaucuuccccaagaccagcucuuggccuaaucacgauuccaacaagggagugacagccgcuuguccccaugccggcgcgaaaucuuuuuauaagaaucugaucuggcucguuaaaaagggcaacagcuacccuaaacuguccaagagcuauauuaaugacaaggggaaagaagugcuuguccuguggggaauccaccaccccuccaccucugccgaucaacagagccucuaccagaacgcugacgccuacguguucgugggcacauccagauauagcaagaaauuuaagccugagauugcuauccggccgaaaguccgcgagagagaagggcggaugaauuacuauuggacccugguugagcccggagauaagauuacguucgaagccacaggcaaccugguggugccucgcuacgcguuugccauggagagaaacgcugggucuggaaucauuaucuccgacacccccguccaugauugcaauacaaccugucagaccccuaaaggcgccaucaacacaagccuccccuuccaaaauauucacccgaucacgauuggcaagugcccuaaguaugugaaaucuaccaagcugcggcuugcuacagggcugcgcaacguucccagcauccaguccagaggacucuuuggcgccauugccggguucaucgaaggaggcuggaccgggaugguggacggaugguacggcuaucaucaccagaaugagcagggcucuggguacgcugcggaccugaaaagcacacaaaacgccaucgaugagauuaccaauaaggucaacuccgugaucgaaaagaugaauacgcaguuuacagcuguuggaaaggaguucaaccaccuugaaaagcggauugagaaucugaacaaaaagguggacgauggcuuccucgacaucuggaccuacaaugccgaacugcugguccuccuggagaacgagcgcacccuugauuaucaugacagcaaugugaaaaaccuguacgaaaaggucagaucucagcucaaaaacaaugccaaggagauugggaacggauguuuugaguucuaucacaagugcgauaauacauguauggaguccgugaaaaacggcaccuacgacuauccuaaguacagcgaagaggcuaaacugaaucgggaggaaaucgaugggguuaaacuugagucuacacgcaucuaucagauucuggccaucuacuccacgguggcgagcucccucguccuggugguuucucugggcgcuauuagcuuuuggaugugcuccaacggaucucuccaaugcagaaucuguauuuga

SEQ ID NO: 196032 - RNA, 1701 nt, Artificial Sequence
  derived and/or modified CDS sequence (opt5) from hemagglutinin__InfluenzaA__ADA83044
augaaggccauccuggugguccuccuguacaccuucgcuacagccaacgcggacacgcuuugcauuggcuaucacgcuaauaacagcaccgauacaguugacaccgugcuggagaaaaaugugacagucacccauuccgugaaccuccuggaagauaagcacaaugggaaacuuuguaagcugagaggaguugcuccccuccaucugggcaaaugcaacaucgccggguggauucugggaaauccugagugugaaucucucagcacagccuccucuuggagcuacaucguggagaccuccucuagcaacaauggcacgugcuauccgggggacuuuauugauuacgaagaacugcgggagcagcuuuccagcgucucuuccuucgaacgcuuugagaucuuccccaagaccagcucuuggccuaaccacgacuccaauaagggagugacagccgcuuguccccaugccggcgcgaaaucuuuuuauaagaaccugaucuggcucguuaaaaaggaaaauagcuacccuaaacugaacaaguccuauauuaaugauaagggcaaagaggugcuuguccugugggggauccaccaccccagcaccuccgccgaccaacagucucucuaccagaacgcugaugccuacguguucgugggaacaagcagauauuccaagaaauuuaagccugagauugcuauccggccgaaaguccgcggccaggaagggagaaugaacuacuauuggacccugguugagcccggagacaagauuacguucgaagccacaggcaaucugguggugccucgguacgcguuugccauggagcgcaacgcugggagcggaaucauuaucucugauacccccguccaugacugcaauacaaccugucaaaccccuaaaggcgccaucaacacaucccuccccuuccagaauauucacccgaucacgauuggcaagugcccuaaguaugugaaaagcaccaagcugagacuugcuacagggcugcggaacguucccucuauccagagccgcggacucuuuggcgccauugccggguucaucgaaggaggcuggaccgggaugguggauggaugguacggcuaucaucaccagaaugagcaaggcuccggguacgcugcggaccugaaaucuacacagaacgccaucgacgagauuaccaauaaggucaacagcgugaucgaaaagaugaauacgcaguuuacagcuguuggaaaggaguucaaccaccuugaaaagagaauugagaaucugaacaaaaagguggaugacggcuuccucgauaucuggaccuacaaugccgaacugcugguccuccuggagaacgagcggacccuugacuaucaugauuccgacgugaaaaaccuguacgaaaagguccgcagccagcucaaaaauaacgccaaggagauugggaauggauguuuugaguucuaucacaagugcgauaacacauguauggagucugugaaaaauggcaccuacgacuauccuaaguacuccgaagaggcuaaacugaacagagaggaaaucgaugggguuaaacuugagagcacacggaucuaucaaauucuggccaucuacucuacgguggcguccagccucguccuggugguuucccugggcgcuauuucuuuuuggaugugcagcaauggaucccuccagugccgcaucuguauuuga

SEQ ID NO: 196033 - RNA, 1701 nt, Artificial Sequence; identical to SEQ ID NO: 194741
  derived and/or modified CDS sequence (opt5) from hemagglutinin__InfluenzaA__ADA83580

SEQ ID NO: 196034 - RNA, 1701 nt, Artificial Sequence; identical to SEQ ID NO: 194741
  derived and/or modified CDS sequence (opt5) from hemagglutinin__InfluenzaA__ADA83587

SEQ ID NO: 196035 - RNA, 1701 nt, Artificial Sequence
  derived and/or modified CDS sequence (opt5) from hemagglutinin__InfluenzaA__ADA83591
augaaggccauccuggugguccuccuguacaccuucgcuacagccaacgcggacacgcuuugcauuggcuaucacgcuaauaacagcaccgauacaguugacaccgugcuggagaagaaugugacagucacccauuccgugaaccuccuggaagauaagcacaaugggaaacuuuguaagcugagaggaguugcuccccuccaucugggcaaaugcaacaucgccggguggauucugggaaauccugagugugaaucucucagcacagccuccucuuggagcuacaucguggagaccuccucuagcgacaacggcacgugcuauccgggggauuuuauugacuacgaagaacugcgggagcagcuuuccagcgucucuuccuucgaacgcuuugagaucuuccccaagaccagcucuuggccuaaucacgauuccaacaagggagugacagccgcuuguccccaugccggcgcgaaaucuuuuuauaagaaucugaucuggcucguuaaaaagggcaacagcuacccuaaacuguccaagagcuauauuaaugacaaggggaaagaagugcuuguccuguggggaauccaccaccccuccaccucugccgaucaacagagccucuaccagaacgcugacgccuacguguucgugggcacauccagauauagcaagaaauuuaagccugagauuucuauccggccgaaaguccgcgaucaggaggggagaaugaauuacuauuggacccugguugaacccggagacaagauuacguucgaggcuacaggcaaccugguggugccucgguacgccuuugcgauggaacgcaacgccggguccggaaucauuaucagcgauacccccguccaugacugcaauacaaccugucaaaccccuaaaggcgcuaucaacacaucucuccccuuccagaauauucacccgaucacgauuggcaagugcccuaaguaugugaaaagcaccaagcugagacuugccacagggcugcggaacguucccuccauccagucucgcggacucuuuggcgcuauugccggguucaucgagggaggcuggaccgggaugguggacggaugguacggcuaucaucaccagaaugaacaaggcagcggguacgccgcugaucugaaauccacacagaacgcgaucgacgagauuaccaauaaggucaacagcgugaucgagaaaaugaauacgcaguuuacagccguuggaaaggaguucaaccaccuugagaagagaauugaaaaucugaacaaaaagguggaugacggcuuccucgauaucuggaccuacaaugcugagcugcugguccuccuggaaaacgagcggacccuugacuaucaugauucuaaugugaaaaaccuguacgagaagguccgcucccagcucaaaaacaaugccaaggaaauugggaacggauguuuugaguucuaucacaagugcgacaauacauguauggaaagcgugaaaaacggcaccuacgauuauccuaaguacucugaggaagccaaacugaauagagaggagaucgacgggguuaaacuugaauccacacggaucuaucaaauucuggcuaucuacagcacgguggccuccucucucguccuggugguuagccugggcgcgauuuccuuuuggaugugcucuaacggaagccuccagugccgcaucuguauuuga

SEQ ID NO: 196036 - RNA, 1701 nt, Artificial Sequence; identical to SEQ ID NO: 195486
  derived and/or modified CDS sequence (opt5) from hemagglutinin__InfluenzaA__ADA83595

SEQ ID NO: 196037 - RNA, 1701 nt, Artificial Sequence; identical to SEQ ID NO: 194741
  derived and/or modified CDS sequence (opt5) from hemagglutinin__InfluenzaA__ADA83599

SEQ ID NO: 196038 - RNA, 1701 nt, Artificial Sequence; identical to SEQ ID NO: 194741
  derived and/or modified CDS sequence (opt5) from hemagglutinin__InfluenzaA__ADA83603

SEQ ID NO: 196039 - RNA, 1701 nt, Artificial Sequence; identical to SEQ ID NO: 194741
  derived and/or modified CDS sequence (opt5) from hemagglutinin__InfluenzaA__ADA83611

SEQ ID NO: 196040 - RNA, 1701 nt, Artificial Sequence
  derived and/or modified CDS sequence (opt5) from hemagglutinin__InfluenzaA__ADA83615
augaaggccauccuggugguccuccuguacaccuucgcuacagccaacgcggacacgcuuugcauuggcuaucacgcuaauaacagcaccgauacaguugacaccgugcuggagaaaaaugugacagucacccauuccgugaaccuccuggaagauaagcacaaugggaaacuuuguaagcugagaggaguugcuccccuccaucugggcaaaugcaacaucgccggguggauucugggaaauccugagugugaaucucucagcacagccuccucuuggagcuacaucguggagaccuccucuagcgacaacggcacgugcuauccgggggauuuuauugacuacgaagaacugcgggagcagcuuuccagcgucucuuccuucgaacgcuuugagaucuuccccaagaccagcucuuggccuaaucacgauuccaacaagggagugacagccgcuuguccccaugccggcgcgaaaucuuuuuauaagaaucugaucuggcucguuaaaaagggcaacagcuacccuaaacuguccaagagcuauauuaaugacaaggggaaagaagugcuuguccuguggggaauccaccaccccuccaccucugccgaucaacagagccucuaccagaacgcugacgccuacguguucgugggcacauccagauauagcaagaaauuuaagccugagauugcuauccggccgaaaguccgcgaucaggaggggagaaugaauuacuauuggacccugguugaacccggagacaagauuacguucgaggccacaggcaaccugguggugccucgguacgcguuugccauggaacgcaacgcugggucuggaaucauuaucuccgauacccccguccaugacugcaauacaaccugucaaaccccuaaaggcgccaucaacacaagccuccccuuccagaauauucacccgaucacgauuggcaagugcccuaaguaugugaaaucuaccaagcugagacuugcuacagggcugcggaacguucccagcauccagucccgcggacucuuuggcgccauugccggguucaucgagggaggcuggaccgggaugguggacggaugguacggcuaucaucaccagaaugaacaaggcucuggguacgcugcggaucugaaaagcacacagaacgccaucgacgagauuaccaauaaggucaacuccgugaucgagaaaaugaauacgcaguuuacagcuguuggaaaggaguucaaccaccuugagaagagaauugaaaaucugaacaaaaagguggaugacggcuuccucgauaucuggaccuacaaugccgagcugcugguccuccuggaaaacgagcggacccuugacuaucaugaucugaaugugaaaaaccucuacgagaagguccgcagccagcugaaaaacaaugccaaggaaauugggaacggauguuuugaguucuaucacaagugcgacaauacauguauggaaucugugaaaaacggcaccuacgauuauccuaaguacuccgaggaagcuaaacuuaauagagaggagaucgacgggguuaagcuggaaagcacacggaucuaucaaauucucgccaucuacucuacgguggcguccagccugguccuggugguuucccucggcgcuauuucuuuuuggaugugcagcaacggaucccugcagugccgcaucuguauuuga

SEQ ID NO: 196041 - RNA, 1701 nt, Artificial Sequence
  derived and/or modified CDS sequence (opt5) from hemagglutinin__InfluenzaA__ADA83622
augaaggccauccuggugguccuccuguacaccuucgcuacagccaacgcggacacgcuuugcauuggcuaucacgcuaauaacagcaccgauacaguugacaccgugcuggagaaaaaugugacagucacccauuccgugaaccuccuggaagauaagcacaaugggaaacuuuguaagcugagaggaguugcuccccuccaucugggcaaaugcaacaucgccggguggauucugggaaauccugagugugaaucucucagcacagccuccucuuggagcuacaucguggagaccuccucuagcgacaacggcacgugcuauccgggggauuuuauugacuacgaggaacugcgggagcagcuuuccagcgucucuuccuucgaacgcuuugagaucuuccccaagaccagcucuuggccuaaucacgauuccaacaagggagugacagccgcuuguccccaugccggcgcgaaaucuuuuuauaagaaucugaucuggcucguuaaaaagggcaacagcuacccuaaacuguccaagagcuauauuaaugacaaggggaaagaagugcuuguccuguggggaauccaccaccccuccaccucugccgaucaacagagacucuaccagaacgcugacgccuacguguucgugggcacaagccgguauuccaagaaacugaagccugagauugcuauccgcccgaaagucagagaucaggaggggcggaugaauuacuauuggacccugguugaacccggagacaagauuacguuugaggccacaggcaaccucguggugccucgcuacgcguucgccauggaaagaaacgcugggagcggaaucauuaucucugauacccccguccaugacugcaauacaaccugucaaaccccuaaaggcgccaucaacacaucccugcccuuucagaauauucacccgaucacgauuggcaagugcccuaaguaugugaaaagcaccaaacuucggcuggcuacagggcuccgcaacguucccucuauccagagcagaggacuguucggcgccauugccggguuuaucgagggaggcuggaccgggaugguggacggaugguacggcuaucaucaccagaaugaacaaggcuccggguacgcugcggaucuuaagucuacacagaacgccaucgacgagauuaccaauaaggucaacagcgugaucgagaaaaugaauacgcaguucacagcuguuggaaaggaauuuaaccaccuggagaagcggauugaaaaucucaacaaaaagguggaugacggcuuccuggauaucuggaccuacaaugccgagcugcucguccugcuugaaaacgagcgcacccuggacuaucaugauuccaaugugaaaaaccucuacgagaaggucagaagccagcugaaaaacaaugccaaggaaauugggaacggauguuucgaguuuuaucacaagugcgacaauacauguauggaaucugugaaaaacggcaccuacgauuauccuaaguacuccgaggaagcuaaacuuaaucgggaggagaucgacgggguuaagcuggaaagcacacgcaucuaucaaauucucgccaucuacucuacgguggcguccagccugguccuggugguuucccucggcgcuauuucuuucuggaugugcagcaacggaucccugcagugcagaaucuguauuuga

SEQ ID NO: 196042 - RNA, 1701 nt, Artificial Sequence; identical to SEQ ID NO: 194741
  derived and/or modified CDS sequence (opt5) from hemagglutinin__InfluenzaA__ADA83633

SEQ ID NO: 196043 - RNA, 1701 nt, Artificial Sequence; identical to SEQ ID NO: 194741
  derived and/or modified CDS sequence (opt5) from hemagglutinin__InfluenzaA__ADA83637

SEQ ID NO: 196044 - RNA, 1701 nt, Artificial Sequence; identical to SEQ ID NO: 194741
  derived and/or modified CDS sequence (opt5) from hemagglutinin__InfluenzaA__ADA83641

SEQ ID NO: 196045 - RNA, 1701 nt, Artificial Sequence; identical to SEQ ID NO: 194741
  derived and/or modified CDS sequence (opt5) from hemagglutinin__InfluenzaA__ADA83645

SEQ ID NO: 196046 - RNA, 1701 nt, Artificial Sequence; identical to SEQ ID NO: 194741
  derived and/or modified CDS sequence (opt5) from hemagglutinin__InfluenzaA__ADA83648

SEQ ID NO: 196047 - RNA, 1701 nt, Artificial Sequence; identical to SEQ ID NO: 194741
  derived and/or modified CDS sequence (opt5) from hemagglutinin__InfluenzaA__ADA83656

SEQ ID NO: 196048 - RNA, 1701 nt, Artificial Sequence; identical to SEQ ID NO: 194741
  derived and/or modified CDS sequence (opt5) from hemagglutinin__InfluenzaA__ADA83660

SEQ ID NO: 196049 - RNA, 1701 nt, Artificial Sequence
  derived and/or modified CDS sequence (opt5) from hemagglutinin__InfluenzaA__ADA83664
augaaggccauccuggugguccuccuguacaccuucgcuacagccaacgcggacacgcuuugcauuggcuaucacgcuaauaacagcaccgauacaguugacaccgugcuggagaagaaugugacagucacccauuccgugaaccuccuggaagauaagcacaaugggaaacuuuguaagcugagaggaguugcuccccuccaucugggcaaaugcaacaucgccggguggauucugggaaauccugagugugaaucucucagcacagccuccucuuggagcuacaucguggagaccuccucuagcgacaacggcacgugcuauccgggggauuuuauugacuacgaagaacugcgggagcagcuuuccagcgucucuuccuucgaacgcuuugagaucuuccccaagaccagcucuuggccuaaucacgauuccaacaagggagugacagccgcuuguccccaugccggcgcgaaaucuuuuuauaagaaucugaucuggcucguuaaaaagggcaacagcuacccuaaacuguccaagagcuauauuaaugacaaggggaaagaagugcuuguccuguggggaauccaccaccccuccaccucugccgaucaacagagccucuaccagaacgcugacgccuacguguucgugggcacauccagauauagcaagaaauuuaagccugagaccgcuauucggccgaaaguccgcgaucaggaggggagaaugaauuacuauuggacgcugguugaacccggagacaagaucacauucgaggccaccggcaaccugguggugccucgguacgcguuugccauggaacgcaacgcugggucuggaauuaucauuuccgauacacccguccaugacugcaauaccaccugucaaacaccuaaaggcgccaucaacacgagccuccccuuccagaauauccacccgauuaccaucggcaagugcccuaaguaugugaaaucuacaaagcugagacuugcuaccgggcugcggaacguucccagcauucagucccgcggacucuuuggcgccaucgccggguucauugagggaggcuggacagggaugguggacggaugguacggcuaucaucaccagaaugaacaaggcucuggguacgcugcggaucugaaaagcacccagaacgccaucgacgagaucacgaauaaggucaacuccgugauugagaaaaugaauacacaguuuaccgcuguuggaaaggaguucaaccaccuugagaagagaaucgaaaaucugaacaaaaagguggaugacggcuuccucgauauuuggaccuacaaugccgagcugcugguccuccuggaaaacgagcggacacuugacuaucaugauagcaaugugaaaaaccuguacgagaagguccgcucucagcucaaaaacaaugccaaggaaaucgggaacggauguuuugaguucuaucacaagugcgacaauaccuguauggaauccgugaaaaacggcacauacgauuauccuaaguacagcgaggaagcuaaacugaauagagaggagauugacgggguuaaacuugaaucuacgcggaucuaucaaauccuggccauuuacuccaccguggcgagcucccucguccuggugguuucucugggcgcuaucagcuuuuggaugugcuccaacggaucucuccagugccgcauuuguaucuga

SEQ ID NO: 196050 - RNA, 1701 nt, Artificial Sequence
  derived and/or modified CDS sequence (opt5) from hemagglutinin__InfluenzaA__ADA83668
augaaggccauccuggugguccuccuguacaccuucgcuacagccaacgcggacacgcuuugcauuggcuaucacgcuaauaacagcaccgauacaguugacaccgugcuggagaagaaugugacagucacccauuccgugaaccuccuggaagauaagcacaaugggaaacuuuguaagcugagaggaguugcuccccuccaucugggcaaaugcaacaucgccggguggauucugggaaauccugaguguggcucucucagcacagccuccucuuggagcuacaucguggaaaccuccucuagcgacaacgggacgugcuauccgggagauuuuauugacuacgaggaacugcgggagcagcuuuccagcgucucuuccuucgagcgcuuugaaaucuuccccaagaccagcucuuggccuaaucacgauuccaacaagggcgugacagccgcuuguccccaugccggcgcgaaaucuuuuuauaagaaucugaucuggcucguuaaaaaggggaacagcuacccuaaacuguccaagagcuauauuaaugacaagggaaaagaggugcuuguccuguggggcauccaccaccccuccaccucugccgaucaacagagccucuaccagaacgcugacgccuacguguucguggggacauccagauauagcaagaaauuuaagccugaaauugcuauccggccgaaaguccgcgaucaggagggaagaaugaauuacuauuggacccugguugagcccggcgacaagauuacguucgaagccacagggaaccugguggugccucgguacgcguuugccauggagcgcaacgcuggaucuggcaucauuaucuccgauacccccguccaugacugcaauacaaccugucaaaccccuaaaggcgccaucaacacaagccuccccuuccagaauauucacccgaucacgauugggaagugcccuaaguaugugaaaucuaccaagcugagacuugcuacaggacugcggaacguucccagcauccagucccgcggccucuuuggggccauugccggauucaucgaaggcggguggaccggaaugguggacggcugguacggcuaucaucaccagaaugagcaagggucuggauacgcugcggaucugaaaagcacacagaacgccaucgacgaaauuaccaauaaggucaacuccgugaucgagaaaaugaauacgcaguuuacagcuguuggcaaggaguucaaccaccuugaaaagagaauugagaaucugaacaaaaagguggaugacggguuccucgauaucuggaccuacaaugccgaacugcugguccuccuggagaacgaacggacccuugacuaucaugauagcaaugugaaaaaccuguacgagaagguccgcucucagcucaaaaacaaugccaaggagauuggaaacggcuguuuugaguucuaucacaagugcgacaauacauguauggaauccgugaaaaacgggaccuacgauuauccuaaguacagcgaagaggcuaaacugaauagagaagagaucgacggcguuaaacuugagucuacacggaucuaucaaauucuggccaucuacuccacgguggcgagcucccucguccuggugguuucucugggagcuauuagcuuuuggaugugcuccaacggcucucuccagugccgcaucuguauuuga

SEQ ID NO: 196051 - RNA, 1701 nt, Artificial Sequence; identical to SEQ ID NO: 194741
  derived and/or modified CDS sequence (opt5) from hemagglutinin__InfluenzaA__ADA83672

SEQ ID NO: 196052 - RNA, 1701 nt, Artificial Sequence; identical to SEQ ID NO: 194741
  derived and/or modified CDS sequence (opt5) from hemagglutinin__InfluenzaA__ADA83676

SEQ ID NO: 196053 - RNA, 1701 nt, Artificial Sequence; identical to SEQ ID NO: 194741
  derived and/or modified CDS sequence (opt5) from hemagglutinin__InfluenzaA__ADA83680

SEQ ID NO: 196054 - RNA, 1701 nt, Artificial Sequence
  derived and/or modified CDS sequence (opt5) from hemagglutinin__InfluenzaA__ADA86068
augaaggccauccuggugguccuccuguacaccuucgcuacagccaacgcggacacgcuuugcauuggcuaucacgcuaauaacagcaccgauacaguugacaccgugcuggagaagaaugugacagucacccauuccguggaucuccuggaagacaagcacaacgggaaacuuuguaagcugagaggaguugcuccccuccaucugggcaaaugcaauaucgccggguggauucugggaaacccugagugugaaucucucagcacagccuccucuuggagcuacaucguggagaccuccucuagcgauaauggcacgugcuauccgggggacuuuauugauuacgaagaacugcgggagcagcuuuccagcgucucuuccuucgaacgcuuugagaucuuccccaagaccagcucuuggccuaaccacgacuccaauaagggagugacagccgcuuguccccaugccggcgcgaaaucuuuuuauaagaaccugaucuggcucguuaaaaagggcaauagcuacccuaaacuguccaagagcuauauuaacgauaaggggaaagaagugcuuguccuguggggaauccaccaccccuccaccucugccgaccaacagagccucuaccagaaugcugaugccuacguguucgugggcacauccagauauagcaagaaauuuaagccugagauugcuauccggccgaaaguccgcaaccaggaggggagaaugaauuacuauuggacccugguugaacccggagacaagauuacguucgaggccacaggcaaccugguggugccucgguacgcguuugccauggaacgcaacgcugggucuggaaucauuaucuccgauacccccguccaugacugcaauacaaccugucaaaccccuaaaggcgccaucaacacaagccuccccuuccagaauauucacccgaucacgauuggcaagugcccuaaguaugugaaaucuaucaagcugagacuugcuaccgggcugcggaacguucccagcauucagucccgcggacucuuuggcgccaucgccggguucaucgagggaggcuggacagggaugguggacggaugguacggcuaucaucaccagaaugaacaaggcucuggguacgcugcggaucugaaaagcacccagaacgccauugacgagaucacaaauaaggucaacuccgugauugagaaaaugaauacccaguuuacggcuguuggaaaggaguucaaccaccuugagaagagaaucgaaaaucugaacaaaaagguggaugacggcuuccucgauauuuggacauacaaugccgagcugcugguccuccuggaaaacgagcggacccuugacuaucaugauagcaaugugaaaaaccuguacgagaagguccgcucucagcucaaaaacaaugccaaggaaaucgggaacggauguuuugaguucuaucacaagugcgacaauaccuguauggaauccgugaaaaacggcacauacgauuauccuaaguacagcgaggaagcuaaacugaauagagaggagaucgacgggguuaaacuugaaucuacccggauuuaucaaauccuggccauuuacuccacaguggcgagcucccucguccuggugguuucucugggcgcuaucagcuuuuggaugugcuccaacggaucucuccagugccgcauuuguaucuga

SEQ ID NO: 196055 - RNA, 1701 nt, Artificial Sequence
  derived and/or modified CDS sequence (opt5) from hemagglutinin__InfluenzaA__ADA86086
augaaggccauccuggugguccuccuguacaccuucgcuacagccaacgcggacacgcuuugcauuggcuaucacgcuaauaacagcaccgauacaguugacaccgugcuggagaagaaugugacagucacccauuccgugaaccuccuggaagauaagcacaaugggaaacuuuguaagcugagaggaguugcuccccuccaucugggcaaaugcaacaucgccggguggauucugggaaauccugagugugaaucucucagcacagccuccucuuggagcuacaucguggagaccuccucuagcgacaacggcacgugcuauccgggggauuuuauugacuacgaagaacugcgggagcagcuuuccagcgucucuuccuucgaacgcuuugagaucuuccccaagaccagcucuuggccuaaucacgauuccaacaagggagugacagccgcuuguccccaugccggcgcgaaaucuuuuuauaagaaucugaucuggcucguuaaaaagggcaacagcuacccuaaacuguccaagagcuauauuaaugacaaggggaaagaagugcuuguccuguggggaauccaccaccccuccaccaacgccgaucaacagucucucuaccagaaugcugacgccuacguguucgugggcacaagcagauauuccaagaaauuuaagccugagauugcuauccggccgaaaguccgcgaucaggaggggagaaugaacuacuauuggacccugguugaacccggagacaagauuacguucgaggccacaggcaaccugguggugccucgguacgcguuugccauggaacgcaaugcugggagcggaaucauuaucucugauacccccguccaugacugcaacacaaccugucaaaccccuaaaggcgccaucaauacaucccuccccuuccagaacauucacccgaucacgauuggcaagugcccuaaguaugugaaaagcaccaagcugagacuugcuacagggcugcggaauguucccucuauccagagccgcggacucuuuggcgccauugccggguucaucgagggaggcuggaccgggaugguggacggaugguacggcuaucaucaccagaacgaacaaggcuccggguacgcugcggaucugaaaucuacacagaaugccaucgacgagauuaccaacaaggucaauagcgugaucgagaaaaugaacacgcaguuuacagcuguuggaaaggaguucaaucaccuugagaagagaauugaaaaccugaauaaaaagguggaugacggcuuccucgauaucuggaccuacaacgccgagcugcugguccuccuggaaaaugagcggacccuugacuaucaugauuccaacgugaaaaaccuguacgagaagguccgcagccagcucaaaaauaacgccaaggaaauugggaauggauguuuugaguucuaucacaagugcgacaacacauguauggaaucugugaaaaauggcaccuacgauuauccuaaguacuccgaggaagcuaaacugaacagagaggagaucgacgggguuaaacuugaaagcacacggaucuaucaaauucuggccaucuacucuacgguggcguccagccucguccuggugguuucccugggcgcuauuucuuuuuggaugugcagcaauggaucccuccagugccgcaucuguauuuga

SEQ ID NO: 196056 - RNA, 1701 nt, Artificial Sequence
  derived and/or modified CDS sequence (opt5) from hemagglutinin__InfluenzaA__ADA86087
augaaggccauccuggugguccuccuguacaccuucgcuacagccaacgcggacacgcuuugcauuggcuaucacgcuaauaacagcaccgauacaguugacaccgugcuggagaaaaaugugacagucacccauuccgugaaccuccuggaagauaagcacaaugggaaacuuuguaagcugagaggaguugcuccccuccaucugggcaaaugcaacaucgccggguggauucugggaaauccugagugugaaucucucagcacagccuccucuuggagcuacaucguggagaccuuuuccucugacaacggcacgugcuauccgggggauuucauugacuacgaagaacugcgggagcagcuuagcuccgucagcucuuuugaacgcuucgagaucuuucccaagaccuccagcuggccuaaucacgauucuaacaagggagugacagccgcuuguccccaugccggcgcgaaauccuucuauaagaaucugaucuggcucguuaaaaagggcaacagcuacccuaaacugucuaaguccuauauuaaugacaaggggaaagaagugcuuguccuguggggaauccaccaccccagcaccuccgccgaucaacagucucucuaccagaacgcugacgccuacguguuugugggcacaagcagauauuccaagaaauucaagccugagauugcuauccggccgaaaguccgcgaucaggaggggagaaugaauuacuauuggacccugguugaacccggagacaagauuacguuugaggccacaggcaaccugguggugccucgguacgcguucgccauggaacgcaacgcugggagcggaaucauuaucucugauacccccguccaugacugcaauacaaccugucaaaccccuaaaggcgcccucaacacaucccugcccuuucagaauauccacccgauuacgaucggcaagugcccuaaguaugugaaaagcaccaaacuuagacuggcuacagggcuccggaacguucccucuauucagagccgcggacuguucggcgccaucgccggguuuauugagggaggcuggaccgggaugguggacggaugguacggcuaucaucaccagaaugaacaaggcuccggguacgcugcggaucuuaagucuacacagaacgccaucgacgagaucaccaauaaggucaacagcgugauugagaaaaugaauacgcaguucacagcuguuggaaaggaguucaaccaccuggagaagagaaucgaaaaucucaacaaaaagguggaugacggcuuucuggauauuuggaccuacaaugccgagcugcucguccugcuugaaaacgagcggacccuggacuaucaugauuccaaugugaaaaaccucuacgagaagguccgcaaccagcugaaaaauaacgccaaggaaaucgggaauggauguuucgaguuuuaucacaagugcgacaacacauguauggaaagcgugaaaaauggcaccuacgauuauccuaaguacucugaggaagcuaaacuuaacagagaggagauugacgggguuaagcuggaauccacacggaucuaucaaauccucgccauuuacagcacgguggcgucuucccugguccuggugguuagccucggcgcuaucuccuucuggaugugcucuaauggaagccugcagugccgcauuuguaucuga

SEQ ID NO: 196057 - RNA, 1701 nt, Artificial Sequence; identical to SEQ ID NO: 195539
  derived and/or modified CDS sequence (opt5) from hemagglutinin__InfluenzaA__ADA86088

SEQ ID NO: 196058 - RNA, 1701 nt, Artificial Sequence
  derived and/or modified CDS sequence (opt5) from hemagglutinin__InfluenzaA__ADB03603
augaaggccauccugauugugcuccuguacaccuucgcuacagcccacgcggacacgcuuugcaucggcuaucaugcuaacaauagcaccgauacagucgacaccguucuggagaagaacgugacagugacccacuccgucaaucuccuggaagauaagcauaacgggaaacuuuguaagcugagaggaguggcuccccuccaccugggcaaaugcaauauugccggguggauccugggaaacccugagugugaaucucucagcacagccuccucuuggagcuacauuguugagaccuccucuagcgacaauggcacgugcuauccgggggauuuuaucgacuacgaagaacugcgggagcagcuuuccagcgugucuuccuucgaacgcuuugagaucuuccccaagaccagcucuuggccuaaccaugauuccaauaagggagucacagccgcuuguccccacgccggcgcgaaaucuuuuuauaagaaccugauuuggcucgugaaaaagggcaauagcuacccuaaacuguccaagagcuauaucaacgacaaggggaaagaaguucuugugcuguggggcauucaccaucccuccaccucugccgaucaacagagccucuaccagaaugcugacgccuacgucuucgugggaacauccagauauagcaagaaauuuaagccugagaucgcuauucggccgaaagugcgcgaucaggaggggagaauggacuacuauuggacccuggucgaacccggagauaagaucacguucgaggccacaggcaaccugguugugccucgguacgcguuugccauggaacgcaaugcugggucuggaauuaucaucuccgacacccccgugcacgacugcaacacaaccugucaaaccccuaaaggcgccauuaacacaagccuccccuuccagaauauccauccgauuacgaucggcaagugcccuaaguaugucaaaucuaccaagcugagacuugcuacagggcugcggaacgugcccagcauucagucccgcggacucuuuggcgccaucgccggguucaucgagggaggcuggaccgggaugguugauggaugguacggcuaucaccaccagaaugaacaaggcucuggguacgcugcggaccugaaaagcacacagaacgccauugaugagaucaccaauaaggugaacuccgucauugagaaaaugaauacgcaguuuacagcugugggaaaggaguucaaccaucuugagaagagaaucgaaaaucugaacaaaaagguugacgauggcuuccucgacauuuggaccuacaaugccgagcugcuggugcuccuggaaaacgagcggacccuugauuaucacgacagcaaugucaaaaaccuguacgagaaggugcgcucucagcucaaaaauaacgccaaggaaaucgggaacggauguuuugaguucuaucauaagugcgauaauacauguauggaauccgucaaaaacggcaccuacgacuauccuaaguacagcgaggaagcuaaacugaauagagaggagaucgauggggugaaacuugaaucuacacggauuuaucaaauccuggccauuuacuccacgguugcgagcucccucgugcuggucgugucucugggcgcuaucagcuuuuggaugugcuccaacggaucucuccagugccgcauuuguaucuga

SEQ ID NO: 196059 - RNA, 1701 nt, Artificial Sequence; identical to SEQ ID NO: 194728
  derived and/or modified CDS sequence (opt5) from hemagglutinin__InfluenzaA__ADB03604

SEQ ID NO: 196060 - RNA, 1701 nt, Artificial Sequence
  derived and/or modified CDS sequence (opt5) from hemagglutinin__InfluenzaA__ADB03605
augaaggccauccuggugguccuccuguacaccuucgcuacagccaacgcggacacgcuuugcauuggcuaucacgcuaauaacagcaccgauacaguugacaccgugcuggagaaaaaugugacagucacccauuccgugaaccuccuggaagauaagcacaaugggaaacuuuguaagcugagaggaguugcuccccuccaucugggcaaaugcaacaucgccggguggauucugggaaauccugagugugaaucucucagcacagccuccucuuggagcuacaucguggagaccuccucuagcgacaacggcacgugcuauccgggggauuuuauugacuacgaagaacugcgggagcagcuuuccagcgucucuuccuucgaacgcuuugagaucuuccccaagaccagcucuuggccuaaucacgauuccaacaagggagugacagccgcuuguccccaugccggcgcgaaaucuuuuuauaagaaucugaucuggcucguuaaaaagggcaacagcuacccuaaacuguccaagagcuauauuaaugacaaggggaaagaagugcuuguccuguggggaauccaccaccccuccaccucugccgaucaacagagccucuaccagaacgcugacgccuacguguucgugggcacauccagauauagcaagaaauuuaagccugagauugcuauccggccgaaaguccgcgagcaggaagggagaauggauuacuauuggacccugguugagcccggagacaagauuacguucgaagccacaggcaaucugguggugccucgguacgcguuugccauggagcgcaacgcugggucuggaaucauuaucuccgauacccccguccaugacugcaacacaaccugucaaaccccuaaaggcgccaucaauacaagccuccccuuccagaacauucacccgaucacgauuggcaagugcccuaaguaugugaaaucuaccaagcugagacuugcuacagggcugcggaauguucccagcauccagucccgcggacucuuuggcgccauugccggguucaucgaaggaggcuggaccgggaugguggacggaugguacggcuaucaucaccagaacgagcaaggcucuggguacgcugcggaucugaaaagcacacagaaugccaucgacgagauuaccaacaaggucaauuccgugaucgaaaagaugaacacgcaguuuacagcuguuggaaaggaguucaaucaccuugaaaagagaauugagaaccugaauaaaaagguggaugacggcuuccucgauaucuggaccuacaacgccgaacugcugguccuccuggagaaugagcggacccuugacuaucaugauagcaacgugaaaaaucuguacgaaaagguccgcucucagcucaaaaacaacgccaaggagauugggaauggauguuuugaguucuaucacaagugcgacaacacauguauggaguccgugaaaaauggcaccuacgauuauccuaaguacagcgaagaggcuaaacugaacagagaggaaaucgacgggguuaaacuugagucuacacggaucuaucaaauucuggccaucuacuccacgguggcgagcucccucguccuggugguuucucugggcgcuauuagcuuuuggaugugcuccaauggaucucuccagugccgcaucuguauuuga

SEQ ID NO: 196061 - RNA, 1701 nt, Artificial Sequence; identical to SEQ ID NO: 194741
  derived and/or modified CDS sequence (opt5) from hemagglutinin__InfluenzaA__ADB03607

SEQ ID NO: 196062 - RNA, 1701 nt, Artificial Sequence; identical to SEQ ID NO: 195094
  derived and/or modified CDS sequence (opt5) from hemagglutinin__InfluenzaA__ADB03609

SEQ ID NO: 196063 - RNA, 1701 nt, Artificial Sequence; identical to SEQ ID NO: 194741
  derived and/or modified CDS sequence (opt5) from hemagglutinin__InfluenzaA__ADB03611

SEQ ID NO: 196064 - RNA, 1701 nt, Artificial Sequence
  derived and/or modified CDS sequence (opt5) from hemagglutinin__InfluenzaA__ADB03612
augaaggccauccuggugguccuccuguacaccuucgcuacagccaacgcggacacgcuuugcauuggcuaucacgcuaauaacagcaccgauacaguugacaccgugcuggagaagaaugugacagucacccauuccgugaaccuccuggaagauaagcacaaugggaaacuuuguaagcugagaggaguugcuccccuccaucugggcaaaugcaacaucgccggguggauucugggaaauccugagugugaaucucucagcacagccuccucuuggagcuacaucguggagaccuccucuagcgacaacggcacgugcuauccgggggauuuuauugacuacgaagaacugcgggagcagcuuuccagcgucucuuccuucgaacgcuuugagaucuuccccaagaccagcucuuggccuaaucacgauuccaacaagggagugacagccgcuuguccccaugccggcgcgaaaucuuuuuauaagaaucugaucuggcucguuaaaaagggcaacagcuacccuaaacuguccaagagcuauauuaaugacaaggggaaagaagugcuuguccuguggggaauccaccaccccuccaccucugccgaucaacagagccucuaccagaacgcugacgccuacguguucgugggcacauccagauauagcaagaaauuuaagccugagauugcuauccggccgaaaguccgcgaucaggaggggagaaugaauuacuauuggacccugguugaacccggagacaagauuacguucgaggccacaggcaaccugguggugccucgguacgcguuugccauggaacgcaacgcugggucuggaaucauuaucuccgauacccccguccaugacugcaauacaaccugucaaaccccuaaaggcgccaucaacacaagccuccccuuccagaauauucacccgaucacgauuggcaagugcccuaaguaugugaaaucuaccaagcugagacuugcuacagggcugcggaacguucccuuuauccagagccgcggacucuucggcgccauugccggguuuaucgagggaggcuggaccgggaugguggacggaugguacggcuaucaucaccagaaugaacaaggcuccggguacgcugcggaucugaaaucuacacagaacgccaucgacgagauuaccaauaaggucaacagcgugaucgagaaaaugaauacgcaguucacagcuguuggaaaggaguucaaccaccuugagaagagaauugaaaaucugaacaaaaagguggaugacggcuuucucgauaucuggaccuacaaugccgagcugcugguccuccuggaaaacgagcggacccuugacuaucaugauuccaaugugaaaaaccuguacgagaagguccgcagccagcucaaaaacaaugccaaggaaauugggaacggauguuucgaguuuuaucacaagugcgacaauacauguauggaaucugugaaaaacggcaccuacgauuauccuaaguacuccgaggaagcuaaacugaauagagaggagaucgacgggguuaaacuugaaagcacacggaucuaucaaauucuggccaucuacucuacgguggcguccagccucguccuggugguuucccugggcgcuauuucuuucuggaugugcagcaacggaucccuccagugccgcaucuguauuuga

SEQ ID NO: 196065 - RNA, 1701 nt, Artificial Sequence; identical to SEQ ID NO: 194741
  derived and/or modified CDS sequence (opt5) from hemagglutinin__InfluenzaA__ADB03614

SEQ ID NO: 196066 - RNA, 1701 nt, Artificial Sequence
  derived and/or modified CDS sequence (opt5) from hemagglutinin__InfluenzaA__ADB03617
augaaggccauccuggugguccuccuguacaccuucgcuacagccaacgcggacacgcuuugcauuggcuaucacgcuaauaacagcaccgauacaguugacaccgugcuggagaaaaaugugacagucacccauuccgugaaccuccuggaagauaagcacaaugggaaacuuuguaagcugagaggaguugcuccccuccaucugggcaaaugcaacaucgccggguggauucugggaaauccugagugugaaucucucagcacagccuccucuuggagcuacaucguggagaccuccucuagcgacaacggcacgugcuauccgggggauuuuauugacuacgaagaacugcgggagcagcuuuccagcgucucuuccuucgaacgcuuugagaucuuccccaagaccagcucuuggccuaaucacgauuccaacaagggagugacagccgcuuguccccaugccggcgcgaaaucuuuuuauaagaaucugaucuggcucguuaaaaagggcaacagcuacccuaaacuguccaagagcuauauuaaugacaaggggaaagaagugcuuguccuguggggaauccaccaccccuccaccucugccgaucaacagagccucuaccagaacgcugacgccuacguguucgugggcacauccagauauagcaagaaauuuaagccugagauugcuauccggccgaaaguccgcgagcaggaagggagaaugaauuacuauuggacccugguugagcccggagauaagauuacguucgaagccacaggcaaccugguggugccucgguacgcguuugccauggagcgcaacgcugggucuggaaucauuaucuccgacacccccguccaugauugcaauacaaccugucaaaccccuaaaggcgccaucaacacaagccuccccuuccagaauauucacccgaucacgauuggcaagugcccuaaguaugugaaaucuaccaagcugagacuugcuacagggcugcggaacguucccagcauccagucccgcggacucuuuggcgccauugccggguucaucgaaggaggcuggaccgggaugguggacggaugguacggcuaucaucaccagaaugagcaaggcucuggguacgcugcggaccugaaaagcacacagaacgccaucgaugagauuaccaauaaggucaacuccgugaucgagaaaaugaauacgcaguuuacagcuguuggaaaggaguucaaccaccuugaaaagagaauugagaaucugaacaaaaagguggacgauggcuuccucgacaucuggaccuacaaugccgaacugcugguccuccuggagaacgagcggacccuugauuaucaugacagcaaugugaaaaaccuguacgaaaagguccgcucucagcucaaaaacaaugccaaggagauugggaacggauguuuugaguucuaucacaagugcgauaauacauguauggaauccgugaaaaacggcaccuacgacuauccuaaguacagcaaagaagcuaagcugaauagagaggagaucgaugggguuaaacuugaaucuacacggaucuaucaaauucuggccaucuacuccacgguggcgagcucccucguccuggugguuucucugggcgcuauuagcuuuuggaugugcuccaacggaucucuccagugccgcaucuguauuuga

SEQ ID NO: 196067 - RNA, 1701 nt, Artificial Sequence; identical to SEQ ID NO: 195094
  derived and/or modified CDS sequence (opt5) from hemagglutinin__InfluenzaA__ADB03619

SEQ ID NO: 196068 - RNA, 1701 nt, Artificial Sequence
  derived and/or modified CDS sequence (opt5) from hemagglutinin__InfluenzaA__ADB03620
augaaggccauccuggugguccuccuguacaccuucgcuacagccaacgcggacacgcuuugcauuggcuaucacgcuaauaacagcaccgauacaguugacaccgugcuggagaagaaugugacagucacccauuccgugaaccuccuggaagggaagcacaauggaaaacuuuguaagcugagaggcguugcuccccuccaucuggggaaaugcaacaucgccggauggauucugggcaauccugagugugaaucucucagcacagccuccucuuggagcuacaucguggagaccuccucuagcgauaacgggacgugcuauccgggagacuuuauugauuacgaggaacugcgggagcagcuuuccagcgucucuuccuucgaacgcuuugagaucgugcccaagaccagcucuuggccuaaucacgacuccaacaagggcguuacagccgcuuguccccaugccggcgcgaaaucuuucuauaagaaucugaucuggcucgugaaaaaggggaacagcuacccuaaacuguccaagagcuauauuaaugauaagggaaaagaaguccuugugcuguggggcauccaccaccccuccaccucugccgaccaacagagccucuaccagaacgcugaugccuacguguuugucgggacauccagauauagcaagaaauucaagccugagauugcuauccggccgaaaguucgcgaccaggagggaagaaugaauuacuauuggacccugguggaacccggcgauaagauuacguuugaggccacagggaaccugguggucccucgguacgcguucgccauggaacgcaacgcuggaucuggcaucauuaucuccgacacccccgugcaugauugcaauacaaccugucaaaccccuaaaggcgccaucaacacaagccuccccuuucagaauauucacccgaucacgauugggaagugcccuaaguauguuaaaucuaccaagcugagacuugcuacaggacugcggaacgugcccagcauccagucccgcggccucuucggggccauugccggauuuaucgagggcggguggaccggaauggucgacggcugguacggcuaucaucaccagaaugaacaagggucuggauacgcugcggaccugaaaagcacacagaacgccaucgaugagauuaccaauaaggugaacuccguuaucgagaaaaugaauacgcaguucacagcugugggcaaggaauuuaaccaccuugagaagagaauugaaaaucugaacaaaaaggucgacgauggguuccucgacaucuggaccuacaaugccgagcugcuggugcuccuggaaaacgagcggacccuugauuaucaugacagcaaugucaaaaaccuguacgagaaggugcgcucucagcucaaaaacaaugccaaggaaauuggaaacggcuguuucgaguuuuaucacaagugcgauaauacauguauggaauccguuaaaaacgggaccuacgacuauccuaaguacagcgaggaagcuaaacugaauagagaggagaucgauggcgugaaacuugaaucuacacggaucuaucaaauucuggccaucuacuccacggucgcgagcucccucgugcugguugugucucugggagcuauuagcuucuggaugugcuccaacggcucucuccagugccgcaucuguauuuga

SEQ ID NO: 196069 - RNA, 1701 nt, Artificial Sequence
  derived and/or modified CDS sequence (opt5) from hemagglutinin__InfluenzaA__ADB03622
augaaggccauccuggugguccuccuguacaccuucgcuacagccaacgcggacacgcuuugcauuggcuaucacgcuaauaacagcaccgauacaguugacaccgugcuggagaaaaaugugacagucacccauuccgugaaccuccuggaagauaagcacaaugggaaacuuuguaagcugagaggaguugcuccccuccaucugggcaaaugcaacaucgccggguggauucugggaaauccugagugugaaucucucagcacagccuccucuuggagcuacaucguggagaccuccucuagcgacaacggcacgugcuauccgggggauuuuauuaauuacgaagaacugcgggagcagcuuuccagcgucucuuccuucgaacgcuuugagaucuuccccaagaccagcucuuggccuaaccacgacuccaauaagggagugacagccgcuuguccccaugccggcgcgaaaucuuuuuauaagaaccugaucuggcucguuaaaaagggcaauagcuacccuaaacuguccaagagcuauauuaacgauaaggggaaagaagugcuuguccuguggggaauccaccaccccuccaccucugccgaccaacagagccucuaccagaaugcugaugccuacguguucgugggcacauccagauauagcaagaaauuuaagccugagauugcuauccggccgaaaguccgcgaccaggaggggagaaugaacuacuauuggacccugguugaacccggagauaagauuacguucgaggccacaggcaaccugguggugccucgguacgcguuugccauggaacgcaaugcugggucuggaaucauuaucuccgacacccccguccaugauugcaacacaaccugucaaaccccuaauggcgccaucaacacaagccuccccuuccagaauauucacccgaucacgauuggcaaaugcccuaaguaugugaagucuaccaaacugagacuugcuacagggcugcggaacguucccagcauccagucccgcggacucuuuggcgccauugccggguucaucgagggaggcuggaccgggaugguggacggaugguacggcuaucaucaccagaaugaacaaggcucuggguacgcugcggaccuuaagagcacacagaacgccaucgauaaaauuaccaauaaggucaacuccgugaucgagaaaaugaauacgcaguuuacagcuguuggaaaggaguucaaccaccuugaaaagagaauugagaaucugaacaaaaagguggacgauggcuuccucgacaucuggaccuacaaugccgaacugcugguccuccuggagaacgaacggacccuugauuaucaugacagcaacgugaaaaaucuguacgagaagguccgcucucagcucaaaaacaaugccaaggagauugggaacggauguuuugaguucuaucacaagugcgauaauacauguauggaguccgugaaaaacggcaccuacgacuauccuaaguacagcgaagaggcuaaacugaauagagaagagaucgaugggguuaagcuggagucuacacggaucuaucaaauucuggccaucuacuccacgguggcgagcucccucguccuggugguuucucugggcgcuauuagcuuuuggaugugcuccaacggaucucuccagugccgcaucuguauuuga

SEQ ID NO: 196070 - RNA, 1701 nt, Artificial Sequence; identical to SEQ ID NO: 196069
  derived and/or modified CDS sequence (opt5) from hemagglutinin__InfluenzaA__ADB03623

SEQ ID NO: 196071 - RNA, 1701 nt, Artificial Sequence
  derived and/or modified CDS sequence (opt5) from hemagglutinin__InfluenzaA__ADB03628
auggaggccauccuggugguccuccuguacaccuucgcuacagccaacgcggacacgcuuugcauuggcuaucacgcuaauaacagcaccgauacaguugacaccgugcuggaaaagaaugugacagucacccauuccgugaaccuccuggaggauaaacacaaugggaagcuguguaaacugagaggaguugcgccccuccaucugggcaagugcaacaucgccggguggauucugggaaauccugaaugugagucucucagcacagcuuccucuuggagcuacaucguggaaaccuccucuagcgacaacggcacgugcuauccgggggauuuuauugacuacgaggagcugcgggaacagcuuuccagcgucucuuccuucgagcgcuuugaaaucuuccccaaaaccagcucuuggccuaaucacgauuccaacaagggagugacagccgcuuguccccaugccggcgccaagagcuuuuauaaaaaucugaucuggcucguuaagaaaggcaacucuuacccuaagcuguccaaaagcuauauuaaugacaaggggaaggaggugcuuguccuguggggaauccaccaccccuccaccucugccgaucaacagagccucuaccagaacgcugacgccuacguguucgugggcacauccagauauagcaaaaaguuuaaaccugagauugcuauccggccgaagguccgcgaucaggaagggagaaugaauuacuauuggacccugguugagcccggagacaaaauuacguucgaagccacaggcaaccugguggugccucgguacgcguuugccauggagcgcaacgcugggucuggaaucauuaucuccgauacccccguccaugacugcaauacaaccugucaaaccccuaagggcgccaucaacacaagccuccccuuccacaauauucauccgaucacgauuggcaaaugcccuaaguaugugaagucuaccaaacugagacuugcuacagggcugcggaacguucccagcauccagucccgcggacucuuuggcgccauugccggguucaucgaaggaggcuggaccgggaugguggacggaugguacggcuaucaccaccagaaugagcagggcucuggguacgcugcggaucuuaagagcacacaaaacgccaucgacgagauuaccaauaaagucaacuccgugaucgaaaagaugaauacgcaguuuacagcuguuggaaaagaguucaaccaucuugaaaagagaauugagaaucugaacaagaaaguggaugacggcuuccucgauaucuggaccuacaaugccgaacugcugguccuccuggagaacgagcggacccuugacuaucacgauagcaaugugaagaaccuguacgaaaaaguccgcucucagcucaagaacaaugccaaagagauugggaacggauguuuugaguucuaucauaagugcgacaauacauguauggaauccgugaagaacggcaccuacgauuauccuaaauacagcgaagaggcuaagcugaauagagaggaaaucgacgggguuaaacuugagucuacacggaucuaucagauucuggccaucuacuccacgguggcgagcucccucguccuggugguuucucugggcgcuauuagcuuuuggaugugcuccaacggaucucuccaaugccgcaucuguauuuga

SEQ ID NO: 196072 - RNA, 1701 nt, Artificial Sequence
  derived and/or modified CDS sequence (opt5) from hemagglutinin__InfluenzaA__ADB03629
augaaggccauccuggugguccuccuguacaccuucacaacggcuaacgccgacacccuuugcauuggcuaucacgcgaauaacagcacagauaccguugacacagugcuggagaaaaaugugaccgucacacauuccgugaaccuccuggaagauaagcacaaugggaaacuuuguaagcugagaggaguugcuccccuccaucugggcaaaugcaacaucgccggguggauucugggaaauccugagugugaaucucucagcaccgccuccucuuggagcuacaucguggagacguccucuagcgacaacgggaccugcuauccgggcgauuuuauugacuacgaagaacugcgggagcagcuuuccagcgucucuuccuucgaacgcuuugagaucuuccccaagacaagcucuuggccuaaucacgauuccaacaagggagugaccgcugccuguccccaugcuggcgccaagagcuuuuauaagaaucugaucuggcucguuaaaaagggcaacucuuacccuaaacuguccaagagcuauauuaaugacaaggggaaagaagugcuuguccuguggggaauccaccaccccuccacaucugcggaucaacagagccucuaccagaacgccgacgcuuacguguucgugggcaccuccagauauagcaagaaauuuaagccugagauugccauccggccgaaaguccgcgagcaggaagggagaaugaauuacuauuggacgcugguugagcccggagauaagauuacauucgaagcuaccggcaaccugguggugccucgguacgccuuugcgauggagcgcaacgccgggucuggaaucauuaucuccgacacacccguccaugauugcaauaccaccugucaaacaccuaaaggcgcuaucaacacgagccuccccuuccagaauauucacucuaucaccauuggcaagugcccgaaguaugugaaaagcacaaagcugagacuugccaccgggcugcggaacguuccuuccauccagucucgcggacucuuuggcgcuauugccggguucaucgaaggaggcuggacagggaugguggacggaugguacggcuuucaucaccagaaugagcaaggcagcggguaugccgcugaccugaaauccacccagaacgcgaucgaugagauuacgaauaaggucaacagcgugaucgagaaaaugaauacacaguucaccgccguuggaaaggaguucaaccaccuugaaaagagaauugagaaucugaacaaaaagguggacgauggcuuucucgacaucuggaccuacaaugcugaacugcugguccuccuggagaacgagcggacacuugauuaccaugacucuaaugugaaaaaccuguaugaaaagguccgcucccagcucaaaaacaaugccaaggagauugggaacggauguuucgaauuuuaccacaagugcgauaauaccuguauggagagcgugaaaaacggcacauaugacuaccccaaguauucugaagaggccaaacugaauagagaggaaaucgaugggguuaaacuugaguccacgcggaucuaccaaauucuggcuaucuauagcaccguggccuccucucucguccuggugguuagccugggcgcgauuuccuucuggaugugcucuaacggaagccuccagugccgcaucuguauuuga

SEQ ID NO: 196073 - RNA, 1701 nt, Artificial Sequence
  derived and/or modified CDS sequence (opt5) from hemagglutinin__InfluenzaA__ADB03630
augaaggccauccuggugguccuccuguacaccuucgcuacagccaacgcggacacgcuuugcauuggcuaucacgcuaauaacagcaccgauacaguugacaccgugcuggagaaaaaugugacagucacccauuccgugaaccuccuggaagauaagcacaaugggaaacuuuguaagcugagaggaguugcuccccuccaucugggcaaaugcaacaucgccggguggauucugggaaauccugagugugaaucucucagcacagccuccucuuggagcuacaucguggagaccuccucuagcgacaacggcacgugcuauccgggggauuuuauugacuacgaagaacugcgggagcagcuuuccagcgucucuuccuucgaacgcuuugagaucuuccccaagaccagcucuuggccuaaucacgauuccaacaagggagugacagccgcuuguccccaugccggcgcgaaaucuuuuuauaagaaucugaucuggcucguuaaaaagggcaacagcuacccuaaacuguccaagagcuauauuaaugacaaggggaaagaagugcuuguccuguggggaauccaccaccccuccaccucugccgaucaacagagccucuaccagaacgcugacgccuacguguucgugggcacauccagauauagcaagaaauuuaagccugagauugcuauccggccgaaaguccgcgaucaggaggggagaaugaauuaccauuggacccugguugaacccggagacaagauuacguucgaggccacaggcaaccugguggugccucgguaugcguuugccauggaacgcaacgcugggucuggaaucauuaucuccgauacccccguccacgacugcaauacaaccugucaaaccccuaaaggcgccaucaacacaagccuccccuuccagaauauucauccgaucacgauuggcaagugcccuaaguacgugaaaucuaccaagcugagacuugcuacagggcugcggaacguucccagcauccagucccgcggacucuuuggcgccauugccggguucaucgagggaggcuggaccgggaugguggacggaugguauggcuaccaccaccagaaugaacaaggcucuggguaugcugcggaucugaaaagcacacagaacgccaucgacgagauuaccaauaaggucaacuccgugaucgagaaaaugaauacgcaguuuacagcuguuggaaaggaguucaaccaucuugagaagagaauugaaaaucugaacaaaaagguggaugacggcuuccucgauaucuggaccuacaaugccgagcugcugguccuccuggaaaacgagcggacccuugacuaccacgauagcaaugugaaaaaccuguaugagaagguccgcucucagcucaaaaacaaugccaaggaaauugggaacggauguuuugaguucuaccauaagugcgacaauacauguauggaauccgugaaaaacggcaccuaugauuacccuaaguauagcaaagaggcuaagcugaauagagaagagaucgacgggguuaaacuugagucuacacggaucuaccaaauucuggccaucuauuccacgguggcgagcucccucguccuggugguuucucugggcgcuauuagcuuuuggaugugcuccaacggaucucuccagugccgcaucuguauuuga

SEQ ID NO: 196074 - RNA, 1701 nt, Artificial Sequence; identical to SEQ ID NO: 195486
  derived and/or modified CDS sequence (opt5) from hemagglutinin__InfluenzaA__ADB25319

SEQ ID NO: 196075 - RNA, 1701 nt, Artificial Sequence; identical to SEQ ID NO: 194741
  derived and/or modified CDS sequence (opt5) from hemagglutinin__InfluenzaA__ADB25321

SEQ ID NO: 196076 - RNA, 1701 nt, Artificial Sequence
  derived and/or modified CDS sequence (opt5) from hemagglutinin__InfluenzaA__ADB27970
augaaggccauccuggugguccuccuguacaccuucgcuacagccaacgcggacacgcuuugcauuggcuaucacgcuaauaacagcaccgauacaguugacaccgugcuggagaagaaugugacagucacccauuccgugaaccuccuggaagauaagcacaaugggaaacuuuguaagcugagaggaguugcuccccuccaucugggcaaaugcaacaucgccggguggauucugggaaauccugagugugaaucucucagcacagccuccucuuggagcuacaucguggagaccuccucuagcgacaacggcacgugcuauccgggggauuuuauugacuacgaagaacugcgggagcagcuuuccagcgucucuuccuucgaacgcuuugagaucuuccccaagaccagcucuuggccuaaucacgauuccaacaagggagugacagccgcuuguccccaugccggcgcgaaaucuuuuuauaagaaucugaucuggcucguuaaaaagggcaacagcuacccuaaacuguccaagagcuauauuaaugacaaggggaaagaagugcuuguccuguggggaauccaccaccccuccaccucugccgaucaacagagccucuaccagaacgcugacgccuacguguucgugggcacauccagauauagcaagaaauuuaagccugagauugcuauccggccgaaaguccgcgaucaggaggggagaaugaauuacuauuggacccugguugaacccggagacaagauuacguucgaggccacaggcaaccugguggugccucgguacgcguuugccauggaacgcgaugcugggucuggaaucauuaucuccgacacccccguccaugacugcaacacaaccugucaaaccccuaaaggcgccaucaauacaagccuccccuuccagaacauucacccgaucacgauuggcaagugcccuaaguaugugaaaucuaccaagcugagacuugcuacagggcugcggaauguucccagcauccagucccgcggacucuuuggcgccauugccggguucaucgagggaggcuggaccgggaugguggauggaugguacggcuaucaucaccagaacgaacaaggcucuggguacgcugcggaccugaaaagcacacagaaugccaucgaugagauuaccaacaaggucaauuccgugaucgagaaaaugaacacgcaguuuacagcuguuggaaaggaguucaaucaccuugagaagagaauugaaaaccugaauaaaaagguggacgauggcuuccucgacaucuggaccuacaacgccgagcugcugguccuccuggaaaaugagcggacccuugauuaucaugacagcaacgugaaaaaucuguacgagaagguccgcucucagcucaaaaacaacgccaaggaaauugggaauggauguuuugaguucuaucacaagugcgauaacacauguauggaauccgugaaaaauggcaccuacgacuauccuaaguacagcgaggaagcuaaacugaacagagaggagaucgaugggguuaaacuugaaucuacacggaucuaucaaauucuggccaucuacuccacgguggcgagcucccucguccuggugguuucucugggcgcuauuagcuuuuggaugugcuccaauggaucucuccagugccgcaucuguauuuga

SEQ ID NO: 196077 - RNA, 1701 nt, Artificial Sequence; identical to SEQ ID NO: 194741
  derived and/or modified CDS sequence (opt5) from hemagglutinin__InfluenzaA__ADB27980

SEQ ID NO: 196078 - RNA, 1701 nt, Artificial Sequence; identical to SEQ ID NO: 194741
  derived and/or modified CDS sequence (opt5) from hemagglutinin__InfluenzaA__ADB54352

SEQ ID NO: 196079 - RNA, 1701 nt, Artificial Sequence; identical to SEQ ID NO: 194741
  derived and/or modified CDS sequence (opt5) from hemagglutinin__InfluenzaA__ADB54355

SEQ ID NO: 196080 - RNA, 1698 nt, Artificial Sequence
  derived and/or modified CDS sequence (opt5) from hemagglutinin__InfluenzaA__ADB65926
augaaggugaaacugcucguccugcuuugcaccuucacagccacguacgcugacaccaucuguauuggcuaucacgccaacaauagcacagauaccguugacacagugcuggagaagaacgugaccgucacacauuccgugaaucuccuggaagauaaacacaacgggaaacuuugccugcucaagggaaaggcgccccugcagcugggcaauuguucuguugcuggguggauccucggaaacccugagugcggccugcuuauuagcaaggaauccuggucuuacaucguggagagaccgaaucccgaaaacgggaccuguuauccuggacauuuugccgacuacgaggagcugcgggaacaacucagcuccgucucuagcuucgagcgcuuugaaauuuuccccaaaggcuccagcuggccuaaucacacggugaccggcguuucugccuccugcagccauaacggggagucuuccuuuuauaagaaucugcuuuggcugacagggaaaaacggccucuaccccaaucugagcaagucuuaugcuaacaauaaagagaaggaagugcugguccucuggggagugcaccacccuccgaacaucggagaucagaugacccuguaccauaaggagaacgccuacguguccgucguuagcucccacuauucuagaaaauucacacccgaaaucgcuaagcggccuaaagugcgcgaccaggagggcagaauuaauuacuauuggacccuucuggaacccggggauacgaucauuuuugaggccaacggaaaucucaucgcgccucgguacgccuucgcucugagccgcggcuuuggcuccgggauuaucaacagcaaugcccccauggacgagugugaugcuaagugccagacaccgcaaggagccauuaacucuucccuuccuuuccagaaugugcaucccgucaccaucggcgaauguccuaaauaugugagaagcgcgaagcugcggaugguuacagggcuccgcaacauccccucuauucagagcagaggacuguuuggcgccaucgcuggguucauugagggaggcuggaccggcaugguggacgggugguacggauaucaccaccagaaugaacaaggcuccggguacgccgcugaucagaaaucuacccagaacgccaucaauggaauuacaaacaaggucaauagcgugaucgagaagaugaacacgcaguuuaccgccguuggcaaagaguucaauaagcuggaacggcgcauggagaaccucaacaaaaagguggacgauggguucaucgacgucuggacauacaaugcugaacugcuugugcugcucgagaacgaaagaacccuggacuuucaugauuccaaugucaaaaaccuuuaugagaaggugaagaaucaacugaaaaacaaugcgaaggaaaugggcaacggaugcuucgaguuuuaccacaaauguaaugacgagugcauggaaagcguuaagaacggcacauaugauuaccccaaauauucugaggaauccaagcucagccgggagaagauugacggggugaaacuggagucuaugggagucuaccagauccuggccauuuauuccaccguggcuagcucccucguucugcuugugucucugggcgccaucggguucuggaugugcagcaauggaucccuccagugucgcauuugcaucuga

SEQ ID NO: 196081 - RNA, 1698 nt, Artificial Sequence
  derived and/or modified CDS sequence (opt5) from hemagglutinin__InfluenzaA__ADB80153
augaaggugaaacugcucgcccugcuuugcaccuucacagcuacguacgccgacaccaucuguauuggcuaucacgcgaacaauagcacagauaccgucgacacaguucuggagaagaacgugaccgugacacauuccgucaaucuccuggaagauaaccacaaugggaaacuuugccugcucaagggaaucgcuccccugcagcugggcaacuguucuguggccggguggauucucggaaauccugagugcgaacugcuuaucagcaaagaguccuggucuuacauuguugaaaagccgaaccccgagaauggcaccuguuauccugggcauuuugccgacuacgaggaacugagagagcaacucagcuccgugucuagcuucgaacgguuugagaucuuccccaaggaguccagcuggccuaaccacacggucaccggagugucugcuuccugcagccauaauggcgaaucuuccuuuuauaaaaaccugcuuuggcugacaggcaagaaugggcucuaccccaaccugagcaaaucuuucgccaauaacaaggagaaagaaguucuggugcucuggggaguccaccacccuccgaacaucggcgaucagaugacccuguaucauaaggagaaugcuuacguguccguggucagcucccacuacucucgcaaguuuacacccgaaauugccaaaagaccuaagguucgggaccaggaggggcgcaucaacuauuacuggacccuucuggagcccggagauacgauuaucuucgaagcgaauggcaaccucauugccccuagauaugcuuuugcccugagccggggguucggauccggcaucauuaauagcaacgcucccauggacgagugugaugccaaaugccagacaccgcaaggcgcgaucaauucuucccuuccuuuucagaacgugcaucccgugaccaucggggaauguccuaaguacguccgcagcacaaaacugagaauggugaccggacuccggaauauucccucuauccagagccgcggccuguucggggccauugcuggauuuaucgagggcggguggaccggaaugguugacggcugguauggcuaccaccaccagaacgaacaaggguccggauaugccgcugaucagaagucuacacagaaugccauuaacggcaucacgaauaaagugaacagcgucaucgagaagaugaauacccaguucacagccguggggaaggaguucaacaaacuggaaagacggauggagaaccucaauaagaaaguugacgauggauuuauugacguguggaccuacaacgcugaacugcuuguccugcucgagaaugaacgcacacuggacuuccaugauuccaacgugaagaaucuuuacgagaaagucaagaaccaacugaagaauaacgcgaaagagaucggcaaugggugcuuugaguucuaucacaaguguaacgacgaaugcauggaaagcgugaaaaauggcaccuacgauuaucccaaguacucugaggaguccaaacucagcagagaaaagauugacggaguuaagcuggagucuaugggcguguaucagauccuggccauuuacuccacggucgcuagcucccucgugcugcuuguuucucugggggccaucagcuuuuggaugugcuccaacggaucucuccagugucggaucugcauuuga

SEQ ID NO: 196082 - RNA, 1701 nt, Artificial Sequence; identical to SEQ ID NO: 195842
  derived and/or modified CDS sequence (opt5) from hemagglutinin__InfluenzaA__ADB81399

SEQ ID NO: 196083 - RNA, 1701 nt, Artificial Sequence; identical to SEQ ID NO: 195842
  derived and/or modified CDS sequence (opt5) from hemagglutinin__InfluenzaA__ADB81409

SEQ ID NO: 196084 - RNA, 1701 nt, Artificial Sequence
  derived and/or modified CDS sequence (opt5) from hemagglutinin__InfluenzaA__ADB81419
augaaggccauccuggugguccuccuguacaccuucgcuacagccaacgcggacacgcuuugcauuggcuaucacgcuaauaacagcaccgauacaguugacaccgugcuggagaaaaaugugacagucacccauuccgugaaccuccuggaagauaagcacaaugggaaacuuuguaagcugagaggaguugcuccccuccaucugggcaaaugcaacaucgccggguggauucugggaaauccugagugugaaucucucagcacagccuccucuuggagcuacaucguggagaccuccucuagcgacaacggcacgugcuauccgggggauuuuauugacuacgaagaacugcgggagcagcuuuccagcgucucuuccuucgaacgcuuugagaucuuccccaagaccagcucuuggccuaaucacgauuccaacaagggagugacagccgcuuguccccaugccggcgcgaaaucuuuuuauaagaaucugaucuggcucguuaaaaagggcaacagcuacccuaaacuguccaagagcuauauuaaugacaaggggaaagaagugcuuguccuguggggaauccaccaccccuccaccucugccgaucaacagagccucuaccagaacgcugacgccuacguguucgugggcacauccagauauagcaagaaauuuaagccugagauugcuauccggccgaaaguccgcgaucaggaggggagaaugaauuacuauuggacccugguugaacccggagacaagauuacguucgaggccacaggcaaccugguggugccucgguacgcguuugccauggaacgcaacgcugggucuggaaucauuaucuccgauacccccguccaugacugcaauacaaccugucaaaccccuaaaggcgccaucaacacaagccuccccuuccagaauauucacccgaucacgauuggcaagugcccuaaguaugugaaaucuaccaagcugagacuugcuacagggcugcggaacauccccagcauucagucccgcggacucuuuggcgccaucgccggguucaucgagggaggcuggaccgggaugguugacggaugguacggcuaucaucaccagaaugaacaaggcucuggguacgcugcggaucugaaaagcacacagaacgccauugacgagaucaccaauaaggugaacuccgucauugagaaaaugaauacgcaguuuacagcugugggaaaggaguucaaccaccuugagaagagaaucgaaaaucugaacaaaaagguugaugacggcuuccucgauauuuggaccuacaaugccgagcugcuggugcuccuggaaaacgagcggacccuugacuaucaugauagcaaugucaaaaaccuguacgagaaggugcgcucucagcucaaaaacaaugccaaggaaaucgggaacggauguuuugaguucuaucacaagugcgacaauacauguauggaauccgucaaaaacggcaccuacgauuauccugaguacagcgaagaggcuaagcugaauagagaggaaaucgacggggugaaacuugagucuacacggauuuaucaaauccuggccauuuacuccacgguugcgagcucccucgugcuggucgugucucugggcgcuaucagcuuuuggaugugcuccaacggaucucuccagugccgcauuuguaucuga

SEQ ID NO: 196085 - RNA, 1701 nt, Artificial Sequence; identical to SEQ ID NO: 195901
  derived and/or modified CDS sequence (opt5) from hemagglutinin__InfluenzaA__ADB81429

SEQ ID NO: 196086 - RNA, 1701 nt, Artificial Sequence
  derived and/or modified CDS sequence (opt5) from hemagglutinin__InfluenzaA__ADB81439
augaaggccauccuggugguccuccuguacaccuucgcuacagccaacgcggacacgcuuugcauuggcuaucacgcuaauaacagcaccgauacaguugacaccgugcuggagaagaaugugacagucacccauuccgugaaccuccuggaagauaagcacaaugggaaacuuuguaagcugagaggaguugcuccccuccaucugggcaaaugcaacaucgccggguggauucugggaaauccugagugugaaucucucagcacagccuccucuuggagcuacaucguggagaccuccucuagcgacaacggcacgugcuauccgggggauuuuauugacuacgaagaacugcgggagcagcuuuccagcgucucuuccuucgaacgcuuugagaucuuccccaagaccagcucuuggccuaaucacgaucccaacaagggagugacagccgcuuguccucaugccggcgcgaaauccuuuuauaagaaucugaucuggcucguuaaaaagggcaacagcuaccccaaacugucuaaguccuauauuaaugacaaggggaaagaagugcuuguccuguggggaauccaccacccuagcaccuccgccgaucaacagucucucuaccagaacgcugacgccuacguguucgugggcacaagcagauauuccaagaaauuuaagccggagauugcuauccggcccaaaguccgcaaucaggaggggagaaugaacuacuauuggacccugguugaaccuggagauaagauuacguucgaggccacaggcaaccugguggugccccgguacgcguuugccauggaacgcaaugcugggagcggaaucauuaucucugacaccccuguccaugauugcaacacaaccugucaaacccccaaaggcgccaucaauacaucccucccguuccagaacauucacccuaucacgauuggcaagugccccaaguaugugaaaagcaccaagcugagacuugcuacagggcugcggaauguuccuucuauccagagccgcggacucuuuggcgccauugccggguucaucgagggaggcuggaccgggaugguggacggaugguacggcuaucaucaccagaacgaacaaggcuccggguacgcugcggaccugaaaucuacacagaaugccaucgaugagauuaccaacaaggucaauagcgugaucgagaaaaugaacacgcaguuuacagcuguuggaaaggaguucaaucaccuugagaagagaauugaaaaccugaauaaaaagguggacgauggcuuccucgacaucuggaccuacaacgccgagcugcugguccuccuggaaaaugagcggacccuugauuaucaugacuccaacgugaaaaaccuguacgagaagguccgcagccagcucaaaaauaacgccaaggaaauugggaauggauguuuugaguucuaucacaagugcgauaacacauguauggaaucugugaaaaauggcaccuacgacuaucccaaguacuccgaggaagcuaaacugaacagagaggagaucgaugggguuaaacuugaaagcacacggaucuaucaaauucuggccaucuacucuacgguggcguccagccucguccuggugguuucccugggcgcuauuucuuuuuggaugugcagcaauggaucccuccagugccgcaucuguauuuga

SEQ ID NO: 196087 - RNA, 1701 nt, Artificial Sequence
  derived and/or modified CDS sequence (opt5) from hemagglutinin__InfluenzaA__ADB81449
augaaggccauccuggugguccuccuguacaccuucgcuacagccaacgcggacacgcuuugcauuggcuaucacgcuaauaacagcaccgauacaguugacaccgugcuggagaagaaugugacagucacccauuccgugaaccuccuggaagauaagcacaaugggaaacuuuguaagcugagaggaguugcuccccuccaucugggcaaaugcaacaucgccggguggauucugggaaauccugagugugaaucucucagcacagccuccucuuggagcuacaucguggagaccuccucuagcgacaacggcacgugcuauccgggggauuuuauugacuacgaagaacugcgggagcagcuuuccagcgucucuuccuucgaacgcuuugagaucuuccccaagaccagcucuuggccuaaucacgauuccaacaagggagugacagccgcuuguccccaugccggcgcgaaaucuuuuuauaagaaucugaucuggcucguuaaaaagggcaacagcuacccuaaacugaauaaguccuauauuaacgacaaggggaaagaagugcuuguccuguggggaauccaccaccccagcaccuccgccgaucaacagucucucuaccagaaugcugacgccuacguguucgugggcacaagcagauauuccaagaaauuuaagccugagauugcuauccggccgaaaguccgcgaucaggaggggagaaugaacuacuauuggacccugguugaacccggagacaagauuacguucgaggccacaggcaaccugguggugccucgguacgcguuugccauggaacgcaaugcugggagcggaaucauuaucucugauacccccguccaugacugcaacacaaccugucaaaccccuaaaggcgccaucaauacaucccuccccuuccagaacauucacccgaucacgauuggcaagugcccuaaguaugugaaaagcaccaagcugagacuugcuacagggcugcggaauguucccucuauccagagccgcggacucuuuggcgccauugccggguucaucgagggaggcuggaccgggaugguggacggaugguacggcuaucaucaccagaacgaacaaggcuccggguacgcugcggaucugaaaucuacacagaaugccaucgacgagauuaccaacaaggucaauagcgugaucgagaaaaugaacacgcaguuuacagcuguuggaaaggaguucaaucaccuugagaagagaauugaaaaccugaauaaaaagguggaugacggcuuccucgauaucuggaccuacaacgccgagcugcugguccuccuggaaaaugagcggacccuugacuaucaugauuccaacgugaaaaaccuguacgagaagguccgcagccagcucaaaaauaacgccaaggaaauugggaauggauguuuugaguucuaucacaagugcgacaacacauguauggaaucugugaaaaauggcaccuacgauuauccuaaguacuccgaggaagcuaaacugaacagagaggagaucgacgggguuaaacuugaaagcacacggaucuaucaaauucuggccaucuacucuacgguggcguccagccucguccuggugguuucccugggcgcuauuucuuuuuggaugugcagcaauggaucccuccagugccgcaucuguauuuga

SEQ ID NO: 196088 - RNA, 1701 nt, Artificial Sequence
  derived and/or modified CDS sequence (opt5) from hemagglutinin__InfluenzaA__ADB81459
augaaggccauccuggugguccuccuguacaccuucgcuacagccaacgcggacacgcuuugcauuggcuaucacgcuaauaacagcaccgauacaguugacaccgugcuggagaagaaugugacagucacccauuccgugaaccuccuggaagauaagcacaaugggaaacuuuguaagcugagaggaguugcuccccuccaucugggcaaaugcaacaucgccggguggauucugggaaauccugagugugaaucucucagcacagccuccucuuggagcuacaucguggagaccuccucuagcgacaacggcacgugcuauccgggggauuuuauugacuacgaagaacugcgggagcagcuuuccagcgucucuuccuucgaacgcuuugagaucuuccccaagaccagcucuuggccuaaucacgauuccaacaagggagugacagccgcuuguccccaugccggcgcgaaaucuuuuuauaagaaucugaucuggcucguuaaaaagggcaacagcuacccuaaacugaauaaguccuauauuaacgacaaggggaaagaagugcuuguccuguggggaauccaccaccccagcaccuccgccgaucaacagucucucuaccagaaugcugacgccuacguguucgugggcacaagcagauauuccaagaaauuuaagccugagauugcuauccggccgaaaguccgcgaucaggaggggagaaugaacuacuauuggacccugguugaacccggagacaagauuacguucgaggccacaggcaaccugguggugccucgguacgcguuugccauggaacgcaaugggggaagcggcaucauuaucucugauacccccguccaugacugcaacacaaccugucaaaccccuaaaggcgcuaucaauacaucccuccccuuccagaacauucacccgaucacgauugggaagugcccuaaguaugugaaaagcaccaagcugagacuugccacaggacugcggaauguucccucuauccagagccgcggccucuuuggggcuauugccggauucaucgagggcggguggaccggaaugguggacggcugguacggcuaucaucaccagaacgaacaaggguccggauacgccgcugaucugaaaucuacacagaaugcgaucgacgagauuaccaacaaggucaauagcgugaucgagaaaaugaacacgcaguuuacagccguuggcaaggaguucaaucaccuugagaagagaauugaaaaccugaauaaaaagguggaugacggguuccucgauaucuggaccuacaacgcugagcugcugguccuccuggaaaaugagcggacccuugacuaucaugauuccaacgugaaaaaccuguacgagaagguccgcagccagcucaaaaauaacgccaaggaaauuggaaauggcuguuuugaguucuaucacaagugcgacaacacauguauggaaucugugaaaaaugggaccuacgauuauccuaaguacuccgaggaagccaaacugaacagagaggagaucgacggcguuaaacuugaaagcacacggaucuaucaaauucuggcuaucuacucuacgguggccuccagccucguccuggugguuucccugggagcgauuucuuuuuggaugugcagcaauggcucccuccagugccgcaucuguauuuga

SEQ ID NO: 196089 - RNA, 1701 nt, Artificial Sequence
  derived and/or modified CDS sequence (opt5) from hemagglutinin__InfluenzaA__ADB82655
augaaggccauccugcucgugcugcuuugcacccuggcugccgcgaacgcugacacacucuguauuggcuaccacgccaauaacagcacggauaccgucgacacaguucuggagaaaaaugugaccgugacacauuccgucaaccuucuggaagauagacacaaugggaagcucugcaaccugcggggaaaagcuccccugcaucucggcaaguguaauaucgccggguggcugcuuggaaacccugagugcgaacuccuguucgccguuaauucuuggagcuauauuguggagaccuccaacucugacaauggcacauguuacccgggggauuuuaccagcuaugaggaacugcgcgagcagcuuuccucugugagcuccuucgaaagauuugagaucuuccccaaagcuagcucuuggccuaaccacgaaacgaaucggggagucaccgccgcgugccccuacgccggcacaaacggcuuuuaucgcaaucugauuuggcucgugaagaaggagaacuccuacccuaaacugagaaagagcuauguuaacaauaaaaagaaagaggugcugguccucugggggauccaucaucccccuaccaacacagaccaacagucucuguaccagaaugcugaugccuacguguucgugggauccagcaaguauucucggaaguuuaaaccggaaaucgcugagcgccccaaggucagaggccaggccgggcggaugaacuacuauuggacccuuauugaaccuggagacacgaucacauucgaggcgaccggcaaucugguugcuccccgcuacgccuuugccaugaacagagggccuguguccggaauuaucacaagcgaugcucccgugcacgacuguaaugcuaccugccaaaccccgaaaggcgccauuaacacaucccucccuuuccagaauauccaccccauuacgaucggcgaauguccuaaguaugucaaaucuacccggcugcgcauggccacagggcuuagaaacauccccagcauucagucccggggacuguuuggcgcgaucgccggguucauugagggaggcuggaccgggaugaucgauggaugguacggcuaucaccaucagaauggccaagggagcggauacgcugccgaccagaagucuacacagaacgccauugaucgcaucaccaauaaagugaacuccguuaucgagaagaugaauauucaguuuacggcugugggcaaggaguucaaccaccucgaaagacggaucgaaaaccugaauaaaaaggucgacgacggguuccuggauguguggacauacaacgccgagcuccugguucuucuggaaaaugagagaacccucgacuuucacgauagcaacgugaaaacccuguaugagaaggucaaaacacaacuucgcaauaacgcgaaggaaauuggaaauggcugcuucgaguuuuaccauaagugugacgauaccugcauggaaucuaucaaaaacgggacauauaauuaccccaaguauagcgaggaauccaaacugaaccgggaggagauugacggcgugaagcucgaaucuacgagaaucuaccagauccuggcuauuuauagcaccgccgccuccagccugguccuccuggugucucuuggagcuaucggcuucuggaugugcuccaaugggagccugcagugucgcauuugcaucuga

SEQ ID NO: 196090 - RNA, 1701 nt, Artificial Sequence
  derived and/or modified CDS sequence (opt5) from hemagglutinin__InfluenzaA__ADB82656
augaaggccauccugcucgugcugcagugcauucuuaccgcugccaacgcggacacacuguguaucggcuaccacgcuaauaacagcacggauaccgucgacacaguucucgagaaaaaugugaccgugacacauuccgucaaccugcuugaagauagacacaaugggaagcugugcaaacucaagggaauugcuccccugcaucugggcaaauguaacaucgccggguggcuccugggaaauccugagugcgaacuucuguucaaggccaacucuuggagcuauauuguggagaccuccuacucugacaauggcacauguuauccgggggauuuuaccaacuacgaggagcuccgggagcaacugagcuccguuucuagcuucgaacgcuuugagauguuccccaaggccaauuccuggccuaaccacgaaacgaauaaaggagugaccgcugccugccccuaugcgggcgccaacagcuuuuacagaaaucuuaucuggcuggucaagaaaggcaacucuuauccucggcucuccaagagcuacgugaacaauaaaaagaaggagguucuggugcugugggggauccaucaccccucuacauccaccgaccagcagagccucuaccagaacgcugaugccuaugucuucgugucuuccagcacauacaauaaacgcuuuaagccugagauuggaaccagaccgaaagugcgggaccaauccggccgcaugaacuauuacuggacgaucgucgaacccggggauacaauuaccuucgaggcuacaggaaaucugguugccccuagauaugcguuugccaugaagcgggacucuggcagcgggaucauuauguccgauacccccgugcacgacuguaacaccacaugccagacgccuaaaggagcuaucaauaccagccuucccuuccagaacgugcauccggucacaauuggcgaauguccuaaguacgugaaaucuaccaagcugcgcauggccacaggccucagaaauauccccuccauccagagccgggggcuguuuggagcuauugccggcuucaucgaagggggauggaccggcaugauugaugggugguauggauaccaccaucaaaacgaacagggcucuggcuacgccgcugaccgcaagagcacgcagaaugcgaucgacgggauuacaaacaaaguuaauuccaucaucgagaagaugaacauucaguuuaccgccgugggaaaagaguucucucaccuugaaaagagagucgagaaucugaacaaaaagguggaugacggcuuccucgauguuuggaccuauaacgcugaacugcuggugcuccuggagaaugaacggacacuugacuaccacgauagcaacgucaagaaucuguaugagaaagugcgcucccaacucaagaacaaugccaaagagaucgggaacggaugcuuugaguucuaccauaagugugacgauagcugcauggaaucuauuaaaaaugaaaccuaugacuacuccaaguauagcgaggaaucuagacugaaccgggagaagaucgauggcgucaaacuugaguccacacagauuuaccagauccuggccaucuacagcacgguggcuuccucucucguucugcuggugagccucggggccauuuccuuuuggaugugcucuaauggcagccugcaauguagaaucugcauuuga

SEQ ID NO: 196091 - RNA, 1701 nt, Artificial Sequence
  derived and/or modified CDS sequence (opt5) from hemagglutinin__InfluenzaA__ADB82944
augaaggccauccuggugguccuccuguacaccuucgcuacagccaacgcggacacgcuuugcauuggcuaucacgcuaauaacagcaccgauacaguugacaccgugcuggagaagaaugugacagucacccauuccgugaaccuccuggaagauaagcacaaugggaaacuuuguaagcugagaggaguugcuccccuccaucugggcaaaugcaacaucgccggguggauucugggaaauccugagugugaaucucucagcacagccuccucuuggagcuacaucguggagaccuccucuagcgacaacggcacgugcuauccgggggauuuuauugacuacgaagaacugcgggagcagcuuuccagcgucucuuccuucgaacgcuuugagaucuuccccaagaccagcucuuggccuaaucacgaucccaacaagggagugacagccgcuuguccucaugccggcgcgaaauccuuuuauaagaaucugaucuggcucguuaaaaagggcaacagcuaccccaaacugucuaaguccuauauuaaugacaaggggaaagaagugcuuguccuguggggaauccaccacccuagcaccuccgccgaucaacagucucucuaccagaacgcugacgccuacguguucgugggcacaagcagauauuccaagaaauuuaagccggagauugcuauccggcccaaaguccgcgaucaggaggggagaaugaauuacuauuggacccugguugaaccuggagacaagauuacguucgaggccacaggcaaccugguggugccccgguacgcguuugccauggaacgcaacgcugggagcggaaucauuaucucugauaccccuguccaugacugcaauacaaccugucaaacccccaaaggcgccaucaacacaucccucccguuccagaauauucacccuaucacgauuggcaagugccccaaguaugugaaaagcaccaagcugagacuugcuacagggcugcggaacaucccuucuauucagagccgcggacucuuuggcgccaucgccggguucaucgagggaggcuggaccgggaugguugacggaugguacggcuaucaucaccagaaugaacaaggcuccggguacgcugcggaucugaaaucuacacagaacgccauugacgagaucaccaauaaggugaacagcgucauugagaaaaugaauacgcaguuuacagcugugggaaaggaguucaaccaccuugagaagagaaucgaaaaucugaacaaaaagguugaugacggcuuccucgauauuuggaccuacaaugccgagcugcuggugcuccuggaaaacgagcggacccuugacuaucaugauuccaaugucaaaaaccuguacgagaaggugcgcagccagcucaaaaacaaugccaaggaaaucgggaacggauguuuugaguucuaucacaagugcgacaauacauguauggaaucugucaaaaacggcaccuacgauuaucccaaguacuccgaggaagcuaaacugaauagagaggagaucgacggggugaaacuugaaagcacacggauuuaucaaauccuggccauuuacucuacgguugcguccagccucgugcuggucgugucccugggcgcuaucucuuuuuggaugugcagcaacggaucccuccagugccgcauuuguaucuga

SEQ ID NO: 196092 - RNA, 1701 nt, Artificial Sequence
  derived and/or modified CDS sequence (opt5) from hemagglutinin__InfluenzaA__ADB82950
augaaggccauccuggugguccuccuguacaccuucgcuacagccaacgcggacacgcuuugcauuggcuaucacgcuaauaacagcaccgauacaguugacaccgugcuggagaaaaaugugacagucacccauuccgugaaccuccuggaagauaagcacaaugggaaacuuuguaagcugagaggaguugcuccccuccaucugggcaaaugcaacaucgccggguggauucugggaaauccugagugugaaucucucagcacagccuccucuuggagcuacaucguggagaccuccucuagcgacaacggcacgugcuauccgggggauuuuauugacuacgaagaacugcgggagcagcuuuccagcgucucuuccuucgaacgcuuugagaucuuccccaagaccagcucuuggccuaaucacgauuccaacaagggagugacagccgcuuguccccaugccggcgcgaaaucuuuuuauaagaaucugaucuggcucguuaaaaagggcaacagcuacccuaaacuguccaagagcuauauuaaugacaaggggaaagaagugcuuguccuguggggaauccaccaccccuccaccucugccgaucaacagagccucuaccagaacgcugacgccuacguguucgugggcacauccagauauagcaagaaauuugagccugagauugcuauccggccgaagguccgcgaucaggaagggagaaugaauuacuauuggacccugguugagcccggagacaaaauuacguucgaagccacaggcaaccugguggugccucgguacgcguuugccauggagcgcaacgcugggucuggaaucauuaucuccgauacccccguccaugacugcaauacaaccugucaaaccccuaagggcgccaucaacacaagccuccccuuccagaauauucacccgaucacgauuggcaaaugcccuaaguaugugaagucuaccaaacugagacuugcuacagggcugcggaacguucccagcauccagucccgcggacucuuuggcgccauugccggguucaucgaaggaggcuggaccgggaugguggacggaugguacggcuaucaucaccagaaugagcaaggcucuggguacgcugcggaucuuaagagcacacagaacgccaucgacgagauuaccaauaaagucaacuccgugaucgaaaagaugaauacgcaguuuacagcuguuggaaaagaguucaaccaccuggaaaagagaauugagaaucugaacaagaaaguggaugacggcuuccucgauaucuggaccuacaaugccgaacugcugguccuccuggagaacgagcggacccuugacuaucaugauagcaaugugaagaaccuguacgaaaaaguccgcucucagcucaagaacaaugccaaagagauugggaacggauguuuugaguucuaucacaagugcgacaauacauguauggaguccgugaagaacggcaccuacgauuauccuaaauacagcgaagaggcuaagcugaauagagaggaaaucgacgggguuaaacuugagucuacacggaucuaucaaauucuggccaucuacuccacgguggcgagcucccucguccuggugguuucucugggcgcuauuagcuuuuggaugugcuccaacggaucucuccagugccgcaucuguauuuga

SEQ ID NO: 196093 - RNA, 1701 nt, Artificial Sequence; identical to SEQ ID NO: 195539
  derived and/or modified CDS sequence (opt5) from hemagglutinin__InfluenzaA__ADB89129

SEQ ID NO: 196094 - RNA, 1701 nt, Artificial Sequence; identical to SEQ ID NO: 194741
  derived and/or modified CDS sequence (opt5) from hemagglutinin__InfluenzaA__ADB89139

SEQ ID NO: 196095 - RNA, 1701 nt, Artificial Sequence
  derived and/or modified CDS sequence (opt5) from hemagglutinin__InfluenzaA__ADB89149
augaaggccauccuggugguccuccuguacaccuucgcuacagccaacgcguauacgcuuugcauuggcuaccacgcuaauaacagcaccgacacaguugauaccgugcuggagaaaaaugugacagucacccauuccgugaaccuccuggaagacaagcacaaugggaaacuuuguaagcugagaggaguugcuccccuccaucugggcaaaugcaacaucgccggguggauucugggaaauccugagugugaaucucucagcacagccuccucuuggagcuauaucguggagaccuccucuagcgauaacggcacgugcuacccgggggacuuuauugauuaugaagaacugcgggagcagcuuuccagcgucucuuccuucgaacgcuuugagaucuuccccaagaccagcucuuggccuaaucacgacuccaacaagggagugacagccgcuuguccccauguuggcgccaagagcuuuuacaagaaucugaucuggcucgugaaaaagggcaacucuuauccuaaacuguccaagagcuacauuaaugauaaggggaaagaaguccuugugcuguggggaauccaccaccccuccaccucugcggaccaacagagccucuaccagaacgccgaugcuuauguguucgucggcacauccagauacagcaagaaauuuaagccugagauugccauccggccgaaaguucgcgggcaggagggaagaaugaauuauuacuggacccugguggaacccggcgacaagauuacguucgaggcuacagggaaccugguggucccucgguaugccuuugcgauggaacgcaacgccggaucuggcaucauuaucuccgauacccccgugcaugacugcaauacaaccugucaaaccccuaaaggcgcuaucaacacaagccuccccuuccagaauauucacccgaucacgauugggaagugcccuaaguacguuaaaucuaccaagcugagacuugccacaggacugcggaacauccccagcauucagucccgcggccucuuuggggcuaucgccggauucaucgagggcggguggaccggaaugguggauggcugguauggcuaccaucaccagaaugaacaagggucuggauacgccgcugaccugaaaagcacacagaacgcgauugacgagaucaccaauaaggucaacuccgugauugagaaaaugaauacgcaguuuacagccguuggcaaggaguucaaccaccuugagaagagaaucgaaaaucugaacaaaaagguggaugacggguuccucgauauuuggaccuauaaugcugagcugcugguccuccuggaaaacgagcggacccuugacuaccaugauagcaaugugaaaaaccuguaugagaagguccgcucucagcucaaaaacaaugccaaggaaaucggaaacggcuguuuugaguucuaccacaagugcgacaauacauguauggaauccgugaaaaacgggaccuaugauuacccuaaguauagcgaggaagccaaacugaauagagaggagaucgacggcguuaaacuugaaucuacacggauuuaccaaauccuggcuauuuacuccacgguggccagcucccucguccuggugguuucucugggagcgaucagcuuuuggaugugcuccaacggcucucuccagugccgcauuuguaucuga

SEQ ID NO: 196096 - RNA, 1701 nt, Artificial Sequence; identical to SEQ ID NO: 195094
  derived and/or modified CDS sequence (opt5) from hemagglutinin__InfluenzaA__ADB89150

SEQ ID NO: 196097 - RNA, 1701 nt, Artificial Sequence
  derived and/or modified CDS sequence (opt5) from hemagglutinin__InfluenzaA__ADB89221
augaaggccauccuggugguccuccuguacaccuucgcuacagccaacgcggacacgcuuugcauuggcuaucacgcuaauaacagcaccgauacaguugacaccgugcuggagaagaaugugacagucacccauuccgugaaccuccuggaagauaagcacaaugggaaacuuuguaagcugagaggaguugcuccccuccaucugggcaaaugcaacaucgccggguggauucugggaaauccugagugugaaucucucagcacagccuccucuuggagcuacaucguggagaccuccucuagcgacaacggcacgugcuauccgggggauuuuauugacuacgaagaacugcgggagcagcuuuccagcgucucuuccuucgaacgcuuugagaucuuccccaagaccagcucuuggccuaaucacgauuccaacaagggagugacagccgcuuguccccaugccggcgcgaaaucuuuuuauaagaaucugaucuggcucguuaaaaagggcaacagcuacccuaaacuguccaagagcuauauuaaugacaaggggaaagaagugcuuguccuguggggaauccaccaccccuccaccucugccgaucaacagaaccucuaccagaaugcugacgccuacguguucgugggcagcuccagauauagcaagaaauuuaagccugagauugcuauccggccgaaaguccgcgaucaggaggggagaaugaacuacuauuggacacugguugaacccggagacaagauuaccuucgaggccacgggcaaccugguggugccucgguacgcguuugccauggaacgcaaugcugggucuggaaucauuaucuccgauacacccguccaugacugcaacaccacaugucaaaccccuaaaggcgccaucaauaccagccuccccuuccagaacauucacccgaucacaauuggcaagugcccuaaguaugugaaaucuacgaagcugagacuugcuaccgggcugcggaauguucccagcauccagucccgcggacucuuuggcgccauugccggguucaucgagggaggcuggacagggaugguggacggaugguacggcuaucaucaccagaacgaacaaggcucuggguacgcugcggaucugaaaagcacccagaaugccaucgacgagauuacaaacaaggucaauuccgugaucgagaaaaugaacacccaguuuacggcuguuggaaaggaguucaaucaccuugagaagagaauugaaaaccugaauaaaaagguggaugacggcuuccucgauaucuggacauacaacgccgagcugcugguccuccuggaaaaugagcggacccuugacuaucaugauagcaacgugaaaaaccuguacgagaagguccgcucucagcucaaaaauaacgccaaggaaauugggaauggauguuuugaguucuaucacaagugcgacaacaccuguauggaauccgugaaaaauggcacauacgauuauccuaaguacagcgaggaagcuaaacugaacagagaggagaucgacgggguuaaacuugaaucuacccggaucuaucaaauucuggccaucuacuccacaguggcgagcucccucguccuggugguuucucugggcgcuauuagcuuuuggaugugcuccaauggaucucuccagugccgcaucuguauuuga

SEQ ID NO: 196098 - RNA, 1701 nt, Artificial Sequence; identical to SEQ ID NO: 194794
  derived and/or modified CDS sequence (opt5) from hemagglutinin__InfluenzaA__ADB89241

SEQ ID NO: 196099 - RNA, 1701 nt, Artificial Sequence; identical to SEQ ID NO: 194741
  derived and/or modified CDS sequence (opt5) from hemagglutinin__InfluenzaA__ADB89251

SEQ ID NO: 196100 - RNA, 1701 nt, Artificial Sequence; identical to SEQ ID NO: 195188
  derived and/or modified CDS sequence (opt5) from hemagglutinin__InfluenzaA__ADB89261

SEQ ID NO: 196101 - RNA, 1701 nt, Artificial Sequence
  derived and/or modified CDS sequence (opt5) from hemagglutinin__InfluenzaA__ADB89271
augaaggccauccuggugguccuccuguacaccuucgcuacagccaacgcggacacgcuuugcauuggcuaucacgcuaauaacagcaccgauacaguugacaccgugcuggagaagaaugugacagucacccauuccgugaaccuccuggaagauaagcacaaugggaaacuuuguaagcugagaggaguugcuccccuccaucugggcaaaugcaacaucgccggguggauucugggaaauccugagugugaaucucucagcacagccuccucuuggagcuacaucguggagaccuccucuagcgacaacggcacgugcuauccgggggauuuuauugacuacgaagaacugcgggagcagcuuuccagcgucucuuccuucgaacgcuuugagaucuuccccaagaccagcucuuggccuaaucacgauuccaacaagggagugacagccgcuuguccccaugccggcgcgaaaucuuuuuauaagaaucugaucuggcucguuaaaaagggcaacagcuacccuaaacuguccaagagcuauauuaaugacaaggggaaagaagugcuuguccuguggggaauccaccaccccuccaccucugccgaucaacagagccucuaccagaacgcugacgccuacguguucgugggcuccagcagauauucuaagaaauuuaagccugagauugcuauccggccgaaaguccgcgaucaggaggggagaaugaauuacuauuggacacugguugaacccggagacaagauuaccuucgaggccacgggcaaccugguggugccucgguacgcguuugccauggaacgcaacgcuggguccggaaucauuaucagcgauacacccguccaugacugcaauaccacaugucaaaccccuaaaggcgccaucaacaccucucuccccuuccagaauauucacccgaucacaauuggcaagugcccuaaguaugugaaaagcacgaagcugagacuugcuaccgggcugcggaacguucccuccauccagucucgcggacucuuuggcgccauugccggguucaucgagggaggcuggacagggaugguggacggaugguacggcuaucaucaccagaaugaacaaggcagcggguacgcugcggaucugaaauccacccagaacgccaucgacgagauuacaaauaaggucaacagcgugaucgagaaaaugaauacccaguuuacggcuguuggaaaggaguucaaccaccuugagaagagaauugaaaaucugaacaaaaagguggaugacggcuuccucgauaucuggacauacaaugccgagcugcugguccuccuggaaaacgagcggacccuugacuaucaugauucuaaugugaaaaaccuguacgagaagguccgcucccagcucaaaaacaaugccaaggaaauugggaacggauguuuugaguucuaucacaagugcgacaauaccuguaugggcagcgugaaaaacgggacauacgauuauccuaaguacucugaagaggcuaaacugaauagagaagagaucgacggcguuaaacuugaguccacccggaucuaucaaauucuggccaucuacagcacaguggcguccucucucguccuggugguuagccugggagcuauuuccuuuuggaugugcucuaacggcagccuccagugccgcaucuguauuuga

SEQ ID NO: 196102 - RNA, 1701 nt, Artificial Sequence
  derived and/or modified CDS sequence (opt5) from hemagglutinin__InfluenzaA__ADB89281
augaaggccauccuggugguccuccuguacaccuucgcuacagccaacgcggacacgcuuugcauuggcuaucacgcuaauaacagcaccgauacaguugacaccgugcuggagaagaaugugacagucacccauuccgugaaccuccuggaagauaagcacaaugggaaacuuuguaagcugagaggaguugcuccccuccaucugggcaaaugcaacaucgccggguggauucugggaaauccugagugugaaucucucagcacagccuccucuuggagcuacaucguggagaccuccucuagcgacaacggcacgugcuauccgggggauuuuauugacuacgaagaacugcgggagcagcuuuccagcgucucuuccuucgaacgcuuugagaucuuccccaagaccagcucuuggccuaaucacgauuccaacaagggagugacagccgcuuguccccaugccggcgcgaaaucuuuuuauaagaaucugaucuggcucguuaaaaagggcaacagcuacccuaaacuguccaagagcuauauuaaugacaaggggaaagaagugcuuguccuguggggaauccaccaucccccuaccuccgccgaucaacagucucucuaccagaacgcugacgccuacguguucgugggcacaagcagauauuccaagaaauuuaagccggagauugcuauccggcccaaaguccgcgggcaggagggaagaaugaauuacuauuggacccugguugaaccuggcgauaagauuacguucgaggccacagggaaccugguggugccccgguacgcguuugccauggaacgcaacgcuggaagcggcaucauuaucucugacaccccuguccacgauugcaauacaaccugucaaacccccaaaggcgccaucaacacaucccucccguuccagaauauucacccuaucacgauugggaagugccccaaguaugugaaaagcaccaagcugagacuugcuacaggacugcggaacguuccuucuauccagagccgcggccucuuuggggccauugccggauucaucgagggcggguggaccggaaugguggacggcugguacggcuaucaucaccagaaugaacaaggguccggauacgcugcggaccugaaaucuacacagaacgccaucgaugagauuaccaauaaggucaacagcgugaucgagaaaaugaauacgcaguuuacagcuguuggcaaggaguucaaccaccuugagaagagaauugaaaaucugaacaaaaagguggacgauggguuccucgacaucuggaccuacaaugccgagcugcugguccuccuggaaaacgagcggacccuugauuaucaugacuccaaugugaaaaaccuguacgagaagguccgcagccagcucaaaaacaaugccaaggaaauuggaaacggcuguuuugaguucuaucacaagugcgauaauacauguauggaaucugugaaaaacgggaccuacgacuaucccaaguacuccgaggaagcuaaacugaauagagaggagaucgauggcguuaaacuugaaagcacacggaucuaucaaauucuggccaucuacucuacgguggcguccagccucguccuggugguuucccugggagcuauuucuuuuuggaugugcagcaacggcucccuccagugccgcaucuguauuuga

SEQ ID NO: 196103 - RNA, 1701 nt, Artificial Sequence; identical to SEQ ID NO: 194741
  derived and/or modified CDS sequence (opt5) from hemagglutinin__InfluenzaA__ADB89291

SEQ ID NO: 196104 - RNA, 1701 nt, Artificial Sequence; identical to SEQ ID NO: 194741
  derived and/or modified CDS sequence (opt5) from hemagglutinin__InfluenzaA__ADB89301

SEQ ID NO: 196105 - RNA, 1701 nt, Artificial Sequence; identical to SEQ ID NO: 194741
  derived and/or modified CDS sequence (opt5) from hemagglutinin__InfluenzaA__ADB89311

SEQ ID NO: 196106 - RNA, 1701 nt, Artificial Sequence
  derived and/or modified CDS sequence (opt5) from hemagglutinin__InfluenzaA__ADB89321
augaaggccauccuggugguccuccuguacaccuucgcuacagccaacgcggacacgcuuugcauuggcuaucacgcuaauaacagcaccgauacaguugacaccgugcuggagaaaaaugugacagucacccauuccgugaaccuccuggaagauaagcacaaugggaaacuuuguaagcugagaggaguugcuccccuccaucugggcaaaugcaacaucgccggguggauucugggaaauccugagugugaaucucucagcacagccuccucuuggagcuacaucguggagaccuccucuagcgacaacggcacgugcuauccgggggauuuuauugacuacgaagaacugcgggagcagcuuuccagcgucucuuccuucgaacgcuuugagaucuuccccaagaccagcucuuggccuaaucacgauuccaacaagggagugacagccgcuuguccccaugccggcgcgaaaucuuuuuauaagaaucugaucuggcucguuaaaaagggcaacagcuacccuaaacuguccgaaagcuauauuaaugacaaggggaaggaggugcuuguccuguggggaauccaccaccccuccaccucugccgaucaacagagccucuaccagaacgcugacgccuacguguucgugggcacauccaaauauagcaagaaauuuaagccugagauugcuaucagaccgaaaguccgggaucaggaagggcgcaugaauuacuauuggacccugguugagcccggagacaagauuacguucgaagccacaggcaaccugguggugccuagauacgcguuugccauggagcggaacgcugggucuggaaucauuaucuccgauacccccguccaugacugcaauacaaccugucaaaccccuaaaggcgccaucaacacaagccuccccuuccagaauauucacccgaucacgauuggcaagugcccuaaguaugugaaaucuaccaagcugcgccuugcuacagggcugagaaacguucccagcauccagucccggggacucuuuggcgccauugccggguucaucgaaggaggcuggaccgggaugguggacggaugguacggcuaucaucaccagaaugagcaaggcucuggguacgcugcggaucugaaaagcacacagaacgccaucgacgagauuaccaauaaggucaacuccgugaucgaaaagaugaauacgcaguuuacagcuguuggaaaggaguucaaccaccuugaaaagcgcauugagaaucugaacaaaaagguggaugacggcuuccucgauaucuggaccuacaaugccgaacugcugguccuccuggagaacgagagaacccuugacuaucaugauagcaaugugaaaaaccuguacgaaaagguccggucucagcucaaaaacaaugccaaggagauugggaacggauguuuugaguucuaucacaagugcgacaauacauguauggaguccgugaaaaacggcaccuacgauuauccuaaguacagcgaagaggcuaaacugaaucgcgaggaaaucgacgggguuaaacuugagucuacaagaaucuaucaaauucuggccaucuacuccacgguggcgagcucccucguccuggugguuucucugggcgcuauuagcuuuuggaugugcuccaacggaucucuccagugccggaucuguauuuga

SEQ ID NO: 196107 - RNA, 1701 nt, Artificial Sequence
  derived and/or modified CDS sequence (opt5) from hemagglutinin__InfluenzaA__ADB89331
augaaggccauccuggugguccuccuguacaccuucgcuacagccaacgcggacacgcuuugcauuggcuaucacgcuaauaacagcaccgauacaguugacaccgugcuggagaaaaaugugacagucacccauuccgugaaccuccuggaagauaagcacaaugggaaacuuuguaagcugagaggaguugcuccccuccaucugggcaaaugcaacaucgccggguggauucugggaaauccugagugugaaucucucagcacagccuccucuuggagcuacaucguggagaccuccucuagcgacaacggcacgugcuauccgggggauuuuauugacuacgaagaacugcgggagcagcuuuccagcgucucuuccuucgaacgcuuugagaucuuccccaagaccagcucuuggccuaaucacgauuccaacaagggagugacagccgcuuguccccaugccggcgcgaaaucuuuuuauaagaaucugaucuggcucguuaaaaagggcaacagcuacccuaaacuguccaagagcuauauuaaugacaaggggaaagaagugcuuguccuguggggaauccaccaccccuccaccucugccgaucaacagagccucuaccagaacgcugacgccuacguguucgugggcuccagcaaguauucuaaaaaguuuaaaccugagauugcuaucagaccgaagguccgggaucaggaggggcgcaugaauuacuauuggacacugguugaacccggagacaaaauuaccuucgaggccacgggcaaccugguggugccuagauacgcguuugccauggaacggaacgcuggguccggaaucauuaucagcgauacacccguccaugacugcaauaccacaugucaaaccccuaagggcgccaucaacaccucucuccccuuccagaauauucacccgaucacaauuggcaagugcccuaaauauguuaagagcacgaaacugcgccuugcuaccgggcugagaaacgugcccuccauccagucucggggacucuuuggcgccauugccggguucaucgagggaggcuggacagggaugguggacggaugguacggcuaucaucaccagaaugaacaaggcagcggguacgcugcggaucugaaguccacccagaacgccaucgacgagauuacaaauaaagucaacagcgugaucgagaagaugaauacccaguuuacggcuguuggaaaggaguucaaccaccuugagaaacgcauugaaaaucugaacaagaaaguggaugacggcuuccucgauaucuggacauacaaugccgagcugcugguccuccuggaaaacgagagaacccuugacuaucaugauucuaaugugaagaaccuguacgagaaaguccggucccagcucaagaacaaugccaaggaaauugggaacggauguuuugaguucuaucacaaaugcgacaauaccuguauggaaagcgugaagaacggcacauacgauuauccuaaauacucugaggaagcuaagcugaaucgcgaggagaucgacgggguuaaacuugaauccaccagaguguaucaaauccuggccauuuacagcacagucgcguccucucucgugcugguugugagccugggcgcuaucuccuuuuggaugugcucuaacggaagccuccagugccggauuuguaucuga

SEQ ID NO: 196108 - RNA, 1701 nt, Artificial Sequence; identical to SEQ ID NO: 194741
  derived and/or modified CDS sequence (opt5) from hemagglutinin__InfluenzaA__ADB89341

SEQ ID NO: 196109 - RNA, 1701 nt, Artificial Sequence; identical to SEQ ID NO: 194741
  derived and/or modified CDS sequence (opt5) from hemagglutinin__InfluenzaA__ADB89351

SEQ ID NO: 196110 - RNA, 1701 nt, Artificial Sequence; identical to SEQ ID NO: 194741
  derived and/or modified CDS sequence (opt5) from hemagglutinin__InfluenzaA__ADB89361

SEQ ID NO: 196111 - RNA, 1701 nt, Artificial Sequence; identical to SEQ ID NO: 194741
  derived and/or modified CDS sequence (opt5) from hemagglutinin__InfluenzaA__ADB89371

SEQ ID NO: 196112 - RNA, 1701 nt, Artificial Sequence; identical to SEQ ID NO: 195486
  derived and/or modified CDS sequence (opt5) from hemagglutinin__InfluenzaA__ADB89381

SEQ ID NO: 196113 - RNA, 1701 nt, Artificial Sequence
  derived and/or modified CDS sequence (opt5) from hemagglutinin__InfluenzaA__ADB89391
augaaggccauccuggugguccuccuguacaccuucgcuacagccaacgcggacacgcuuugcauuggcuaucacgcuaauaacagcaccgauacaguugacaccgugcuggagaaaaaugugacagucacccauuccgugaaccuccuggaagauaagcacaaugggaaacuuuguaagcugagaggaguugcuccccuccaucugggcaaaugcaacaucgccggguggauucugggaaauccugagugugaaucucucagcacagccuccucuuggagcuacaucguggagaccuccucuagcgacaacggcacgugcuauccgggggauuuuauugacuacgaagaacugcgggagcagcuuuccagcgucucuuccuucgaacgcuuugagaucuuccccaagaccagcucuuggccuaaucacgauuccaacaagggagugacagccgcuugucugcaugccggcgcgaaaucuuuuuauaagaaucucaucuggcugguuaaaaagggcaacagcuaccccaaacuuuccaagagcuauauuaaugacaaggggaaagaagugcugguccucuggggaauccaccacccuuccaccucugccgaucaacagagccuguaccagaacgcugacgccuacguguucgugggcacauccagauauagcaagaaauuuaagcccgagauugcuauccggccuaaaguccgcgaucaggaggggagaaugaauuacuauuggacccugguugaaccgggagacaagauuacguucgaggccacaggcaaccucguggugccccgguacgcguuugccauggaacgcaacgcugggucuggaaucauuaucuccgauaccccuguccaugacugcaauacaaccugucaaacccccaaaggcgccaucaacacaagccugccuuuccagaauauucaccccaucacgauuggcaagugcccgaaguaugugaaaucuaccaaacuuagacuggcuacagggcuccggaacguuccuagcauccagucccgcggacuguuuggcgccauugccggguucaucgagggaggcuggaccgggaugaucgacggaugguacggcuaucaucaccagaaugaacaaggcucuggguacgcugcggaucuuaagagcacacagaacgccauugacgagaucaccaauaaggugaacuccgucauugagaaaaugaauacgcaguuuacagcugugggaaaggaguucaaccaccuggagaagagaaucgaaaaucucaacaaaaagguugaugacggcuuccuggauauuuggaccuacaaugccgagcugcucgugcugcuugaaaacgagcggacccuggacuaucaugauagcaaugucaaaaaccucuacgagaaggugcgcucucagcugaaaaacaaugccaaggaaaucgggaacggauguuuugaguucuaucacaagugcgacaauacauguauggaauccgucaaaaacggcaccuacgauuaucccaaguacagcgaggaagcuaaacuuaauagagaggagaucgacggggugaagcuggaaucuacacggauuuaucaaauccucgccauuuacuccacgguugcgagcucccuggugcuggucgugucucucggcgcuaucagcuuuuggaugugcuccaacggaucucugcagugccgcauuuguaucuga

SEQ ID NO: 196114 - RNA, 1701 nt, Artificial Sequence; identical to SEQ ID NO: 194728
  derived and/or modified CDS sequence (opt5) from hemagglutinin__InfluenzaA__ADB89401

SEQ ID NO: 196115 - RNA, 1701 nt, Artificial Sequence; identical to SEQ ID NO: 194741
  derived and/or modified CDS sequence (opt5) from hemagglutinin__InfluenzaA__ADB89411

SEQ ID NO: 196116 - RNA, 1701 nt, Artificial Sequence; identical to SEQ ID NO: 195188
  derived and/or modified CDS sequence (opt5) from hemagglutinin__InfluenzaA__ADB89431

SEQ ID NO: 196117 - RNA, 1701 nt, Artificial Sequence; identical to SEQ ID NO: 195094
  derived and/or modified CDS sequence (opt5) from hemagglutinin__InfluenzaA__ADB89441

SEQ ID NO: 196118 - RNA, 1701 nt, Artificial Sequence; identical to SEQ ID NO: 194741
  derived and/or modified CDS sequence (opt5) from hemagglutinin__InfluenzaA__ADB89461

SEQ ID NO: 196119 - RNA, 1701 nt, Artificial Sequence; identical to SEQ ID NO: 195188
  derived and/or modified CDS sequence (opt5) from hemagglutinin__InfluenzaA__ADB89481

SEQ ID NO: 196120 - RNA, 1701 nt, Artificial Sequence; identical to SEQ ID NO: 195188
  derived and/or modified CDS sequence (opt5) from hemagglutinin__InfluenzaA__ADB89491

SEQ ID NO: 196121 - RNA, 1701 nt, Artificial Sequence
  derived and/or modified CDS sequence (opt5) from hemagglutinin__InfluenzaA__ADB89501
augaaggccauccuggugguccuccuguacaccuucgcuacagccaacgcggacacgcuuugcauuggcuaucacgcuaauaacagcaccgauacaguugacaccgugcuggagaaaaaugugacagucacccauuccgugaaccuccuggaagauaagcacaaugggaaacuuuguaagcugagaggaguugcuccccuccaucugggcaaaugcaacaucgccggguggauucugggaaauccugagugugaaucucucagcacagccuccucuuggagcuacaucguggagaccuccucuagcgacaacggcacgugcuauccgggggauuuuauugacuacgaagaacugcgggagcagcuuuccagcgucucuuccuucgaacgcuuugagaucuuccccaagaccagcucuuggccuaaucacgauuccaacaagggagugacagccgcuuguccccaugccggcgcgaaaucuuuuuauaagaaucugaucuggcucguuaaaaagggcaacagcuacccuaaacuguccaagagcuauauuaaugacaaggggaaagaagugcuuguccuguggggaauccaccaccccuccaccucugccgaucaacagagccucuaccagaacgcugacgccuacguguucgugggcuccagcagauauucuaagaaauuuaagccugagauugcuauccggccgaaaguccgcgaucaggaggggagaaugaauuacuauuggacacugguugaacccggagacaagauuaccuucgaggccacgggcaaccugguggugccucgguacgcguuugccauggaacgcaacgcuggguccggaaucauuaucagcgauacacccguccaugacugcaauaccacaugucaaaccccuaaaggcgccaucaacaccucucuccccuuccagaauauucacccgaucacaauuggcaagugcccuaaguaugugaaaagcacgaagcugagacuugcuaccgggcugcggaacguucccuccauccagucucgcggacucuuuggcgccauugccggguucaucgagggaggcuggacagggcugguggacggaugguacggcuaucaucaccagaaugaacaaggcagcggguacgcugcggaucuuaaauccacccagaacgccaucgacgagauuacaaauaaggucaacagcgugaucgagaaaaugaauacccaguuuacggcuguuggaaaggaguucaaccaccuggagaagagaauugaaaaucucaacaaaaagguggaugacggcuuccuggauaucuggacauacaaugccgagcugcucguccugcuugaaaacgagcggacccuggacuaucaugauucuaaugugaaaaaccucuacgagaagguccgcucccagcugaaaaacaaugccaaggaaauugggaacggauguuuugaguucuaucacaagugcgacaauaccuguauggaaagcgugaaaaacggcacauacgauuauccuaaguacucugaggaagcuaaacuuaauagagaggagaucgacgggguuaagcuggaauccacccggaucuaucaaauucucgccaucuacagcacaguggcguccucucugguccuggugguuagccucggcgcuauuuccuuuuggaugugcucuaacggaagccugcagugccgcaucuguauuuga

SEQ ID NO: 196122 - RNA, 1701 nt, Artificial Sequence; identical to SEQ ID NO: 194741
  derived and/or modified CDS sequence (opt5) from hemagglutinin__InfluenzaA__ADB89511

SEQ ID NO: 196123 - RNA, 1701 nt, Artificial Sequence; identical to SEQ ID NO: 195188
  derived and/or modified CDS sequence (opt5) from hemagglutinin__InfluenzaA__ADB89531

SEQ ID NO: 196124 - RNA, 1701 nt, Artificial Sequence; identical to SEQ ID NO: 195188
  derived and/or modified CDS sequence (opt5) from hemagglutinin__InfluenzaA__ADB89541

SEQ ID NO: 196125 - RNA, 1701 nt, Artificial Sequence; identical to SEQ ID NO: 195901
  derived and/or modified CDS sequence (opt5) from hemagglutinin__InfluenzaA__ADB89551

SEQ ID NO: 196126 - RNA, 1701 nt, Artificial Sequence; identical to SEQ ID NO: 194741
  derived and/or modified CDS sequence (opt5) from hemagglutinin__InfluenzaA__ADB89561

SEQ ID NO: 196127 - RNA, 1701 nt, Artificial Sequence; identical to SEQ ID NO: 194741
  derived and/or modified CDS sequence (opt5) from hemagglutinin__InfluenzaA__ADB89571

SEQ ID NO: 196128 - RNA, 1701 nt, Artificial Sequence; identical to SEQ ID NO: 194741
  derived and/or modified CDS sequence (opt5) from hemagglutinin__InfluenzaA__ADB89581

SEQ ID NO: 196129 - RNA, 1701 nt, Artificial Sequence
  derived and/or modified CDS sequence (opt5) from hemagglutinin__InfluenzaA__ADB89591
augaaggccauccuggugguccuccuguacaccuucgcuacagccaacgcggacacgcuuugcauuggcuaucacgcuaauaacagcaccgauacaguugacaccgugcuggagaaaaaugugacagucacccauuccgugaaccuccuggaagauaagcacaaugggaaacuuuguaagcugagaggaguugcuccccuccaucugggcaaaugcaacaucgccggguggauucugggaaauccugagugugaaucucucagcacagccuccucuuggagcuacaucguggagaccuccucuagcgacaacggcacgugcuauccgggggauuuuauugacuacgaagaacugcgggagcagcuuuccagcgucucuuccuucgaacgcuuugagaucuuccccaagaccagcucuuggccuaaucacgauuccaacaagggagugacagccgcuuguccccaugccggcgcgaaaucuuuuuauaagaaucugaucuggcucguuaaaaagggcaacagcuacccuaaacuguccaagagcuauauuaaugacaaggggaaagaagugcuuguccuguggggaauccaccaccccuccaccucugccgaucaacagagccucuaccagaacgcugacgccuacguguucgugggcacauccagauauagcaagaaauuuaagccugagauugcuauccggccgaaaguccgcgagcaggaagggagaaugaauuacuauugggcccugguugagcccggagauaagauuaccuucgaagcgacgggcaaccugguggugccucgguacgccuuugcuauggagcgcaacgccgggucuggaaucauuaucuccgacacacccguccaugauugcaauaccacaugucaaaccccuaaaggcgcuaucaacaccagccuccccuuccagaauauucacucuaucacaauuggcaagugcccgaaguaugugaaaagcacgaagcugagacuugccaccgggcugcggaacguuccuuccauccagucucgcggacucuuuggcgccauugcuggguucaucgaaggaggcuggacagggaugguggacggaugguacggcuaucaucaccagaaugagcaaggcagcggguacgcggccgaccugaaauccacccagaacgcuaucgaugagauuacaaauaaggucaacagcgugaucgaaaagaugaauacccaguuuacggccguuggaaaggaguucaaccaccuugaaaagagaauugagaaucugaacaaaaagguggacgauggcuuccucgacaucuggacauacaaugccgaacugcugguccuccuggagaacgagcggacccuugauuaucaugacucuaaugugaaaaaccuguacgaaaagguccgcucccagcucaaaaacaaugcuaaggagauugggaacggauguuuugaguucuaucacaagugcgauaauaccuguauggagagcgugaaaaacggcacauacgacuaucccaaguacucugaagaggccaaacugaauagagaggaaaucgaugggguuaaacuugaguccacccggaucuaucaaauucuggcgaucuacagcacaguggcuuccucucucguccuggugguuagccugggcgccauuuccuuuuggaugugcucuaacggaagccuccagugccgcaucuguauuuga

SEQ ID NO: 196130 - RNA, 1701 nt, Artificial Sequence
  derived and/or modified CDS sequence (opt5) from hemagglutinin__InfluenzaA__ADB89601
augaaggccaucauugugguccugcucuacaccuucgcuacagccaacgcggacacgcugugcaucggcuaucacgcuaauaacagcaccgauacaguugacaccgugcuugagaaaaaugugacagucacccauuccgugaaccugcucgaagauaagcacaaugggaaacuguguaaacuuagaggaguugcuccccugcaucucggcaaaugcaacauugccggguggauccugggaaauccugagugugaaucucugagcacagccuccucuuggagcuacauuguggagaccuccucuagcgacaacggcacgugcuauccgggggauuuuaucgacuacgaagaacuccgggagcagcuguccagcgucucuuccuucgaacgcuuugagaucuuccccaagaccagcucuuggccuaaucacgauuccaacaagggagugacagccgcuuguccccaugccggcgcgaaaucuuuuuauaagaaucuuauuuggcugguuaaaaagggcaacagcuacccuaaacucuccaagagcuauaucaaugacaaggggaaagaagugcugguccuuuggggcauucaccaccccuccaccucugccgaucaacagagccuguaccagaacgcugacgccuacguguucgugggaacauccagauauagcaagaaauuuaagccugagaucgcuauucggccgaaaguccgcgaucaggaggggagaaugaauuacuauuggacccucguugaacccggagacaagaucacguucgaggccacaggcaaccugguggugccucgguacgcguuugccauggaacgcaacgcugggucuggaauuaucaucuccgauacccccguccaugacugcaauacaaccugucaaaccccuaaaggcgccauuaacacaagccugcccuuccagaauauccacccgauuacgaucggcaagugcccuaaguaugugaaaucuaccaagcucagacuggcuacagggcuucggaacguucccagcauucagucccgcggacuguuuggcgccaucgccggguucaucgagggaggcuggaccgggaugguggacggaugguacggcuaucaucaccagaaugaacaaggcucuggguacgcugcggaucucaaaagcacacagaacgccauugacaagaucaccaauaaagucaacuccgugauugagaagaugaauacgcaguuuacagcuguuggaaaggaguucaaccaccuggaaaagagaaucgagaaucuuaacaagaaaguggaugacggcuuccuggauauuuggaccuacaaugccgaacuccugguccugcucgagaacgaacggacccuggacuaucaugauagcaaugugaagaaccuuuacgagaaaguccgcucucagcugaagaacaaugccaaggagaucgggaacggauguuuugaguucuaucacaaaugcgacaauacauguauggaguccgugaagaacggcaccuacgauuauccuaaauacagcgaagaggcuaagcucaauagagaagagaucgacgggguuaaacuggagucuacacggauuuaucaaauccuuacgauuuacuccaccguggccagcucccugguccucgugguuucucugggcgcgaucagcuuuuggaugugcuccaacggaucucugcagugccgcauuuguaucuga

SEQ ID NO: 196131 - RNA, 1701 nt, Artificial Sequence; identical to SEQ ID NO: 195905
  derived and/or modified CDS sequence (opt5) from hemagglutinin__InfluenzaA__ADB89611

SEQ ID NO: 196132 - RNA, 1701 nt, Artificial Sequence; identical to SEQ ID NO: 195905
  derived and/or modified CDS sequence (opt5) from hemagglutinin__InfluenzaA__ADB89621

SEQ ID NO: 196133 - RNA, 1701 nt, Artificial Sequence
  derived and/or modified CDS sequence (opt5) from hemagglutinin__InfluenzaA__ADB89631
augaaggccauccugauugugcuccuguacaccuucgcuacagccaacgcggacacgcuuugcaucggcuaucacgcuaauaacagcaccgauacagucgacaccguucuggagaagaaugugacagugacccauuccgucaaccuccuggaagauaagcacaaugggaaacuuuguaagcugagaggaguggcuccccuccaucugggcaaaugcaacauugccggguggauccugggaaauccugagugugaaucucucagcacagccuccucuuggagcuacauuguugagaccuccucuagcgacaacggcacgugcuauccgggggauuuuaucgacuacgaagaacugcgggagcagcuuuccagcgugucuuccuucgaacgcuuugagaucuuccccaagaccagcucuuggccuaaucacgauuccaacaagggagucacagccgcuuguccccaugccggcgcgaaaucuuuuuauaagaaucugauuuggcucgugaaaaagggcaacagcuacccuaaacuguccaagagcuauaucaaugacaaggggaaagaaguucuugugcuguggggcauucaccaccccuccaccucugccgaucaacagagccucuaccagaacgcugacgccuacgucuucgugggaacauccagauauagcaagaaauuuaagccugagaucgcuauucggccgaaagugcgcgaucaggaggggagaaugaauuacuauuggacccuggucgaacccggagacaagaucacguucgaggccacaggcaaccugguugugccucgguacgcguuugccauggaacgcaacgcugggucuggaauuaucaucuccgauacccccgugcaugacugcaauacaaccugucaaaccccuaaaggcgccauuaacacaagccuccccuuccagaauauccacccgauuacgaucggcaagugcccuaaguaugucaaaucuaccaagcugagacuugcuacagggcugcggaacauucccagcauccagucccgcggacucuuuggcgccaucgccggguucauugagggaggcuggaccgggaugguggacggaugguacggcuaucaucaccagaaugaacaaggcucuggguacgcugcggaucugaaaagcacacagaacgccaucgacgagauuaccaauaagguuaacuccgugaucgagaaaaugaauacgcaguuuacagcugucggaaaggaguucaaccaccuugagaagagaauugaaaaucugaacaaaaagguggaugacggcuuccucgauaucuggaccuacaaugccgagcugcugguucuccuggaaaacgagcggacccuugacuaucaugauagcaaugugaaaaaccuguacgagaagguccgcucucagcucaaaaacaaugccaaggaaaucgggaacggauguuuugaguucuaucacaagugcgacaauacauguauggaauccgugaaaaacggcaccuacgauuauccuaaguacagcgaggaagcuaaacugaauagagaggagauugacggggucaaacuugaaucuacacggaucuaucaaauucuggccaucuacuccacgguggcgagcucccucguucugguggucucucugggcgcuauuagcuuuuggaugugcuccaacggaucucuccagugccgcaucuguauuuga

SEQ ID NO: 196134 - RNA, 1701 nt, Artificial Sequence; identical to SEQ ID NO: 195905
  derived and/or modified CDS sequence (opt5) from hemagglutinin__InfluenzaA__ADB89641

SEQ ID NO: 196135 - RNA, 1701 nt, Artificial Sequence; identical to SEQ ID NO: 194741
  derived and/or modified CDS sequence (opt5) from hemagglutinin__InfluenzaA__ADB89651

SEQ ID NO: 196136 - RNA, 1701 nt, Artificial Sequence; identical to SEQ ID NO: 194741
  derived and/or modified CDS sequence (opt5) from hemagglutinin__InfluenzaA__ADB89661

SEQ ID NO: 196137 - RNA, 1701 nt, Artificial Sequence; identical to SEQ ID NO: 195905
  derived and/or modified CDS sequence (opt5) from hemagglutinin__InfluenzaA__ADB89671

SEQ ID NO: 196138 - RNA, 1701 nt, Artificial Sequence; identical to SEQ ID NO: 194741
  derived and/or modified CDS sequence (opt5) from hemagglutinin__InfluenzaA__ADB89681

SEQ ID NO: 196139 - RNA, 1701 nt, Artificial Sequence; identical to SEQ ID NO: 194741
  derived and/or modified CDS sequence (opt5) from hemagglutinin__InfluenzaA__ADB89691

SEQ ID NO: 196140 - RNA, 1701 nt, Artificial Sequence; identical to SEQ ID NO: 195843
  derived and/or modified CDS sequence (opt5) from hemagglutinin__InfluenzaA__ADB89701

SEQ ID NO: 196141 - RNA, 1701 nt, Artificial Sequence
  derived and/or modified CDS sequence (opt5) from hemagglutinin__InfluenzaA__ADB89711
augaaggccauccuggugguccuccuguacaccuucgcuacagccaacgcggacacgcuuugcauuggcuaucacgcuaauaacagcaccgauacaguugacaccgugcuggagaagaaugugacagucacccauuccgugaaccuccuggaagauaagcacaaugggaaacuuuguaagcugagaggaguugcuccccuccaucugggcaaaugcaacaucgccggguggauucugggaaauccugagugugaaucucucagcacagccuccucuuggagcuacaucguggagaccuccucuagcggcaacgggacgugcuauccgggagacuuuauugauuacgaagaacugcgggagcagcuuuccagcgucucuuccuucgaacgcuuugagaucuuccccaagaccagcucuuggccuaaucacgacuccaacaagggcgugacagccgcuuguccccaugccggcgcgaaaucuuuuuauaagaaucugaucuggcucguuaaaaaggggaacagcuacccuaaacuguccaagagcuauauuaaugauaagggaaaagaagugcuuguccuguggggcauccaccaccccuccaccucugccgaccaacagagccucuaccagaacgcugaugccuacguguucguggggacauccagauauagcaagaaauuuaagccugagauugcuauccggccgaaaguccgcgaccaggagggaagaaugaauuaccauuggacccugguugaacccggcgauaagauuacguucgaggccacagggaaccugguggugccucgguaugcguuugccauggaacgcaacgcuggaucuggcaucauuaucuccgacacccccguccacgauugcaauacaaccugucaaaccccuaaaggcgccaucaacacaagccuccccuuccagaauauucauccgaucacgauugggaagugcccuaaguacgugaaaucuaccaagcugagacuugcuacaggacugcggaacguucccagcauccagucccgcggccucuuuggggccauugccggauucaucgagggcggguggaccggaaugguggacggcugguauggcuaccaccaccagaaugaacaagggucuggauaugcugcggaccugaaaagcacacagaacgccaucgaugagauuaccaauaaggucaacuccgugaucgagaaaaugaauacgcaguuuacagcuguuggcaaggaguucaaccaucuugagaagagaauugaaaaucugaacaaaaagguggacgauggguuccucgacaucuggaccuacaaugccgagcugcugguccuccuggaaaacgagcggacccuugauuaccacgacagcaaugugaaaaaccuguaugagaagguccgcucucagcucaaaaacaaugccaaggaaauuggaaacggcuguuuugaguucuaccauaagugcgauaauacauguauggaauccgugaaaaacgggaccuaugacuacccuaaguauagcgaggaagcuaaacugaauagagaggagaucgauggcguuaaacuugaaucuacacggaucuaccaaauucuggccaucuauuccacgguggcgagcucccucguccuggugguuucucugggagcuauuagcuuuuggaugugcuccaacggcucucuccagugccgcaucuguauuuga

SEQ ID NO: 196142 - RNA, 1701 nt, Artificial Sequence
  derived and/or modified CDS sequence (opt5) from hemagglutinin__InfluenzaA__ADB89721
augaagaccaucauugcccugagcuacauccucugccugguguucgcucagaaacuucccggcaacgacaauuccacagccacgcugugucucgggcaccaugcggucccuaacggaaccauuguuaagacaaucaccaaugaucaaauugaggugacaaacgcuaccgaacuggugcagucuagcuccacaggcgagaucugcgacucuccgcaccagauccuugaugggaaaaauuguacccugauugacgcccuccugggagauccccagugcgacggcuuucaaaacaagaaaugggaucuguucgucgaaagaagcaaggccuauuccaauuguuacccuuaugacgugcccgauuacgcuucucuccggagccugguugccuccagcgggacgcuugaguuugacaacgaaucuuucaauuggaccggagugacacagaacggcaccuccagcgcuugcauccgcagaucuaaaaauuccuuuuucagccggcugaacuggcucacacaucugaauuuuaaauauccugcccuuaacgucaccaugcccaauaacgagcaguucgauaagcuguaccucuggggcgugcaccauccugggacggacaaagaucagauuuuucuguaugcgcaagccucuggacgcaucacaguuuccaccaagagaagccagcagacagugauuccgaacaucggcucccggccccgcgucagaaauauuccuucucggaucagcaucuacuggaccauugugaaacccggggacauccugcucauuaacuccaccggaaaucugaucgcuccucgcggcuacuucaagauucagagcgggaagucuuccaucaugagaagcgacgcccccaucggaaaauguaacucugagugcauuacaccgaauggcagcaucccuaacgauaagcccuuucaaaaugugaaccggauuacguauggcgcuuguccucgcuacgucaaacagaauacccuuaagcuggccacagggaugagaaacguucccgaaaaacagacccggggaaucuucggcgcgauugccggguuuaucgagaauggaugggaaggcaugguggacgggugguauggauuccgccaccaaaacuccgagggcagaggccaggcugccgaucucaagucuacacaggcugccaucgaccagauuaaugggaaacugaaccggcuuaucggaaagaccaaugagaaguuccaccaaauugaaaaagaguuuagcgaaguggagggcagaauccaggaucuggaaaaguacgucgaggacacgaaaauugaucucugguccuauaacgccgagcugcugguggcucucgaaaaccagcauacaaucgaccugaccgauagcgagaugaauaaacuuuucgaaaagaccaagaagcagcugcgcgagaacgcggaagacauggggaauggaugcuuuaagauuuaccacaagugugauaacgccugcaucggcucuauccggaaugggacauaugaccaugacguuuacagagaugaggcucucaacaaucgcuuccaaauuaaaggcguggagcugaaguccggauacaaagacuggauccuuuggauuagcuuugccaucucuugcuuccugcucugugucgcccugcugggcuuuauuaugugggcuugccagaaggggaacauccgguguaauaucugcauuuga

SEQ ID NO: 196143 - RNA, 1701 nt, Artificial Sequence
  derived and/or modified CDS sequence (opt5) from hemagglutinin__InfluenzaA__ADB90360
augaaggccauccuggugguccuccuguacaccuucgcuacagccaacgcggacacgcuuugcauuggcuaucacgcuaauaacagcaccgauacaguugacaccgugcuggagaagaaugugacagucacccauuccgugaaccuccuggaagauaagcacaaugggaaacuuuguaagcugagaggaguugcuccccuccaucugggcaaaugcaacaucgccggguggauucugggaaauccugagugugaaucucucagcacagccuccucuuggagcuacaucguggagaccuccucuagcaacaauggcacgugcuauccgggggacuuuauugauuacgaagaacugcgggagcagcuuuccagcgucucuuccuucgaacgcuuugagaucuuccccaagaccagcucuuggccuaaccacgaccccaauaagggagugacagccgcuuguccucaugccggcgcgaaauccuuuuauaagaaccugaucuggcucguuaaaaagggcaauagcuaccccaaacugucuaaguccuauauuaacgauaaggggaaagaagugcuuguccuguggggaauccaccacccuagcaccuccgccgaccaacagucucucuaccagaaugcugaugccuacguguucgugggcacaagcagauauuccaagaaauuuaagccggagauugcuauccggcccaaaguccgcgggcaggagggaagaaugaacuacuauuggacccugguugaaccuggcgacaagauuacguucgaggccacagggaaccugguggugccccgguacgcguuugccauggaacgcaaugcuggaagcggcaucauuaucucugauaccccuguccaugacugcaacacaaccugucaaacccccaaaggcgccaucaauacaucccucccguuccagaacauucacccuaucacgauugggaagugccccaaguaugugaaaagcaccaagcugagacuugcuacaggacugcggaauaucccuucuauucagagccgcggccucuuuggggccaucgccggauucaucgagggcggguggaccggaaugguugauggcugguacggcuaucaucaccagaacgaacaaggguccggauacgcugcggaccugaaaucuacacagaaugccauugacgagaucaccaacaaggugaauagcgucauugagaaaaugaacacgcaguuuacagcugugggcaaggaguucaaucaccuugagaagagaaucgaaaaccugaauaaaaagguugaugacggguuccucgauauuuggaccuacaacgccgagcugcuggugcuccuggaaaaugagcggacccuugacuaucaugauuccaacgucaaaaaccuguacgagaaggugcgcagccagcucaaaaauaacgccaaggaaaucggaaauggcuguuuugaguucuaucacaagugcgacaacacauguauggaaucugucaaaaaugggaccuacgauuaucccaaguacuccgaggaagcuaaacugaacagagaggagaucgacggcgugaaacuugaaagcacacggauuuaucaaauccuggccauuuacucuacgguugcguccagccucgugcuggucgugucccugggagcuaucucuuuuuggaugugcagcaauggcucccuccagugccgcauuuguaucuga

SEQ ID NO: 196144 - RNA, 1701 nt, Artificial Sequence
  derived and/or modified CDS sequence (opt5) from hemagglutinin__InfluenzaA__ADB90370
augaaggccauccuggugguccuccuguacaccuucgcuacagccaacgcggacacgcuuugcauuggcuaucacgcuaauaacagcaccgauacaguugacaccgugcuggagaagaaugugacagucacccauuccgugaaccuccuggaagauaagcacaaugggaaacuuuguaagcugagaggaguugcuccccuccaucugggcaaaugcaacaucgccggguggauucugggaaauccugagugugaaucucucagcacagccuccucuuggagcuacaucguggagaccuccucuagcgacaacggcacgugcuauccgggggauuuuauugacuacgaagaacugcgggagcagcuuuccagcgucucuuccuucgaacgcuuugagaucuuccccaagaccagcucuuggccuaaucacgaucccaacaagggagugacagccgcuuguccucaugccggcgcgaaauccuuuuauaagaaucugaucuggcucguuaaaaagggcaacagcuaccccaaacugucuaaguccuauauuaaugacaaggggaaagaagugcuuguccuguggggaauccaccacccuagcaccuccgccgaucaacagucucucuaccagaacgcugacgccuacguguucgugggcacaagcagauauuccaagaaauuuaagccggagauugcuauccggcccaaaguccgcgggcaggagggaagaaugaauuacuauuggacccugguugaaccuggcgauaagauuacguucgaggccacagggaaccugguggugccccgguacgcguuugccauggaacgcaacgcuggaagcggcaucauuaucucugacaccccuguccaugauugcaauacaaccugucaaacccccaaaggcgccaucaacacaucccucccguuccagaauauucacccuaucacgauugggaagugccccaaguaugugaaaagcaccaagcugagacuugcuacaggacugcggaacguuccuucuauccagagccgcggccucuuuggggccauugccggauucaucgagggcggguggaccggaaugguggacggcugguacggcuaucaucaccagaaugaacaaggguccggauacgcugcggaccugaaaucuacacagaacgccaucgaugagauuaccaauaaggucaacagcgugaucgagaaaaugaauacgcaguuuacagcuguuggcaaggaguucaaccaccuugagaagagaauugaaaaucugaacaaaaagguggacgauggguuccucgacaucuggaccuacaaugccgagcugcugguccuccuggaaaacgagcggacccuugauuaucaugacuccaaugugaaaaaccuguacgagaagguccgcagccagcucaaaaacaaugccaaggaaauuggaaacggcuguuuugaguucuaucacaagugcgauaauacauguauggaaucugugaaaaacgggaccuacgacuaucccaaguacuccgaggaagcuaaacugaauagagaggagaucgauggcguuaaacuugaaagcacacggaucuaucaaauucuggccaucuacucuacgguggcguccagccucguccuggugguuucccugggagcuauuucuuuuuggaugugcagcaacggcucccuccagugccgcaucuguauuuga

SEQ ID NO: 196145 - RNA, 1701 nt, Artificial Sequence; identical to SEQ ID NO: 195660
  derived and/or modified CDS sequence (opt5) from hemagglutinin__InfluenzaA__ADB90414

SEQ ID NO: 196146 - RNA, 1701 nt, Artificial Sequence; identical to SEQ ID NO: 195188
  derived and/or modified CDS sequence (opt5) from hemagglutinin__InfluenzaA__ADC32409

SEQ ID NO: 196147 - RNA, 1701 nt, Artificial Sequence
  derived and/or modified CDS sequence (opt5) from hemagglutinin__InfluenzaA__ADC32410
augaaggccauccuggugguccuccuguacaccuucgcuacagccaacgcggacacgcuuugcauuggcuaucacgcuaauaacagcaccgauacaguugacaccgugcuggagaaaaaugugacagucacccauuccgugaaccuccuggaagauaagcacaaugggaaacuuuguaagcugagaggaguugcuccccuccaucugggcaaaugcaacaucgccggguggauucugggaaauccugagugugaaucucucagcacagccuccucuuggagcuacaucguggagaccuccucuagcgacaacggcacgugcuauccgggggauuuuauugacuacgaagaacugcgggagcagcuuuccagcgucucuuccuucgaacgcuuugagaucuuccccaagaccagcucuuggccuaaucacgauuccaacaagggagugacagccgcuuguccccaugccggcgcgaaaucuuuuuauaagaaucugaucuggcucguuaaaaagggcaacagcuacccuaaacuguccaagagcuauauuaaugacaaggggaaagaagugcuuguccuguggggaauccaccaccccuccaccucugccgaucaacagagccucuaccagaacgcugacgccuacguguucgugggcacauccagauauagcaagaaauuuaagccugagauugcuauccggccgaaaguccgcgaucaggaggggagaaugaauuacuauuggacccugguugaacccggagacaagauuacguucgaggccacaggcaaccugguggugccucgguacgcguuugccauggaacgcaacgcugggucuggaaucauuaucuccgauacccccguccaugacugcaauacaaccugucaaaccccuaaaggcgccaucaacacaagccuccccuuccagaauauucacccgaucacgauuggcaagugcccuaaguaugugaaaucuaccaagcugagacuugcuacagggcugcggaacguucccagcauccagucccgcggacucuuuggcgccauugccggguucaucgagggaggcuggaccgggaugguggacggaugguacggcuaucaucaccagaaugaacaaggcucuggguacgcugcggaucugaaaagcacacagaacgccaucgacgagauuaccaauaaggucaacuccgugaucgagaaaaugaauacgcaguuuacagcuguuggaaaggaguucaaccaccuugagaagagaauugaaaaucugaacaaaaagguggaugacggcuuccucgauaucuggaccuacaaugccgagcugcugguccuccuggaaaacgagaaaacccuugacuaucaugauagcaaugugaagaaccuguacgagaaaguccggucucagcucaagaacaaugccaaggaaauugggaacggauguuuugaguucuaucacaaaugcgacaauacauguauggaauccgugaagaacggcaccuacgauuauccuaaauacagcgaggaagcuaagcugaaucgcgaggagaucgacgggguuaaacuugaaucuacaagaaucuaucaaauucuggccaucuacuccacgguggcgagcucccucguccuggugguuucucugggcgcuauuagcuuuuggaugugcuccaacggaucucuccagugccggaucuguauuuga

SEQ ID NO: 196148 - RNA, 1701 nt, Artificial Sequence
  derived and/or modified CDS sequence (opt5) from hemagglutinin__InfluenzaA__ADC32411
augaaggccauccuggugguccuccuguacaccuucgcuacagccaacgcggacacgcuuugcauuggcuaucacgcuaauaacagcaccgauacaguugacaccgugcuggagaaaaaugugacagucacccauuccgugaaccuccuggaagauaagcacaaugggaaacuuuguaagcugagaggaguugcuccccuccaucugggcaaaugcaacaucgccggguggauucugggaaauccugagugugaaucucucagcacagccuccucuuggagcuacaucguggagaccuccucuagcgacaacggcacgugcuauccgggggauuuuauugacuacgaggaacugcgggagcagcuuuccagcgucucuuccuucgaacgcuuugagaucuuccccaagaccagcucuuggccuaaucacgauuccaacaagggagugacagccgcuuguccccaugccggcgcgaaaucuuuuuauaagaaucugaucuggcucguuaaaaagggcaacagcuacccuaaacuguccaagagcuauauuaaugacaaggggaaagaagugcuuguccuguggggaauccaccaccccuccaccucugccgaucaacagagccucuaccagaacgcugacgccuacguguucgugggcacauccagauauagcaagaaauuuaagccugagauugcuauccggccgaaaguccgcgagcaggaagggagaaugaauuacuauuggacccugguugagcccggagauaagauuacguucgaagccacaggcaaccugguggugccucgguacgcguuugccauggagcgcaacgcugggucuggaaucauuaucuccgacacccccguccaugauugcaauacaaccugucaaaccccuaaaggcgccaucaacacaagccuccccuuccagaauauucacucuaucacgauuggcaagugcccgaaguaugugaaaagcaccaagcugagacuugcuacagggcugcggaacguuccuuccauccagucucgcggacucuuuggcgccauugccggguucaucgaaggaggcuggaccgggaugguggacggaugguacggcuaucaucaccagaaugagcaaggcagcggguacgcugcggaccugaaauccacacagaacgccaucgaugagauuaccaauaaggucaacagcgugaucgaaaagaugaauacgcaguuuacagcuguuggaaaggaguucaaccaccuugccaagagaauugaaaaucugaacaaaaagguggacgauggcuuccucgacaucuggaccuacaaugccgagcugcugguccuccuggaaaacgagcggacccuugauuaucaugacucuaaugugaaaaaccuguacgagaagguccgcucccagcucaaaaacaaugcuaaggaaauugggaacggauguuuugaguucuaucacaagugcgauaauacauguauggaaagcgugaaaaacggcaccuacgacuaucccaaguacucugaggaagccaaacugaauagagaggagaucgaugggguuaaacuugaauccacacggaucuaucaaauucuggcgaucuacagcacgguggcuuccucucucguccuggugguuagccugggcgccauuuccuuuuggaugugcucuaacggaagccuccagugccgcaucuguauuuga

SEQ ID NO: 196149 - RNA, 1701 nt, Artificial Sequence; identical to SEQ ID NO: 195094
  derived and/or modified CDS sequence (opt5) from hemagglutinin__InfluenzaA__ADC32412

SEQ ID NO: 196150 - RNA, 1701 nt, Artificial Sequence; identical to SEQ ID NO: 194741
  derived and/or modified CDS sequence (opt5) from hemagglutinin__InfluenzaA__ADC32413

SEQ ID NO: 196151 - RNA, 1701 nt, Artificial Sequence; identical to SEQ ID NO: 195188
  derived and/or modified CDS sequence (opt5) from hemagglutinin__InfluenzaA__ADC32414

SEQ ID NO: 196152 - RNA, 1701 nt, Artificial Sequence; identical to SEQ ID NO: 195188
  derived and/or modified CDS sequence (opt5) from hemagglutinin__InfluenzaA__ADC32415

SEQ ID NO: 196153 - RNA, 1701 nt, Artificial Sequence; identical to SEQ ID NO: 195188
  derived and/or modified CDS sequence (opt5) from hemagglutinin__InfluenzaA__ADC32416

SEQ ID NO: 196154 - RNA, 1701 nt, Artificial Sequence
  derived and/or modified CDS sequence (opt5) from hemagglutinin__InfluenzaA__ADC32417
augaaggccauccuggugguccuccuguacaccuucgcuacagccaacgcggacacgcuuugcauuggcuaucacgcuaauaacagcaccgauacaguugacaccgugcuggagaaaaaugugacagucacccauuccgugaaccuccuggaauacaagcacaaugggaaacuuuguaagcugagaggaguugcuccccuccaucugggcaaaugcaacaucgccggguggauucugggaaauccugagugugaaucucucagcacagccuccucuuggagcuauaucguggagaccuccucuagcgauaacggcacgugcuacccgggggacuuuauugauuaugaagaacugcgggagcagcuuuccagcgucucuuccuucgaacgcuuugagaucuuccccaagaccagcucuuggccuaaucacgacuccaacaagggagugacagccgcuuguccccaugccggcgcgaaaucuuuuuacaagaaucugaucuggcucguuaaaaagggcaacagcuauccuaaacuguccaagagcuacauuaaugauaaggggaaagaagugcuuguccuguggggaauccaccaccccuccaccucugccgaccaacagagccucuaccagaacgcugaugccuauguguucgugggcacauccagauacagcaagaaauuuaagccugagauugcuauccggccgaaaguccgcgagcaggaagggagaaugaauuauuacuggacccugguugagcccggagacaagauuacguucgaagccacaggcaaccugguggugccucgguaugcguuugccauggagcgcaacgcugggucuggaaucauuaucuccgauacccccguccaugacugcaauacaaccugucaaaccccuaaaggcgccaucaacacaagccuccccuuccagaauauucacccgaucacgauuggcaagugcccuaaguacgugaaaucuaccaagcugagacuugcuacagggcugcggaacguucccagcauccagucccgcggacucuuuggcgccauugccggguucaucgaaggaggcuggaccgggaugguggauggaugguauggcuaccaucaccagaaugagcaaggcucuggguacgcugcggaccugaaaagcacacagaacgccaucgacgagauuaccaauaaggucaacuccgugaucgaaaagaugaauacgcaguuuacagcuguuggaaaggaguucaaccaccuugaaaagagaauugagaaucugaacaaaaagguggaugacggcuuccucgauaucuggaccuauaaugccgaacugcugguccuccuggagaacgagcggacccuugacuaccaugauagcaaugugaaaaaccuguaugaaaagguccgcucucagcucaaaaacaaugccaaggagauugggaacggauguuuugaguucuaccacaagugcaauaacacauguauggaguccgugaaaaauggcaccuaugacuacccuaaguauagcgaagaggcuaaacugaacagagaggaaaucgaugggguuaaacuugagucuacacggaucuaccaaauucuggccaucuacuccacgguggcgagcucccucguccuggugguuucucugggcgcuauuagcuuuuggaugugcuccaauggaucucuccagugccgcaucuguauuuga

SEQ ID NO: 196155 - RNA, 1701 nt, Artificial Sequence; identical to SEQ ID NO: 195188
  derived and/or modified CDS sequence (opt5) from hemagglutinin__InfluenzaA__ADC32418

SEQ ID NO: 196156 - RNA, 1701 nt, Artificial Sequence
  derived and/or modified CDS sequence (opt5) from hemagglutinin__InfluenzaA__ADC32419
augaaggccauccuggugguccuccuguacaccuucgcuacagccaacgcggacacgcuuugcauuggcuaucacgcuaauaacagcaccgauacaguugacaccgugcuggagaagaaugugacagucacccauuccgugaaccuccuggaagauaagcacaaugggaaacuuuguaagcugagaggaguugcuccccuccaucugggcaaaugcaacaucgccggguggauucugggaaauccugagugugaaucucucagcacagccuccucuuggagcuacaucguggagaccuccucuagcgacaacggcacgugcuauccgggggauuuuauugacuacgaagaacugcgggagcagcuuuccagcgucucuuccuucgaacgcuuugagaucuuccccaagaccagcucuuggccuaaucacgauuccaacaagggagugacagccgcuuguccccaugccggcgcgaaaucuuuuuauaagaaucugaucuggcucguuaaaaagggcaacagcuacccuaaacuguccaagagcuauauuaaugacaaggggaaagaagugcuuguccuguggggaauccaccaccccuccaccucugccgaucaacagagccucuaccagaacgcugacgccuacguguucgugggcacauccagauauagcaagaaauuuaagccugagauugcuauccggccgaaaguccgcgagcaggaagggagaaugaauuacuauuggacccugguugagcccggagauaagauuacguucgaagccacaggcaaccugguggugccucgguacgcguuugccauggagcgcaacgcugggucuggaaucauuaucuccgacacccccguccaugauugcaauacaaccugucaaaccccuaaaggcgccaucaacacaagccuccccuuccagaauauucacucuaucacgauuggcaagugcccgaaguaugugaaaagcaccaagcugagacuugcuacagggcugcggaacguuccuuccauccagucucgcggacucuuuggcgccauugccggguucaucgaaggaggcuggaccgggaugguggacggaugguuuggcuaccaucaccagaaugaccaaggcagcgcuuaugcggccgaucugaaauccacacagaacgcuaucgacgagauuaccaauaaggucaacagcgugaucgagaaaaugaauacgcaguucacagccguugggaaggaguucaaccaccuugagaagagaauugaaaaucugaacaaaaagguggaugacggauuucucgauaucuggaccuacaaugccgagcugcugguccuccuggaaaacgagcggacccuugacuaccaugauucuaaugugaaaaaccuguaugagaagguccgcucccagcucaaaaacaaugcuaaggaaauuggcaacggguguuucgaguuuuaccacaagugcgacaauacauguauggaaagcgugaaaaacggaaccuaugauuaccccaaguauucugaggaagccaaacugaauagagaggagaucgacggcguuaaacuugaauccacacggaucuaccaaauucuggcgaucuauagcacgguggcuuccucucucguccuggugguuagccugggggccauuuccuucuggaugugcucuaacggcagccuccagugccgcaucuguauuuga

SEQ ID NO: 196157 - RNA, 1701 nt, Artificial Sequence; identical to SEQ ID NO: 195188
  derived and/or modified CDS sequence (opt5) from hemagglutinin__InfluenzaA__ADC32420

SEQ ID NO: 196158 - RNA, 1701 nt, Artificial Sequence; identical to SEQ ID NO: 195188
  derived and/or modified CDS sequence (opt5) from hemagglutinin__InfluenzaA__ADC32421

SEQ ID NO: 196159 - RNA, 1701 nt, Artificial Sequence
  derived and/or modified CDS sequence (opt5) from hemagglutinin__InfluenzaA__ADC32422
augaaggccauccuggugguccuccuguacaccuucgcuacagccaacgcggacacgcuuugcauuggcuaucacgcuaauaacagcaccgauacaguugacaccgugcuggagaaaaaugugacagucacccauuccgugaaccuccuggaagauaagcacaaugggaaacuuuguaagcugagaggaguugcuccccuccaucugggcaaaugcaacaucgccggguggauucugggaaauccugagugugaaucucucagcacagccuccucuuggagcuacaucguggagaccuccucuagcgacaacggcacgugcuauccgggggauuuuauugacuacgaagaacugcgggagcagcuuuccagcgucucuuccuucgaacgcuuugagaucuuccccaagaccagcucuuggccuaaucacgauuccaacaagggagugacagccgcuuguccccaugccggcgcgaaaucuuuuuauaagaaucugaucuggcucguuaaaaagggcaacagcuacccuaaacuguccaagagcuauauuaaugacaaggggaaagaagugcuuguccuguggggaauccaccaccccuccaccucugccgaucaacagagccucuaccagaacgcugacgccuacguguucgugggcacauccagauauagcaagaaauuuaagccugagauugcuauccggccgaaaguccgcgagcaggaagggagaaugaauuacuauuggacccugguugagcccggagauaagauuacguucgaagccacaggcaaccugauggugccucgguacgcguuugccauggagcgcaacgcugggucuggaaucauuaucuccgacacccccgugcaugauugcaauacaaccugucaaaccccuaaaggcgccaucaacacaagccuccccuuccagaauauucacucuaucacgauuggcaagugcccgaaguaugucaaaagcaccaagcugagacuugcuacagggcugcggaacgugccuuccauccagucucgcggacucuuuggcgccauugccggguucaucgaaggaggcuggaccgggaugguugacggaugguacggcuaucaucaccagaaugagcaaggcagcggguacgcugcggaccugaaauccacacagaacgccaucgaugagauuaccaauaaggugaacagcgucaucgaaaagaugaauacgcaguuuacagcugugggaaaggaguucaaccaccuugaaaagagaauugagaaucugaacaaaaagguugacgauggcuuccucgacaucuggaccuacaaugccgaacugcuggugcuccuggagaacgagcggacccuugauuaucaugacucuaaugucaaaaaccuguacgaaaaggugcgcucccagcucaaaaacaaugccaaggagauugggaacggauguuuugaguucuaucacaagugcgauaauacauguauggagagcgucaaaaacggcaccuacgacuaucccaaguacucugaagaggcuaaacugaauagagaggaaaucgauggggugaaacuugaguccacacggaucuaucaaauucuggccaucuacagcacgguugcguccucucucgugcuggucgugagccugggcgcuauuuccuuuuggaugugcucuaacggaagccuccagugccgcaucuguauuuga

SEQ ID NO: 196160 - RNA, 1701 nt, Artificial Sequence
  derived and/or modified CDS sequence (opt5) from hemagglutinin__InfluenzaA__ADC32423
augaaggccauccuggugguccuccuguacaccuucgcuacagccaacgcggacacgcuuugcauuggcuaucacgcuaauaacagcaccgauacaguugacaccgugcuggagaaaaaugugacagucacccauuccgugaaccuccuggaagauaagcacaaugggaaacuuuguaagcugagaggaguugcuccccuccaucugggcaaaugcaacaucgccggguggauucugggaaauccugagugugaaucucucagcacagccuccucuuggagcuacaucguggagaccuccucuagcgacaacggcacgugcuauccgggggauuuuauugacuacgaagaacugcgggagcagcuuuccagcgucucuuccuucgaacgcuuugagaucuuccccaagaccagcucuuggccuaaucacgauuccaacaagggagugacagccgcuuguccccaugccggcgcgaaaucuuuuuauaagaaucugaucuggcucguuaaaaagggcaacagcuacccuaaacuguccaagagcuauauuaaugacaaggggaaagaagugcuuguccuguggggaauccaccaccccuccaccucugccgaucaacagagccucuaccagaacgcugacgccuacguguucgugggcacauccagauauagcaagaaauuuaagccugagauugcuauccggccgaaaguccgcgagcaggaagggagaaugaauuacuauuggacccugguugagcccggagauaagauuacguucgaagccacaggcaaccugguggugccucgguacgcguuugccauggagcgcaacgcugggucuggaaucauuaucuccgacacccccguccaugauugcaauacaaccugucaaaccccuaaaggcgccaucaacacaagccuccccuuccagaauauucacucuaucacgauuggcaagugcccgaaguaugugaaaagcaccaagcugagacuugcuacagggcugcggaacguuccuuccauccagucucgcggacucuuuggcgccauugccggguucaucgaaggaggcuggaccgggaugguggacggaugguacggcuaucaucaccagaaugagcaaggcagcggguacgcugcggaccugaaauccacacagaacgccaucgaugagauuaccaauaaggucaacagcgugaucgaaaagaugaauacgcaguuuacagcuguuggaaaggaguucaaccaccuugaaaagagaauugagaaucugaacaaaaaggugaaugacggcuuccucgauaucuggaccuacaacgccgaacugcugguccuccuggagaaugagcggacccuugacuaucaugauucuaacgugaaaaaccuguacgaaaagguccgcucccagcucaaaaauaacgccaaggagauugggaauggauguuuugaguucuaucacaagugcgacaacacauguauggagagcgugaaaaauggcaccuacgauuaucccaaguacucugaagaggcuaaacugaacagagaggaaaucgacgggguuaaacuugaguccacacggaucuaucaaauucuggccaucuacagcacgguggcguccucucucguccuggugguuagccugggcgcuauuuccuuuuggaugugcucuaauggaagccuccagugccgcaucuguauuuga

SEQ ID NO: 196161 - RNA, 1701 nt, Artificial Sequence
  derived and/or modified CDS sequence (opt5) from hemagglutinin__InfluenzaA__ADC32434
augaaggccauccuggugguccuccuguacaccuucgcuacagccaacgcggacacgcuuugcauuggcuaucacgcuaauaacagcaccgauacaguugacaccgugcuggagaagaaugugacagucacccauuccgugaaccuccuggaagauaagcacaaugggaaacuuuguaagcugagaggaguugcuccccuccaucugggcaaaugcaacaucgccggguggauucugggaaauccugagugugaaucucucagcacagccuccucuuggagcuacaucguggagaccuccucuagcgacaacggcacgugcuauccgggggauuuuauugacuacgaagaacugcgggagcagcuuuccagcgucucuuccuucgaacgcuuugagaucuuccccaagaccagcucuuggccuaaucacgauuccaacaagggagugacagccgcuuguccccaugccggcgcgaaaucuuuuuauaagaaucugaucuggcucguuaaaaagggcaacagcuacccuaaacuguccaagagcuauauuaaugacaaggggaaagaagugcuuguccuguggggaauccaccaccccuccaccucugccgaucaacagagccucuaccagaacgcugacgccuacguguucgugggcacauccagauauagcaagaaauuuaagccugagauugcuauccggccgaaaguccgcgaucaggaggggagaaugaauuacuauuggacccugguugaacccggagacaagauuacguucgaggccacaggcaaccugguggugccucgguacgcguuugccauggaacgcaacgcugggucuggaaucauuaucuccgauacccccguccaugacugcaauacaaccugucaaaccccuaaaggcgccaucaacacaagccuccccuuccagaauauucacccgaucacgauuggcaagugcccuaaguaugugaaaucuaccaagcugagacuugcuacagggcugcggaacguucccagcauccagucccgcggacucuuuggcgccauugccggguucaucgagggaggcuggaccgggaugguggacggaugguacggcuaucaucaccagaaugaacaaggcucuggguacgcugcggaucugaaaagcacacagcacgccaucgacgagauuaccaacaaggucaauuccgugaucgagaaaaugaacacgcaguuuacagcuguuggaaaggaguucaaucaucuugagaagagaauugaaaaccugaauaaaaagguggaugacggcuuccucgauaucuggaccuacaacgccgagcugcugguccuccuggaaaaugagcggacccuugacuaucacgauagcaacgugaaaaaucuguacgagaagguccgcucucagcucaaaaacaacgccaaggaaauugggaauggauguuuugaguucuaucauaagugcgacaacacauguauggaauccgugaaaaauggcaccuacgauuauccuaaguacagcgaggaagcuaaacugaacagagaggagaucgacgggguuaaacuugaaucuacacggaucuaucaaauucuggccaucuacuccacgguggcgagcucccucguccuggugguuucucugggcgcuauuagcuuuuggaugugcuccaauggaucucuccagugccgcaucuguauuuga

SEQ ID NO: 196162 - RNA, 1701 nt, Artificial Sequence; identical to SEQ ID NO: 196161
  derived and/or modified CDS sequence (opt5) from hemagglutinin__InfluenzaA__ADC32435

SEQ ID NO: 196163 - RNA, 1701 nt, Artificial Sequence
  derived and/or modified CDS sequence (opt5) from hemagglutinin__InfluenzaA__ADC34940
augaagaccaucauugcccugagcuacauccucugccugguguucgcucagaaacuucccggcaacgacaauuccacagccacgcugugucucgggcaccaugcggucccuaacggaaccauuguuaagacaaucaccaaugaucaaauugaggugacaaacgcuaccgaacuggugcagucuagcuccacaggcgggaucugcgacucuccgcaccagauccuugauggagagaauuguacccugauugacgcccuccugggcgauccccagugcgacggguuucaaaacaaaaagugggaucuguucgucgaaagaagcaaagccuauuccaauuguuacccuuaugacgugcccgauuacgcuucucuccggagccugguugccuccagcggaacgcuugaguuuaacaaugaacgcuucaacuggaccggcgugacacagaauggcaccucuuccgcuugcaagagagggagcgacaacuccuuuuucucucggcugaauuggcucacacaucugaaguuuaaauauccugcccuuaacgucaccaugcccaauaacgagaaguucgauaaacuguacaucuggggagugcaccauccuggcacggacaacgaucagauuuuucuccacgcgcaggccagcgggcgcaucacaguuucuaccaagagaucccaacagacagugauuccgaauaucggaagccggccccgcgucagaaacauuccuucccggaucucuaucuauuggaccauugugaaacccggcgacauccugcugauuaauagcaccgggaaccucaucgcuccucgcggauacuucaagauuagauccggcaagagcucuaucaugaaauccgacgcccccaucggcaaguguaauagcgagugcauuacaccgaacgggucuaucccuaaugauaaacccuuucagaacgugaaucggauuacguacggagcuuguccucgcuaugucaagcagaacacccugaaacuugccacaggcaugagaaauguucccgaaaagcaaacccgggggaucuucggagcgauugccggcuuuaucgagaacgggugggaaggaaugguggacggcugguacggcuuccgccaccagaauagcgaggggaucggacaggcugccgaucugaaauccacacaagcugccauuaaccagaucaauggcaagcucaacagacugauugggaagaccaacgagaaauuccaucagaucgaaaaggaguuuucugaaguggagggacggauucaggaccuugaaaaauaugucgaggauacgaagaucgaccuguggagcuacaaugccgagcuccugguggcucuggaaaaccaacacacaauugaucucaccgacuccgagaugaauaaacuguucgaaagaaccaagaagcagcuucgcgagaacgcggaagauaugggcaaugggugcuuuaaaaucuaucauaagugugacaacgccugcaucggcagcauucggaauggaacauacgaucacgacguuuauagagacgaggcucugaacaaucgcuuccagaucaaaggcguggagcucaagucuggguacaaagauuggauucuguggaucuccuuugccauuagcugcuuccuucugugugucgcccuccugggauuuaucaugugggcuugccagaagggcaacauccgguguaauauuugcaucuga

SEQ ID NO: 196164 - RNA, 1701 nt, Artificial Sequence; identical to SEQ ID NO: 196076
  derived and/or modified CDS sequence (opt5) from hemagglutinin__InfluenzaA__ADC38987

SEQ ID NO: 196165 - RNA, 1701 nt, Artificial Sequence
  derived and/or modified CDS sequence (opt5) from hemagglutinin__InfluenzaA__ADC38997
augaaggccauccuggugguccuccuguacaccuucgcuacagccaacgcggacacgcuuugcauuggcuaucacgcuaauaacagcaccgauacaguugacaccgugcuggagaagaaugugacagucacccauuccgugaaccuccuggaagauaagcacaaugggaaacuuuguaagcugagaggaguugcuccccuccaucugggcaaaugcaacaucgccggguggauucugggaaauccugagugugaaucucucagcacagccuccucuuggagcuacaucguggagaccuccucuagcgacaacggcacgugcuauccgggggauuuuauugacuacgaagaacugcgggagcagcuuuccagcgucucuuccuucgaacgcuuugagaucuuccccaagaccagcucuuggccuaaucacgauuccaacaagggagugacagccgcuuguccccaugccggcgcgaaaucuuuuuauaagaaucugaucuggcucguuaaaaagggcaacagcuacccuaaacuguccaagagcuauauuaaugacaaggggaaagaugugcuuguccuguggggaauccaccaccccuccaccucugccgaccaacagagccucuaccagaacgcugaugccuacguguucgugggcacauccagauauagcaagaaauuuaagccugaaauugcuauccggccgaaaguccgcgaccaggaggggagaaugaauuacuauuggacccugguugagcccggagauaagauuacguucgaagccacaggcaaccugguggugccucgguacgcguuugccauggagcgcaacgcugggucuggaaucauuaucuccgacacccccguccaugacugcaauacaaccugucaaaccccuaaaggcgccaucaacacaagccuccccuuccagaauauucacccgaucacgauuggcaagugcccuaaguaugugaaaucuaccaagcugagacuugcuacagggcugcggaacguucccagcauccagucccgcggacucuuuggcgccauugccggguucaucgaaggaggcuggaccgggaugguggauggaugguacggcuaucaucaccagaaugagcaaggcucuggguacgcugcggaccugaaaagcacacagaacgccaucgaugaaauuaccaauaaggucaacuccgugaucgagaaaaugaauacgcaguuuacagcuguuggaaaggaguucaaccaccuugaaaagagaauugagaaucugaacaaaaagguggacgauggcuuccucgacaucuggaccuacaaugccgaacugcugguccuccuggagaacgaacggacccuugauuaucaugacagcaaugugaaaaaccuguacgagaagguccgcucucagcucaaaaacaaugccaaggagauugggaacggauguuuugaguucuaucacaagugcgauaauacauguauggaguccgugaaaaacggcaccuacgacuauccuaaguacagcgaagaggcuaaacugaauagagaagagaucgaugggguuaaacuugagucuacacggaucuaucaaauucuggccaucuacuccacgguggcgagcucccucguccuggugguuucucugggcgcuauuagcuuuuggaugugcuccaacggaucucuccagugccgcaucuguauuuga

SEQ ID NO: 196166 - RNA, 1701 nt, Artificial Sequence; identical to SEQ ID NO: 195842
  derived and/or modified CDS sequence (opt5) from hemagglutinin__InfluenzaA__ADC39007

SEQ ID NO: 196167 - RNA, 1698 nt, Artificial Sequence
  derived and/or modified CDS sequence (opt5) from hemagglutinin__InfluenzaA__ADC45604
augaaggccaaacugcucgugcugcuuugcaccuucacagcuacguacgccgacaccaucuguauuggcuaucacgcgaacaauagcacagauaccgucgacacaguucuggagaagaacgugaccgugacacauuccgucaaucuccuggaaaacucucacaaugggaaacuuugccugcucaagggaaucgcuccccugcagcugggcaacuguagcguggccggguggauucucggaaauccugagugcgaacugcuuaucuccaaagagucuuggagcuacauuguugaaaagccgaaccccgagaauggcaccuguuauccugggcauuuugccgauuacgaggaacugagagagcaacucuccucugugagcuccuucgaacgguuugagaucuuccccaaggagagcucuuggccuaaccacacggucaccggaguguccgcuagcugcucucauaauggcgaauccagcuuuuaucgcaaccugcuuuggcugacaggcaaaaaugggcucuaccccaaccugucuaaguccuaugccaauaacaaagagaaggaaguucuggugcucuggggaguccaccacccuccgaacaucggcgaccagaaagcucuguaccauaccgagaaugccuacgugagcguggucuccucucacuauagcagaaaguucacacccgaaauugcgaagcggccuaaaguucgcgaucaggaggggagaaucaacuacuauuggacccuucuggagcccggagacacgauuaucuuugaagccaauggcaaccucauugcuccucgguacgccuucgcucugucccgcgggcuuggaagcggcaucauuaauucuaacgcccccauggauaagugugacgcgaaaugccagacaccgcaaggcgccaucaauuccagccugccuuuucagaacgugcaucccgugaccaucggggaguguccuaaguaugucagaucugcuaaacuccggauggugacaggacugcgcaauauucccagcauccaguccagaggccuguucggggccauugcuggauuuaucgaaggcggguggaccggaaugguugauggcugguacggcuaucaccaccagaacgagcaagggucuggauacgccgccgaccaaaagagcacccagaaugcuauuaacggcaucacaaauaaagugaacuccgucaucgaaaagaugaauacgcaguucaccgcgguggggaaggaguuuaacaaacucgagcggcgcauggaaaaccugaauaagaaaguugaugacggauucauugauaucuggacauacaacgccgagcuucuggugcuccuggaaaaugagagaacccuugacuuccaugacagcaacgucaagaaucuguaugaaaaagugaagucucagcucaagaacaaugcuaaagagauuggcaacgggugcuuugaguucuaccacaaguguaaugaugaaugcauggaguccgucaaaaacggcacauaugacuaccccaaguauagcgaagagucuaaacugaaucgggagaagaucgauggagugaagcuggaauccaugggcguuuaccagauucucgccaucuauagcaccguggccuccucucugguccuucuggugagccucggggcuaucuccuuuuggaugugcucuaacggaagccugcagugucgcauuugcaucuga

SEQ ID NO: 196168 - RNA, 1698 nt, Artificial Sequence
  derived and/or modified CDS sequence (opt5) from hemagglutinin__InfluenzaA__ADC45626
augaaggugaaacugcucguccugcuuugcaccuucacagccacguacgcugacaccaucuguauuggcuaucacgccaacaauagcacagauaccguugacacagugcuggagaagaacgugaccgucacacauuccgugaaucuccuggaagauaaccacaaugggaaacuuugccugcucaagggaaucgcgccccugcagcugggcaacuguucuguugcuggguggauucucggaaauccugagugcgaacugcuuaucagcaaagaguccuggucuuacauuguggaaaagccgaaccccgagaauggcaccuguuauccugggcauuuugccgacuacgaggaacugagagagcaacucagcuccgucucuagcuucgaacgguuugagaucuuccccaaggaguccagcuggccuaaccacacggugaccggaguuucugccuccugcagccauaauggcgaaucuuccuuuuauaaaaaccugcuuuggcugacaggcaagaaugggcucuaccccaaccugagcaaaucuuaugcuaauaacaaggagaaagaagugcugguccucuggggagugcaccacccuccgaacaucggcaaucagaugacccuguaccauaaggagaacgccuacguguccgucguuagcucccacuauucucgcaaguucacacccgaaauugcuaaaagaccuaaggugcgggaucaggaggggcgcaucaauuacuauuggacccuucuggagcccggagacacgauuaucuuugaagccagcggcaaccucauugcgccuagauacgccuucgcucugucccggggguuuggaagcggcaucauuaauucuaacgcccccauggaugagugugacgcuaaaugccagacaccgcaaggcgccaucaauuccagccuuccuuuccagaacgugcaucccgucaccaucggggaauguccuaaguaugugcgcucugcgaaacugagaaugguuacaggacuccggaauauucccagcauccagucccgcggccuguuuggggccauugcuggauucaucgagggcggguggaccggaaugguggauggcugguacggcuaucaccaccagaacgaacaagggucuggauacgccgcugaccaaaagagcacccagaaugccauuaacggcaucacaaauaaagucaacuccgugaucgagaagaugaauacgcaguuuaccgccguugggaaggaguucaacaaacuggaaagacggauggagaaccucaauaagaaaguggaugacggauucauugaugucuggacauacaacgcugaacugcuugugcugcucgagaaugaacgcacccuggacuuucaugacagcaacgucaagaaucuuuaugagaaagugaagaaccagcugaagaauaacgcgaaagagaucggcaaugggugcuucgaauuuuaccacaaguguaacgaugagugcauggaaucuguuaaaaauggcacauaugacuaccccaaguauuccgaggagagcaaacucucuagagaaaagauugauggagugaagcuggaguccaugggcgucuaccagauccuggccauuuauagcaccguggcuuccucucucguucugcuugugagccugggggccaucuccuucuggaugugcucuaacggaagccuccagugucggaucugcauuuga

SEQ ID NO: 196169 - RNA, 1698 nt, Artificial Sequence
  derived and/or modified CDS sequence (opt5) from hemagglutinin__InfluenzaA__ADC45637
augaaggugaaacugcucguccugcuuugcaccuucacagccacguacgcugacaccaucuguauuggcuaucacgccaacaauagcacagauaccguugacacagugcuggagaagaacgugaccgucacacauuccgugaaucuccuggaagauaaccacaaugggaaacuuugccugcucaagggaaucgcgccccugcagcugggcaacuguucuguugcuggguggauucucggaaauccugagugcgaacugcuuaucagcaaagaguccuggucuuacauuguggaaaagccgaaccccgagaauggcaccuguuauccugggcauuuugccgacuacgaggaacugagagagcaacucagcuccgucucuagcuucgaacgguuugagaucuuccccaaggaguccagcuggccuaaccacacggugaccggaguuucugccuccugcagccauaauggcgaaucuuccuuuuauaaaaaccugcuuuggcugacaggcaagaaugggcucuaccccaaccugagcaaaucuuaugcuaauaacaaggagaaagaagugcugguccucuggggagugcaccacccuccgaacaucggcgaucagaugacccuguaccauaaggagaaugccuacguguccgucguuagcucccacuauucucgcaaguucacacccgaaauugcuaaaagaccuaaggugcgggaccaggaggggcgcaucaacuacuauuggacccuucuggagcccggagauacgauuaucuuugaagccagcggcaaucucauugcgccuagauacgccuucgcucugucccggggguuuggaagcggcaucauuaacucuaaugcccccauggacgagugugaugcuaaaugccagacaccgcaaggcgccaucaacuccagccuuccuuuccagaaugugcaucccgucaccaucggggaauguccuaaguaugugcgcucugcgaaacugagaaugguuacaggacuccggaacauucccagcauccagucccgcggccuguuuggggccauugcuggauucaucgagggcggguggaccggaaugguggacggcugguacggcuaucaccaccagaaugaacaagggucuggauacgccgcugaucaaaagagcacccagaacgccauuaauggcaucacaaacaaagucaauuccgugaucgagaagaugaacacgcaguuuaccgccguugggaaggaguucaauaaacuggaaagacggauggagaaccucaacaagaaaguggacgauggauucauugacgucuggacauacaaugcugaacugcuugugcugcucgagaacgaacgcacccuggacuuucaugauagcaaugucaagaaccuuuaugagaaagugaagaaucagcugaagaacaaugcgaaagagaucggcaacgggugcuucgaauuuuaccacaaguguaaugacgagugcauggaaucuguuaaaaacggcacauaugauuaccccaaguauuccgaggagagcaaacucucuagagaaaagauugacggagugaagcuggaguccaugggcgucuaccagauccuggccauuuauagcaccguggcuuccucucucguucugcuugugagccugggggccaucuccuucuggaugugcucuaauggaagccuccagugucggaucugcauuuga

SEQ ID NO: 196170 - RNA, 1698 nt, Artificial Sequence
  derived and/or modified CDS sequence (opt5) from hemagglutinin__InfluenzaA__ADC45648
augaaggugaaacugcucguccugcuuugcaccuucgccgcuacauacgccgacacgaucuguauuggcuaucacgcgaacaauagcaccgauacaguugacaccgugcuggagaagaacgugacagucacccauuccgugaaucuccuggaaaacucucacaaugggaaacuuugccugcucaagggaaucgcuccccugcagcugggcaacuguagcauugccggguggguucucggaaauccugagugcgaacugcuuaucuccaaagagucuuggagcuacauuguggaaaagccgaaccccgagaauggcacauguuauccugggcauuuugccgauuacgaggaacugagagagcaacucuccucugucagcuccuucgaacgguuugagaucuuccccaaggagagcucuuggccuaaccacaccgugacgggaguuuccgcuagcugcucucauaauggcgaauccagcuuuuaucgcaaccugcuuuggcugaccggcaaaaaugggcucuaccccaaccugucuaaguccuaugccaauaacaaagagaaggaagugcugguccucuggggagugcaccacccuccgaacaucggcgaccagaaagcucuguaccauacagagaaugccuacgugagcgucguuuccucucacuauagcagaaaguucacccccgaaauugcgaagcggccuaaagugcgcgaucaggaggggagaaucaacuacuauuggacacuucuggagcccggagacaccauuaucuuugaagccaauggcaaccucauugcuccucgguacgccuucgcucugucccgcggguuuggaagcggcaucauuaauucuaacgcccccauggauaagugugacgcgaaaugccagacgccgcaaggcgccaucaauuccagccuuccuuuccagaacgugcaucccgucacaaucggggaguguccuaaguaugugagaucugcuaaacugcggaugguuaccggacuccgcaauauucccagcauccaguccagaggccuguuuggggccauugcuggauucaucgaaggcggguggacaggaaugguggauggcugguacggcuaucaccaccagaacgagcaagggucuggauacgccgccgaccaaaagagcacccagaaugcuauuaacggcaucaccaauaaagucaacuccgugaucgaaaagaugaauacacaguuuacggcgguugggaaggaguucaacaaacuggagcggcgcauggaaaaccucaauaagaaaguggaugacggauucauugauaucuggaccuacaacgccgagcugcuuguccugcucgaaaaugagagaacacuggacuuucaugacagcaacgugaagaaucuuuaugaaaaagucaagucucagcugaagaacaaugcuaaagagauuggcaacgggugcuucgaguuuuaccacaaguguaaugaugaaugcauggaguccgugaaaaacggcaccuaugacuaccccaaguauagcgaagagucuaaacucaaucgggagaagaucgauggaguuaagcuggaauccaugggcguguaccagauucuggccaucuauagcacagucgccuccucucucgugcugcuuguuagccugggggcuaucuccuucuggaugugcucuaacggaagccuccagugucgcauuugcaucuga

SEQ ID NO: 196171 - RNA, 1698 nt, Artificial Sequence
  derived and/or modified CDS sequence (opt5) from hemagglutinin__InfluenzaA__ADC45659
augaaggugaaacugcucguccugcuuugcaccuucacagccacguacgcugacaccaucuguauuggcuaucacgccaacaauagcacagauaccguugacacagugcuggagaagaacgugaccgucacacauuccgugaaucuccuggaaaacucucacaaugggaaacuuugccugcucaagggaaucgcgccccugcagcugggcaacuguagcguugcuggguggauucucggaaauccugagugcgaacugcuuaucuccaaagagucuuggagcuacauuguggaaaagccgaaccccgagaauggcaccuguuauccugggcauuuugccgauuacgaggaacugagagagcaacucuccucugucagcuccuucgaacgguuugagaucuuccccaagaaaagcucuuggccuaaccacacggugaccggaguuuccgccagcugcucucauaauggcgaguccagcuuuuaucgcaaccugcuuuggcugacagaaaagaauggccucuaccccaaccugucuaaauccuaugcuaauaacaaggagaaagaagugcugguccucuggggagugcaccacccuccgaacaucggggaccagaaggcccuguaccauaccgagaaugcuuacgugagcgucguuuccucucacuauagcagaaaguucacacccgaaauugccaaacggccuaaggugcgcgaucaggagggcagaaucaacuacuauuggacccuucuggagcccggggacacgauuaucuuugaagcgaauggaaaccucauugccccucgguacgcuuucgcccugucccgcggcuuugggagcggaaucauuaauucuaacgcucccauggauaaaugugacgccaagugccagacaccgcaaggcgcgaucaauuccagccuuccuuuccagaacgugcaucccgucaccaucggcgaguguccuaaauaugugagaucugccaagcugcggaugguuacagggcuccgcaauauucccagcauccaguccagaggacuguuuggcgcuauugccggguucaucgaaggaggcuggaccgggaugguggauggaugguacggcuaucaccaccagaacgagcaaggcucuggguacgcugccgaccagaaaagcacccagaaugccauuaacggaaucacaaauaaggucaacuccgugaucgaaaagaugaauacgcaguuuaccgcuguuggcaaagaguucaacaagcuggagcggcgcauggaaaaccucaauaaaaagguggaugacggguucauugauaucuggacauacaacgcggagcugcuuguccugcucgaaaaugagagaacccuggacuuucaugacagcaacgugaaaaaucuuuaugaaaaggucaagucucaacugaaaaacaaugccaaggagauuggaaacggcugcuucgaguuuuaccacaaauguaaugaugaaugcauggaguccgugaagaacgggacauaugacuaccccaaauauagcgaagagucuaagcucaaucgggagaagaucgauggcguuaaacuggaauccaugggaguguaccagauucuggcuaucuauagcaccgucgccuccucucucgugcugcuuguuagccugggcgccaucuccuucuggaugugcucuaacgggagccuccagugucgcauuugcaucuga

SEQ ID NO: 196172 - RNA, 1698 nt, Artificial Sequence
  derived and/or modified CDS sequence (opt5) from hemagglutinin__InfluenzaA__ADC45670
augaaggugaaacugcucguccugcuuugcaccuucacagccacguacgcugacaccaucuguauuggcuaucacgccaacaauagcacagauaccguugacacagugcuggagaagaacgugaccgucacacauuccgugaaucuccuggaaaacucucacaaugggaaacuuugccugcucaagggaaucgcgccccugcagcugggcaacuguagcguugcuggguggauucucggaaauccugagugcgaacugcuuaucuccaaagagucuuggagcuacauuguggaaaagccgaaccccgagaauggcaccuguuauccugggcauuuugccgauuacgaggaacugagagagcaacucuccucugucagcuccuucgaacgguuugagaucuuccccaaggagagcucuuggccuaaccacacggugaccggaggcuccgccagcugcucucauaauggcgaauccagcuuuuaucgcaaccugcuuuggcugacagggaaaaauggacucuaccccaaccugucuaaguccuaugcuaauaacaaagagaaggaaguucuggugcucuggggcguccaccacccuccgaacaucggggaccagaaagcccuguaccauaccgagaaugcuuacgugagcguggucuccucucacuauagcagaaaguucacacccgaaauugccaagcggccuaaaguucgcgaucaggagggaagaaucaacuacuauuggacccuucuggagcccggcgacacgauuaucuuugaagcgaaugggaaccucauugccccucgguacgcuuucgcccugucccgcggauuuggcagcggcaucauuaauucuaacgcucccauggauaagugugacgccaaaugccagacaccgcaaggggcgaucaauuccagccuuccuuuccagaacgugcaucccgugaccaucggagaguguccuaaguaugucagaucugccaaacugcggauggugacaggccuccgcaauauucccagcauccaguccagagggcuguuuggagcuauugccggcuucaucgaagggggauggaccggcaugguugauggcugguacggguaucaccaccagaacgagcaaggaucuggcuacgcugccgaccaaaagagcacccagaaugccauuaacgggaucacaaauaaagugaacuccgucaucgaaaagaugaauacgcaguuuaccgcugugggaaaggaguucaacaaacuggagcggcgcauggaaaaccucaauaagaaaguugaugacggcuucauugauaucuggacauacaacgcggagcugcuugugcugcucgaaaaugagagaacccuggacuuucaugacagcaacgucaagaaucuuuaugaaaaagugaagucucagcugaagaacaaugccaaagagauugggaacggcugcuucgaguuuuaccacaaguguaaugaugaaugcauggaguccgucaaaaacggaacauaugacuaccccaaguauagcgaagagucuaaacucaaucgggagaagaucgauggcgugaagcuggaauccauggggguuuaccagauucuggcuaucuauagcaccguggccuccucucucguccugcuugugagccugggagccaucuccuucuggaugugcucuaacggcagccuccagugucgcauuugcaucuga

SEQ ID NO: 196173 - RNA, 1698 nt, Artificial Sequence
  derived and/or modified CDS sequence (opt5) from hemagglutinin__InfluenzaA__ADC45681
augaaggugaaacugcucguccugcuuugcaccuucacagccacguacgcugacaccaucuguauuggcuaucacgccaacaauagcacagauaccguugacacagugcuggagaagaacgugaccgucacacauuccgugaaucuccuggaagauaaccacaaugggaaacuuugccugcucaagggaaucgcgccccugcagcugggcaacuguucuguugcuggguggauucucggaaauccugagugcgaacugcuuaucagcaaagaguccuggucuuacauuguggaaaagccgaaccccgagaauggcaccuguuauccugggcauuuugccgacuacgaggaacugagagagcaacucagcuccgccucuagcuucgaacgguuugagaucuuccccaaggaguccagcuggccuaaccacacggucaccggagugucugcuuccugcagccauaauggcgaaucuuccuuuuauaaaaaccugcuuuggcugacaggcaagaaugggcucuaccccaaccugcgcaaaagcuaugccaauaacaaggagaaagaaguucuggugcucuggggaguccaccacccuccgaacaucggcgaucagaugacccuguaccauaaggagaaugcuuacgugucuguggucuccagccacuauuccagaaaguucacacccgaaauugccaaacggccuaagguucgcgaccaggaggggagaaucaacuacuauuggacccuucuggagcccggagauacgauuaucuuugaagcgucuggcaaucucauugccccucgguacgcuuucgcccugagccgcggguuuggauccggcaucauuaacagcaaugcucccauggacgagugugaugccaaaugccagacaccgcaaggcgcgaucaacucuucccuuccuuuccagaaugugcaucccgugaccaucggggaauguccuaaguaugucagaagcgccaaacugcggauggugacaggacuccgcaacauucccucuauccagagcagaggccuguuuggggcuauugccggauucaucgagggcggguggaccggaaugguugacggcugguacggcuaucaccaccagaaugaacaaggguccggauacgcugccgaucagaagucuacccagaacgccauuaauggcaucacaaacaaagugaauagcgucaucgagaagaugaacacgcaguuuaccgcuguggggaaggaguucaauaaacuggaacggcgcauggagaaccucaacaagaaaguugacgauggauucauugacguguggacauacaaugcggaacugcuuguccugcucgagaacgaaagaacccuggacuuucaugauuccaaugugaagaaccuuuaugagaaagucaagaaucaacugaagaacaaugccaaagagaucggcaacgggugcuucgaauuuuaccacaaguguaaugacgagugcauggaaagcgugaaaaacggcacauaugauuaccccaaguauucugaggaguccaaacucagccgggaaaagauugacggaguuaagcuggagucuaugggcguguaccagauccuggcuauuuauuccaccgucgccagcucccucgugcugcuuguuucucugggggccaucagcuucuggaugugcuccaauggaucucuccagugucgcaucugcauuuga

SEQ ID NO: 196174 - RNA, 1698 nt, Artificial Sequence
  derived and/or modified CDS sequence (opt5) from hemagglutinin__InfluenzaA__ADC45692
augaaggugaaacugcucguccugcuuugcaccuucacagccacguacgcugacaccaucuguauuggcuaucacgccaacaauagcacagauaccguugacacagugcuggagaagaacgugaccgucacacauuccgugaaucuccuggaaaacucucacaaugggaaacuuugccugcucaagggaaucgcgccccugcagcugggcaacuguagcguugcuggguggauucucggaaauccugagugcgaacugcuuaucuccaaaaagucuuggagcuacauuguggagaagccgaaccccgaaaauggcaccuguuauccugggcauuuugccgauuacgaggagcugagagaacaacucuccucugucagcuccuucgagcgguuugaaaucuuccccaaagagagcucuuggccuaaccacacggugaccggaguuuccgccagcugcucucauaauggcgaguccagcuuuuaucgcaaccugcuuuggcugacaggcaagaaugggcucuaccccaaccugucuaaauccuaugcuaauaacaaggaaaaagaggugcugguccucuggggagugcaccacccuccgaacaucggcgaccagaaggcccuguaccauaccgaaaaugcuuacgugagcgucguuuccucucacuauagcagaaaguucacacccgagauugccaaacggccuaaggugcgcgaucaggaagggagaaucaacuacuauuggacccuucuggagcccggagacacgauuaucuuugaggcgaauggcaaccucauugccccucgguacgcuuucgcccugucccgcggguuuggaagcggcaucauuaauucuaacgcucccauggauaaaugugacgccaagugccagacaccgcaaggcgcgaucaauuccagccuuccuuuccagaacgugcaucccgucaccaucggggaauguccuaaauaugugagaucugccaagcugcggaugguuacaggacuccgcaauauucccagcauccaguccagaggccuguuuggggcuauugccggauucaucgagggcggguggaccggaaugguggauggcugguacggcuaucaccaccagaacgaacaagggucuggauacgcugccgaccagaaaagcacccagaaugccauuaacggcaucacaaauaaggucaacuccgugaucgagaagaugaauacgcaguuuaccgcuguugggaaagaguucaacaagcuggaacggcgcauggagaaccucaauaaaaagguggaugacggauucauugauaucuggacauacaacgcggaacugcuuguccugcucgagaaugaaagaacccuggacuuucaugacagcaacgugaaaaaucuuuaugagaaggucaagucucaacugaaaaacaaugccaaggaaauuggcaacgggugcuucgaguuuuaccacaaauguaaugaugagugcauggaauccgugaagaacggcacauaugacuaccccaaauauagcgaggaaucuaagcucaaucgggagaagaucgauggaguuaaacuggaguccaugggcguguaccagauucuggcuaucuauagcaccgucgccuccucucucgugcugcuuguuagccugggggccaucuccuucuggaugugcucuaacggaagccuccagugucgcauuugcaucuga

SEQ ID NO: 196175 - RNA, 1698 nt, Artificial Sequence; identical to SEQ ID NO: 195242
  derived and/or modified CDS sequence (opt5) from hemagglutinin__InfluenzaA__ADC45703

SEQ ID NO: 196176 - RNA, 1698 nt, Artificial Sequence
  derived and/or modified CDS sequence (opt5) from hemagglutinin__InfluenzaA__ADC45714
augaaggugaaacugcucguccugcuuugcaccuucacagccacguacgcugacaccaucuguauuggcuaucacgccaacaauagcacagauaccguugacacagugcuggagaagaacgugaccgucacacauuccgugaaucuccuggaagauaaccacaaugggaaacuuugccugcucaagggaaucgcgccccugcagcugggcaacuguucuguugcuggguggauucucggaaauccugagugcgaacugcuuaucagcaaagaguccuggucuuacauuguggaaaagccgaaccccgagaauggcaccuguuauccugggcauuuugccgacuacgaggaacugagagagcaacucagcuccgucucuagcuucgaacgguuugagaucuuccccaaggaguccagcuggccuaaccacacggugaccggaguuucugccuccugcagccauaauggcgaaucuuccuuuuauaaaaaccugcuuuggcugacaggcaagaaugggcucuaccccaaccugagcaaaucuuaugcuaauaacaaggagaaagaagugcugguccucuggggagugcaccacccuccgaacaucggcgaucagaccacacuguaccauaaggagaaugccuacguguccgucguuagcucccacuauucucgcaaguucacccccgaaauugcuaaaagaccuaaggugcgggaccaggaggggcgcaucaacuacuauuggacgcuucuggagcccggagauacaauuaucuuugaagccagcggcaaucucauugcgccuagauacgccuucgcucugucccggggguuuggaagcggcaucauuaacucuaaugcccccauggacgagugugaugcuaaaugccagaccccgcaaggcgccaucaacuccagccuuccuuuccagaaugugcaucccgucacaaucggggaauguccuaaguaugugcgcucugcgaaacugagaaugguuaccggacuccggaacauucccagcauccagucccgcggccuguuuggggccauugcuggauucaucgagggcggguggaccggaaugguggacggcugguacggcuaucaccaccagaaugaacaagggucuggauacgccgcugaucaaaagagcacacagaacgccauuaauggcaucacgaacaaagucaauuccgugaucgagaagaugaacacccaguuuacagccguugggaaggaguucaauaaacuggaaagacggauggagaaccucaacaagaaaguggacgauggauucauugacgucuggaccuacaaugcugaacugcuugugcugcucgagaacgaacgcacacuggacuuucaugauagcaaugucaagaaccuuuaugagaaagugaagaaucagcugaagaacaaugcgaaagagaucggcaacgggugcuucgaauuuuaccacaaguguaaugacgagugcauggaaucuguuaaaaacggcaccuaugauuaccccaaguauuccgaggagagcaaacucucuagagaaaagauugacggagugaagcuggaguccaugggcgucuaccagauccuggccauuuauagcacgguggcuuccucucucguucugcuugugagccugggggccaucuccuucuggaugugcucuaauggaagccuccagugucggaucugcauuuga

SEQ ID NO: 196177 - RNA, 1698 nt, Artificial Sequence; identical to SEQ ID NO: 195242
  derived and/or modified CDS sequence (opt5) from hemagglutinin__InfluenzaA__ADC45725

SEQ ID NO: 196178 - RNA, 1698 nt, Artificial Sequence
  derived and/or modified CDS sequence (opt5) from hemagglutinin__InfluenzaA__ADC45736
augaaggugaaacugcucguccugcuuugcaccuucacagccacguacgcugacaccaucuguauuggcuaucacgccaacaauagcacagauaccguugacacagugcuggagaagaacgugaccgucacacauuccgugaaucuccuggaaaacucucacaaugggaaacuuugccugcucaagggaaucgcgccccugcagcugggcaacuguagcguugcuggguggauucucggaaauccugagugcgaacugcuuaucuccaaagagucuuggagcuacauuguggaaaagccgaaccccgagaauggcaccuguuauccugggcauuuugccgauuacgaggaacugagagagcaacucuccucugucagcuccuucgaacgguuugagaucuuccccaaggagagcucuuggccuaaccacacggugaccggaguuuccgccagcugcucucauaauggcgaauccagcuuuuaucgcaaccugcuuuggcugacaggcaaaaaugggcucuaccccaaccugucuaaguccuaugcuaauaacaaagagaaggaagugcugguccucuggggagugcaccacccuccgaacaucggcgaccagaaagcccuguaccauaccgagaauacauacgugagcgucguuuccucucacuauagcagaaaguucacccccgaaauugcuaagcggccuaaagugcgcgaucaggaggggagaaucaacuacuauuggacgcuucuggagcccggagacacaauuaucuuugaagccaauggcaaccucauugcgccucgguacgccuucgcucugucccgcggguuuggaagcggcaucauuaauucuaacgcccccauggauaagugugacgcuaaaugccagaccccgcaaggcgccaucaauuccagccuuccuuuccagaacgugcaucccgucacaaucggggaguguccuaaguaugugagaucugcgaaacugcggaugguuaccggacuccgcaauauucccagcauccaguccagaggccuguuuggggccauugcuggauucaucgaaggcggguggaccggaaugguggauggcugguacggcuaucaccaccagaacgagcaagggucuggauacgccgcugaccaaaagagcacacagaaugccauuaacggcaucacgaauaaagucaacuccgugaucgaaaagaugaauacccaguuuacagccguugggaaggaguucaacaaacuggagcggcgcauggaaaaccucaauaagaaaguggaugacggauucauugauaucuggaccuacaacgcugagcugcuuguccugcucgaaaaugagagaacacuggacuuucaugacagcaacgugaagaaucuuuaugaaaaagucaagucucagcugaagaacaaugcgaaagagauuggcaacgggugcuucgaguuuuaccacaaguguaaugaugaaugcauggaguccgugaaaaacggcaccuaugacuaccccaaguauagcgaagagucuaaacucaaucgggagaagaucgauggaguuaagcuggaauccaugggcguguaccagauucuggccaucuauagcacggucgcuuccucucucgugcugcuuguuagccugggggccaucuccuucuggaugugcucuaacggaagccuccagugucgcauuugcaucuga

SEQ ID NO: 196179 - RNA, 1698 nt, Artificial Sequence; identical to SEQ ID NO: 194560
  derived and/or modified CDS sequence (opt5) from hemagglutinin__InfluenzaA__ADC45747

SEQ ID NO: 196180 - RNA, 1698 nt, Artificial Sequence
  derived and/or modified CDS sequence (opt5) from hemagglutinin__InfluenzaA__ADC45758
augaaggugaaacugcucguccugcuuugcaccuucacagccacguacgcugacaccaucuguauuggcuaucacgccaacaauagcacagauaccguugacacagugcuggagaagaacgugaccgucacacauuccgugaaucuccuggaaaacucucacaaugggaaacuuugccugcucaagggaaucgcgccccugcagcugggcaacuguagcguugcuggguggauucucggaaauccugagugcgaacugcuuaucuccaaagagucuuggagcuacauuguggaaaagccgaaccccgagaauggcaccuguuauccugggcauuuugccgauuacgaggaacugagagagcaacucuccucugucagcuccuucgaacgguuugagaucuuccccaaggagagcucuuggccuaaccacacggugaccggaguuuccgccagcugcucucauaauggcgaaaacuccuuuuaucgcaaucugcuuuggcugacaggcaaaaacgggcucuaccccaaucugagcaagucuuaugcuaacaacaaagagaaggaagugcugguccucuggggagugcaccacccuccgaauaucgccgaccagaaaacccuguaccauacagagaacgcuuacguguccgucguuagcucccacuauucuagaaaguucacccccgaaauugccaagcggccuaaagugcgcgaucaggagggcagaaucaauuacuauuggacgcuucuggagcccggggacacaauuaucuuugaagcgaacggaaaucucauugccccucgguacgcuuucgcccugagccgcggcuuuggguccggaaucauuaacagcaaugcucccauggauaagugugacgccaaaugccagaccccgcaaggcgcgaucaacucuucccuuccuuuccagaaugugcaucccgucacaaucggcgaguguccuaaguaugugagaagcgccaaacugcggaugguuaccgggcuccgcaacauucccucuauccagagcagaggacuguuuggcgcuauugccggguucaucgaaggaggcuggaccgggaugguggauggaugguacggcuaucaccaccagaaugagcaaggcuccggguacgcugccgaccagaagucuacacagaacgccauuaauggaaucacgaacaaagucaauagcgugaucgaaaagaugaacacccaguuuacagcuguuggcaaggaguucaacaaacuggagcggcgcauggaaaaucucaacaagaaaguggaugacggguucauugauaucuggaccuacaaugcggagcugcuuguccugcucgaaaacgagagaacacugaauuuucaugacuccaacgugaagaaucuuuaugaaaaagucaagagccaacugaagaacaaugccaaagagauuggaaacggcugcuucgaguuuuaccacaaguguaaugacgaaugcauggagucugugaaaaacgggaccuaugauuaccccaaguauuccgaagagagcaaacucaaucgggagaagaucgacggcguuaagcuggaaucuaugggaguguaccagauucuggcuaucuauuccacggucgccagcucccucgugcugcuuguuucucugggcgccaucagcuucuggaugugcuccaacgggucucuccagugucgcauuugcaucuga

SEQ ID NO: 196181 - RNA, 1698 nt, Artificial Sequence; identical to SEQ ID NO: 195698
  derived and/or modified CDS sequence (opt5) from hemagglutinin__InfluenzaA__ADC45780

SEQ ID NO: 196182 - RNA, 1698 nt, Artificial Sequence; identical to SEQ ID NO: 195203
  derived and/or modified CDS sequence (opt5) from hemagglutinin__InfluenzaA__ADC45791

SEQ ID NO: 196183 - RNA, 1698 nt, Artificial Sequence
  derived and/or modified CDS sequence (opt5) from hemagglutinin__InfluenzaA__ADC45813
augaaggugaaacugcucauccugcuuugcaccuucacagccacguacgcugacaccauuuguaucggcuaucacgccaacaauagcacagauaccgucgacacaguucuggagaagaacgugaccgugacacauuccgucaaucuccuggaaaacucucacaaugggaaacuuugccugcucaagggaauugcgccccugcagcugggcaacuguagcguggcuggguggauccucggaaauccugagugcgaacugcuuauuuccaaagagucuuggagcuacaucguugaaaagccgaaccccgagaauggcaccuguuauccugggcauuuugccgauuacgaggaacugagagagcaacucuccucugugagcuccuucgaacgguuugagaucuuccccaaggagagcucuuggccuaaccacacggucaccggaguguccgccagcugcucucauaauggcgaauccagcuuuuaucgcaaccugcuuuggcugacaaugaaaaauggccucuaccccaaccugucuaaguccuaugcuaauaacaaagagaaggaaguucuggugcucuggggaguccaccacccuccgaacauuggggaccagaaaacccuguacaauacagagaacgccuacgugagcguggucuccucucauuauagcagaaaguucacccccgaaaucgcuaagcggccuaaaguucgcgaucaggagggcagaauuaauuacuauuggacgcuucuggagcccggggacacaaucauuuuugaagccaacggaaaucucaucgcgccucgguacgccuucgcucugucccgcggcuuugggagcggaauuaucaacucuaaugcccccauggauaagugugacgcuaaaugccagaccccgcaaggcgccaucaacuccagccuuccuuuccagaaugugcaccccgugacaauuggcgaguguccuaaguaugucagaucugcgaaacugcggauggugaccgggcuccgcaacauccccagcauucaguccagaggacuguuuggcgccaucgcuggguucauugaaggaggcuggaccgggaugguugauggaugguacggcuaucaucaccagaaugagcaaggcucuggguacgccgcugaccagaaguccacacagaacgccaucaauggaaucacgaacaaagugaauagcgucauugaaaagaugaacacccaguuuacagccgugggcaaggaguucaacaaacuggagcggcgcauggaaaaucucaacaagaaaguugaugacggguucaucgauauuuggaccuacaaugcugagcugcuugugcugcucgaaaacgagagaacacuggacuuucacgacagcaaugucaagaaccuuuaugaaaaagugaagucucaacugaagaauaacgcgaaagagaucggaaauggcugcuucgaguuuuaccauaaguguaacgaugaaugcauggaguccgucaaaaaugggaccuaugacuaccccaaguauagcgaagagucuaaacucaaccgggagaagauugauggcgugaagcuggaauccaugggaguuuaccagauccuggccaucuauagcacgguggcuuccucucucguccugcuugugagccugggcgccauuuccuucuggaugugcucuaaugggagccuccagugucgcaucugcauuuga

SEQ ID NO: 196184 - RNA, 1698 nt, Artificial Sequence; identical to SEQ ID NO: 195203
  derived and/or modified CDS sequence (opt5) from hemagglutinin__InfluenzaA__ADC45824

SEQ ID NO: 196185 - RNA, 1698 nt, Artificial Sequence
  derived and/or modified CDS sequence (opt5) from hemagglutinin__InfluenzaA__ADC45835
augaaggugaaacugcucguccugcuuugcaccuucacagccacguacgcugacaccaucuguauuggcuaucacgccaacaauagcacagauaccguugacacagugcuggagaagaacgugaccgucacacauuccgugaaucuccuggaaaacucucacaaugggaaacuuugccugcucaagggaaucgcgccccugcagcugggcaacuguagcguugcuggguggauucucggaaauccugagugcgaacugcuuaucuccaaagagucuuggagcuacauuguggaaaagccgaaccccgagaauggcaccuguuauccugggcauuuugccgauuacgaggaacugagagagcaacucuccucugucagcuccuucgaacgguuugagaucuuccccaaggagagcucuuggccuaaccacacggugaccggaguuuccgccagcugcucucauaauggcgaaaacuccuuuuaucgcaaucugcuuuggcugacaggcaaaaacgggcucuaccccaaucugagcaagucuuaugcuaacaacaaagagaaggaagugcugguccucuggggagugcaccacccuccgaauaucgccgaccagaaaacccuguaccauacagagaacgcuuacguguccgucguuagcucccacuauucuagaaaguucacccccgaaauugccaagcggccuaaagugcgcgaucaggagggcagaaucaauuacuauuggacgcuucuggagcccggggacacaauuaucuuugaagcgaacggaaaucucauugccccucgguacgcuuucgcccugagccgcggcuuuggguccggaaucauuaacagcaaugcucccauggauaagugugacgccaaaugccagaccccgcaaggcgcgaucaacucuucccuuccuuuccagaaugugcaucccgucacaaucggcgaguguccuaaguaugugagaagcgccaaacugcggaugguuaccgggcuccgcaacauucccucuauccagagcagaggacuguuuggcgcuauugccggguucaucgaaggaggcuggaccgggaugguggauggaugguacggcuaucaccaccagaaugagcaaggcuccggguacgcugccgaccagaagucuacacagaacgccauuaauggaaucacgaacaaagucaauagcgugaucgaaaagaugaacacccaguuuacagcuguuggcaaggaguucaacaaacuggagcggcgcauggaaaaucucaacaagaaaguggaugacggguucauugauaucuggaccuacaaugcggagcugcuuguccugcucgaaaacgagagaacacuggacuuucaugacuccaaugugaagaaccuuuaugaaaaagucaagagccaacugaagaauaacgccaaagagauuggaaauggcugcuucgaguuuuaccacaaguguaacgaugaaugcauggagucugugaaaaaugggaccuaugacuaccccaaguauuccgaagagagcaaacucaaccgggagaagaucgauggcguuacgcuggaaucuaugggaguguaccagauucuggcuaucuauuccacagucgccagcucccucgugcugcuuguuucucugggcgccaucagcuucuggaugugcuccaaugggucucuccagugucgcauuugcaucuga

SEQ ID NO: 196186 - RNA, 1698 nt, Artificial Sequence; identical to SEQ ID NO: 194560
  derived and/or modified CDS sequence (opt5) from hemagglutinin__InfluenzaA__ADC45846

SEQ ID NO: 196187 - RNA, 1701 nt, Artificial Sequence; identical to SEQ ID NO: 194741
  derived and/or modified CDS sequence (opt5) from hemagglutinin__InfluenzaA__ADC53558

SEQ ID NO: 196188 - RNA, 1701 nt, Artificial Sequence; identical to SEQ ID NO: 194832
  derived and/or modified CDS sequence (opt5) from hemagglutinin__InfluenzaA__ADD14087

SEQ ID NO: 196189 - RNA, 1701 nt, Artificial Sequence; identical to SEQ ID NO: 194741
  derived and/or modified CDS sequence (opt5) from hemagglutinin__InfluenzaA__ADD14089

SEQ ID NO: 196190 - RNA, 1701 nt, Artificial Sequence; identical to SEQ ID NO: 194741
  derived and/or modified CDS sequence (opt5) from hemagglutinin__InfluenzaA__ADD14093

SEQ ID NO: 196191 - RNA, 1701 nt, Artificial Sequence
  derived and/or modified CDS sequence (opt5) from hemagglutinin__InfluenzaA__ADD14095
augaaggccauccuggugguccuccuguacaccuucgcuacagccaacgcggacacgcuuugcauuggcuaucacgcuaauaacagcaccgauacaguugacaccgugcuggagaaaaaugugacagucacccauuccgugaaccuccuggaagauaagcacaaugggaaacuuuguaagcugagaggaguugcuccccuccaucugggcaaaugcaacaucgccggguggauucugggaaauccugagugugaaucucucagcacagccuccucuuggagcuacaucguggagaccuccucuagcgacaacggcacgugcuauccgggggauuuuauugacuacgaagaacugcgggagcagcuuuccagcgucucuuccuucgaacgcuuugagaucuuccccaagaccagcucuuggccuaaucacgauuccaacaagggagugacagccgcuuguccccaugccggcgcgaaaucuuuuuauaagaaucugaucuggcucguuaaaaagggcaacagcuacccuaaacuguccaagagcuauauuaaugacaaggggaaagaagugcuuguccuguggggaauccaccaccccuccaccucugccgaucaacagagccucuaccagaacgcugacgccuacguguucgugggcacauccagauauagcaagaaauuuaagccugagauugcuauccggccgaaaguccgcgaucaggaggggagaaugaauuacuauuggacccugguugaacccggagacaagauuacguucgaggccacaggcaaccuggugcucccucgguacgcguuugccauggaacgcaacgcugggucuggaaucauuaucuccgauacccccgugcaugacugcaauacaaccugucaaaccccuaaaggcgccaucaacacaagccugcccuuccagaauauucacccgaucacgauuggcaagugcccuaaguaugucaaaucuaccaaacuuagacuggcuacagggcuccggaacgugcccagcauccagucccgcggacuguuuggcgccauugccggguucaucgagggaggcuggaccgggaugguugacggaugguacggcuaucaucaccagaaugaacaaggcucuggguacgcugcggaucuuaagagcacacagaacgccaucgacgagauuaccaauaaggugaacuccgucaucgagaaaaugaauacgcaguuuacagcugugggaaaggaguucaaccaccuggagaagagaauugaaaaucucaacaaaaagguugaugacggcuuccuggauaucuggaccuacaaugccgagcugcucgugcugcuugaaaacgagcggacccuggacuaucaugauagcaaugucaaaaaccucuacgagaaggugcgcucucagcugaaaaacaaugccaaggaaauugggaacggauguuuugaguucuaucacaagugcgacaauacauguauggaauccgucaaaaacggcaccuacgauuauccuaaguacagcgaggaagcuaaacuuaauagagaggagaucgacggggugaagcuggaaucuacacggaucuaucaaauucucgccaucuacuccacgguugcgagcucccuggugcuggucgugucucucggcgcuauuagcuuuuggaugugcuccaacggaucucugcagugccgcaucuguauuuga

SEQ ID NO: 196192 - RNA, 1701 nt, Artificial Sequence; identical to SEQ ID NO: 194741
  derived and/or modified CDS sequence (opt5) from hemagglutinin__InfluenzaA__ADD14097

SEQ ID NO: 196193 - RNA, 1701 nt, Artificial Sequence; identical to SEQ ID NO: 194741
  derived and/or modified CDS sequence (opt5) from hemagglutinin__InfluenzaA__ADD14099

SEQ ID NO: 196194 - RNA, 1701 nt, Artificial Sequence; identical to SEQ ID NO: 194741
  derived and/or modified CDS sequence (opt5) from hemagglutinin__InfluenzaA__ADD14101

SEQ ID NO: 196195 - RNA, 1701 nt, Artificial Sequence
  derived and/or modified CDS sequence (opt5) from hemagglutinin__InfluenzaA__ADD14103
augaaggccauccuggugguccuccugugcaccuucgcuacagccaacgcggacacgcuuuguauuggcuaccacgcuaauaacagcaccgauacaguugacaccgugcuggagaagaaugugacagucacccauuccgugaaccuccuggaagauaagcacaaugggaaacuuugcaagcugagaggaguugcuccccuccaucugggcaaauguaacaucgccggguggauucugggaaauccugagugcgaaucucucagcacagccuccucuuggagcuauaucguggagaccuccucuagcgacaacggcacguguuacccgggggauuuuauugacuaugaagaacugcgggagcagcuuuccagcgucucuuccuucgaacgcuuugagaucuuccccaagaccagcucuuggccuaaucacgauuccaacaagggagugacagccgcuugcccccaugccggcgcgaaaucuuuuuacaagaaucugaucuggcucguuaaaaagggcaacagcuauccuaaacuguccaagagcuacauuaaugacaaggggaaagaagugcuuguccuguggggaauccaccaccccuccaccucugccgaucaacagagccucuaucagaacgcugacgccuacguguucgugggcacauccagauacagcaagaaauuuaagccugagauugcuauccggccgaaaguccgcgaucaggaggggagaaugaauuauuacuggacccugguugaacccggagacaagauuacguucgaggccacaggcaaccugguggugccucgguaugcguuugccauggaacgcaacgcugggucuggaaucauuaucuccgauacccccguccaugacuguaauacaaccugccaaaccccuaaaggcgccaucaacacaagccuccccuuccagaauauucacccgaucacgauuggcaaguguccuaaguacgugaaaucuaccaagcugagacuugcuacagggcugcggaacguucccagcauccagucccgcggacucuuuggcgccauugccggguucaucgagggaggcuggaccgggaugguggacggaugguauggcuaccaucaccagaaugaacaaggcucuggguaugcugcggaucugaaaagcacacagaacgccaucgacgagauuaccaauaaggucaacuccgugaucgagaaaaugaauacgcaguuuacagcuguuggaaaggaguucaaccaccuugauaagagaauugagaaucugaacaaaaagaucgacgauggcuuccucgacauuuggaccuacaaugccgaacugcuggugcuccuggagaacgaacggacccuugauuaccaugacagcaaugucaaaaaccuguaugagaaggugcgcucucagcucaaaaacaaugccaaggagaucgggaacggaugcuuugaguucuaccacaagugugauaauacaugcauggaauccgucaaaaacggcaccuaugacuacccuaaguauagcgaagaggcuaaacugaauagagaagagaucgauggggugaaacuugagucuacacggauuuaccaaauccuggccauuuauuccacgguugcgagcucccucgugcuggucgugucucugggcgcuaucagcuuuuggaugugcuccaacggaucucuccagugucgcauuugcaucuga

SEQ ID NO: 196196 - RNA, 1701 nt, Artificial Sequence
  derived and/or modified CDS sequence (opt5) from hemagglutinin__InfluenzaA__ADD14111
augaaggccauccuggugguccuccuguacaccuucgcuacagccaacgcggacacgcuuugcauuggcuaucacgcuaauaacagcaccgauacaguugacaccgugcuggagaagaaugugacagucacccauuccgugaaccuccuggaagauaagcacaaugggaaacuuuguaagcugagaggaguugcuccccuccaucugggcaaaugcaacaucgccggguggauucugggaaauccugagugugaaucucucagcacagccuccucuuggagcuacaucguggagauuuccucuagcgacaacggaaccugcuauccgggggauuuuaucgacuacgaagaacugcgggagcagcuuuccagcgucucuuccuucgaacgcuuugagaucuuccccaagacgagcucuuggccuaaucacgauuccaacaagggagugaccgccgcuuguccccaugccggcgcgaaaucuuuuuauaagaaucugauuuggcucguuaaaaagggcaacagcuacccuaaacuguccaagagcuauaucaaugacaaggggaaagaagugcuuguccuguggggcauucaccaccccuccacaucugccgaucaacagagccucuaccagaacgcugacgccuacguguucgugggcaccuccagauauagcaagaaauuuaagccugagaucgcuauucggccgaaaguccgcgaucaggaggggagaaugaauuacuauuggacacugguugaacccggagacaagaucaccuucgaggccacgggcaaccugguggugccucgguacgcguuugccauggaacgcaacgcugggucuggaauuaucaucuccgauacacccguccaugacugcaauaccacaugucaaaccccuaaaggcgccauuaacaccagccuccccuuccagaauauccacccgauuacaaucggcaagugcccuaaguaugugaaaucuacgaagcugagacuugcuaccgggcugcggaacguucccagcauucagucccgcggacucuuuggcgccaucgccggguucaucgagggaggcuggacagggaugguggacggaugguacggcuaucaucaccagaaugaacaaggcucuggguacgcugcggaucugaaaagcacccagaacgccauugacgagaucacaaauaaggucaacuccgugauugagaaaaugaauacccaguuuacggcuguuggaaaggaguucaaccaccuugagaagagaaucgaaaaucugaacaaaaagguggaugacggcuuccucgauauuuggacauacaaugccgagcugcugguccuccuggaaaacgagcggacccuugacuaucaugauagcaaugugaaaaaccuguacgagaagguccgcucucagcucaaaaacaaugccaaggaaaucgggaacggauguuuugaguucuaucacaagugcgacaauaccuguauggaauccgugaaaaacggcacauacgauuauccuaaguacagcgaggaagcuaaacugaauagagaggagaucgacgggguuaaacuugaaucuacccggauuuaucaaauccuggccauuuacuccacaguggcgagcucccucguccuggugguuucucugggcgcuaucagcuuuuggaugugcuccaacggaucucuccagugccgcauuuguaucuga

SEQ ID NO: 196197 - RNA, 1701 nt, Artificial Sequence; identical to SEQ ID NO: 194741
  derived and/or modified CDS sequence (opt5) from hemagglutinin__InfluenzaA__ADD14115

SEQ ID NO: 196198 - RNA, 1701 nt, Artificial Sequence; identical to SEQ ID NO: 194741
  derived and/or modified CDS sequence (opt5) from hemagglutinin__InfluenzaA__ADD14117

SEQ ID NO: 196199 - RNA, 1701 nt, Artificial Sequence; identical to SEQ ID NO: 194741
  derived and/or modified CDS sequence (opt5) from hemagglutinin__InfluenzaA__ADD14119

SEQ ID NO: 196200 - RNA, 1701 nt, Artificial Sequence; identical to SEQ ID NO: 194741
  derived and/or modified CDS sequence (opt5) from hemagglutinin__InfluenzaA__ADD14121

SEQ ID NO: 196201 - RNA, 1701 nt, Artificial Sequence; identical to SEQ ID NO: 194741
  derived and/or modified CDS sequence (opt5) from hemagglutinin__InfluenzaA__ADD14123

SEQ ID NO: 196202 - RNA, 1701 nt, Artificial Sequence; identical to SEQ ID NO: 194741
  derived and/or modified CDS sequence (opt5) from hemagglutinin__InfluenzaA__ADD14127

SEQ ID NO: 196203 - RNA, 1701 nt, Artificial Sequence
  derived and/or modified CDS sequence (opt5) from hemagglutinin__InfluenzaA__ADD14129
augaaggccauccuggugguccuccuguacaccuucgcuacagccaacgcggacacgcuuugcauuggcuaucacgcuaauaacagcaccgauacaguugacaccgugcuggagaagaaugugacagucacccauuccgugaaccuccuggaagauaagcacaaugggaaacuuuguaagcugagaggaguugccucucuccaucugggcaaaugcaacaucgccggguggauucugggaaaucccgagugugaaagccucuccacagcuucuagcugguccuacaucguggagaccucuagcuccgacaacggcacgugcuauccuggggauuuuauugacuacgaagaacugcgggagcagcuuagcucugucuccagcuucgaacgcuuugagaucuucccgaagaccucuuccuggcccaaucacgauagcaacaagggagugacagccgcuuguccucaugccggcgcgaaaucuuuuuauaagaaucugaucuggcucguuaaaaagggcaacuccuaccccaaacugagcaaguccuauauuaaugacaaggggaaagaagugcuuguccuguggggaauccaccacccuucuaccagcgccgaucaacagucccucuaccagaacgcugacgccuacguguucgugggcacaagcagauauucuaagaaauuuaagcccgagauugcuauccggccuaaaguccgcgaucaggaggggagaaugaauuacuauuggacccugguugaaccgggagacaagauuacguucgaggccacaggcaaccugguggugccccgguacgcguuugccauggaacgcaacgcuggguccggaaucauuaucagcgauaccccuguccaugacugcaauacaaccugucaaacccccaaaggcgccaucaacacaucucucccuuuccagaauauucaccccaucacgauuggcaagugcccgaaguaugugaaaagcaccaagcugagacuugcuacagggcugcggaacguuccuuccauccagucucgcggacucuuuggcgccauugccggguucaucgagggaggcuggaccgggaugguggacggaugguacggcuaucaucaccagaaugaacaaggcagcggguacgcugcggaucugaaauccacacagaacgccaucgacgagauuaccaauaaggucaacagcgugaucgagaaaaugaauacgcaguuuacagcuguuggaaaggaguucaaccaccuugagaagagaauugaaaaucugaacaaaaagguggaugacggcuuccucgauaucuggaccuacaaugccgagcugcugguccuccuggaaaacgagcggacccuugacuaucaugauucuaaugugaaaaaccuguacgagaagguccgcucccagcucaaaaacaaugccaaggaaauugggaacggauguuuugaguucuaucacaagugcgacaauacauguauggaaagcgugaaaaacggcaccuacgauuaucccaaguacucugaggaagcuaaacugaauagagaggagaucgacgggguuaaacuugaauccacacggaucuaucaaauucuggccaucuacagcacgguggcguccucucucguccuggugguuagccugggcgcuauuuccuuuuggaugugcucuaacggaagccuccagugccgcaucuguauuuga

SEQ ID NO: 196204 - RNA, 1701 nt, Artificial Sequence
  derived and/or modified CDS sequence (opt5) from hemagglutinin__InfluenzaA__ADD14133
augaaggccauccuggugguccuccuguacaccuucgcuacagccaacgcggacacgcuuugcauuggcuaucacgcuaauaacagcaccgauacaguugacaccgugcuggagaagaaugugacagucacccauuccgugaaccuccuggaagauaagcacaaugggaaacuuuguaagcugagaggaguugcuccccuccaucugggcaaaugcaacaucgccggguggauucugggaaauccugagugugaaucucucagcacagccuccucuuggagcuacaucguggagaccuccucuagcgacaacggcacgugcuauccgggggauuuuauugacuacgaagaacugcgggagcagcuuuccagcgucucuuccuucgaacgcuuugagaucuuccccaagaccagcucuuggccuaaucacgauuccaacaagggagugacagccgcuuguccccaugccggcgcgaaaucuuuuuauaagaaucugaucuggcucguuaaaaagggcaacagcuacccuaaacuguccaagagcuauauuaaugacaaggggaaagaagugcuuguccuguggggaauccaccaccccuccaccucugccgaucaacagagccucuaccagaacguggacgcuuacguguucgucggcacauccagauauagcaagaaauuuaagccugagauugccauccggccgaaaguucgcgaucaggaggggagaaugaauuacuauuggacccugguggaacccggagacaagauuacguucgaggcuacaggcaaccugguggucccucgguacgccuuugcgauggaacgcaacgccggguucggaaucauuaucucugauacccccgugcaugacugcaauacaaccugucaaaccccuaaaggcgcuaucaacacaucccuccccuuucagaauauucacccgaucacgauuggcaagugcccuaaguauguuaaaagcaccaagcugagacuugccacagggcugcggaacgugcccucuauccagagccgcggacucuucggcgcuauugccggguuuaucgagggaggcuggaccgggauggucgacggaugguacggcuaucaucaccagaaugaacaaggcuccggguacgccgcugaucugaaaucuacacagaacgcgaucgacgagauuaccaauaaggugaacagcguuaucgagaaaaugaauacgcaguucacagccgugggaaaggaguucaaccaccuugagaagagaauugaaaaucugaacaaaaaggucgaugacggcuuucucgauaucuggaccuacaaugcugagcugcuggugcuccuggaaaacgagcggacccuugacuaucaugauuccaaugucaaaaaccuguacgagaaggugcgcagccagcucaaaaacaaugccaaggaaauugggaacggauguuucgaguuuuaucacaagugcgacaauacauguauggaaucuguuaaaaacggcaccuacgauuauccuaaguacuccgaggaagccaaacugaauagagaggagaucgacggggugaaacuugaaagcacacggaucuaucaaauucuggcuaucuacucuacggucgccuccagccucgugcugguugugucccugggcgcgauuucuuucuggaugugcagcaacggaucccuccagugccgcaucuguauuuga

SEQ ID NO: 196205 - RNA, 1701 nt, Artificial Sequence; identical to SEQ ID NO: 194832
  derived and/or modified CDS sequence (opt5) from hemagglutinin__InfluenzaA__ADD14135

SEQ ID NO: 196206 - RNA, 1701 nt, Artificial Sequence; identical to SEQ ID NO: 194741
  derived and/or modified CDS sequence (opt5) from hemagglutinin__InfluenzaA__ADD14137

SEQ ID NO: 196207 - RNA, 1701 nt, Artificial Sequence; identical to SEQ ID NO: 195489
  derived and/or modified CDS sequence (opt5) from hemagglutinin__InfluenzaA__ADD14139

SEQ ID NO: 196208 - RNA, 1701 nt, Artificial Sequence; identical to SEQ ID NO: 194741
  derived and/or modified CDS sequence (opt5) from hemagglutinin__InfluenzaA__ADD14143

SEQ ID NO: 196209 - RNA, 1701 nt, Artificial Sequence; identical to SEQ ID NO: 194741
  derived and/or modified CDS sequence (opt5) from hemagglutinin__InfluenzaA__ADD14145

SEQ ID NO: 196210 - RNA, 1701 nt, Artificial Sequence; identical to SEQ ID NO: 194741
  derived and/or modified CDS sequence (opt5) from hemagglutinin__InfluenzaA__ADD14147

SEQ ID NO: 196211 - RNA, 1701 nt, Artificial Sequence
  derived and/or modified CDS sequence (opt5) from hemagglutinin__InfluenzaA__ADD14151
augaaggccauccuggugguccuccuguacaccuucgcuacagccaacgcggacacgcuuugcauuggcuaucacgcuaauaacagcaccgauacaguugacaccgugcuggagaaaaaugugacagucacccauuccgugaaccuccuggaagauaagcacaaugggaaacuuuguaagcugagaggaguugcuccccuccaucugggcaaaugcaacaucgccggguggauucugggaaauccugagugugaaucucucagcacagccuccucuuggagcuacaucguggagaccuccucuagcgacaacggcacgugcuauccgggggauuuuauugacuacgaagaacugcgggagcagcuuuccagcgucucuuccuucgaacgcuuugagaucuuccccaagaccagcucuuggccuaaucacgauuccaacaagggagugacagccgcuugucccagagccggcgcgaaaucuuuuuauaagaaucugaucuggcucguuaaaaagggcaacagcuacccuaaacuguccaagagcuauauuaaugacaaggggaaagaagugcuuguccuguggggaauccaucaccccuccaccucugccgaucaacagagccucuaccagaacgcugacgccuacguguucgugggcacaucccgguauagcaagaaauuuaagccugagauugcuauccgcccgaaagucagagaucaggaggggcggaugaauuacuauuggacccugguugaacccggagacaagauuacguucgaggccacaggcaaccugguggugccucgcuacgcguuugccauggaaagaaacgcugggucuggaaucauuaucuccgauacccccguccacgacugcaauacaaccugucaaaccccuaaaggcgccaucaacacaagccuccccuuccagaauauucauccgaucacgauuggcaagugcccuaaguaugugaaaucuaccaagcugcggcuugcuacagggcugcgcaacguucccagcauccaguccagaggacucuuuggcgccauugccggguucaucgagggaggcuggaccgggaugguggacggaugguacggcuaucaccaucagaaugaacaaggcucuggguacgcugcggaucugaaaagcacacagaacgccaucgacaagauuaccaauaaagucaacuccgugaucgagaagaugaauacgcaguuuacagcuguuggaaaggaguucaaccaccuugaaaaacggauugagaaucugaacaagaaaguggaugacggcuuccucgauaucuggaccuacaaugccgaacugcugguccuccuggagaacgaacgcacccuugacuaucacgauagcaaugugaagaaccuguacgagaaagucagaucucagcucaagaacaaugccaaggagauugggaacggauguuuugaguucuaucauaaaugcgacaauacauguauggaguccgugaagaacggcaccuacgauuauccuaaauacagcgaagaggcuaagcugaaucgggaagagaucgacgggguuaaacuugagucuacacgcaucuaucaaauucuggccaucuacuccacgguggcgagcucccucguccuggugguuucucugggcgcuauuagcuuuuggaugugcuccaacggaucucuccagugcagaaucuguauuuga

SEQ ID NO: 196212 - RNA, 1701 nt, Artificial Sequence; identical to SEQ ID NO: 194741
  derived and/or modified CDS sequence (opt5) from hemagglutinin__InfluenzaA__ADD14153

SEQ ID NO: 196213 - RNA, 1701 nt, Artificial Sequence; identical to SEQ ID NO: 194741
  derived and/or modified CDS sequence (opt5) from hemagglutinin__InfluenzaA__ADD14155

SEQ ID NO: 196214 - RNA, 1701 nt, Artificial Sequence; identical to SEQ ID NO: 194741
  derived and/or modified CDS sequence (opt5) from hemagglutinin__InfluenzaA__ADD14157

SEQ ID NO: 196215 - RNA, 1701 nt, Artificial Sequence; identical to SEQ ID NO: 194741
  derived and/or modified CDS sequence (opt5) from hemagglutinin__InfluenzaA__ADD14162

SEQ ID NO: 196216 - RNA, 1701 nt, Artificial Sequence; identical to SEQ ID NO: 194741
  derived and/or modified CDS sequence (opt5) from hemagglutinin__InfluenzaA__ADD14172

SEQ ID NO: 196217 - RNA, 1701 nt, Artificial Sequence; identical to SEQ ID NO: 194741
  derived and/or modified CDS sequence (opt5) from hemagglutinin__InfluenzaA__ADD14182

SEQ ID NO: 196218 - RNA, 1701 nt, Artificial Sequence; identical to SEQ ID NO: 194741
  derived and/or modified CDS sequence (opt5) from hemagglutinin__InfluenzaA__ADD14192

SEQ ID NO: 196219 - RNA, 1701 nt, Artificial Sequence; identical to SEQ ID NO: 194741
  derived and/or modified CDS sequence (opt5) from hemagglutinin__InfluenzaA__ADD14202

SEQ ID NO: 196220 - RNA, 1701 nt, Artificial Sequence
  derived and/or modified CDS sequence (opt5) from hemagglutinin__InfluenzaA__ADD21447
augaaggccauccugguguuccuccuguacaccuuugcuacagccaacgcggacacgcuuugcauuggcuaucacgcuaauaacagcaccgauacagucgacaccguucuggagaaaaaugugacagugacccauuccgucaaccuccuggaagauagacacaaugggaaacuuuguaagcugcggggaguggcuccccuccaucugggcaagugcaacaucgccggguggcugcucggaaauccugagugugaacugcuuuucacagccucuagcugguccuacauuguugagaccucuaacagcgacaauggcacgugcuauccgggggauuuuaucaacuacgaggagcugcgcgagcagcucuccucugugagcuccuucgaaagauuugagauguuccccaaaucuucuuccuggccuaaucacgaaaccaaccggggagucacagccgcuugucccuaugccggcgcgaauagcuuuuaccgcaaccugauuuggcuugugaagaaggagaauagcuauccuaaacuguccaagagcuacaucaacaacaaagagaaggaaguucucgugcuguggggcauccaucaucccccuaccucugccgaccaacagucccuguaccagaaugcugaugccuaugucuucguggggagcuccaaauacaacaagaaguuuagaccggagauugcugcccggcccaaagugcgcggacagacaggcagaaugaauuauuacuggacccucgucgaaccuggggacacgaucacauucgaggcgaccgaaaaccugguugugccccgguaugccuuugcuaugaagcgcggaucuggcagcgggauuaucauuuccgauacaccugugcacgacugcaauaccaccugucaaacacccaaaggagccaucaacacgagccuuccguuccagaauauucacccugucaccaucggcgagugccccaaguacgugaaaucuacaaaccugagaauggcuaccggccuccggaauaucccuuccauucagagccgcgggcuguuuggagccaucgccggcuucauugaagggggauggacaggcaugaucgaugggugguauggauaccaccaucagaacgaacaaggcucuggcuacgcugcggacagaaagagcacccagaaugccauugaugggaucacgaacaaaguuaauuccgugaucgagaagaugaacacacaguucaccgcugucggaaaggaauuuaaucaccuugagaaacggauugaaaaccugaacaagaaaguggacgacggccuccuggauguuuggaccuauaaugccgagcugcucgugcugcuugagaacgaacgcacacuggacuaccacgauucuaaugucaagaaccucuaugagaaagugagaagccagcugaagaauaacgccaaggaaaucgggaauggauguuucgaguuuuaccauaaaugcgacgauaccuguauggaauccguccggaacggcgcuuaugacuaccccaaguauagcgaggaggccaaacuuaauagagaagagauugauggggugaagcuggaaucuacacgcaucuaccaaauucucgcgaucuacuccacgguugcuagcucucuggugcugcucgucucccugggcgccaucagcuucuggaugugcuccaacggaucucuucagugccggauuuguaucuga

SEQ ID NO: 196221 - RNA, 1701 nt, Artificial Sequence
  derived and/or modified CDS sequence (opt5) from hemagglutinin__InfluenzaA__ADD21457
augaaggccauccugguguuccuccuguacaccuuugcuacagccaacgcggacacgcuuugcauuggcuaucacgcuaauaacagcaccgauacagucgacaccguucuggagaaaaaugugacagugacccauuccgucaaccuccuggaagauagacacaaugggaaacuuuguaagcugcggggaguggcuccccuccaucugggcaagugcaacaucgccggguggcugcucggaaauccugagugugaacugcuuuucacagccucuagcugguccuacauuguugagaccucuaacagcgacaauggcacgugcuauccgggggauuuuaucaacuacgaggagcugcgcgagcagcucuccucugugagcuccuucgaaagauuugagauguuccccaaauccucuuccuggccuaaucacgaaaccaaccggggagucacagccgcuugucccuaugccggcgcgaauagcuuuuaccgcaaccugauuuggcuugugaagaaggaaaauucuuauccuaaacuguccaagagcuacaucaacaacaaagagaaggaaguucucgugcuguggggcauccaucaucccccuaccucugccgaccaacagucccuguaccagaaugcugaugccuaugucuucguggggagcuccaaauacaacaagaaguuuagaccggagauugcugcccggcccaaagugcgcggacagacaggcagaaugaauuauuacuggacccucgucgaaccuggggacacgaucacauucgaggcgaccggaaaccugguugugccccgguaugccuuugcuaugaagcgcggcucugggagcggaauuaucauuuccgauacaccugugcacgacugcaauaccaccugucaaacacccaaaggcgccgucaacacgagccuuccguuccagaauauccacccugugaccauuggcgaaugccccaaguacguuaaaucuacaaaccugagaauggcuaccgggcuccggaauaucccuuccauccagagccgcggacuguuuggcgccauugccggguucaucgagggaggcuggacagggaugauugauggaugguauggcuaccaccaucagaacgagcaaggcucuggguacgcugcggacagaaagagcacccagaaugccaucgauggaauuacgaacaaagugaauagcgucaucgaaaagaugaacacacaguucaccgcugugggcaaggaguuuaaucaccuugaaaaacggaucgagaaccugaacaagaaaguugacgacgggcuccuggauguguggaccuauaaugccgaacugcucguccugcuugagaacgagcgcacacuggacuaccacgauucuaaugugaagaaccucuaugaaaaagucagaagccagcugaagaauaacgccaaggagauuggaaauggcuguuucgaauuuuaccauaaaugcgacgauaccuguauggaguccgugcggaacgggacauaugacuaccccaaguauagcgaagaggcuaaacuuaauagagaggaaaucgauggcguuaagcuggagucuacgcgcauuuaccaaauccucgccauuuacuccaccguggcgagcucucugguccugcucgugucccugggagcuaucagcuucuggaugugcuccaacggcucucuucagugccggaucuguauuuga

SEQ ID NO: 196222 - RNA, 1698 nt, Artificial Sequence
  derived and/or modified CDS sequence (opt5) from hemagglutinin__InfluenzaA__ADD21467
augaaggccaaacugcucgugcugcuuugcaccuucacagcuacguacgccgacaccaucuguauuggcuaucacgcgaacaauagcacagauaccgucgacacaguucuggagaagaacgugaccgugacacauuccgucaaucuccuggaagauucucacaacgggaaacuuugccugcucaagggaaucgcuccccugcagcugggcaauuguagcguggccggguggauucucggaaacccugagugcgaacugcuuaucuccaaagagucuuggagcuacauuguugaaaccccgaaucccgagaacggcacguguuauccuggguacuuugccgacuaugaggaacugagagagcaacucuccucugugagcuccuucgaacgguuugagaucuuccccaaggagagcucuuggccuaaucauaccgucacaggaguguccgcuagcugcucucacaacggcaaguccagcuuuuaccgcaaucugcuuuggcugaccggcaaaaacgggcucuaucccaaucugucuaaguccuacgccaacaauaaagaaaaggagguucuggugcucuggggaguccaucacccuccgaacaucagagaucagcgggcucuguaccacacagaaaacgccuaugugagcguggucuccucucauuacagccgcagauucacccccgagauugcgaaacggccuaagguucgcggccaggaagggagaaucaauuauuacuggacgcuucuggagcccggagacacaauuaucuuugaggccaacggcaaucucauugcuccuugguaugccuucgcucugucccggggguuuggaagcggcaucauuaccucuaacgcccccauggaugaaugugacgcgaagugccagacaccgcaaggcgccaucaauuccagccuuccuuuccagaacgugcaccccgugaccaucggggaguguccuaaauacgcucgcucugccaagcugagaauggucaccggacuccggaauauucccagcauccagucccgcggccuguuuggggcuauugccggauucaucgaaggcggguggacaggaaugguggauggcugguauggcuaccaucaccagaacgagcaagggucuggauacgccgcugaccagaaaagcacgcagaaugcgauuaacggcaucaccaauaagguuaacuccgugaucgaaaagaugaauacacaguuuaccgccgucgggaaagaguucaacaaacuggagagacggauggaaaaucucaacaagaagguggaugacggauuccuggauauuuggacauauaacgcugagcuucugguucuccuggaaaaugagcgcacccuugacuuucacgacagcaacgugaaaaaucuguacgaaaaggucaaaucucaacucaagaacaaugccaaagagaucggcaacgggugcuucgaguuuuaucauaaguguaauaacgaaugcauggaguccgugaagaauggcacguacgauuaucccaaauacagcgaagagucuaagcugaacagagagaaaauugacggagucaagcuggaauccaugggcguguaucagauccucgccauuuacagcacaguugcuuccucucuggugcuucuggucagccucggggccaucuccuucuggaugugcucuaauggaagccugcagugucggaucugcauuuga

SEQ ID NO: 196223 - RNA, 1701 nt, Artificial Sequence
  derived and/or modified CDS sequence (opt5) from hemagglutinin__InfluenzaA__ADD21560
augaagaccaucauugccuucagccacauccugugccucauuuacgcucagaaacugcccggcuccgacaacucuauggccacacuuugucuggggcaucacgcggugccuaauggaacgcucgucaagaccaucacagaugaccaaauugagguuaccaacgcuacagaacuggugcagagcuccucuaccggcagaaucugcaauagcccgcaucacauccuugaugggaaaaacuguacacugauugacgcccuccugggagauccccauugcgacgauuuucagaauaaggagugggaccuguucguggaacgguccaccgccuauucuaacuguuacccuuauuacguccccgauuaugcuagccuccgcucccugguggccagcucuggcacgcuugaguuuacccaggaauccuucaauuggacagggguuacccaagacggaagcucuuacacaugcagacggaaauccgugaacagcuuuuucucucgccugaauuggcuccacaaccuggauuauaaguacccugcucuuaaugucaccaugcccaacaaugacaaguuugauaaacuguacaucuggggcgugcaccauccuggcacggacagagaccagacaaaccucuauguucaggccuccgggcgggugaccgucagcacaaagcgcucccagcaaaccgugauuccgaauaucggaucuagacccugggugcggggcgucagcuccauuaucagcauuuacuggaccaucguuaaaccuggggauauccugcugauuaacucuacaggaaaccucaucgcgccccgcggcuauuucaagauucaguccgggaaaagcucuaucaugagaagcgacgccccuauuggaaauuguaacuccgagugcaucacgcccaauggcucuaucccgaacgauaagccuuuucagaaugugaaccggauuaccuacggcgcuuguccccgcuaugugaagcagaauacacugaaacuugccaccgggaugagaaacgucccugagaagcaaacacggggaaucuucggcgcuauugccggguuuaucgaaaauggaugggagggcaugguggacgggugguacggauuccgccaccagaacagcgaaggcaccggccaggcggccgaucugaaauccacgcaagcugccauuaaucagaucacagggaagcucaacagaguuaucaaaaagaccaaugagaaauuucaucagauugagaaggaguucagcgaaguggaaggacggauccaggaccuggagaaguaugucgaagauaccaaaauugaccuuuggucuuacaacgcugagcugcucguggcccuggagaaucaacacacaaucgaucugaccgacuccgaaaugaacaaacucuucgagagaacacgcaagcagcugcgggaaaacgccgaggauaugggcaaugggugcuuuaagauuuaccacaaaugugacaacgcuugcaucggaagcauuagaaauggcacguaugaccaugauguuuaccgcgacgaagcgcuuaacaaucgguuccagaucaagucugugcagcugaaguccggguauaaagauuggauccucuggauuagcuuugccauguccugcuuccugcuuugugucgugcugcucggcuuuaucauguggaccugccaaaagggaaacauuaaauguaauaucugcauuuga

SEQ ID NO: 196224 - RNA, 1701 nt, Artificial Sequence; identical to SEQ ID NO: 194728
  derived and/or modified CDS sequence (opt5) from hemagglutinin__InfluenzaA__ADD21734

SEQ ID NO: 196225 - RNA, 1701 nt, Artificial Sequence; identical to SEQ ID NO: 194741
  derived and/or modified CDS sequence (opt5) from hemagglutinin__InfluenzaA__ADD21744

SEQ ID NO: 196226 - RNA, 1701 nt, Artificial Sequence
  derived and/or modified CDS sequence (opt5) from hemagglutinin__InfluenzaA__ADD21764
augaaggccauccuggugguccuccuguacaccuucgcuacagccaacgcggacacgcuuugcauuggcuaucacgcuaauaacagcaccgauacaguugacaccgugcuggagaaaaaugugacagucacccauuccgugaaccuccuggaagauaagcacaaugggaaacuuuguaagcugagaggaguugcuccccuccaucugggcaaaugcaacaucgccggguggauucugggaaauccugagugugaaucucucagcacagccuccucuuggagcuacaucguggagaccuccucuagcgacaacggcacgugcuauccgggggauuuuauugacuacgaagaacugcgggagcagcuuuccagcgucucuuccuucgaacgcuuugagaucuuccccaagaccagcucuuggccuaaucacgauuccaacaagggagugacagccgcuuguccccaugccggcgcgaaaucuuuuuauaagaaucugaucuggcucguuaaaaagggcaacagcuacccuaaacuguccaagagcuauauuaaugacaaggggaaagaagugcuuguccuguggggaauccaccaccccuccaccucugccgaucaacagagccucuaccagaacgcugacgccuacguguucgugggcacauccagauauagcaagaaauuuaagccugagauugcuauccggccgaaaguccgcgaucaggaggggagaaugaauuacuauuggacccugguugaacccggagacaagauuacguucgaggccacaggcaaccugguggugccucgguacgcguuugccauggaacgcaacgcugagucugggaucauuaucuccgauacccccguccaugacugcaauacaaccugucaaaccccuaaaggagccaucaacacaagccuccccuuccagaauauucacccgaucacgauuggcaagugcccuaaguaugugaaaucuaccaagcugagacuugcuacaggccugcggaacguucccagcauccagucccgcgggcucuuuggagccauugccggcuucaucgaagggggauggaccggcaugguggacgggugguacggauaucaucaccagaaugagcaaggcucuggcuacgcugcggaucugaaaagcacacagaacgccaucgacgagauuaccaauaaggucaacuccgugaucgaaaagaugaauacgcaguuuacagcuguugggaaggaguucaaccaccuugaaaagagaauugagaaucugaacaaaaagguggaugacggauuccucgauaucuggaccuacaaugccgaacugcugguccuccuggagaacgagcggacccuugacuaucaugauagcaaugugaaaaaccuguacgaaaagguccgcucucagcucaaaaacaaugccaaggagauuggcaacggguguuuugaguucuaucacaagugcgacaauacauguauggaguccgugaaaaacggaaccuacgauuauccuaaguacagcgaagaggcuaaacugaauagagaggaaaucgacggcguuaaacuugagucuacacggaucuaucaaauucuggccaucuacuccacgguggcgagcucccucguccuggugguuucucugggggcuauuagcuuuuggaugugcuccaacggcucucuccagugccgcaucuguauuuga

SEQ ID NO: 196227 - RNA, 1701 nt, Artificial Sequence
  derived and/or modified CDS sequence (opt5) from hemagglutinin__InfluenzaA__ADD21774
augaaggccauccuggugguccuccuguacaccuucgcuacagccaacgcggacacgcuuugcauuggcuaucacgcuaauaacagcaccgauacaguugacaccgugcuggagaagaaugugacagucacccauuccgugaaccuccuggaagauaagcacaaugggaaacuuuguaagcugagaggaguugcuccccuccaucugggcaaaugcaacaucgccggguggauucugggaaauccugagugugaaucucucagcacagccuccucuuggagcuacaucguggagaccuccucuagcgacaacggcacgugcuauccgggggauuuuauugacuacgaagaacugcgggagcagcuuuccagcgucucuuccuucgaacgcuuugagaucuuccccaagaccagcucuuggccuaaucacgauuccaacaagggagugacagccgcuuguccccaugccggcgcgaaaucuuuuuauaagaaucugaucuggcucguuaaaaagggcaacagcuacccuaaacuguccaagagcuauauuaaugacaaggggaaagaagugcuuguccuguggggaauccaccaccccuccaccucugccgaucaacagagccucuaccagaacgcugacgccuacguguucgugggcuccagcagauauucuaagaaauuuaagccugagauugcuauccggccgaaaguccgcgaucaggaggggagaaugaauuacuauuggacacugguugaacccggagacaagauuaccuucgaggccacgggcaaccugguggugccucgguacgcguuugccauggaacgcaacgcuggguccggaaucauuaucagcgauacacccguccaugacugcaauaccacaugucaaaccccuaaaggcgccaucaacaccucucuccccuuccagaauauucacccgaucacaauuggcaagugcccuaaguaugugaaaagcacgaagcugagacuugcuaccgggcugcggaacguucccuccgugcagucucgcggacucuuuggcgccaucgccggguucauugagggaggcuggacagggauggucgacggaugguacggcuaucaucaccagaaugaacaaggcagcggguacgcugcggaucugaaauccacccagaacgccaucgacgagaucacaaauaaggugaacagcguuauugagaaaaugaauacccaguuuacggcugugggaaaggaguucaaccaccuugagaagagaaucgaaaaucugaacaaaaaggucgaugacggcuuccucgauauuuggacauacaaugccgagcugcuggugcuccuggaaaacgagcggacccuugacuaucaugauucuaaugucaaaaaccuguacgagaaggugcgcucccagcucaaaaacaaugccaaggaaaucgggaacggauguuuugaguucuaucacaagugcgacaauaccuguauggaaagcguuaaaaacggcacauacgauuauccuaaguacucugaggaagcuaaacugaauagagaggagauugacggggugaaacuugaauccacccggaucuaucaaauccuggccauuuacagcacagucgcguccucucucgugcugguugugagccugggcgcuaucuccuuuuggaugugcucuaacggaagccuccagugccgcauuuguaucuga

SEQ ID NO: 196228 - RNA, 1701 nt, Artificial Sequence; identical to SEQ ID NO: 194741
  derived and/or modified CDS sequence (opt5) from hemagglutinin__InfluenzaA__ADD21784

SEQ ID NO: 196229 - RNA, 1701 nt, Artificial Sequence; identical to SEQ ID NO: 195901
  derived and/or modified CDS sequence (opt5) from hemagglutinin__InfluenzaA__ADD21794

SEQ ID NO: 196230 - RNA, 1701 nt, Artificial Sequence; identical to SEQ ID NO: 194741
  derived and/or modified CDS sequence (opt5) from hemagglutinin__InfluenzaA__ADD21804

SEQ ID NO: 196231 - RNA, 1701 nt, Artificial Sequence
  derived and/or modified CDS sequence (opt5) from hemagglutinin__InfluenzaA__ADD21814
augaaggccauccuggugguccuccuguacaccuucgcuacagccaacgcggacacgcuuugcauuggcuaucacgcuaauaacagcaccgauacaguugacaccgugcuggagaagaaugugacagucacccauuccgugaaccuccuggaagauaagcacaaugggaaacuuuguaagcugagaggaguugcuccccuccaucugggcaaaugcaacaucgccucuuggauucuggggaauccugagugugaaagccucuccacagccucuagcugguccuacaucguggagaccucuagcuccgacaacggaacgugcuauccgggcgauuuuauugacuacgaggagcugcgggagcagcuuagcucugucuccagcuucgaacgcuuugagaucuuccccaagaccucuuccuggccuaaucacgauagcaacaagggggugacagccgcuuguccccaugccggagcgaaaucuuuuuauaagaaucugaucuggcucguuaaaaagggcaacuccuacccuaaacugagcaaguccuauauuaaugacaagggcaaagaagugcuuguccugugggggauccaccaccccucuaccagcgccgaucaacagucccucuaccagaacgcugacgccuacguguucgugggaacaagcagauauucuaagaaauuuaagccugagauugcuauccggccgaaaguccgcgaucaggagggcagaaugaauuacuauuggacccugguugaacccggggacaagauuacguucgaggccacaggaaaccugguggugccucgguacgcguuugccauggaacgcaacgcuggcuccgggaucauuaucagcgauacccccguccaugacugcaauacaaccugucaaaccccuaaaggagccaucaacacaucucuccccuuccagaauauucacccgaucacgauuggcaagugcccuaaguaugugaaaagcaccaagcugagacuugcuacaggccugcggaacguucccuccauccagucucgcgggcucuuuggagccauugccggcuucaucgaagggggauggaccggcaugguggacgggugguacggauaucaucaccagaaugaacaaggcagcggcuacgcugcggaucugaaauccacacagaacgccaucgacgagauuaccaauaaggucaacagcgugaucgagaaaaugaauacgcaguuuacagcuguugggaaggaguucaaccaccuugaaaagagaauugaaaaucugaacaaaaagguggaugacggauuccucgauaucuggaccuacaaugccgagcugcugguccuccuggaaaacgagcggacccuugacuaucaugauucuaaugugaaaaaccuguacgagaagguccgcucccagcucaaaaacaaugccaaggaaauuggcaacggguguuuugaguucuaucacaagugcgacaauacauguauggaaagcgugaaaaacggaaccuacgauuauccuaaguacucugaggaagcuaaacugaauagagaggagaucgacggcguuaaacuugaauccacacggaucuaucaaauucuggccaucuacagcacgguggcguccucucucguccuggugguuagccugggggcuauuuccuuuuggaugugcucuaacggcagccuccagugccgcaucuguauuuga

SEQ ID NO: 196232 - RNA, 1701 nt, Artificial Sequence; identical to SEQ ID NO: 195901
  derived and/or modified CDS sequence (opt5) from hemagglutinin__InfluenzaA__ADD21824

SEQ ID NO: 196233 - RNA, 1701 nt, Artificial Sequence; identical to SEQ ID NO: 195901
  derived and/or modified CDS sequence (opt5) from hemagglutinin__InfluenzaA__ADD21834

SEQ ID NO: 196234 - RNA, 1701 nt, Artificial Sequence; identical to SEQ ID NO: 195905
  derived and/or modified CDS sequence (opt5) from hemagglutinin__InfluenzaA__ADD21844

SEQ ID NO: 196235 - RNA, 1701 nt, Artificial Sequence; identical to SEQ ID NO: 195905
  derived and/or modified CDS sequence (opt5) from hemagglutinin__InfluenzaA__ADD21854

SEQ ID NO: 196236 - RNA, 1701 nt, Artificial Sequence; identical to SEQ ID NO: 195843
  derived and/or modified CDS sequence (opt5) from hemagglutinin__InfluenzaA__ADD21864

SEQ ID NO: 196237 - RNA, 1701 nt, Artificial Sequence
  derived and/or modified CDS sequence (opt5) from hemagglutinin__InfluenzaA__ADD21884
augaaggccauccuggugguccuccuguacaccuucgcuacagccaacgcggacacgcuuugcauuggcuaucacgcuaauaacagcaccgauacaguugacaccgugcuggagaagaaugugacagucacccauuccgugaaccuccuggaagauaagcacaaugggaaacuuuguaagcugagaggaguugcuccccuccaucugggcaaaugcaacaucgccggguggauucugggaaauccugagugugaaucucucagcacagccuccucuuggagcuacaucguggagaccuccucuagcggcaacgggacgugcuauccgggagacuuuauugauuacgaagaacugcgggagcagcuuuccagcgucucuuccuucgaacgcuuugagaucuuccccaagaccagcucuuggccuaaucacgacuccaacaagggcgugacagccgcuuguccccaugccggcgcgaaaucuuuuuauaagaaucugaucuggcucguuaaaaaggggaacagcuacccuaaacuguccaagagcuauauuaaugauaagggaaaagaagugcuuguccuguggggcauccaccaccccuccaccucugccgaccaacagagccucuaccagaacgcugaugccuacguguucguggggacauccagauauagcaagaaauuuaagccugagauugcuauccggccgaaaguccgcgaccaggagggaagaaugaauuacuauuggacccugguugaacccggcgauaagauuacguucgaggccacagggaaccugguggugccucgguacgcguuugccauggaacgcaacgcuggaucuggcaucauuaucuccgacacccccguccaugauugcaauacaaccugucaaaccccuaaaggcgccaucaacacaagccuccccuuccagaauauucacccgaucacgauugggaagugcccuaaguaugugaaaucuaccaagcugagacuugcuacaggacugcggaacguucccagcauccagucccgcggccucuuuggggccauugccggauucaucgagggcggguggaccggaaugguggacggcugguacggcuaucaucaccagaaugaacaagggucuggauacgcugcggaccugaaaagcacacagaacgccaucgaugagauuaccaauaaggucaacuccgugaucgagaaaaugaauacgcaguuuacagcuguuggcaaggaguucaaccaccuugagaagagaauugaaaaucugaacaaaaagguggacgauggguuccucgacaucuggaccuacaaugccgagcugcugguccuccuggaaaacgagcggacccuugauuaucaugacagcaaugugaaaaaccuguacgagaagguccgcucucagcucaaaaacaaugccaaggaaauuggaaacggcuguuuugaguucuaucacaagugcgauaauacauguaugggguccgugaaaaacggcaccuacgacuauccuaaguacagcgaagaggcuaaacugaauagagaagagaucgauggaguuaaacuugagucuacacggaucuaucaaauucuggccaucuacuccacgguggcgagcucccucguccuggugguuucucugggcgcuauuagcuuuuggaugugcuccaacgggucucuccagugccgcaucuguauuuga

SEQ ID NO: 196238 - RNA, 1701 nt, Artificial Sequence; identical to SEQ ID NO: 195843
  derived and/or modified CDS sequence (opt5) from hemagglutinin__InfluenzaA__ADD21894

SEQ ID NO: 196239 - RNA, 1701 nt, Artificial Sequence
  derived and/or modified CDS sequence (opt5) from hemagglutinin__InfluenzaA__ADD22501
augaaggccauccuggugguccuccuguacaccuucgcuacagccaacgcggacacgcuuugcauuggcuaucacgcuaauaacagcaccgauacaguugacaccgugcuggagaaaaaugugacagucacccauuccgugaaccuccuggaagauaagcacaaugggaaacuuuguaagcugagaggaguugcuccccuccaucugggcaaaugcaacaucgccggguggauucugggaaauccugagugugaaucucucagcacagccuccucuuggagcuacaucguggagaccuccucuagcgacaacggcacgugcuauccgggggauuuuauugacuacgaagaacugcgggagcagcuuuccagcgucucuuccuucgaacgcuuugagaucuuccccaagaccagcucuuggccuaaucacgauuccaacaagggagugacagccgcuuguccccaugccggcgcgaaaucuuuuuauaagaaucugaucuggcucguuaaaaagggcaacagcuacccuaaacuguccaagagcuauauuaaugacaaggggaaagaagugcuuguccuguggggaauccaccaccccuccaccucugccgaucaacagagccucuaccagaacgcugacgccuacguguucgugggcacauccaaguauagcaaaaaguuuaaaccugagauugcuaucagaccgaagguccgggaucaggaggggcgcaugaauuacuauuggacccugguugaacccggagacaaaauuacguucgaggccacaggcaaccugguggugccuagauacgcguuugccauggaacggaacgcugggucuggaaucauuaucuccgauacccccguccaugacugcaauacaaccugucaaaccccuaagggcgccaucaacacaagccuccccuuccagaauauucacccgaucacgauuggcaagugcccuaaauaugugaagucuaccaaacugcgccuugcuacagggcugagaaacguucccagcauccagucccggggacucuuuggcgccauugccggguucaucgagggaggcuggaccgggaugguggacggaugguacggcuaucaucaccagaaugaacaaggcucuggguacgcugcggaucuuaagagcacacagaacgccaucgacgagauuaccaauaaagucaacuccgugaucgagaagaugaauacgcaguuuacagcuguuggaaaggaguucaaccaccuggagaaacgcauugaaaaucugaacaagaaaaucgaugacggcuuccucgauauuuggaccuacaaugccgagcugcuggugcuccuggaaaacgagagaacccuugacuaucaugauagcaaugucaagaaccuguacgagaaagugcggauccagcucaagaacaaugccaaggaaaucgggaacggauguuuugaguucuaucacaaaugcgacaauacauguauggaaucugucaagaacggcaccuacgauuauccuaaauacuccgaggaagcuaagcugaaucgcgaggagauugacggggugaaacuugaaagcacaagaaucuaucaaauucuggccaucuacucuacgguugcguccagccucgugcuggucgugucccugggcgcuauuucuuuuuggaugugcagcaacggaucccuccagugccggaucuguauuuga

SEQ ID NO: 196240 - RNA, 1701 nt, Artificial Sequence; identical to SEQ ID NO: 195843
  derived and/or modified CDS sequence (opt5) from hemagglutinin__InfluenzaA__ADD22511

SEQ ID NO: 196241 - RNA, 1701 nt, Artificial Sequence
  derived and/or modified CDS sequence (opt5) from hemagglutinin__InfluenzaA__ADD22521
augaaggccauccuggugguccuccuguacaccuucgcuacagccaacgcggacacgcuuugcauuggcuaucacgcuaauaacagcaccgauacaguugacaccgugcuggagaagaaugugacagucacccauuccgugaaccuccuggaagauaagcacaaugggaaacuuuguaagcugagaggaguugcuccccuccaucugggcaaaugcaacaucgccggguggauucugggaaauccugagugugaaucucucagcacagccuccucuuggagcuacaucguggagaccuccucuagcgacaacggcacgugcuauccgggggauuuuauugacuacgaagaacugcgggagcagcuuuccagcgucucuuccuucgaacgcuuugagaucuuccccaagaccagcucuuggccuaaucacgauuccaacaagggagugacagccgcuuguccccaugccggcgcgaaaucuuuuuauaagaaucugaucuggcucguuaaaaagggcaacagcuacccuaaacuguccaagagcuauauuaaugacaaggggaaagaagugcuuguccuguggggaauccaccaccccuccaccucugccgaucaacagagccucuaccagaacgcugacacauacguguucgugggcaccuccagauauagcaagaaauuuaagccugagauugccauccggccgaaaguccgcgaucaggaggggagaaugaauuacuauuggacgcugguugaacccggagacaagauuacauucgaggcuaccggcaaccugguggugccucgguacgccuuugcgauggaacgcaacgccgggucuggaaucauuaucuccgauacacccguccaugacugcaauaccaccugucaaacaccuaaaggcgcuaucaacacgagccuccccuuccagaauauucacccgaucaccauuggcaagugcccuaaguaugugaaaucuacaaagcugagacuugccaccgggcugcggaacguucccagcauccagucccgcggacucuuuggcgcuauugccggguucaucgagggaggcuggacagggaugguggacggaugguacggcuaucaucaccagaaugaacaaggcucuggguacgccgcugaucugaaaagcacccagaacgcgaucgacgagauuacgaauaaggucaacuccgugaucgagaaaaugaauacacaguuuaccgccguuggaaaggaguucaaccaccuugagaagagaauugaaaaucugaacaaaaagaucgaugacggcuuccucgauauuuggaccuacaaugcugagcugcuggugcuccuggaaaacgagcggacacuugacuaucaugauagcaaugucaaaaaccuguacgagaaggugcgcucucagcucaaaaacaaugccaaggaaaucgggaacggauguuuugaguucuaucacaagugcgacaauaccuguauggaauccgucaaaaacggcacauacgauuauccuaaguacagcgaggaagccaaacugaauagagaggagaucgacggggugaaacuugaaucuacgcggauuuaucaaauccuggcuauuuacuccaccguugccagcucccucgugcuggucgugucucugggcgcgaucagcuuuuggaugugcuccaacggaucucuccagugccgcauuuguaucuga

SEQ ID NO: 196242 - RNA, 1701 nt, Artificial Sequence; identical to SEQ ID NO: 194741
  derived and/or modified CDS sequence (opt5) from hemagglutinin__InfluenzaA__ADD22531

SEQ ID NO: 196243 - RNA, 1701 nt, Artificial Sequence
  derived and/or modified CDS sequence (opt5) from hemagglutinin__InfluenzaA__ADD22541
augaaggccauccuggugguccuccuguacaccuucgcuacagccaacgcggacacgcuuugcauuggcuaucacgcuaauaacagcaccgauacaguugacaccgugcuggagaaaaaugugacagucacccauuccgugaaccuccuggaagauaagcacaaugggaaacuuuguaagcugagaggaguugcuccccuccaucugggcaaaugcaacaucgccggguggauucugggaaauccugagugugaaucucucagcacagccuccucuuggagcuacaucguggagaccuccucuagcggcaacgggacgugcuauccgggagacuuuauugauuacgaagaacugcgggagcagcuuuccagcgucucuuccuucgaacgcuuugagaucuuccccaagaccagcucuuggccuaaucacgacuccaacaagggcgugacagccgcuuguccccaugccggcgcgaaaucuuuuuauaagaaucugaucuggcucguuaaaaaggggaacagcuacccuaaacuguccaagagcuauauuaaugauaagggaaaagaagugcuuguccuguggggcauccaccaccccuccaccucugccgaccaacagagccucuaccagaacgcugaugccuacguguucguggggacauccaaguauagcaaaaaguuuaaaccugagauugcuaucagaccgaagguccgggaccaggagggacgcaugaauuacuauuggacccugguugaacccggcgauaaaauuacguucgaggccacagggaaccugguggugccuagauacgcguuugccauggaacggaacgcuggaucuggcaucauuaucuccgacacccccguccaugauugcaauacaaccugucaaaccccuaagggcgccaucaacacaagccuccccuuccagaauauucacccgaucacgauugggaagugcccuaaauaugugaagucuaccaaacugcgccuugcuacaggacugagaaacguucccagcauccagucccggggccucuuuggggccauugccggauucaucgagggcggguggaccggaaugguggacggcugguacggcuaucaucaccagaaugaacaagggucuggauacgcugcggaccuuaagagcacacagaacgccaucgaugagauuaccaauaaagucaacuccgugaucgagaagaugaauacgcaguuuacagcuguuggcaaggaguucaaccaccuggagaaacgcauugaaaaucugaacaagaaaguggacgauggguuccucgacaucuggaccuacaaugccgagcugcugguccuccuggaaaacgagagaacccuugauuaucaugacagcaaugugaagaaccuguacgagaaaguccggucucagcucaagaacaaugccaaggaaauuggaaacggcuguuuugaguucuaucacaaaugcgauaauacauguauggaauccgugaagaacgggaccuacgacuauccuaaauacagcgaggaagcuaagcugaaucgcgaggagaucgauggcguuaaacuugaaucuacaagaaucuaucaaauucuggccaucuacuccacgguggcgagcucccucguccuggugguuucucugggagcuauuagcuuuuggaugugcuccaacggcucucuccagugccggaucuguauuuga

SEQ ID NO: 196244 - RNA, 1701 nt, Artificial Sequence; identical to SEQ ID NO: 195843
  derived and/or modified CDS sequence (opt5) from hemagglutinin__InfluenzaA__ADD22554

SEQ ID NO: 196245 - RNA, 1701 nt, Artificial Sequence; identical to SEQ ID NO: 195843
  derived and/or modified CDS sequence (opt5) from hemagglutinin__InfluenzaA__ADD22564

SEQ ID NO: 196246 - RNA, 1701 nt, Artificial Sequence
  derived and/or modified CDS sequence (opt5) from hemagglutinin__InfluenzaA__ADD22574
augaaggccauccuggugguccuccuguacaccuucgcuacagccaacgcggacacgcuuugcauuggcuaucacgcuaauaacagcaccgauacaguugacaccgugcuggagaaaaaugugacagucacccauuccgugaaccuccuggaagauaagcacaaugggaaacuuuguaagcugagaggaguugcuccccuccaucugggcaaaugcaacaucgccggguggauucugggaaauccugagugugaaucucucagcacagccuccucuuggagcuacaucguggagaccuccucuagcgacaacggcacgugcuauccgggggauuuuauugacuacgaagaacugcgggagcagcuuuccagcgucucuuccuucgaacgcuuugagaucuuccccaagaccagcucuuggccuaaucacgauuccaacaagggagugacagccgcuuguccccaugccggcgcgaaaucuuuuuauaagaaucugaucuggcucguuaaaaagggcaacagcuacccuaaacuguccaagagcuauauuaaugacaaggggaaagaagugcuuguccuguggggaauccaccaccccuccaccucugccgaucaacagagccucuaccagaacgcugacacauacguguucgugggcaccuccagauauagcaagaaauuuaagccugagauugccauccggccgaaaguccgcgaucaggaggggagaaugaauuacuauuggacgcugguugaacccggagacaagauuacauucgaggcuaccggcaaccugguggugccucgguacgccuuugcgauggaacgcaacgccgggucuggaaucauuaucuccgauacacccguccaugacugcaauaccaccugucaaacacucaaaggcgcuaucaacacgagccugccuuuccagaauauucaccccaucaccauuggcaagugcccgaaguaugugaaaucuacaaaacuuagacuggccaccgggcuccggaacguuccuagcauccagucccgcggacuguuuggcgcuauugccggguucaucgagggaggcuggacagggaugguggacggaugguacggcuaucaucaccagaaugaacaaggcucuggguacgccgcugaucuuaagagcacccagaacgcgaucgacgagauuacgaauaaggucaacuccgugaucgagaaaaugaauacacaguuuaccgccguuggaaaggaguucaaccaccuggagaagagaauugaaaaucucaacaaaaagaucgaugacggcuuccuggauauuuggaccuacaaugcugagcugcucgugcugcuugaaaacgagcggacacuggacuaucaugauagcaaugucaaaaaccucuacgagaaggugcgcucucagcugaaaaacaaugccaaggaaaucgggaacggauguuuugaguucuaucacaagugcgacaauaccuguauggaauccgucaaaaacggcacauacgauuaucccaaguacagcgaggaagccaaacuuaauagagaggagaucgacggggugaagcuggaaucuacgcggauuuaucaaauccucgcuauuuacuccaccguugccagcucccuggugcuggucgugucucucggcgcgaucagcuuuuggaugugcuccaacggaucucugcagugccgcauuuguaucuga

SEQ ID NO: 196247 - RNA, 1701 nt, Artificial Sequence; identical to SEQ ID NO: 195843
  derived and/or modified CDS sequence (opt5) from hemagglutinin__InfluenzaA__ADD22584

SEQ ID NO: 196248 - RNA, 1701 nt, Artificial Sequence; identical to SEQ ID NO: 194741
  derived and/or modified CDS sequence (opt5) from hemagglutinin__InfluenzaA__ADD22594

SEQ ID NO: 196249 - RNA, 1701 nt, Artificial Sequence; identical to SEQ ID NO: 195843
  derived and/or modified CDS sequence (opt5) from hemagglutinin__InfluenzaA__ADD22604

SEQ ID NO: 196250 - RNA, 1701 nt, Artificial Sequence; identical to SEQ ID NO: 195843
  derived and/or modified CDS sequence (opt5) from hemagglutinin__InfluenzaA__ADD22614

SEQ ID NO: 196251 - RNA, 1701 nt, Artificial Sequence; identical to SEQ ID NO: 195843
  derived and/or modified CDS sequence (opt5) from hemagglutinin__InfluenzaA__ADD22624

SEQ ID NO: 196252 - RNA, 1701 nt, Artificial Sequence
  derived and/or modified CDS sequence (opt5) from hemagglutinin__InfluenzaA__ADD22634
augaaggccauccuggugguccuccugugcaccuucgcuacagccaacgcggacacgcuuuguauuggcuaccacgcuaauaacagcaccgauacaguugacaccgugcuggagaagaaugugacagucacccauuccgugaaccuccuggaagauaagcacaaugggaaacuuugcaagcugagaggaguugcuccccuccaucugggcaaauguaacaucgccggguggauucugggaaauccugagugcgaaucucucagcacagccuccucuuggagcuauaucguggagaccuccucuagcgacaacggcacguguuacccgggggauuuuauugacuaugaagaacugcgggagcagcuuuccagcgucucuuccuucgaacgcuuugagaucuuccccaagaccagcucuuggccuaaucacgauuccaacaagggagugacagccgcuugcccccaugccggcgcgaaaucuuuuuacaagaaucugaucuggcucguuaaaaagggcaacagcuauccuaaacuguccaagagcuacauuaaugacaaggggaaagaagugcuuguccuguggggaauccaccaccccuccaccucugccgaucaacagagccucuaucagaacgcugacgccuacguguucgugggcacauccagauacagcaagaaauuuaagccugagauugcuauccggccgaaaguccgcgaucaggaggggagaaugaauuauuacuggacccugguugaacccggagacaagauuacguucgaggccacaggcaaccugguggugccucgguaugcguuugccauggaacgcaacgcugggucuggaaucauuaucuccgauacccccguccaugacuguaauacaaccugccaaaccccuaaaggcgccaucaacacaagccuccccuuccagaauauucacccgaucacgauuggcaaguguccuaaguacgugaaaucuaccaagcugagacuugcuacagggcugcggaacguucccagcauccagucccgcggacucuuuggcgccauugccggguucaucgagggaggcuggaccgggaugguggacggaugguauggcuaccaucaccagaaugaacaaggcucuggguaugcugcggaucugaaaagcacacagaacgccaucgacgagauuaccaauaaggucaacuccgugaucgagaaaaugaauacgcaguuuacagcuguuggaaaggaguucaaccaccuugagaagagaauugaaaaucugaacaaaaagaucgaugacggcuuccucgauauuuggaccuacaaugccgagcugcuggugcuccuggaaaacgagcggacccuugacuaccaugauagcaaugucaaaaaccuguaugagaaggugcgcucucagcucaaaaacaaugccaaggaaaucgggaacggaugcuuugaguucuaccacaagugugacaauacaugcauggaauccgucaaaaacggcaccuaugauuacccuaaguauagcgaggaagcuaaacugaauagagaggagaucgacggggugaaacuugaaucuacacggauuuaccaaauccuggccauuuauuccacgguugcgagcucccucgugcuggucgugucucugggcgcuaucagcuuuuggaugugcuccaacggaucucuccagugucgcauuugcaucuga

SEQ ID NO: 196253 - RNA, 1701 nt, Artificial Sequence
  derived and/or modified CDS sequence (opt5) from hemagglutinin__InfluenzaA__ADD22645
augaaggccauccuggugguccuccuguacaccuucgcuacagccaacgcggacacgcuuugcauuggcuaucacgcuaauaacagcaccgauacaguugacaccgugcuggagaagaaugugacagucacccauuccgugaaccuccuggaagauaagcacaaugggaaacuuuguaagcugagaggaguugcuccccuccaucugggcaaaugcaacaucgccggguggauucugggaaauccugagugugaaucucucagcacagccuccucuuggagcuacaucguggagaccuccucuagcggcaacgggacgugcuauccgggagacuuuauugauuacgaagaacugcgggagcagcuuuccagcgucucuuccuucgaacgcuuugagaucuuccccaagaccagcucuuggccuaaucacgacuccaacaagggcgugacagccgcuuguccccaugccggcgcgaaaucuuuuuauaagaaucugaucuggcucguuaaaaaggggaacagcuacccuaaacuguccaagagcuauauuaaugauaagggaaaagaagugcuuguccuguggggcauccaccaccccuccaccucugccgaccaacagagccucuaccagaacgcugaugccuacguguucguggggacauccagauauagcaagaaauuuaagccugagauugcuauccggccgaaaguccgcgaccaggagggaagaaugaauuacuauuggacccugguugaacccggcgauaagauuacguucgaggccacagggaaccugguggugccucgguacgcguuugccauggaacgcaacgcuggaucuggcaucauuaucuccgacacccccguccaugauugcaauacaaccugucaaaccccuaaaggcgccaucaacacaagccuccccuuccagaauauucacccgaucacgauugggaagugcccuaaguaugugaaaucuaccaagcugagacuugcuacaggacugcggaacguucccagcauccagucccgcggccucuuuggggccauugccggauucaucgagggcggguggaccggaaugguggacggcugguacggcuaucaucaccagaaugaacaagggucuggauacgcugcggaccugaaaagcacacagaacgccaucgaugagauuaccaauaaggucaacuccgugaucgagaaaaugaauacgcaguuuacagcuguuggcaaggaguucaaccaccuugagaagagaauugaaaaucugaacaaaaagguggacgauggguuccucgacaucuggaccuacaaugccgagcugcugguccuccuggaaaacgagcggacccuugauuaucaugacagcaaugugaaaaaccuguacgagaagguccgcucucagcucaaaaacaaugccaaggaaauuggaaacggcuguuuugaguucuaucacaagugcgauaauacauguauggaauccgugaaaaacgggaccuacgacuauccuaaguacagcgaggaagcuaaacugaauagagaggagaucgaaggcguuaaacuugagucuacacggaucuaucaaauucuggccaucuacuccacgguggcgagcucccucguccuggugguuucucugggagcuauuagcuuuuggaugugcuccaacggcucucuccagugccgcaucuguauuuga

SEQ ID NO: 196254 - RNA, 1701 nt, Artificial Sequence
  derived and/or modified CDS sequence (opt5) from hemagglutinin__InfluenzaA__ADD22665
augaaggccauccuggugguccuccuguacaccuucgcuacagccaacgcggacacgcuuugcauuggcuaucacgcuaauaacagcaccgauacaguugacaccgugcuggagaaaaaugugacagucacccauuccgugaaccuccuggaagauaagcacaaugggaaacuuuguaagcugagaggaguugcuccccuccaucugggcaaaugcaacaucgccggguggauucugggaaauccugagugugaaucucucagcacagccuccucuuggagcuacaucguggagaccuccucuagcggcaacgggacgugcuauccgggagacuuuauugauuacgaagaacugcgggagcagcuuuccagcgucucuuccuucgaacgcuuugagaucuuccccaagaccagcucuuggccuaaucacgacuccaacaagggcgugacagccgcuuguccccaugccggcgcgaaaucuuuuuauaagaaucugaucuggcucguuaaaaaggggaacagcuacccuaaacuguccaagagcuauauuaaugauaagagaaaagaagugcuuguccuguggggaauccaccaccccuccaccucugccgaccaacagagccucuaccagaacgcugaugccuacguguucgugggcacauccaaguauagcaaaaaguuuaaaccugagauugcuauccggccgaagguccgcgaccaggaggggagaaugaauuacuauuggacccugguugaacccggagauaaaauuacguucgaggccacaggcaaccugguggugccucgguacgcguuugccauggaacgcaacgcugggucuggaaucauuaucuccgacacccccguccaugauugcaauacaaccugucaaaccccuaagggcgccaucaacacaagccuccccuuccagaauauucacccgaucacgauuggcaagugcccuaaauaugugaagucuaccaaacugagacuugcuacagggcugcggaacguucccagcauccagucccgcggacucuuuggcgccauugccggguucaucgagggaggcuggaccgggaugguggacggaugguacggcuaucaucaccagaaugaacaaggcucuggguacgcugcggaccuuaagagcacacagaacgccaucgaugagauuaccaauaaagucaacuccgugaucgagaagaugaauacgcaguuuacagcuguuggaaaggaguucaaccaccuggagaaaagaauugaaaaucugaacaagaaaguggacgauggcuuccucgacaucuggaccuacaaugccgagcugcugguccuccuggaaaacgagcggacccuugauuaucaugacagcaaugugaagaaccuguacgagaaaguccgcucucagcucaagaacaaugccaaggaaauugggaacggauguuuugaguucuaucacaaaugcgauaauacauguauggaauccgugaagaacggcaccuacgacuauccuaaauacagcgaggaagcuaagcugaauagagaggagaucgaugggguuaaacuugaaucuacacggaucuaucaaauucuggccaucuacuccacgguggcgagcucccucguccuggugguuucucugggcgcuauuagcuuuuggaugugcuccaacggaucucuccagugccgcaucuguauuuga

SEQ ID NO: 196255 - RNA, 1701 nt, Artificial Sequence; identical to SEQ ID NO: 195843
  derived and/or modified CDS sequence (opt5) from hemagglutinin__InfluenzaA__ADD22675

SEQ ID NO: 196256 - RNA, 1701 nt, Artificial Sequence; identical to SEQ ID NO: 195843
  derived and/or modified CDS sequence (opt5) from hemagglutinin__InfluenzaA__ADD22685

SEQ ID NO: 196257 - RNA, 1701 nt, Artificial Sequence; identical to SEQ ID NO: 195843
  derived and/or modified CDS sequence (opt5) from hemagglutinin__InfluenzaA__ADD22695

SEQ ID NO: 196258 - RNA, 1701 nt, Artificial Sequence
  derived and/or modified CDS sequence (opt5) from hemagglutinin__InfluenzaA__ADD22722
augaaggccauccuggugguccuccuguacaccuucgcuacagccaacgcggacacgcuuugcauuggcuaucacgcuaauaacagcaccgauacaguugacaccgugcuggagaaaaaugugacagucacccauuccgugaaccuccuggaagauagacacaaugggaaacuuuguaagcugcggggaguugcgccccuccaucugggcaagugcaacaucgccggguggauucugggaaauccugagugugaaucucucagcacagcuuccucuuggagcuacaucguggagaccuccucuagcggcaacgggacgugcuauccgggagacuuuauugauuacgaagaacugcgcgagcagcuuuccagcgucucuuccuucgaaagauuugagaucuuccccaaaaccagcucuuggccuaaucacgacuccaacaagggcgugacagccgcuuguccccaugccggcgccaagagcuuuuauaaaaaucugaucuggcucguuaagaaagggaacucuuacccuaagcuguccaaaagcuauauuaaugauaagggaaaggaagugcuuguccuguggggcauccaccaccccuccaccucugccgaccaacagagccucuaccagaacgcugaugccuacguguucguggggacauccagcuauucuaaaaaguuuaaaccugagauugcuauccggccgaagguccgcgaccaggagggaagaaugaauuacuauuggacccugguugaacccggcgauaaaauuacguucgaggccacagggaaccugguggugccucgguacgcguuugccauggaacgcaacgcuggauccggcaucauuaucagcgacacccccguccaugauugcaauacaaccugucaaaccccuaagggcgccaucaacacaucucuccccuuccagaauauucacccgaucacgauugggaaaugcccuaaguauguuaagagcaccaaacugagacuugcuacaggacugcggaacgugcccuccauccagucucgcggccucuuuggggccauugccggauucaucgagggcggguggaccggaaugguggacggcugguacggcuaucaucaccagaaugaacaagggagcggauacgcugcggaccugaaguccacacagaacgccaucgaugagauuaccaauaaagucaacagcgugaucgagaagaugaauacgcaguuuacagcuguuggcaaagaguucaaccaccuugagaagagaauugaaaaucugaacaagaaaguggacgauggguuccucgacaucuggaccuacaaugccgagcugcugguccuccuggaaaacgagcggacccuugauuaucaugacucuaaugugaagaaccuguacgagaaaguccgcucccagcucaagaacaaugccaaagaaauuggaaacggcuguuuugaguucuaucacaagugcgauaauacauguauggaaagcgugaagaacgggaccuacgacuauccuaaauacucugaggaagcuaagcugaauagagaggagaucgauggcguuaaacuugaauccacacggaucuaucaaauucuggccaucuacagcacgguggcguccucucucguccuggugguuagccugggagcuauuuccuuuuggaugugcucuaacggcagccuccagugccgcaucuguauuuga

SEQ ID NO: 196259 - RNA, 1701 nt, Artificial Sequence; identical to SEQ ID NO: 196241
  derived and/or modified CDS sequence (opt5) from hemagglutinin__InfluenzaA__ADD22732

SEQ ID NO: 196260 - RNA, 1701 nt, Artificial Sequence
  derived and/or modified CDS sequence (opt5) from hemagglutinin__InfluenzaA__ADD22742
augaaggccauccuggugguccuccuguacaccuucgcuacagccaacgcggacacgcuuugcauuggcuaucacgcuaauaacagcaccgauacaguugacaccgugcuggagaagaaugugacagucacccauuccgugaaccuccuggaagauaagcacaaugggaaacuuuguaagcugagaggaguugcuccccuccaucugggcaaaugcaacaucgccggguggauucugggaaauccugagugugaaucucucagcacagccuccucuuggagcuacaucguggagaccuccucuagcggcaacgggacgugcuauccgggagacuuuauugauuacgaagaacugcgggagcagcuuuccagcgucucuuccuucgaacgcuuugagaucuuccccaagaccagcucuuggccuaaucacgacuccaacaagggcgugacagccgcuuguccccaugccggcgcgaaaucuuuuuauaagaaucugaucuggcucguuaaaaaggggaacagcuacccuaaacuguccaagagcuauauuaaugauaagggaaaagaagugcuuguccuguggggcauccaccaccccuccaccucugccgaccaacagagccucuaccagaacgcugaugccuacguguucguggggacauccagcuauucuaagaaauuuaagccugagauugcuaucagaccgaaaguccgggaccaggagggacgcaugaauuacuauuggacccugguugaacccggcgauaagauuacguucgaggccacagggaaccugguggugccuagauacgcguuugccauggaacggaacgcuggauccggcaucauuaucagcgacacccccguccaugauugcaauacaaccugucaaaccccuaaaggcgccaucaacacaucucuccccuuccagaauauucacccgaucacgauugggaagugcccuaaguaugugaaaagcaccaagcugcgccuugcuacaggacugagaaacguucccuccauccagucucggggccucuuuggggccauugccggauucaucgagggcggguggaccggaaugguggacggcugguacggcuaucaucaccagaaugaacaagggagcggauacgcugcggaccugaaauccacacagaacgccaucgaugagauuaccaauaaggucaacagcgugaucgagaaaaugaauacgcaguuuacagcuguuggcaaggaguucaaccaccuugagaagcgcauugaaaaucugaacaaaaagguggacgauggguuccucgacaucuggaccuacaaugccgagcugcugguccuccuggaaaacgagagaacccuugauuaucaugacucuaaugugaaaaaccuguacgagaagguccggucccagcucaaaaacaaugccaaggaaauuggaaacggcuguuuugaguucuaucacaagugcgauaauacauguauggaaagcgugaaaaacgggaccuacgacuauccuaaguacucugaggaagcuaaacugaaucgcgaggagaucgauggcguuaaacuugaauccacaagaaucuaucaaauucuggccaucuacagcacgguggcguccucucucguccuggugguuagccugggagcuauuuccuuuuggaugugcucuaacggcagccuccagugccggaucuguauuuga

SEQ ID NO: 196261 - RNA, 1701 nt, Artificial Sequence; identical to SEQ ID NO: 194741
  derived and/or modified CDS sequence (opt5) from hemagglutinin__InfluenzaA__ADD22752

SEQ ID NO: 196262 - RNA, 1701 nt, Artificial Sequence; identical to SEQ ID NO: 194832
  derived and/or modified CDS sequence (opt5) from hemagglutinin__InfluenzaA__ADD22762

SEQ ID NO: 196263 - RNA, 1701 nt, Artificial Sequence; identical to SEQ ID NO: 195843
  derived and/or modified CDS sequence (opt5) from hemagglutinin__InfluenzaA__ADD22772

SEQ ID NO: 196264 - RNA, 1701 nt, Artificial Sequence; identical to SEQ ID NO: 195843
  derived and/or modified CDS sequence (opt5) from hemagglutinin__InfluenzaA__ADD22782

SEQ ID NO: 196265 - RNA, 1701 nt, Artificial Sequence
  derived and/or modified CDS sequence (opt5) from hemagglutinin__InfluenzaA__ADD22792
augaaggccauccuggugguccuccuguacaccuucgcuacagccaacgcggacacgcuuugcauuggcuaucacgcuaauaacagcaccgauacaguugacaccgugcuggagaagaaugugacagucacccauuccgugaaccuccuggaagauaagcacaaugggaaacuuuguaagcugagaggaguugcuccccuccaucugggcaaaugcaacaucgccggguggauucugggaaauccugagugugaaucucucagcacagccuccucuuggagcuacaucguggagaccuccucuagcggcaacgggacgugcuauccgggagacuuuauuaauuacgaagaacugcgggagcagcuuuccagcgucucuuccuucgaacgcuuugagaucuuccccaagaccagcucuuggccuaaccacgauuccaauaagggcgugacagccgcuuguccccaugccggcgcgaaaucuuuuuauaagaaccugaucuggcucguuaaaaaggggaauagcuacccuaaacuguccaagagcuauauuaacgacaagggaaaagaagugcuuguccuguggggcauccaccaccccuccaccucugccgaucaacagagccucuaccagaaugcugacgccuacguguucguggggacauccagauauagcaagaaauuuaagccugagauugcuauccggccgaaaguccgcgaucaggagggaagaaugaacuacuauuggacccugguugaacccggcgacaagauuacguucgaggccacagggaaccugguggugccucgguacgcguuugccauggaacgcaaugcuggaucuggcaucauuaucuccgauacccccguccaugacugcaacacaaccugucaaaccccuaaaggcgccaucaauacaagccuccccuuccagaacauucacccgaucacgauugggaagugcccuaaguaugugaaaucuaccaagcugagacuugcuacaggacugcggaauguucccagcauccagucccgcggccucuuuggggccauugccggauucaucgagggcggguggaccggaaugguggauggcugguacggcuaucaucaccagaacgaacaagggucuggauacgcugcggaccugaaaagcacacagaaugccaucgacgagauuaccaacaaggucaauuccgugaucgagaaaaugaacacgcaguuuacagcuguuggcaaggaguucaaucaccuugagaagagaauugaaaaccugaauaaaaagguggaugacggguuccucgauaucuggaccuacaacgccgagcugcugguccuccuggaaaaugagcggacccuugacuaucaugauagcaacgugaaaaaccuguacgagaagguccgcucucagcucaaaaauaacgccaaggaaauuggaaauggcuguuuugaguucuaucacaagugcgacaacacauguauggaauccgugaaaaaugggaccuacgauuauccuaaguacagcgaggaagcuaaacugaacagagaggagaucgacggcguuaaacuugaaucuacacggaucuaucaaauucuggccaucuacuccacgguggcgagcucccucguccuggugguuucucugggagcuauuagcuuuuggaugugcuccaauggcucucuccagugccgcaucuguauuuga

SEQ ID NO: 196266 - RNA, 1701 nt, Artificial Sequence; identical to SEQ ID NO: 196241
  derived and/or modified CDS sequence (opt5) from hemagglutinin__InfluenzaA__ADD22802

SEQ ID NO: 196267 - RNA, 1701 nt, Artificial Sequence; identical to SEQ ID NO: 195843
  derived and/or modified CDS sequence (opt5) from hemagglutinin__InfluenzaA__ADD22812

SEQ ID NO: 196268 - RNA, 1701 nt, Artificial Sequence
  derived and/or modified CDS sequence (opt5) from hemagglutinin__InfluenzaA__ADD22822
augaaggccauccuggugguccuccuguacaccuucgcuacagccaacgcggacacgcuuugcauuggcuaucacgcuaauaacagcaccgauacaguugacaccgugcuggagaaaaaugugacagucacccauuccgugaaccuccuggaagauaagcacaaugggaaacuuuguaagcugagaggaguugcuccccuccaucugggcaaaugcaacaucgccggguggauucugggaaauccugagugugaaucucucagcacagccuccucuuggagcuacaucguggagaccuccucugccgacaacggcacgugcuauccgggggauuuuauugacuacgaagaacugcgggagcagcuuagcuccgucagcucuuucgaacgcuuugagaucuuccccaagaccuccagcuggccuaaucacgauucuaacaagggagugacagcugccuguccccaugcgggcgccaaauccuuuuauaagaaucugaucuggcucguuaaaaagggcaacagcuacccuaaacugucuaaguccuauauuaaugacaaggggaaagaagugcuuguccuguggggaauccaccaccccagcaccuccgcugaucaacagucucucuaccagaacgccgacgcuuacguguucgugggcacaagcaaguauuccaaaaaguuuaaaccugagauugccaucagaccgaagguccgggaucaggaggggcgcaugaauuacuauuggacccugguugaacccggagacaaaauuacguucgaggcgacaggcaaccugguggugccuagauacgccuuugcuauggaacggaacgccgggagcggaaucauuaucucugauacccccguccaugacugcaauacaaccugucaaaccccuaagggcgcuaucaacacaucccuccccuuccagaauauucacccgaucacgauuggcaagugcccuaaauauguuaagagcaccaaacugcgccuugccacagggcugagaaacgugcccucuauccagagccggggacucuuuggcgccauugcuggguucaucgagggaggcuggaccgggaugguggacggaugguacggcuaucaucaccagaaugaacaaggcuccggguacgcggccgaucugaagucuacacagaacgcuaucgacgagauuaccaauaaagucaacagcgugaucgagaagaugaauacgcaguuuacagccguuggaaaggaguucaaccaccuugagaaacgcauugaaaaucugaacaagaaaaucgaugacggcuuccucgauauuuggaccuacaaugccgagcugcuggugcuccuggaaaacgagagaacccuugacuaucaugauuccaaugucaagaaccuguacgagaaagugcggagccagcucaagaacaaugcuaaggaaaucgggaacggauguuuugaguucuaucacaaaugcgacaauauguguauggaaucugucaagaacggcacauacgauuauccuaaauacuccgaggaagccaagcugaaucgcgaggagaucgacggggugaaacuugaaagcaccagaauuuaucaaauccuggcgauuuacucuacaguugcuuccagccucgugcuggucgugucccugggcgccaucucuuuuuggaugugcagcaacggaucccuccagugccggauuuguaucuga

SEQ ID NO: 196269 - RNA, 1701 nt, Artificial Sequence; identical to SEQ ID NO: 195843
  derived and/or modified CDS sequence (opt5) from hemagglutinin__InfluenzaA__ADD22832

SEQ ID NO: 196270 - RNA, 1701 nt, Artificial Sequence; identical to SEQ ID NO: 195843
  derived and/or modified CDS sequence (opt5) from hemagglutinin__InfluenzaA__ADD22842

SEQ ID NO: 196271 - RNA, 1701 nt, Artificial Sequence
  derived and/or modified CDS sequence (opt5) from hemagglutinin__InfluenzaA__ADD22852
augaaggccauccuggugguccuccuguacaccuucgcuacagccaacgcggacacgcuuugcauuggcuaucacgcuaauaacagcaccgauacaguugacaccgugcuggagaagaaugugacagucacccauuccgugaaccuccuggaagauaagcacaaugggaaacuuuguaagcugagaggaguugcuccccuccaucugggcaaaugcaacaucgccggguggauucugggaaauccugagugugaaucucucagcacagccuccucuuggagcuacaucguggagaccuccucuagcgacaacggcacgugcuauccgggggauuuuauugacuacgaagaacugcgggagcagcuuuccagcgucucuuccuucgaacgcuuugagaucuuccccaagaccagcucuuggccuaaucacgauuccaacaagggagugacagccgcuuguccccaugccggcgcgaaaucuuuuuauaagaaucugaucuggcucguuaaaaagggcaacagcuacccuaaacuguccaagagcuauauuaaugacaaggggaaagaagugcuuguccuguggggaauccaccaccccuccaccucugccgaucaacagagccucuaccagaacgcugacgccuacguguucgugggcacauccagauauagcaagaaauuuaagccugagauugcuauccggccgaaaguccgcgaucaggaggggagaaugaauuacuauuggacccugguugaacccggagacaagauuacguucgaggccacaggcaaccugguggugccucgguacgcguuugccauggaacgcaacgcugggucuggaaucgucauuuccgauacccccgugcaugacugcaauacaaccugucaaaccccuaaaggcgccaucaacacaagccuccccuuccagaauauccacccgauuacgaucggcaagugcccuaaguauguuaaaucuaccaagcugagacuugcuacagggcugcggaacgugcccagcauucagucccgcggacucuuuggcgccaucgccggguucauugagggaggcuggaccgggauggucgacggaugguacggcuaucaucaccagaaugaacaaggcucuggguacgcugcggaucugaaaagcacacagaacgccaucgacgagaucaccaauaaggugaacuccguuauugagaaaaugaauacgcaguuuacagcugugggaaaggaguucaaccaccuugagaagagaaucgaaaaucugaacaaaaaggucgaugacggcuuccucgauauuuggaccuacaaugccgagcugcuggugcuccuggaaaacgagcggacccuugacuaucaugauagcaaugucaaaaaccuguacgagaaggugcgcucucagcucaaaaacaaugccaaggaaaucgggaacggauguuuugaguucuaucacaagugcgacaauacauguauggaauccguuaaaaacggcaccuacgauuauccuaaguacagcgaggaagcuaaacugaauagagaggagauugacggggugaaacuugaaucuacacggaucuaucaaauccuggccauuuacuccacggucgcgagcucccucgugcugguugugucucugggcgcuaucagcuuuuggaugugcuccaacggaucucuccagugccgcauuuguaucuga

SEQ ID NO: 196272 - RNA, 1701 nt, Artificial Sequence
  derived and/or modified CDS sequence (opt5) from hemagglutinin__InfluenzaA__ADD22941
augaaggccauccuggugguccuccuguacaccuucgcuacagccaacgcggacacgcuuugcauuggcuaucacgcuaauaacagcaccgauacaguugacaccgugcuggagaagaaugugacagucacccauuccgugaaccuccuggaagauaagcacaaugggaaacuuuguaagcugagaggaguugcuccccuccaucugggcaaaugcaacaucgccggguggauucugggaaauccugagugugaaucucucagcacagccaucuccuggucuuacauuguggagaccagcuccucuggcaacgggacgugcuauccgggagacuuuaucgauuacgaagaacugcgggagcagcuuagcuccgucagcucuuucgaacgcuuugagaucuuccccaagaccuccagcuggccuaaucacgacucuaacaagggcgugacagccgcuuguccccaugccggcgcgaaauccuuuuauaagaaucugauuuggcucguuaaaaaggggaacagcuacccuaaacugucuaaguccuauaucaaugauaagggaaaagaagugcuuguccuguggggcauucaccaccccagcaccuccgccgaccaacagucucucuaccagaacgcugaugccuacguguucguggggacaagcagauauuccaagaaauuuaagccugagaucgcuauucggccgaaaguccgcgaccaggagggaagaaugaauuacuauuggacccugguugaacccggcgauaagaucacguucgaggccacagggaaccugguggugccucgguacgcguuugccauggaacgcaacgcuggaagcggcauuaucaucucugacacccccguccaugauugcaauacaaccugucaaaccccuaaaggcgccauuaacacaucccuccccuuccagaauauccacccgauuacgaucgggaagugcccuaaguaugugaaaagcaccaagcugagacuugcuacaggacugcggaacguucccucuauucagagccgcggccucuuuggggccaucgccggauucaucgagggcggguggaccggaaugguggacggcugguacggcuaucaucaccagaaugaacaaggguccggauacgcugcggaccugaaaucuacacagaacgccauugaugagaucaccaauaaggucaacagcgugauugagaaaaugaauacgcaguuuacagcuguuggcaaggaguucaaccaccuugagaagagaaucgaaaaucugaacaaaaagguggacgauggguuccucgacauuuggaccuacaaugccgagcugcugguccuccuggaaaacgagcggacccuugauuaucaugacuccaaugugaaaaaccuguacgagaagguccgcagccagcucaaaaacaaugccaaggaaaucggaaacggcuguuuugaguucuaucacaagugcgauaauacauguauggaaucugugaaaaacgggaccuacgacuauccuaaguacuccgaggaagcuaaacugaauagagaggagaucgauggcguuaaacuugaaagcacacggauuuaucaaauccuggccauuuacucuacgguggcguccagccucguccuggugguuucccugggagcuaucucuuuuuggaugugcagcaacggcucccuccagugccgcauuuguaucuga

SEQ ID NO: 196273 - RNA, 1701 nt, Artificial Sequence; identical to SEQ ID NO: 195843
  derived and/or modified CDS sequence (opt5) from hemagglutinin__InfluenzaA__ADD22951

SEQ ID NO: 196274 - RNA, 1701 nt, Artificial Sequence; identical to SEQ ID NO: 195843
  derived and/or modified CDS sequence (opt5) from hemagglutinin__InfluenzaA__ADD22961

SEQ ID NO: 196275 - RNA, 1701 nt, Artificial Sequence; identical to SEQ ID NO: 195843
  derived and/or modified CDS sequence (opt5) from hemagglutinin__InfluenzaA__ADD22971

SEQ ID NO: 196276 - RNA, 1701 nt, Artificial Sequence; identical to SEQ ID NO: 195843
  derived and/or modified CDS sequence (opt5) from hemagglutinin__InfluenzaA__ADD23072

SEQ ID NO: 196277 - RNA, 1701 nt, Artificial Sequence
  derived and/or modified CDS sequence (opt5) from hemagglutinin__InfluenzaA__ADD23082
augaaggccauccuggugguccuccuguacaccuucgcuacagccaacgcggacacgcuuugcauuggcuaucacgcuaauaacagcaccgauacaguugacaccgugcuggagaagaaugugacagucacccauuccgugaaccuccuggaagauaagcacaaugggaaacuuuguaagcugagaggaguugcuccccuccaucugggcaaaugcaacaucgccggguggauucugggaaauccugagugugaaucucucagcacagccuccucuuggagcuacaucguggagaccuccucuagcggcaacgggacgugcuauccgggagacuuuauugauuacgaagaacugcgggagcagcuuuccagcgucucuuccuucgaacgcuuugagaucuuccccaagaccagcucuuggccuaaucacgacuccaacaagggcgugacagccgcuuguccccaugccggcgcgaaaucuuuuuauaagaaucugaucuggcucguuaaaaaggggaacagcuacccuaaacuguccaagagcuauauuaaugauaagggaaaagaagugcuuguccuguggggcauccaccaccccuccaccucugccgaccaacagagccucuaccagaacgcugauacauacguguucguggggaccuccagauauagcaagaaauuuaagccugagauugccauccggccgaaaguccgcgaccaggagggaagaaugaauuacuauuggacgcugguugaacccggcgauaagauuacauucgaggcuaccgggaaccugguggugccucgguacgccuuugcgauggaacgcaacgccggaucuggcaucauuaucuccgacacacccguccaugauugcaauaccaccugucaaacaccuaaaggcgcuaucaacacgagccuccccuuccagaauauucacccgaucaccauugggaagugcccuaaguaugugaaaucuacaaagcugagacuugccaccggacugcggaacguucccagcauccagucccgcggccucuuuggggcuauugccggauucaucgagggcggguggacaggaaugguggacggcugguacggcuaucaucaccagaaugaacaagggucuggauacgccgcugaccugaaaagcacccagaacgcgaucgaugagauuacgaauaaggucaacuccgugaucgagaaaaugaauacacaguuuaccgccguuggcaaggaguucaaccaccuugagaagagaauugaaaaucugaacaaaaagguggacgauggguuccucgacaucuggaccuacaaugcugagcugcugguccuccuggaaaacgagcggacacuugauuaucaugacagcaaugugaaaaaccuguacgagaagguccgcucucagcucaaaaacaaugccaaggaaauuggaaacggcuguuuugaguucuaucacaagugcgauaauaccuguauggaauccgugaaaaacgggacauacgacuauccuaaguacagcgaggaagccaaacugaauagagaggagaucgauggcguuaaacuugaaucuacgcggaucuaucaaauucuggcuaucuacuccaccguggccagcucccucguccuggugguuucucugggagcgauuagcuuuuggaugugcuccaacggcucucuccagugccgcaucuguauuuga

SEQ ID NO: 196278 - RNA, 1701 nt, Artificial Sequence
  derived and/or modified CDS sequence (opt5) from hemagglutinin__InfluenzaA__ADD23102
augaaggccauccuggugguccuccuguacaccuucgcuacagccaacgcggacacgcuuugcauuggcuaucacgcuaauaacagcaccgauacaguugacaccgugcuggagaaaaaugugacagucacccauuccgugaaccuccuggaagauaagcacaaugggaaacuuuguaagcugagaggaguugcgccccuccaucugggcaaaugcaacaucgccggguggauucugggaaauccugagugugaaucucucagcacagcuuccucuuggagcuacaucguggagaccuccucuagcggcaacgggacgugcuauccgggagacuuuauugauuacgaagaacugcgggagcagcuuuccagcgucucuuccuucgaaaaguuugagaucuuccccaagaccagcucuuggccuaaucacgacuccaacaaaggcgugacagccgcuuguccccaugccggcgccaagagcuuuuauaaaaaucugaucuggcucguuaagaaagggaacucuuacccuaagcuguccaagagcuauauuaaugauaaaggaaaggaagugcuuguccuguggggcauccaccaccccuccaccucugccgaccaacagagccucuaccagaacgcugaugccuacguguucguggggacaucccgcuauagcaaaaaguuuaaaccugagauugcuaucagaccgaagguccgggaccaggagggacgcaugaauuacuauuggacccugguugaacccggcgauaaaauuacguucgaggccacagggaaccugguggugccuagauacgcguuugccauggaacggaacgcuggaucuggcaucauuaucuccgacacccccguccaugauugcaauacaaccugucaaaccccuaagggcgccaucaacacaagccuccccuuccagaauauucacccgaucacgauugggaagugcccuaaauaugugaagucuaccaaacugcgccuugcuacaggacugagaaacguucccagcauccagucccggggccucuuuggggccauugccggauucaucgagggcggguggaccggaaugguggacggcugguacggcuaucaucaccagaaugaacaagggucuggauacgcugcggaccuuaagagcacacagaacgccaucgaugagauuaccaauaaagucaacuccgugaucgagaagaugaauacgcaguuuacagcuguuggcaaggaguucaaccaccuggagaaacgcauugaaaaucugaacaagaaaguggacgauggguuccucgacaucuggaccuacaaugccgagcugcugguccuccuggaaaacgagagaacccuugauuaucaugacagcaaugugaagaaccuguacgagaaaguccggucucagcucaagaacaaugccaaggaaauuggaaacggcuguuuugaguucuaucacaaaugcgauaauacauguauggaauccgugaagaacgggaccuacgacuauccuaaauacagcgaggaagcuaagcugaaucgcgaggagaucgauggcguuaaacuugaaucuacaagaaucuaucaaauucuggccaucuacuccacgguggcgagcucccucguccuggugguuucucugggagcuauuagcuuuuggaugugcuccaacggcucucuccagugccggaucuguauuuga

SEQ ID NO: 196279 - RNA, 1701 nt, Artificial Sequence; identical to SEQ ID NO: 195843
  derived and/or modified CDS sequence (opt5) from hemagglutinin__InfluenzaA__ADD23112

SEQ ID NO: 196280 - RNA, 1701 nt, Artificial Sequence; identical to SEQ ID NO: 195843
  derived and/or modified CDS sequence (opt5) from hemagglutinin__InfluenzaA__ADD23122

SEQ ID NO: 196281 - RNA, 1701 nt, Artificial Sequence; identical to SEQ ID NO: 194741
  derived and/or modified CDS sequence (opt5) from hemagglutinin__InfluenzaA__ADD23132

SEQ ID NO: 196282 - RNA, 1701 nt, Artificial Sequence; identical to SEQ ID NO: 195905
  derived and/or modified CDS sequence (opt5) from hemagglutinin__InfluenzaA__ADD23142

SEQ ID NO: 196283 - RNA, 1701 nt, Artificial Sequence
  derived and/or modified CDS sequence (opt5) from hemagglutinin__InfluenzaA__ADD23162
augaaggccauccuggugguccuccuguacaccuucgcuacagccaacgcggacacgcuuugcauuggcuaucacgcuaauaacagcaccgauacaguugacaccgugcuggagaaaaaugugacagucacccauuccgugaaccuccuggaagauaagcacaaugggaaacuuuguaagcugagaggaguugcuccccuccaucugggcaaaugcaacaucgccggguggauucugggaaauccugagugugaaucucucagcacagccuccucuuggagcuacaucguggagaccuccucuagcgacaacggcacgugcuauccgggggauuuuauugacuacgaagaacugcgggagcagcuuuccagcgucucuuccuucgaacgcuuugagaucuuccccaagaccagcucuuggccuaaucacgauuccaacaagggagugacagccgcuuguccccaugccggcgcgaaaucuuuuuauaagaaucugaucuggcucguuaaaaagggcaacagcuacccuaaacuguccaagagcuauauuaaugacaaggggaaagaagugcuuguccuguggggaauccaccaccccuccaccucugccgaucaacagggccucuaccagaacgcugacgccuacguguucguggggacaagcagauauuccaagaaauuuaagccugagauugcuauccggccgaaaguccgcgaucaggagggaagaaugaauuacuauuggacccugguugaacccggcgacaagauuacguucgaggccacagggaaccugguggugccucgguacgcguuugccauggaacgcaacgcuggaagcggcaucauuaucucugauacccccguccaugacugcaauacaaccugucaaaccccuaaaggcgccaucaacacaucccuccccuuccagaauauucacccgaucacgauugggaagugcccuaaguaugugaaaagcaccaagcugagacuugcuacaggacugcggaacguucccucuauccagagccgcggccucuuuggggccauugccggauucaucgagggcggguggaccggaaugguggacggcugguacggcuaucaucaccagaaugaacaaggguccggauacgcugcggaucugaaaucuacacagaacgccaucgacaagauuaccaauaaagucaacagcgugaucgagaagaugaauacgcaguuuacagcuguuggcaaggaguucaaccaccuugagaaaagaauugagaaucugaacaagaaaguggaugacggguuccucgauaucuggaccuacaaugccgaacugcugguccuccuggagaacgaacggacccuugacuaucaugauuccaaugugaagaaccuguacgagaaaguccgcagccagcucaagaacaaugccaaggagauuggaaacggcuguuuugaguucuaucacaaaugcgacaauacauguauggaaucugugaagaacgggaccuacgauuauccuaaauacuccgaagaggcuaagcugaauagagaagagaucgacggcguuaaacuugagagcacacggaucuaucaaauucuggccaucuacucuacgguggcguccagccucguccuggugguuucccugggagcuauuucuuuuuggaugugcagcaacggcucccuccagugccgcaucuguauuuga

SEQ ID NO: 196284 - RNA, 1701 nt, Artificial Sequence; identical to SEQ ID NO: 195905
  derived and/or modified CDS sequence (opt5) from hemagglutinin__InfluenzaA__ADD23172

SEQ ID NO: 196285 - RNA, 1701 nt, Artificial Sequence; identical to SEQ ID NO: 195905
  derived and/or modified CDS sequence (opt5) from hemagglutinin__InfluenzaA__ADD23182

SEQ ID NO: 196286 - RNA, 1701 nt, Artificial Sequence; identical to SEQ ID NO: 195905
  derived and/or modified CDS sequence (opt5) from hemagglutinin__InfluenzaA__ADD23192

SEQ ID NO: 196287 - RNA, 1701 nt, Artificial Sequence; identical to SEQ ID NO: 195905
  derived and/or modified CDS sequence (opt5) from hemagglutinin__InfluenzaA__ADD23202

SEQ ID NO: 196288 - RNA, 1701 nt, Artificial Sequence; identical to SEQ ID NO: 195905
  derived and/or modified CDS sequence (opt5) from hemagglutinin__InfluenzaA__ADD23220

SEQ ID NO: 196289 - RNA, 1701 nt, Artificial Sequence; identical to SEQ ID NO: 195901
  derived and/or modified CDS sequence (opt5) from hemagglutinin__InfluenzaA__ADD23230

SEQ ID NO: 196290 - RNA, 1701 nt, Artificial Sequence; identical to SEQ ID NO: 195905
  derived and/or modified CDS sequence (opt5) from hemagglutinin__InfluenzaA__ADD23240

SEQ ID NO: 196291 - RNA, 1701 nt, Artificial Sequence
  derived and/or modified CDS sequence (opt5) from hemagglutinin__InfluenzaA__ADD23260
augaaggccauccuggugguccuccuguacaccuucgcuacagccaacgcggacacgcuuugcauuggcuaucacgcuaauaacagcaccgauacaguugacaccgugcuggagaaaaaugugacagucacccauuccgugaaccuccuggaagauaagcacaaugggaaacuuuguaagcugagaggaguugcuccccuccaucugggcaaaugcaacaucgccggguggauucugggaaauccugagugugaaucucucagcacagccuccucuuggagcuacaucguggagaccuccucuagcgacaacggcacgugcuauccgggggauuuuauugacuacgaagaacugcgggagcagcuuuccagcgucucuuccuucgaacgcuuugagaucuuccccaagaccagcucuuggccuaaucacgauuccaacaagggagugacagccgcuuguccccaugccggcgcgaaaucuuuuuauaagaaucugaucuggcucguuaaaaagggcaacagcuacccuaaacuguccaagagcuauauuaaugacaaggggaaagaagugcuuguccuguggggaauccaccaccccuccaccucugccgaucaacagagccucuaccagaacgcugacgccuacguguucgugggcacauccagauauagcaagaaauuuaagccugagauugcuauccggccgaaaguccgcgaucaggaggggagaaugaauuacuauuggacccugguugaacccggagacaagauuacguucgaggccacaggcaaccugguggugccucgguacgcguuugccauggaacgcaacgcugggucuggaaucauuaucuccgauacccccguccaugacugcaauacaaccugucaaaccccugagggcgccaucaacacaagccuccccuuccagaauauucacccgaucacgauuggcaaaugcccuaaguaugugaagucuaccaaacugagacuugcuacagggcugcggaacguucccagcauccagucccgcggacucuuuggcgccauugccggguucaucgaaggaggcuggaccgggaugguggacggaugguacggcuaucaucaccagaaugagcaaggcucuggguacgcugcggaucuuaagagcacacagaacgccaucgacaaaauuaccaauaaggucaacuccgugaucgagaaaaugaauacgcaguuuacagcuguuggaaaggaguucaaccaccuugagaagagaauugaaaaucugaacaaaaagguggaugacggcuuccucgauaucuggaccuacaaugccgagcugcugguccuccuggaaaacgagcggacccuugacuaucaugauagcaaugugaaaaaccuguacgagaagguccgcucucagcucaaaaacaaugccaaggaaauugggaacggauguuuugaguucuaucacaagugcgacaauacauguauggaauccgugaaaaacggcaccuacgauuauccuaaguacagcgaggaagcuaaacugaauagagaggagaucgacgggguuaagcuggaaucuacacggaucuaucaaauucuggccaucuacuccacgguggcgagcucccucguccuggugguuucucugggcgcuauuagcuuuuggaugugcuccaacggaucucuccagugccgcaucuguauuuga

SEQ ID NO: 196292 - RNA, 1701 nt, Artificial Sequence; identical to SEQ ID NO: 195094
  derived and/or modified CDS sequence (opt5) from hemagglutinin__InfluenzaA__ADD23280

SEQ ID NO: 196293 - RNA, 1701 nt, Artificial Sequence
  derived and/or modified CDS sequence (opt5) from hemagglutinin__InfluenzaA__ADD23290
augaaggccauccuggugguccuccuguacaccuucgcuacagccaacgcggacacgcuuugcauuggcuaucacgcuaauaacagcaccgauacaguugacaccgugcuggagaaaaaugugacagucacccauuccgugaaccuccuggaagauaagcacaaugggaaacuuuguaagcugagaggaguugcuccccuccaucugggcaaaugcaacaucgccggguggauucugggaaauccugagugugaaucucucagcacagccuccucuuggagcuacaucguggagaccuccucuagcgacaacggcacgugcuauccgggggauuuuauuaauuacgaagaacugcgggagcagcuuuccagcgucucuuccuucgaacgcuuugagaucuuccccaagaccagcucuuggccuaaccacgacuccaauaagggagugacagccgcuuguccccaugccggcgcgaaaucuuuuuauaagaaccugaucuggcucguuaaaaagggcaauagcuacccuaaacuguccaagagcuauauuaacgauaaggggaaagaagugcuuguccuguggggaauccaccaccccuccaccucugccgaccaacagagccucuaccagaaugcugaugccuacguguucgugggcacauccagauauagcaagaaauuuaagccugagauugcuauccggccgaaaguccgcgaccaggaggggagaaugaacuacuauuggacccugguugaacccggagauaagauuacguucgaggccacaggcaaccugguggugccucgguacgcguuugccauggaacgcaaugcugggucuggaaucauuaucuccgacacccccguccaugauugcaacacaaccugucaaaccccuaaaggcgccaucaauacaagccuccccuuccagaacauucacccgaucacgauuggcaagugcccuaaguaugugaaaucuaccaagcugagacuugcuacagggcugcggaauguucccagcauccagucccgcggacucuuuggcgccauugccggguucaucgagggaggcuggaccgggaugguggacggaugguacggcuaucaucaccagaacgaacaaggcucuggguacgcugcggaccugaaaagcacacagaaugccaucgauaagauuaccaacaaagucaauuccgugaucgagaagaugaacacgcaguuuacagcuguuggaaaggaguucaaucaccuugagaaaagaauugagaaccugaauaagaaaguggacgauggcuuccucgacaucuggaccuacaacgccgaacugcugguccuccuggagaaugaacggacccuugauuaucaugacagcaacgugaagaaccuguacgagaaaguccgcucucagcucaagaauaacgccaaggagauugggaauggauguuuugaguucuaucacaaaugcgauaacacauguauggaauccgugaagaauggcaccuacgacuauccuaaauacagcgaagaggcuaagcugaacagagaagagaucgaugggguuaaacuugagucuacacggaucuaucaaauucuggccaucuacuccacgguggcgagcucccucguccuggugguuucucugggcgcuauuagcuuuuggaugugcuccaauggaucucuccagugccgcaucuguauuuga

SEQ ID NO: 196294 - RNA, 1701 nt, Artificial Sequence; identical to SEQ ID NO: 195905
  derived and/or modified CDS sequence (opt5) from hemagglutinin__InfluenzaA__ADD23300

SEQ ID NO: 196295 - RNA, 1701 nt, Artificial Sequence; identical to SEQ ID NO: 196293
  derived and/or modified CDS sequence (opt5) from hemagglutinin__InfluenzaA__ADD23310

SEQ ID NO: 196296 - RNA, 1701 nt, Artificial Sequence; identical to SEQ ID NO: 195905
  derived and/or modified CDS sequence (opt5) from hemagglutinin__InfluenzaA__ADD23320

SEQ ID NO: 196297 - RNA, 1701 nt, Artificial Sequence
  derived and/or modified CDS sequence (opt5) from hemagglutinin__InfluenzaA__ADD23330
augaaggccauccuggugguccuccuguacaccuucgcuacagccaacgcggacacgcuuugcauuggcuaucacgcuaauaacagcaccgauacaguugacaccgugcuggagaaaaaugugacagucacccauuccgugaaccuccuggaagauaagcacaaugggaaacuuuguaagcugagaggaguugcuccccuccaucugggcaaaugcaacaucgccggguggauucugggaaauccugagugugaaucucucagcacagccuccucuuggagcuacaucguggagaccuccucuagcgacaacggcacgugcuauccgggggauuuuauuaauuacgaagaacugcgggagcagcuuuccagcgucucuuccuucgaacgcuuugagaucuuccccaagaccagcucuuggccuaaccacgacuccaauaagggagugacagccgcuuguccccaugccggcgcgaaaucuuuuuauaagaaccugaucuggcucguuaaaaagggcaauagcuacccuaaacuguccaagagcuauauuaacgauaaggggaaagaagugcuuguccuguggggaauccaccaccccuccaccucugccgaccaacagagccucuaccagaaugcugaugccuacguguucgugggcacauccagauauagcaagaaauuuaagccugagauugcuauccggccgaaaguccgcgaccaggaggggagaaugaacuacuauuggacccugguugaacccggagauaagauuacguucgaggccacaggcaaccugguggugccucgguacgcguuugccauggaacgcaaugcugggucuggaaucauuaucuccgacacccccguccaugauugcaacacaaccugucaaaccccuaaaggcgccaucaauacaagccuccccuuccagaacauucacccgaucacgauuggcaagugcccuaaguaugugaaaucuaccaagcugagacuugcuacagggcugcggaauguucccagcauccagucccgcggacucuuuggcgccauugccggguucaucgagggaggcuggaccgggaugguggacggaugguacggcuaucaucaccagaacgaacaaggcucuggguacgcugcggaccugaaaagcacacagaaugccaucgauaagauuaccaacaaagucaauuccgugaucgagaagaugaacacgcaguuuacagcuguuggaaaggaguucaaucaccuugagaaaagaauugagaaccugaauaagaaaguggacgauggcuuccucgacaucuggaccuacaacgccgaacugcugguccuccuggagaaugaacggacccuugauuaucaugacagcaacgugaagaaccuguacgagaaaguccgcucucagcucaagacaaaugccaaggagauugggaacggauguuuugaguucuaucacaaaugcgauaauaccuguauggaauccgugaagaacggcacauacgacuauccuaaauacagcgaagaggcuaagcugaauagagaagagaucgaugggguuaaacuugagucuacgcggaucuaucaaauucuggccaucuacuccaccguggcgagcucccucguccuggugguuucucugggcgcuauuagcuuuuggaugugcuccaacggaucucuccagugccgcaucuguauuuga

SEQ ID NO: 196298 - RNA, 1701 nt, Artificial Sequence
  derived and/or modified CDS sequence (opt5) from hemagglutinin__InfluenzaA__ADD23355
augaaggccauccuggugguccuccuguacaccuucgcuacagccaacgcggacacgcuuugcauuggcuaucacgcuaauaacagcaccgauacaguugacaccgugcuggagaaaaaugugacagucacccauuccgugaaccuccuggaagauaagcacaaugggaaacuuuguaagcugagaggaguugcuccccuccaucugggcaaaugcaacaucgccggguggauucugggaaauccugagugugaaucucucagcacagccuccucuuggagcuacaucguggagaccuccucuagcgacaacggcacgugcuauccgggggauuuuauuaauuacgaagaacugcgggagcagcuuuccagcgucucuuccuucgaaauguuugagaucuuccccaagaccagcucuuggccuaaccacgacuccaauaagggagugacagccgcuuguccccaugccggcgcgaaaucuuuuuauaagaaccugaucuggcucguuaaaaagggcaauagcuacccuaaacuguccaagagcuauauuaacgauaaggggaaagaagugcuuguccuguggggaauccaccaccccuccaccucugccgaccaacagagccucuaccagaaugcugaugccuacguguucgugggcacaucccgcuauagcaagaaauuuaagccugagauugcuaucagaccgaaaguccgggaccaggaggggcgcaugaacuacuauuggacccugguugaacccggagauaagauuacguucgaggccacaggcaaccugguggugccuagauacgcguuugccauggaacggaaugcugggucuggaaucauuaucuccgacacccccguccaugauugcaacacaaccugucaaaccccuaaaggcgccaucaauacaagccuccccuuccagaacauucacccgaucacgauuggcaagugcccuaaguaugugaaaucuaccaagcugcgccuugcuacagggcugagaaauguucccagcauccagucccggggacucuuuggcgccauugccggguucaucgagggaggcuggaccgggaugguggacggaugguacggcuaucaucaccagaacgaacaaggcucuggguacgcugcggaccugaaaagcacacagaaugccaucgauaagauuaccaacaaagucaauuccgugaucgagaagaugaacacgcaguuuacagcuguuggaaaggaguucaaucaccuugaaaaacgcauugagaaccugaauaagaaaguggacgauggcuuccucgacaucuggaccuacaacgccgaacugcugguccuccuggagaaugaaagaacccuugauuaucaugacagcaacgugaagaaccuguacgagaaaguccggucucagcucaagaauaacgccaaggagauugggaauggauguuuugaguucuaucacaaaugcgauaacacauguauggaguccgugaagaauggcaccuacgacuauccuaaauacagcgaagaggcuaagcugaaccgcgaagagaucgaugggguuaaacuugagucuacaagaaucuaucaaauucuggccaucuacuccacgguggcgagcucccucguccuggugguuucucugggcgcuauuagcuuuuggaugugcuccaauggaucucuccagugccggaucuguauuuga

SEQ ID NO: 196299 - RNA, 1701 nt, Artificial Sequence; identical to SEQ ID NO: 196293
  derived and/or modified CDS sequence (opt5) from hemagglutinin__InfluenzaA__ADD23375

SEQ ID NO: 196300 - RNA, 1701 nt, Artificial Sequence; identical to SEQ ID NO: 195905
  derived and/or modified CDS sequence (opt5) from hemagglutinin__InfluenzaA__ADD23385

SEQ ID NO: 196301 - RNA, 1701 nt, Artificial Sequence
  derived and/or modified CDS sequence (opt5) from hemagglutinin__InfluenzaA__ADD23405
augaaggccauccuggugguccuccuguacaccuucgcuacagccaacgcggacacgcuuugcauuggcuaucacgcuaauaacagcaccgauacaguugacaccgugcuggagaaaaaugugacagucacccauuccgugaaccuccuggaagauaagcacaaugggaaacuuuguaagcugagaggaguugcuccccuccaucugggcaaaugcaacaucgccggguggauucugggaaauccugagugugaaucucucagcacagccuccucuuggagcuacaucguggagaccuccucuagcgacaacggcacgugcuauccgggggauuuuauuaauuacgaagaacugcgggagcagcuuuccagcgucucuuccuucgaacgcuuugagaucuuccccaagaccagcucuuggccuaaccacgacuccaauaagggagugacagccgcuuguccccaugccggcgcgaaauccuuuuauaagaaccugaucuggcucguuaaaaagggcaauucuuacccuaaacuguccaagagcuauauuaacgauaaggggaaagaagugcuuguccuguggggaauccaccaccccuccaccucugccgaccaacagagccucuaccagaaugcugaugccuacguguucgugggcacauccagauauagcaagaaauuuaagccugagauugcuauccggccgaaaguccgcgaccaggaggggagaaugaacuacuauuggacccugguugaacccggagauaagauuacguucgaggccacaggcaaccugguggugccucgguacgcguuugccauggaacgcaaugcugggucuggaaucauuaucuccgacacccccguccaugauugcaacacaaccugucaaaccccuaaaggcgccaucaauacaagccuccccuuccagaacauucacccgaucacggugggcaagugcccuaaguauguuaaaucuaccaagcugagacuugcuacagggcugcggaaugugcccagcauucagucccgcggacucuuuggcgccaucgccggguucauugagggaggcuggaccgggauggucgacggaugguacggcuaucaucaccagaacgaacaaggcucuggguacgcugcggaccugaaaagcacacagaaugccaucgauaagaucaccaacaaagugaauagcguuauugagaagaugaacacgcaguuuacagcugugggaaaggaguucaaucaccuugagaaaagaaucgagaaccugaauaagaaagucgacgauggcuuccucgacauuuggaccuacaacgccgaacugcuggugcuccuggagaaugaacggacccuugauuaucaugacagcaacgucaagaaccuguacgagaaagugcgcucucagcucaagaauaacgccaaggagaucgggaauggauguuuugaguucuaucacaaaugcgauaacacauguauggaauccguuaagaauggcaccuacgacuauccuaaauacagcgaagaggcuaagcugaacagagaagagauugauggggugaaacuugagucuacacggaucuaucaaauccuggccauuuacuccacggucgcgagcucccucgugcugguugugucucugggcgcuaucagcuuuuggaugugcuccaauggaucucuccagugccgcauuuguaucuga

SEQ ID NO: 196302 - RNA, 1701 nt, Artificial Sequence
  derived and/or modified CDS sequence (opt5) from hemagglutinin__InfluenzaA__ADD23415
augaaggccauccuggugguccuccuguacaccuucgcuacagccaacgcggacacgcuuugcauuggcuaucacgcuaauaacagcaccgauacaguugacaccgugcuggagaaaaaugugacagucacccauuccgugaaccuccuggaagauaagcacaaugggaaacuuuguaagcugagaggaguugcuccccuccaucugggcaaaugcaacaucgccggguggauucugggaaauccugagugugaaucucucagcacagccuccucuuggagcuacaucguggagaccuccucuagcgacaacggcacgugcuauccgggggauuuuauuaauuacgaagaacugcgggagcagcuuuccagcgucucuuccuucgaacgcuuugagaucuuccccaagaccagcucuuggccuaaccacgacuccaauaagggagugacagccgcuuguccccaugccggcgcgaaaucuuuuuauaagaaccugaucuggcucguuaaaaagggcaauagcuacccuaaacuguccaagagcuauauuaacgauaaggggaaagaagugcuuguccuguggggaauccaccaccccuccaccucugccgaccaacagagccucuaccagaaugcugaugccuacguguucgugggcacauccagauauagcaagaaauuuaagccugagauugcuauccggccgaaaguccgcgaccaggaggggagaaugaacuacuauuggacccugguugaacccggagauaagauuacguucgaggccacaggcaaccugguggugccucgguacgcguuugccauggaacgcaaugcugagucugggaucauuaucuccgacacccccguccaugauugcaacacaaccugucaaaccccuaaaggagccaucaauacaagccuccccuuccagaacauucacccgaucacgauuggcaagugcccuaaguaugugaaaucuaccaagcugagacuugcuacaggccugcggaauguucccagcauccagucccgcgggcucuuuggagccauugccggcuucaucgaagggggauggaccggcaugguggacgggugguacggauaucaucaccagaacgagcaaggcucuggcuacgcugcggaccugaaaagcacacagaaugccaucgauaagauuaccaacaaagucaauuccgugaucgagaagaugaacacgcaguuuacagcuguugggaaggaguucaaucaccuugagaaaagaauugaaaaccugaauaagaaaguggacgauggauuccucgacaucuggaccuacaacgccgagcugcugguccuccuggaaaaugagcggacccuugauuaucaugacagcaacgugaagaaccuguacgagaaaguccgcucucagcucaagaauaacgccaaggaaauuggcaauggguguuuugaguucuaucacaaaugcgauaacacauguauggaauccgugaagaauggaaccuacgacuauccuaaauacagcgaggaagcuaagcugaacagagaggagaucgauggcguuaaacuugaaucuacacggaucuaucaaauucuggccaucuacuccacgguggcgagcucccucguccuggugguuucucugggggcuauuagcuuuuggaugugcuccaauggcucucuccagugccgcaucuguauuuga

SEQ ID NO: 196303 - RNA, 1701 nt, Artificial Sequence; identical to SEQ ID NO: 195905
  derived and/or modified CDS sequence (opt5) from hemagglutinin__InfluenzaA__ADD23435

SEQ ID NO: 196304 - RNA, 1701 nt, Artificial Sequence
  derived and/or modified CDS sequence (opt5) from hemagglutinin__InfluenzaA__ADD23465
augaaggccauccuggcugugcuccuguacaccuucgccacagcgaacgcugacacgcuuugcauuggcuaucacgccaauaacagcaccgauacagucgacaccguucuggagaaaaaugugacagugacccauuccgucaaccuccuggaagauaagcacaaugggaaacuuuguaagcugagaggaguggcuccccuccaucugggcaaaugcaacaucgccggguggauucugggaaauccugagugugaaucucucagcacagccuccucuuggagcuacaucguugagaccuccucuagcgacaacggcacgugcuauccgggggauuuuauugacuacgaagaacugcgggagcagcuuuccagcgugucuuccuucgaacgcuuugagaucuuccccaagaccagcucuuggccuaaucacgauuccaacaagggagucacagcugccuguccccaugcgggcgccaagagcuuuuauaaaaaucugaucuggcucgugaaaaagggcaacucuuacccuaaacuguccaagagcuauauuaaugacaaggggaaagaaguucuugugcuguggggaauccaccaccccuccaccucugcugaucaacagagccucuaccagaacgccgacgcuuacgucuucgugggcacauccagauauagcaagaaauuuaagccugagauugccauccggccgaaagugcgcgaucaggaggggagaaugaauuacuauuggacccuggucgaacccggagacaagauuacguucgaggcgacaggcaaccugguugugccucgguacgccuuugcuauggaacgcaacgccgggucuggaaucauuaucuccgauacccccgugcaugacugcaauacaaccugucaaaccccuaaaggcgcuaucaacacaagccuccccuuccagaauauucacccgaucacgauuggcaagugcccuaaguaugucaaaucuaccaagcugagacuugccacagggcugcggaacgugcccagcauccagucccgcggacucuuuggcgccauugcuggguucaucgagggaggcuggaccgggaugguugacggaugguacggcuaucaucaccagaaugaacaaggcucuggguacgcggccgaucugaaaagcacacagaacgcuaucgacaagauuaccaauaaagugaacuccgucaucgagaagaugaauacgcaguuuacagccgugggaaaggaguucaaccaccuugagaaaagaauugagaaucugaacaagaaaguugaugacggcuuccucgauaucuggaccuacaaugccgaacugcuggugcuccuggagaacgaacggacccuugacuaucaugauagcaaugucaagaaccuguacgagaaagugcgcucucagcucaagaacaaugcuaaggagauugggaacggauguuuugaguucuaucacaaaugcgacaauacauguauggaauccgucaagaacggcaccuacgauuauccuaaauacagcgaagaggccaagcugaauagagaagagaucgacggggugaaacuugagucuacacggaucuaucaaauucuggcgaucuacuccacgguugcuagcucccucgugcuggucgugucucugggcgccauuagcuuuuggaugugcuccaacggaucucuccagugccgcaucuguauuuga

SEQ ID NO: 196305 - RNA, 1701 nt, Artificial Sequence; identical to SEQ ID NO: 195905
  derived and/or modified CDS sequence (opt5) from hemagglutinin__InfluenzaA__ADD23475

SEQ ID NO: 196306 - RNA, 1701 nt, Artificial Sequence; identical to SEQ ID NO: 195905
  derived and/or modified CDS sequence (opt5) from hemagglutinin__InfluenzaA__ADD23485

SEQ ID NO: 196307 - RNA, 1701 nt, Artificial Sequence
  derived and/or modified CDS sequence (opt5) from hemagglutinin__InfluenzaA__ADD23495
augaaggccauccuggugguccuccuguacaccuucgcuacagccaacgcggacacgcuuugcauuggcuaucacgcuaauaacagcaccgauacaguugacaccgugcuggagaaaaaugugacagucacccauuccgugaaccuccuggaagauaagcacaaugggaaacuuuguaagcugagaggaguugcuccccuccaucugggcaaaugcaacaucgccggguggauucugggaaauccugagugugaaucucucagcacagccuccucuuggagcuacaucguggagaccuccucuagcgacaacggcacgugcuauccgggggauuuuauugacuacgaagaacugcgggagcagcuuuccagcgucucuuccuucgaacgcuuugagaucuuccccaagaccagcucuuggccuaaucacgauuccaacaagggagugacagccgcuuguccccaugccggcgcgcggagcuuuuauaaaaaucugaucuggcucguuaagaaaggcaacucuuacccuaagcuguccaaaagcuauauuaaugacaaggggaaggaagugcuuguccuguggggaauccaccaccccuccaccucugccgaucaacagagccucuaccagaacgcugacgccuacguguucgugggcacauccagauauagcaaaaaguuuaaaccugagauugcuauccgcccgaaggucagagaucaggaggggcggaugaauuacuauuggacccugguugaacccggagacaaaauuacguucgaggccacaggcaaccugguggugccucgcuacgcguuugccauggaaagaaacgcugggucuggaaucauuaucuccgauacccccguccaugacugcaauacaaccugucaaaccccuaagggcgccaucaacacaagccuccccuuccagaauauucacccgaucacgauuggcaaaugcccuaaguaugugaagucuaccaaacugcggcuugcuacagggcugcgcaacguucccagcauccaguccagaggacucuuuggcgccauugccggguucaucgagggaggcuggaccgggaugguggacggaugguacggcuaucaucaccagaaugaacaaggcucuggguacgcugcggaucuuaagagcacacagaacgccaucgacgagauuaccaauaaagucaacuccgugaucgagaagaugaauacgcaguuuacagcuguuggaaaagaguucaaccaccuggagaagcggauugaaaaucugaacaagaaaguggaugacggcuuccucgauaucuggaccuacaaugccgagcugcugguccuccuggaaaacgagcgcacccuugacuaucaugauagcaaugugaagaaccuguacgagaaagucagaucucagcucaagaacaaugccaaagaaauugggaacggauguuuugaguucuaucacaagugcgacaauacauguauggaauccgugaagaacggcaccuacgauuauccuaaauacagcgaggaagcuaagcugaaucgggaggagaucgacgggguuaaacuugaaucuacacgcaucuaucaaauucuggccaucuacuccacgguggcgagcucccucguccuggugguuucucugggcgcuauuagcuuuuggaugugcuccaacggaucucuccagugcagaaucuguauuuga

SEQ ID NO: 196308 - RNA, 1701 nt, Artificial Sequence
  derived and/or modified CDS sequence (opt5) from hemagglutinin__InfluenzaA__ADD23505
augaaggccauccuggugguccuccuguacaccuucgcuacagccaacgcggacacgcuuugcauuggcuaucacgcuaauaacagcaccgauacaguugacaccgugcuggagaaaaaugugacagucacccauuccgugaaccuccuggaagauaagcacaaugggaaacuuuguaagcugagaggaguugcuccccuccaucugggcaaaugcaacaucgccggguggauucugggaaauccugagugugaaucucucagcacagccuccucuuggagcuacaucguggagaccuccucuagcgacaacggcacgugcuauccgggggauuuuauugacuacgaagaacugcgggagcagcuuuccagcgucucuuccuucgaacgcuuugagaucuuccccaagaccagcucuuggccuaaucacgauuccaacaagggagugacagccgcuuguccccaugccggcgcgaaaucuuuuuauaagaaucugaucuggcucguuaaaaagggcaacagcuacccuaaacuguccaagagcuauauuaaugacaaggggaaagaagugcuuguccuguggggaauccaccaccccuccaccucugccgaucaacagagccucuaccagaacgcugacgccuacguguucgugggcacauccagauauagcaagaaauuuaagccugagauugcuauccggccgaaaguccgcgaucaggaggggagaaugaauuacuauuggacccugauugaacccggagacaagaucacguucgaggccacaggcaaccugguugugccucgguacgcguuugccauggaacgcaacgcugggucuggaauuaucaucuccgauacccccgcccaugacugcaauacaaccugucaaaccccuaaaggcgcuauuaacacaagccuccccuuccagaauauccacccgauuacgaucggcaagugcccuaaguaugugaaaucuaccaagcugagacuugccacagggcugcggaacguccccagcauucagucccgcggacucuuuggcgccaucgcuggguucaucgagggaggcuggaccgggaugguggacggaugguacggcuaucaucaccagaaugaacaaggcucuggguacgcggccgaucugaaaagcacacagaacgcuauugacaagaucaccaauaaaguuaacuccgugauugagaagaugaauacgcaguuuacagccgucggaaaggaguucaaccaccuugagaaaagaaucgagaaucugaacaagaaaguggaugacggcuuccucgauauuuggaccuacaaugccgaacugcugguucuccuggagaacgaacggacccuugacuaucaugauagcaaugugaagaaccuguacgagaaaguccgcucucagcucaagaacaaugcuaaggagaucgggaacggauguuuugaguucuaucacaaaugcgacaauacauguauggaauccgugaagaacggcaccuacgauuauccuaaauacagcgaagaggccaagcugaauagagaagagaucgacggggucaaacuugagucuacacggauuuaucaaauccuggcgauuuacuccacgguggcuagcucccucguucugguggucucucugggcgccaucagcuuuuggaugugcuccaacggaucucuccagugccgcauuuguaucuga

SEQ ID NO: 196309 - RNA, 1701 nt, Artificial Sequence; identical to SEQ ID NO: 195905
  derived and/or modified CDS sequence (opt5) from hemagglutinin__InfluenzaA__ADD23515

SEQ ID NO: 196310 - RNA, 1701 nt, Artificial Sequence; identical to SEQ ID NO: 195905
  derived and/or modified CDS sequence (opt5) from hemagglutinin__InfluenzaA__ADD23994

SEQ ID NO: 196311 - RNA, 1701 nt, Artificial Sequence
  derived and/or modified CDS sequence (opt5) from hemagglutinin__InfluenzaA__ADD24004
augaaggccauccuggugguccuccuguacaccuucgcuacagccaacgcggacacgcuuugcauuggcuaucacgcuaauaacagcaccgauacaguugacaccgugcuggagaaaaaugugacagucacccauuccgugaaccuccuggaagauaagcacaaugggaaacuuuguaagcugagaggaguugcuccccuccaucugggcaaaugcaacaucgccggguggauucugggaaauccugagugugaaucucucagcacagccuccucuuggagcuacaucguggagaccuccucuagcgacaacggcacgugcuauccgggggauuuuauugacuacgaagaacugcgggagcagcuuuccagcgucucuuccuucgaacgcuuugagaucuuccccaagaccagcucuuggccuaaucacgauuccaacaagggagugacagccgcuuguccccaugccggcgcgaaaucuuuuuauaagaaucugaucuggcucguuaaaaagggcaacagcuacccuaaacuguccaagagcuauauuaaugacaaggggaaagaagugcuuguccuguggggaauccaccaccccuccaccucugccgaucaacagagccucuaccagaacgcugacgccuacguguucgugggcacauccagauauagcaagaaauuuaagccugagauugcuauccggccgaaaguccgcgaucaggaggggagaaugaauuacuauuggacccugguugaacccggagacaagauuacguucgaggccacaggcaaccugguggugccucgguacgcguuugccauggaacgcaacgcugggucuggaaucauuaucuccgauacccccguccaugacugcaauacaaccugucaaaccccuaacggcgccaucaauacaagccuccccuuccagaacauucacccgaucacgauuggcaaaugcccuaaguaugugaagucuaccaaacugagacuugcuacagggcugcggaauguucccagcauccagucccgcggacucuuuggcgccauugccggguucaucgagggaggcuggaccgggaugguggacggaugguacggcuaucaucaccagaacgaacaaggcucuggguacgcugcggaucuuaagagcacacagaaugccaucgacgagauuaccaacaaagucaauuccgugaucgagaagaugaacacgcaguuuacagcuguuggaaaagaguucaaucaccuggagaagagaauugaaaaccugaauaagaaaaucgaugacggcuuccucgauauuuggaccuacaacgccgagcugcuggugcuccuggaaaaugagcggacccuugacuaucaugauagcaacgucaagaaccuguacgagaaagugcgcucucagcucaagaauaacgccaaagaaaucgggaauggauguuuugaguucuaucacaagugcgacaacacauguauggaauccgucaagaauggcaccuacgauuauccuaaauacagcgaggaagcuaagcugaacagagaggagaucgacggggugaaacuugaaucuacacggauuuaucaaauccuggccauuuacuccacgguugcgagcucccucgugcuggucgugucucugggcgcuaucagcuuuuggaugugcuccaauggaucucuccagugccgcauuuguaucuga

SEQ ID NO: 196312 - RNA, 1701 nt, Artificial Sequence; identical to SEQ ID NO: 195843
  derived and/or modified CDS sequence (opt5) from hemagglutinin__InfluenzaA__ADD24014

SEQ ID NO: 196313 - RNA, 1701 nt, Artificial Sequence
  derived and/or modified CDS sequence (opt5) from hemagglutinin__InfluenzaA__ADD52537
augaaggccauccuggugguccuccuguacaccuucgcuacagccaacgcggacacgcuuugcauuggcuaucacgcuaauaacagcaccgauacaguugacaccgugcuggagaagaaugugacagucacccauuccgugaaccuccuggaagauaagcacaaugggaaacuuuguaagcugagaggaguugcuccccuccaucugggcaaaugcaacaucgccggguggauucugggaaauccugagugugaaucucucagcacagccuccucuuggagcuacaucguggagaccuccucuagcgacaacggcacgugcuauccgggggauuuuauugacuacgaagaacugcgggagcagcuuuccagcgucucuuccuucgaacgcuuugagaucuuccccaagaccagcucuuggccuaaucacgauuccaacaagggagugacagccgcuuguccccaugccggcgcgaaaucuuuuuauaagaaucugaucuggcucguuaaaaagggcaacagcuacccuaaacuguccaagagcuauauuaaugacaaggggaaagaagugcuuguccuguggggaauccaccaccccuccaccucugccgaucaacagagccucuaccagaacgcugacgccuacguguucgugggcuccagcagauauucuaagaaauuuaagccugagauugcuauccggccgaaaguccgcgaucaggaggggagaaugaauuacuauuggacacugguugaacccggagacaagauuaccuucgaggccacgggcaaccugguggugccucgguacgcguuugccauggaacgcaacgcuggguccggaaucauuaucagcgauacacccguccaugacugcaauaccacaugucaaaccccuaaaggcgccaucaacaccucucuccccuuccagaauauucacccgaucacaauuggcaagugcccuaaguaugugaaaagcacgaagcugagacuugcuaccgggcugcggaacguucccuccauccagucucgcggacucuuuggcgccauugccggguucaucgagggaggcuggacagggaugguggacggaugguacggcuaucaucaccagaaugaacaaggcagcggguacgcugcggaucugaaauccacccagaacgccaucgacggaauuacaaauaaggucaacagcgugaucgagaaaaugaauacccaguuuacggcuguuggcaaggaguucaaccaccuugaaaagagaauugagaaucugaacaaaaagguggaugacggguuccucgauaucuggacauacaaugccgaacugcugguccuccuggagaacgaacggacccuugacuaucaugauucuaaugugaaaaaccuguacgagaagguccgcucccagcucaaaaacaaugccaaggagauuggaaacggcuguuuugaguucuaucacaagugcgacaauaccuguauggagagcgugaaaaacgggacauacgauuauccuaaguacucugaagaggcuaaacugaauagagaagagaucgacggcguuaaacuugaguccacccggaucuaucaaauucuggccaucuacagcacaguggcguccucucucguccuggugguuagccugggagcuauuuccuuuuggaugugcucuaacggcagccuccagugccgcaucuguauuuga

SEQ ID NO: 196314 - RNA, 1701 nt, Artificial Sequence; identical to SEQ ID NO: 195905
  derived and/or modified CDS sequence (opt5) from hemagglutinin__InfluenzaA__ADD64203

SEQ ID NO: 196315 - RNA, 1701 nt, Artificial Sequence
  derived and/or modified CDS sequence (opt5) from hemagglutinin__InfluenzaA__ADD64204
augaaggccauccuggugguccuccuguacaccuucgcuacagccaacgcggacacgcuuugcauuggcuaucacgcuaauaacagcaccgauacaguugacaccgugcuggagaaaaaugugacagucacccauuccgugaaccuccuggaagauaagcacaaugggaaacuuuguaagcugagaggaguugcuccccuccaucugggcaaaugcaacaucgccggguggauucugggaaauccugagugugaaucucucagcacagccuccucuuggagcuacaucguggagaccuccucuagcgacaacggcacgugcuauccgggggauuuuauugacuacgaagaacugcgggagcagcuuuccagcgucucuuccuucgaacgcuuugagaucuuccccaagaccagcucuuggccuaaucacgaucccaacaagggagugacagccgcuuguccucaugccggcgcgaaauccuuuuauaagaaucugaucuggcucguuaaaaagggcaacagcuaccccaaacugucuaaguccuauauuaaugacaaggggaaagaagugcuuguccuguggggaauccaccacccuagcaccuccgccgaucaacagucucucuaccagaacgcugacgccuacguguucgugggcacaagcagauauuccaagaaauuuaagccggagauugcuauccggcccaaaguccgcgaucaggaggggagaaugaauuacuauuggacccugauugaaccuggagagaagaucacguucgaagccacaggcaaccugguugugccccgguacgcguuugccauggagcgcaacgcugggagcggaauuaucaucucugacaccccugugcaugauugcaauacaaccugucaaacccccaaaggcgccauuaacacaucccucccguuccagaauauccacccuauuacgaucggcaagugccccaaguaugucaaaagcaccaagcugagacuugcuacagggcugcggaacgugccuucuauucagagccgcggacucuuuggcgccaucgccggguucaucgaaggaggcuggaccgggaugguugacggaugguacggcuaucaucaccagaaugagcaaggcuccggguacgcugcggaccugaaaucuacacagaacgccauugaugagaucaccaauaaggugaacagcgucauugagaaaaugaauacgcaguuuacagcugugggaaaggaguucaaccaccuugaaaagagaaucgagaaucugaacaaaaagguugacgauggcuuccucgacauuuggaccuacaaugccgaacugcuggugcuccuggagaacgagcggacccuugauuaucaugacuccaaugucaaaaaccuguacgaaaaggugcgcagccagcucaaaaacaaugccagagagaucgggaacggauguuuugaguucuaucacaagugcgauaauacauguauggaaucugucaagaacggcaccuacgacuaucccaaauacuccgaagaggcuaagcugaaucgggaggaaaucgauggggugaaacuugagagcacacgcauuuaucaaauccuggccauuuacucuacgguugcguccagccucgugcuggucgugucccugggcgcuaucucuuuuuggaugugcagcaacggaucccuccagugcagaauuuguaucuga

SEQ ID NO: 196316 - RNA, 1701 nt, Artificial Sequence; identical to SEQ ID NO: 194741
  derived and/or modified CDS sequence (opt5) from hemagglutinin__InfluenzaA__ADD64205

SEQ ID NO: 196317 - RNA, 1701 nt, Artificial Sequence; identical to SEQ ID NO: 194741
  derived and/or modified CDS sequence (opt5) from hemagglutinin__InfluenzaA__ADD64206

SEQ ID NO: 196318 - RNA, 1701 nt, Artificial Sequence; identical to SEQ ID NO: 195539
  derived and/or modified CDS sequence (opt5) from hemagglutinin__InfluenzaA__ADD64207

SEQ ID NO: 196319 - RNA, 1701 nt, Artificial Sequence
  derived and/or modified CDS sequence (opt5) from hemagglutinin__InfluenzaA__ADD64208
augaaggccauccuggugguccuccuguacaccuucgcuacagccaacgcggacacgcuuugcauuggcuaucacgcuaauaacagcaccgauacaguugacaccgugcuggagaagaaugugacagucacccauuccgugaaccuccuggaagauaagcacaaugggaaacuuuguaagcugagaggaguugcuccccuccaucugggcaaaugcaacaucgccggguggauucugggaaauccugagugugaaucucucagcacagccuccucuuggagcuacaucguggagaccuccucuagcgacaacggcacgugcuauccgggggauuuuauugacuacgaagaacugcgggagcagcuuuccagcgucucuuccuucgaacgcuuugagaucuuccccaagaccagcucuuggccuaaucacgaucccaacaagggagugacagccgcuuguccucaugccggcgcgaaauccuuuuauaagaaucugaucuggcucguuaaaaagggcaacagcuaccccaaacugucuaaguccuauauuaaugacaaggggaaagaagugcuuguccuguggggaauccaccacccuagcaccuccgccgaucaacagucucucuaccagaacgcugacgccuacguguucgugggcacaagcagauauuccaagaaauuuaagccggagauugcuauccggcccaaaguccgcgaucaggaggggagaaugaauuacuauuggacccugguugaaccuggagacaagauuacguucgaggccacaggcaaccugguggugccccgguacgcguuugccauggaacgcaacgcugggagcggaaucauuaucucugauaccccuguccaugacugcaauacaaccugucaaacccccaaaggcgccaucaacacaucccucccguuccagaauauucacccuaucacgauuggcaagugccccaaguaugugaaaagcaccaagcugagacuugcuacagggcugcggaacguuccuucuauccagagccgcggacucuuuggcgccauugccggguucaucgagggaggcuggaccgggaugguggacggaugguacggcuaucaucaccagaaugaacaaggcuccggguacgcugcggaucugaaaucuacacagaacgccaucgacgagauuaccaauaaggucaacagcgugaucgagaaaaugaauacgcaguuuacagcuguuggaaaggaguucaaccaccuugagaagagaauugaaaaucugaacaaaaagguggaugacggcuuccucgauaucuggaccuacaaugccgagcugcugguccuccuggaaaacgagcggacccuugacuaucaugaucccaaugugaaaaaccuguacgagaagguccgcucccagcucaaaaacaaugccaaggaaauugggaacggauguuuugaguucuaucacaagugcgacaauacauguauggaaagcgugaaaaacggcaccuacgauuaucccaaguacucugaggaagcuaaacugaauagagaggagaucgacgggguuaaacuugaauccacacggaucuaucaaauucuggccaucuacagcacgguggcgucuucccucguccuggugguuagccugggcgcuauuuccuuuuggaugugcucuaacggaagccuccagugccgcaucuguauuuga

SEQ ID NO: 196320 - RNA, 1701 nt, Artificial Sequence; identical to SEQ ID NO: 195539
  derived and/or modified CDS sequence (opt5) from hemagglutinin__InfluenzaA__ADD64209

SEQ ID NO: 196321 - RNA, 1701 nt, Artificial Sequence; identical to SEQ ID NO: 194741
  derived and/or modified CDS sequence (opt5) from hemagglutinin__InfluenzaA__ADD64210

SEQ ID NO: 196322 - RNA, 1701 nt, Artificial Sequence; identical to SEQ ID NO: 195539
  derived and/or modified CDS sequence (opt5) from hemagglutinin__InfluenzaA__ADD64211

SEQ ID NO: 196323 - RNA, 1701 nt, Artificial Sequence; identical to SEQ ID NO: 194741
  derived and/or modified CDS sequence (opt5) from hemagglutinin__InfluenzaA__ADD64212

SEQ ID NO: 196324 - RNA, 1701 nt, Artificial Sequence; identical to SEQ ID NO: 195539
  derived and/or modified CDS sequence (opt5) from hemagglutinin__InfluenzaA__ADD64213

SEQ ID NO: 196325 - RNA, 1701 nt, Artificial Sequence
  derived and/or modified CDS sequence (opt5) from hemagglutinin__InfluenzaA__ADD64214
augaaggccauccuggugguccuccuguacaccuucgcuacagccaacgcggacacgcuuugcauuggcuaucacgcuaauaacagcaccgauacaguugacaccgugcuggagaaaaaugugacagucacccauuccgugaaccuccuggaaaauaagcacaacgggaaacuuuguaagcugagaggaguugcuccccuccaucugggcaaaugcaauaucgccggguggauucugggaaacccugagugugaaucuuuuagcacauccucuagcugguccuacaucguggagaccucuagcuccgauaauggcacgugcuauccgggggacuucauugauuacgaggaacuccgggagcagcugagcucugucuccagcuuugaacgcuucgagaucuuucccaagaccucuuccuggccuaaccacgacagcaauaagggagugacagccgccuguccccaugcuggcgccaaaucuuucuauaagaaccuuaucuggcugguuaaaaagggcaauuccuacccuaaacucaacaagagcuauauuaaugauaaggggaaagaagugcugguccuuuggggaauccaccaccccuccaccucugcggaccaacagagccuguaccagaacgccgaugcuuacguguuugugggcacauccagauauagcaagaaauucaagccugagauugccauccggccgaaaguccgcgaccaggaggggagaaugaacuacuauuggacccucguugaacccggagauaagauuacguuugaggcuacaggcaaucugguggugccucgguacgccuucgcgauggaacgcaacgccgggucuggaaucauuaucuccgacacccccguccaugauugcaauacaaccugucaaaccccuaaaggcgcuaucaacacaagccugcccuuucagaauauucacccgaucacgauuggcaagugcccuaaguaugugaaaucuaccaagcucagacuggccacagggcuucggaacguucccagcauccagucccgcggacuguucggcgcuauugccggguuuaucgagggaggcuggaccgggaugguggacggaugguacggcuaucaucaccagaaugaacaaggcucuggguacgccgcugaccucaaaagcacacagaacgcgaucgauggaauuaccaauaaggucaacuccgugaucgagaaaaugaauacgcaguucacagccguuggcaaggaguucaaccaccuggaaaagagaauugagaaucuuaacaaaaagguggacgauggguuucuggacaucuggaccuacaaugcugaacuccugguccugcucgagaacgaacggacccuggauuaucaugacagcaacgugaaaaaucuuuacgagaagguccgcucucagcugaaaaacaaugccaaggagauuggaaacggcuguuucgaauuuuaucacaagugcgauaauacauguauggaguccgugaaaaacgggaccuacgacuauccuaaguacagcgaagaggccaaacucaauagagaagagaucgauggcguuaagcuggagucuacacggaucuaucaaauucuugcuaucuacuccacgguggccagcucccugguccucgugguuucucugggagcgauuagcuucuggaugugcuccaacggcucucugcagugccgcaucuguauuuga

SEQ ID NO: 196326 - RNA, 1701 nt, Artificial Sequence; identical to SEQ ID NO: 194741
  derived and/or modified CDS sequence (opt5) from hemagglutinin__InfluenzaA__ADD64215

SEQ ID NO: 196327 - RNA, 1701 nt, Artificial Sequence; identical to SEQ ID NO: 195539
  derived and/or modified CDS sequence (opt5) from hemagglutinin__InfluenzaA__ADD64216

SEQ ID NO: 196328 - RNA, 1701 nt, Artificial Sequence; identical to SEQ ID NO: 195539
  derived and/or modified CDS sequence (opt5) from hemagglutinin__InfluenzaA__ADD64217

SEQ ID NO: 196329 - RNA, 1701 nt, Artificial Sequence
  derived and/or modified CDS sequence (opt5) from hemagglutinin__InfluenzaA__ADD74350
augaaggccauccuggugguccuccuguacaccuucgcuacagccaacgcggacacgcuuugcauuggcuaucacgcuaauaacagcaccgauacaguugacaccgugcuggagaaaaaugugacagucacccauuccgugaacauccucgaagauaagcacaaugggaaacuguguaaacuuagaggaguugcuccccugcaucucggcaagugcaacauugccggguggauccugggaaauccugagugugaaucucugagcacagccuccucuuggagcuacauuguggagaccuccucuagcgacaacggcacgugcuauccgggggauuuuaucgacuacgaagaacuccgggagcagcuguccagcgucucuuccuucgaacgcuuugagaucuuccccaagaccagcucuuggccuaaucacgauuccaacaagggagugacagccgcuuguagccaugccggcgcgaaaucuuuuuauaagaaucuuauuuggcugguuaaaaagggcaacuccuaccccaaacucagcaaguccuauaucaaugacaaggggaaagaagugcugguccuuuggggcauucaccacccuucuaccagcgccgaucaacagucccuguaccagaacgcugacgccuacguguucgugggaagcucuagauauuccaagaaauuuaagcccgagaucgcuauucggccuaaaguccgcgaucaggaggggagaaugaauuacuauuggacacucguugaaccgggagacaagaucaccuucgaggccacgggcaaccugguggugccccgguacgcguuugccauggaacgcaacgcugggagcggaauuaucaucucugauacaccuguccaugacugcaauaccacaugucaaacccccaaaggcgccauuaacaccagccugccuuuccagaauauccaccccauuacaaucggcaagugcccgaaguaugugaaauccacgaagcucagacuggcuaccgggcuucggaacguuccuucuauucagagccgcggacuguuuggcgccaucgccggguucaucgagggaggcuggacagggaugguggacggaugguacggcuaucaucaccagaaugaacaaggcuccggguacgcugcggaucucaaaagcacccagaacgccauugacgagaucacaaauaaggucaacucugugauugagaaaaugaauacccaguuuacggcuguuggaaaggaguucaaccaccuggagaagagaaucgaaaaucuuaacaaaaagguggaugacggcuuccuggauauuuggacauacaaugccgagcuccugguccugcucgaaaacgagcggacccuggacuaucaugauuccaaugugaaaaaccuuuacgagaagguccgcagccagcugaaaaacaaugccaaggaaaucgggaacggauguuuugaguucuaucacaagugcgacaauaccuguauggaaucugugaaaaacggcacauacgauuaucccaaguacuccgaggaagcuaaacucaauagagaggagaucgacgggguuaagcuggaaagcacccggauuuaucaaauccuugccauuuacuccacaguggcgucuagccugguccucgugguuucccugggcgcuaucucuuuuuggaugugcagcaacggaucccugcagugccgcauuuguaucuga

SEQ ID NO: 196330 - RNA, 1701 nt, Artificial Sequence
  derived and/or modified CDS sequence (opt5) from hemagglutinin__InfluenzaA__ADD74360
augaaggccauccuggugguccuccuguacaccuucgcuacagccaacgcggacacgcuuugcauuggcuaucacgcuaauaacagcaccgauacaguugacaccgugcuggagaagaaugugacagucacccauuccgugaaccuccuggaagauaagcacaaugggaaacuuuguaagcugagaggaguugcuccccuccaucugggcaaaugcaacaucgccggguggauucugggaaauccugagugugaaucucucagcacagccuccucuuggagcuacaucguggagaccuccucuagcgacaacggcacgugcuauccgggggauuuuauugacuacgaggagcugcgggagcagcuuuccagcgucucuuccuucgaacgcuuugagaucuuccccaagaccagcucuuggccuaaucacgauuccaacaagggagugacagccgcuuguccccaugccggcgcgaaaucuuuuuauaagaaucugaucuggcucguuaaaaagggcaacagcuacccuaaacuguccaagagcuauauuaaugacaagagaaaagaagugcuuguccugugggggauccaccaccccuccaccucugccgaucaacagagccucuaccagaacgcugacgccuacguguucgugggaacaucccgguauagcaagaaauuuaagccugagauugcuauccgcccgaaagucagagaucaggagggccggaugaauuacuauuggacccugguugaacccggggacaagauuacguucgaggccacaggaaaccugguggugccucgcuacgcguuugccauggaaagaaacgcuggcucugggaucauuaucuccgauacccccguccaugacugcaauacaaccugucaaaccccuaaaggagccaucaacacaagccuccccuuccagaauauucacccgaucacgauuggcaagugcccuaaguaugugaaaucuaccaagcugcggcuugcuacaggccugcgcaacguucccagcauccaguccagagggcucuuuggagccauugccggcuucaucgaagggggauggaccggcaugguggacgggugguacggauaucaucaccagaaugaacaaggcucuggcuacgcugcggaucugaaaagcacacagaacgccaucgacgagauuaccaauaaggucaacuccgugaucgagaaaaugaauacgcaguuuacagcuguugggaaggaguucaaccaccuugaaaagcggauugaaaaucugaacaaaaagguggaugacggauuccucgauaucuggaccuacaaugccgagcugcugguccuccuggaaaacgagcgcacccuugacuaucaugauagcaaugugaaaaaccuguacgagaaggucagaucucagcucaaaaacaaugccaaggaaauuggcaacggguguuuugaguucuaucacaagugcgacaauacauguauggaauccgugaaaaacggaaccuacgauuauccuaaguacagcgaggaagcuaaacugaaucgggaggagaucgacggcguuaaacuugaaucuacacgcaucuaucaaauucuggccaucuacuccacgguggcgagcucccucguccuggugguuucucugggggcuauuagcuuuuggaugugcuccaacggcucucuccagugcagaaucuguauuuga

SEQ ID NO: 196331 - RNA, 1701 nt, Artificial Sequence; identical to SEQ ID NO: 194741
  derived and/or modified CDS sequence (opt5) from hemagglutinin__InfluenzaA__ADD74370

SEQ ID NO: 196332 - RNA, 1701 nt, Artificial Sequence; identical to SEQ ID NO: 194741
  derived and/or modified CDS sequence (opt5) from hemagglutinin__InfluenzaA__ADD74398

SEQ ID NO: 196333 - RNA, 1701 nt, Artificial Sequence
  derived and/or modified CDS sequence (opt5) from hemagglutinin__InfluenzaA__ADD74428
augaaggccauccuggugguccuccuguacaccuucgcuacagccaacgcggacacgcuuugcauuggcuaucacgcuaauaacagcaccgauacaguugacaccgugcuggagaaaaaugugacagucacccauuccgugaaccuccuggaagauaagcacaaugggaaacuuuguaagcugagaggaguugcuccccuccaucugggcaaaugcaacaucgccggguggauucugggaaauccugagugugaaucucucagcacagccuccucuuggagcuacaucguggagaccuccucuagcgacaacggcacgugcuauccgggggauuuuauuaauuacgaggaacugcgggagcagcuuuccagcgucucuuccuucgaacgcuuugagaucuuccccaagaccagcucuuggccuaaccacgacuccaauaagggagugacagccgcuuguccccaugccggcgcgaaaucuuuuuauaagaaccugaucuggcucguuaaaaagggcaauagcuacccuaaacuguccaagagcuauauuaacgauaaggggaaagaagugcuuguccuguggggaauccaccaccccuccaccucugccgaccaacagagccucuaccagaaugcugaugccuacguguucgugggcacauccagauauagcaagaaauuuaagccugagauugcuauccggccgaaaguccgcgaccaggaggggagaaugaacuacuauuggacccugguuaagcccggagauaaaauuacguucgaagccacaggcaaccugguggugccucgguacgcguuugccauggagcgcaaugcugggucuggaaucauuaucuccgacacccccguccaugauugcaacacaaccugucaaaccccuaagggcgccaucaauacaagccuccccuuccagaacauucacccgaucacgauuggcaagugcccuaaauaugugaagucuaccaaacugagacuugcuacagggcugcggaauguucccagcauccagucccgcggacucuuuggcgccauugccggguucaucgaaggaggcuggaccgggaugguggacggaugguacggcuaucaucaccagaacgagcaaggcucuggguacgcugcggaccuuaagagcacacagaaugccaucgauaaaauuaccaacaaggucaauuccgugaucgaaaagaugaacacgcaguuuacagcuguuggaaaagaguucaaucaccuugagaagagaauugaaaaccugaauaaaaagguggacgauggcuuccucgacaucuggaccuacaacgccgagcugcugguccuccuggaaaaugagcggacccuugauuaucaugacagcaacgugaaaaaccuguacgaaaagguccgcucucagcucaagaauaacgccaaagagauugggaauggauguuuugaguucuaucacaagugcgauaacacauguauggaauccgugaaaaauggcaccuacgacuauccuaaguacagcgaggaagcuaaacugaacagagaggaaaucgaugggguuaagcuggagucuacacggaucuaucaaauucuggccaucuacuccacgguggcgagcucccucguccuggugguuucucugggcgcuauuagcuuuuggaugugcuccaauggaucucuccagugccgcaucuguauuuga

SEQ ID NO: 196334 - RNA, 1701 nt, Artificial Sequence
  derived and/or modified CDS sequence (opt5) from hemagglutinin__InfluenzaA__ADD74438
augaaggccauccuggugguccuccuguacaccuucgcuacagccaacgcggacacgcuuugcauuggcuaucacgcuaauaacagcaccgauacaguugacaccgugcuggagaagaaugugacagucacccauuccgugaaccuccuggaagauaagcacaaugggaaacuuuguaagcugagaggaguugcuccccuccaucugggcaaaugcaacaucgccggguggauucugggaaauccugagugugaaucucucagcacagccuccucuuggagcuacaucguggagaccuccucuagcgacaacggcacgugcuauccgggggauuuuauugacuacgaagaacugcgggagcagcuuuccagcgucucuuccuucgaacgcuuugagaucuuccccaagaccagcucuuggccuaaucacgauuccaacaagggagugacagccgcuuguccccaugccggcgcgaaaucuuuuuauaagaaucugaucuggcucguuaaaaagggcaacagcuacccuaaacuguccaagagcuauauuaaugacaaggggaaagaagugcuuguccuguggggaauccaccaccccuccaccucugccgaucaacagagccucuaccagaacgcugacgccuacguguucgugggcacauccagauauagcaagaaauuuaagccugagauugcuauccggccgaaaguccgcgaucaggaggggagaaugaauuacuauuggacccugguugaacccggagacaagauuacguucgaggccacaggcaaccugguggugccucgguacgcguuugccauggaacgcaacgcugggucuggaaucauuaucuccgauacccccguccaugacugcaauacaaccugucaaaccccuaaaggcgccaucaacacaagccuccccuuccagaauauucacccgaucacgauuggcaagugcccuaaguaugugaaaucuaccaagcugagacuugcuacagggcugcggaacguucccagcauccagucccgcggacucuuuggcgccauugccggguucaucgagggaggcuggaccgggaugguggacggaugguacggcuaucaucaccagaaugaacaaggcucuggguacgcugcggaucugaaaagcacacagaacgccaucgacgagauuaccaauaaggucaacuccgugaucgagaaaaugaauacgcaguuuacagcuguuggaaaggaguucaaccaccuugagaagagaauugaaaaucugaacaaaaagguggaugacggcuuccucgauaucuggaccuacaaugccgagcugcugguccuccuggaaaacgagcggacccuugacuaucaugauagcaaugugaaaaaccuguacgagaagguccgcucucagcucaaaaacaaugccaaggaaauugggaacggauguuuugaguucuaucacaagugcgacaauacauguauggaauccgugaaaaacggcaccuacgauuauccuaaguacagcgaggaagcuaaacugaauagagaggagaucgacgggguuaaacuugaacccacacggaucuaucaaauucuggccaucuacucuacgguggcguccagccucguccuggugguuucccugggcgcuauuucuuuuuggaugugcagcaacggaucccuccagugccgcaucuguauuuga

SEQ ID NO: 196335 - RNA, 1701 nt, Artificial Sequence; identical to SEQ ID NO: 194741
  derived and/or modified CDS sequence (opt5) from hemagglutinin__InfluenzaA__ADD74448

SEQ ID NO: 196336 - RNA, 1701 nt, Artificial Sequence; identical to SEQ ID NO: 194741
  derived and/or modified CDS sequence (opt5) from hemagglutinin__InfluenzaA__ADD74458

SEQ ID NO: 196337 - RNA, 1701 nt, Artificial Sequence
  derived and/or modified CDS sequence (opt5) from hemagglutinin__InfluenzaA__ADD74468
augaaggccauccuggugguccuccuguacaccuucgcuacagccaacgcggacacgcuuugcauuggcuaucacgcuaauaacagcaccgauacaguugacaccgugcuggagaagaaugugacagucacccauuccguggaucuccuggaagacaagcacaacgggaaacuuuguaagcugagaggaguugcuccccuccaucugggcaaaugcaauaucgccggguggauucugggaaacccugagugugaaucucucagcacagccuccucuuggagcuacaucguggagaccuccucuagcgauaauggcacgugcuauccgggggacuuuauugauuacgaagaacugcgggagcagcuuuccagcgucucuuccuucgaacgcuuugagaucuuccccaagaccagcucuuggccuaaccacgacuccaauaagggagugacagccgcuuguccccaugccggcgcgaaaucuuuuuauaagaaccugaucuggcucguuaaaaagggcaauagcuacccuaaacuguccaagagcuauauuaacgauaaggggaaagaagugcuuguccuguggggaauccaccaccccuccaccucugccgaccaacagagccucuaccagaaugcugaugccuacguguucgugggcacauccagauauagcaagaaauuuaagccugagauuaccauccggccgaaaguccgcgaccaggaggggagaaugaacuacuauuggacgcugguugaacccggagauaagauuacauucgaggcuaccggcaaucugguggugccucgguacgccuuugcgauggaacgcaacgccgggucuggaaucauuaucuccgacacacccguccaugacugcaacaccaccugucaaacaccuaaaggcgcuaucaauacgagccuccccuuccagaacauucacccgaucaccauuggcaagugcccuaaguaugugaaaucuacaaagcugagacuugccaccgggcugcggaauguucccagcauccagucccgcggacucuuuggcgcuauugccggguucaucgagggaggcuggacagggaugguggauggaugguacggcuaucaucaccagaacgaacaaggcucuggguacgccgcugaccugaaaagcacccagaaugcgaucgaugagauuacgaacaaggucaauuccgugaucgagaaaaugaacacacaguuuaccgccguuggaaaggaguucaaucaccuugagaagagaauugaaaaccugaauaaaaagguggacgauggcuuccucgacaucuggaccuacaacgcugagcugcugguccuccuggaaaaugagcggacacuugauuaucaugacagcaacgugaaaaaucuguacgagaagguccgcucucagcucaaaaacaacgccaaggaaauugggaauggauguuuugaguucuaucacaagugcgauaacaccuguauggaauccgugaaaaauggcacauacgacuauccuaaguacagcgaggaagccaaacugaacagagaggagaucgaugggguuaaacuugaaucuacgcggaucuaucaaauucuggcuaucuacuccaccguggccagcucccucguccuggugguuucucugggcgcgauuagcuuuuggaugugcuccaauggaucucuccagugccgcaucuguauuuga

SEQ ID NO: 196338 - RNA, 1701 nt, Artificial Sequence
  derived and/or modified CDS sequence (opt5) from hemagglutinin__InfluenzaA__ADD74488
augaaggccauccuggugguccuccuguacaccuucgcuacagccaacgcggacacgcuuugcauuggcuaucacgcuaauaacagcaccgauacaguugacaccgugcuggagaaaaaugugacagucacccauuccgugaacauccucgaagauaagcacaaugggaaacuguguaaacuuagaggaguugcuccccugcaucucggcaagugcaacauugccggguggauccugggaaauccugagugugaaucucugagcacagccuccucuuggagcuacauuguggagaccuccucuagcgacaacggcacgugcuauccgggggauuuuaucgacuacgaagaacuccgggagcagcuguccagcgucucuuccuucgaacgcuuugagaucuuccccaagaccagcucuuggccuaaucacgauuccaacaagggagugacagccgcuuguccccaugccggcgcgaaaucuuuuuauaagaaucuuauuuggcugguuaaaaagggcaacagcuacccuaaacucuccaagagcuauaucaaugacaaggggaaagaagugcugguccuuuggggcauucaccaccccuccaccucugccgaucaacagagccuguaccagaacgcugacgccuacguguucgugggaacauccagauauagcaagaaauuuaagccugagaucgcuauucggccgaaaguccgcgaucaggaggggagaaugaauuacuauuggacccucguugaacccggagacaagaucacguucgaggccacaggcaaccugguggugccucgguacgcguuugccauggaacgcaacgcugggucuggaauuaucaucuccgauacccccguccaugacugcaauacaaccugucaaaccccuaaaggcgccauuaacacaagccugcccuuccagaauauccacccgauuacgaucggcaagugcccuaaguaugugaaaucuaccaagcucagacuggcuacagggcuucggaacguucccagcauucagucccgcggacuguuuggcgccaucgccggguucaucgagggaggcuggaccgggaugguggacggaugguacggcuaucaucaccagaaugaacaaggcucuggguacgcugcggaucucaaaagcacacagaacgccauugacgagaucaccaauaaggucaacuccgugauugagaaaaugaauacgcaguuuacagcuguuggaaaggaguucaaccaccuggagaagagaaucgaaaaucuuaacaaaaagguggaugacggcuuccuggauauuuggaccuacaaugccgagcuccugguccugcucgaaaacgagcggacccuggacuaucaugauagcaaugugaaaaaccuuuacgagaagguccgcucucagcugaaaaacaaugccaaggaaaucgggaacggauguuuugaguucuaucacaagugcgacaauacauguauggaauccgugaaaaacggcaccuacgauuauccuaaguacagcgaggaagcuaaacucaauagagaggagaucgacgggguuaagcuggaaucuacacggauuuaucaaauccuugccauuuacuccacgguggcgagcucccugguccucgugguuucucugggcgcuaucagcuuuuggaugugcuccaacggaucucugcagugccgcauuuguaucuga

SEQ ID NO: 196339 - RNA, 1701 nt, Artificial Sequence; identical to SEQ ID NO: 194741
  derived and/or modified CDS sequence (opt5) from hemagglutinin__InfluenzaA__ADD74498

SEQ ID NO: 196340 - RNA, 1701 nt, Artificial Sequence
  derived and/or modified CDS sequence (opt5) from hemagglutinin__InfluenzaA__ADD74508
augaaggccauccuggugguccuccuguacaccuucgcuacagccaacgcggacacgcuuugcauuggcuaucacgcuaauaacagcaccgauacaguugacaccgugcuggagaaaaaugugacagucacccauuccguggaucuccuggaagacaagcacaacgggaaacuuuguaagcugagaggaguugcuccccuccaucugggcaaaugcaauaucgccggguggauucugggaaacccugagugugaaucucucagcacagccuccucuuggagcuacaucguggagaccuccucuagcgauaauggcacgugcuauccgggggacuuuauugauuacgaagaacugcgggagcagcuuuccagcgucucuuccuucgaacgcuuugagaucuuccccaagaccagcucuuggccuaaccacgacuccaauaagggagugacagccgcuuguccccaugccgaagcgaaaucuuuuuauaagaaccugaucuggcucguuaaaaagggcaauagcuacccuaaacuguccaagagcuauauuaacgauaagggcaaagaggugcuuguccugugggggauccaccaccccuccaccucugccgaccaacagagccucuaccagaaugcugaugccuacguguucgugggaacauccagauauagcaagaaauuuaagccugagauugcuauccggccgaaaguccgcgaccaggaaggcagaaugaacuacuauuggacccugguugagcccggggauaagauuacguucgaagccacaggaaaucugguggugccucgguacgcguuugccauggagcgcaacgcuggcucugggaucauuaucuccgacacccccguccaugacugcaacacaaccugucaaaccccuaaaggagccaucaauacaagccuccccuuccagaacauucacccgaucacgauuggcaagugcccuaaguaugugaaaucuaccaagcugagacuugcuacaggccugcggaauguucccagcauccagucccgcgggcucuuuggagccauugccggcuucaucgaagggggauggaccggcaugguggaugggugguacggauaucaucaccagaacgagcaaggcucuggcuacgcugcggaccugaaaagcacacagaaugccaucgaugagauuaccaacaaggucaauuccgugaucgaaaagaugaacacgcaguuuacagcuguugggaaggaguucaaucaccuugaaaagagaauugagaaccugaauaaaaagguggacgauggauuccucgacaucuggaccuacaacgccgaacugcugguccuccuggagaaugagcggacccuugauuaucaugacagcaacgugaaaaaucuguacgaaaagguccgcucucagcucaaaaacaacgccaaggagauuggcaauggguguuuugaguucuaucacaagugcgauaacacauguauggaguccgugaaaaauggaaccuacgacuauccuaaguacagcgaagaggcuaaacugaacagagaggaaaucgauggcguuaaacuugagucuacacggaucuaucaaauucuggccaucuacuccacgguggcgagcucccucguccuggugguuucucugggggcuauuagcuuuuggaugugcuccaauggcucucuccagugccgcaucuguauuuga

SEQ ID NO: 196341 - RNA, 1701 nt, Artificial Sequence
  derived and/or modified CDS sequence (opt5) from hemagglutinin__InfluenzaA__ADD74518
augaaggccauccuggugguccuccuguacaccuucgcuacagccaacgcggacacgcuuugcauuggcuaucacgcuaauaacagcaccgauacaguugacaccauccuggagaagaaugugacagugacccauuccgucaaccuccuggaagauaagcacaaugggaaacuuuguaagcugagaggaguggcuccccuccaucugggcaaaugcaacauugccggguggauccugggaaauccugagugugaaucucucagcacagccuccucuuggagcuacauuguugagaccuccucuagcgacaacggcacgugcuauccgggggauuuuaucgacuacgaagaacugcgggagcagcuuuccagcgugucuuccuucgaacgcuuugagaucuuccccaagaccagcucuuggccuaaucacgauuccaacaagggagucacagccgcuuguccccaugccggcgcgaaaucuuuuuauaagaaucugauuuggcucgugaaaaagggcaacagcuacccuaaacuguccaagagcuauaucaaugacaaggggaaagaaauucuuguucuguggggaauccaccaccccuccaccucugccgaucaacagagccucuaccagaacgcugacgccuacguguucgucggcacauccagauauagcaagaaauuuaagccugagauugcuauccggccgaaagugcgcgaucaggaggggagaaugaauuacuauuggacccugguggaacccggagacaagauuacguucgaggccacaggcaaccuggucguuccucgguacgcguuugccauggaacgcaacaccgggucuggaaucaucauuuccgauacacccgugcaugacugcaauaccaccugucaaacaccuaaaggcgcuaucaacacgagccuccccuuccagaauauucacccgaucaccauuggcaagugcccuaaguaugugaaaucuacaaagcugagacuugccaccgggcugcggaacguccccagcauccagucccgcggacucuuuggcgcuaucgccggguucauugagggaggcuggacagggaugguggacggaugguacggcuaucaucaccagaaugaacaaggcucuggguacgccgcugaucugaaaagcacccagaacgcgaucgacgagauuacgaauaagguuaacuccgugaucgagaaaaugaauacacaguuuaccgccgucggaaaggaguucaaccaccuugagaagagaauugaaaaucugaacaaaaagguggaugacggcuuccucgauaucuggaccuacaaugcugagcugcugguucuccuggaaaacgagcggacacuugacuaucaugauagcaaugugaaaaaccuguacgagaagguccgcucucagcucaaaaacaaugccaaggaaaucgggaacggauguuuugaguucuaucacaagugcgacaauaccuguauggaauccgugaaaaacggcacauacgauuauccuaaguacagcgaggaagccaaacugaauagagaggagauugacggggucaaacuugaaucuacgcggaucuaucaaauucuggcuaucuacuccaccguggccagcucccucguucugguggucucucugggcgcgauuagcuuuuggaugugcuccaacggaucucuccagugccgcaucuguauuuga

SEQ ID NO: 196342 - RNA, 1701 nt, Artificial Sequence
  derived and/or modified CDS sequence (opt5) from hemagglutinin__InfluenzaA__ADD74528
augaaggccauccuggugguccuccuguacaccuucgcuacagccaacgcggacacgcuuugcauuggcuaucacgcuaauaacagcaccgauacaguugacaccgugcuggagaaaaaugugacagucacccauuccgugaaccuccuggaagauaagcacaaugggaaacuuuguaagcugagaggaguugcuccccuccaucugggcaaaugcaacaucgccggguggauucugggaaauccugagugugaaucucucagcacagccuccucuuggagcuacaucguggagaccuccucuagcgacaacggcacgugcuauccgggggauuuuauuaauuacgaagaacugcgggagcagcuuuccagcgucucuuccuucgaacgcuuugagaucuuccccaagaccagcucuuggccuaaccacgacuccaauaagggagugacagccgcuuguccccaugccggcgcgaaaucuuuuuauaagaaccugaucuggcucguuaaaaagggcaauagcuacccuaaacuguccaagagcuauauuaacgauaaggggaaagaagugcuuguccuguggggaauccaccaccccuccaccucugccgaccaacagagccucuaccagaaugcugaugccuacguguucgugggcacauccagauauagcaagaaauuucagccugagauugcuauccggccgaagguccgcgaccaagaggggagaaugaacuacuauuggacccugguugaacccggagauaaaauuacguucgaggccacaggcaaccugguggugccucgguacgcguuugccauggaacgcaaugcugggucuggaaucauuaucuccgacacccccguccaugauugcaacacaaccugucagaccccuaagggcgccaucaauacaagccuccccuuccagaacauucacccgaucacgauuggcaaaugcccuaaguaugugaagucuaccaaacugagacuugcuacagggcugcggaauguucccagcauccagucccgcggacucuuuggcgccauugccggguucaucgagggaggcuggaccgggaugguggacggaugguacggcuaucaucaccaaaacgaacagggcucuggguacgcugcggaccuuaagagcacacagaaugccaucgauaaaauuaccaacaaggucaauuccgugaucgagaaaaugaacacgcaguuuacagcuguuggaaaggaguucaaucaccuugaaaagagaauugagaaccugaauaaaaagguggacgauggcuuccucgacaucuggaccuacaacgccgaacugcugguccuccuggagaaugaacggacccuugauuaucaugacagcaacgugaaaaaccuguacgagaagguccgcucucaacucaaaaauaacgccaaggagauugggaauggauguuuugaguucuaucacaagugcgauaacacauguauggaguccgugaaaaauggcaccuacgacuauccuaaguacagcgaagaggcuaaacugaacagagaagagaucgaugggguuaagcuggagucuacacggaucuaucagauucuggccaucuacuccacgguggcgagcucccucguccuggugguuucucugggcgcuauuagcuuuuggaugugcuccaauggaucucuccagugccgcaucuguauuuga

SEQ ID NO: 196343 - RNA, 1701 nt, Artificial Sequence
  derived and/or modified CDS sequence (opt5) from hemagglutinin__InfluenzaA__ADD74538
augaaggccauccuggugguccuccuguacaccuucgcuacagccaacgcggacacgcuuugcauuggcuaucacgcuaauaacagcaccgauacaguugacaccgugcuggagaaaaaugugacagucacccauuccgugaaccuccuggaagauaagcacaaugggaaacuuuguagacugcggggaguugcgccccuccaucugggcaagugcaacaucgccggguggauucugggaaauccugagugugaaucucucagcacagcuuccucuuggagcuacaucguggagaccuccucuagcgacaacggcacgugcuauccgggggauuuuauugacuacgaagaacugcgcgagcagcuuuccagcgucucuuccuucgaaagauuugagaucuuccccaaaaccagcucuuggccuaaucacgauuccaacaagggagugacagccgcuuguccccaugccggcgccaagagcuuuuauaaaaaucugaucuggcucguuaagaaaggcaacucuuacccuaagcuguccaaaagcuauauuaaugacaaggggaaggaagugcuuguccuguggggaauccaccaccccuccaccucugccgaucaacagagccucuaccagaacgcugacgccuacguguucgugggcacaucccgguauagcaaaaaguuuaaaccugagauugcuauccgcccgaaggucagagaucaggaggggcggaugaauuacuauuggacccugguugaacccggagacaaaauuacguucgaggccacaggcaaccugguggugccucgcuacgcguuugccauggaaagaaacgcugggucuggaaucauuaucuccgauacccccgucuaugacugcaauacaaccugucaaaccccuaagggcgccaucaacacaagccuccccuuccagaauauucauccgaucacgauuggcaaaugcccuaaguacgugaagucuaccaaacugcggcuugcuacagggcugcgcaacguucccagcauccaguccagaggacucuuuggcgccauugccggguucaucgagggaggcuggaccgggaugguggacggaugguauggcuaccaccaucagaaugaacaaggcucuggguacgcugcggaucuuaagagcacacagaacgccaucgacgagauuaccaauaaagucaacuccgugaucgagaagaugaauacgcaguuuacagcuguuggaaaagaguucaaccaccuggagaagcggauugaaaaucugaacaagaaaguggaugacggcuuccucgauaucuggaccuauaaugccgagcugcugguccuccuggaaaacgagcgcacccuugacuaccacgauagcaaugugaagaaccuguaugagaaagucagaucucagcucaagaacaaugccaaagaaauugggaacggauguuuugaguucuaccauaagugcgacaauacauguauggaauccgugaagaacggcaccuaugauuacccuaaauauagcgaggaagcuaagcugaaucgggaggagaucgacgggguuaaacuugaaucuacacgcaucuaccaaauucuggccaucuacuccacgguggcgagcucccucguccuggugguuucucugggcgcuauuagcuuuuggaugugcuccaacggaucucuccagugcagaaucuguauuuga

SEQ ID NO: 196344 - RNA, 1701 nt, Artificial Sequence; identical to SEQ ID NO: 196338
  derived and/or modified CDS sequence (opt5) from hemagglutinin__InfluenzaA__ADD74548

SEQ ID NO: 196345 - RNA, 1701 nt, Artificial Sequence; identical to SEQ ID NO: 195905
  derived and/or modified CDS sequence (opt5) from hemagglutinin__InfluenzaA__ADD74558

SEQ ID NO: 196346 - RNA, 1701 nt, Artificial Sequence; identical to SEQ ID NO: 196293
  derived and/or modified CDS sequence (opt5) from hemagglutinin__InfluenzaA__ADD74568

SEQ ID NO: 196347 - RNA, 1701 nt, Artificial Sequence
  derived and/or modified CDS sequence (opt5) from hemagglutinin__InfluenzaA__ADD74578
augaaggccauccuggugguccuccuguacaccuucgcuacagccaacgcggacacgcuuugcauuggcuaucacgcuaauaacagcaccgauacaguugacaccgugcuggagaagaaugugacagucacccauuccgugaaccuccuggaagauaagcacaaugggaaacuuuguaagcugagaggaguugcuccccuccaucugggcaaaugcaacaucgccggguggauucugggaaauccugagugugaaucucucagcacauccucuagcugguccuacaucguggagaccucuagcuccgacaacggcacgugcuauccgggggauuuuauugacuacgaagaacugcgggagcagcuuagcucugucuccagcuucgaacgcuuugagaucuuccccaagaccucuuccuggccuaaucacgauagcaacaagggagugacagccgccuguccccaugcuggcgccaaaucuuuuuauaagaaucugaucuggcucguuaaaaagggcaacuccuacccuaaacugagcaaguccuauauuaaugacaaggggaaagaagugcuuguccuguggggaauccaccaccccucuaccagcacagaucaacagucccucuaccagaacgcggacgccuacguguucgugggcaccagcagauauucuaagaaauuuaagccugagauugcuauccggccgaaaguccgcgaucaggaggggagaaugaauuacuauuggacgcugguugaacccggagacaagauuacauucgaggccaccggcaaccugguggugccucgguacgcuuuugccauggaacgcaacgcgggguccggaaucauuaucagcgauacacccguccaugacugcaauaccaccugucaaacaccuaaaggcgccaucaacacgucucuccccuuccagaauauucacccgaucaccauuggcaagugcccuaaguaugugaaaagcacaaagcugagacuugcuaccgggcugcggaacguucccuccauccagucucgcggacucuuuggcgccauugcuggguucaucgagggaggcuggacagggaugguggacggaugguacggcuaucaucaccagaaugaacaaggcagcggguacgccgccgaucugaaauccacccagaacgcuaucgacgagauuacgaauaaggucaacagcgugaucgagaaaaugaauacacaguuuaccgcgguuggaaaggaguucaaccaccuugagaagagaauugaaaaucugaacaaaaagguggaugacggcuuccucgauaucuggaccuacaaugccgagcugcugguccuccuggaaaacgagcggacacuugacuaucaugauucuaaugugaaaaaccuguacgagaagguccgcucccagcucaaaaacaaugcuaaggaaauugggaacggauguuuugaguucuaucacaagugcgacaauaccuguauggaaagcgugaaaaacggcacauacgauuauccuaaguacucugaggaagccaaacugaauagagaggagaucgacgggguuaaacuugaauccacgcggaucuaucaaauucuggccaucuacagcaccguggcuuccucucucguccuggugguuagccugggcgccauuuccuuuuggaugugcucuaacggaagccuccagugccgcaucuguauuuga

SEQ ID NO: 196348 - RNA, 1701 nt, Artificial Sequence
  derived and/or modified CDS sequence (opt5) from hemagglutinin__InfluenzaA__ADD74588
augaaggccauccuggugguccuccuguacaccuucgcuacagccaacgcggacacgcuuugcauuggcuaucacgcuaauaacagcaccgauacaguugacaccgugcuggagaaaaaugugacagucacccauuccgugaaccuccuggaagauaagcacaaugggaaacuuuguaagcugagaggaguugcuccccuccaucugggcaaaugcaacaucgccggguggauucugggaaauccugagugugaaucucucagcacagccuccucuuggagcuacaucguggagaccuccucuagcgacaacggcacgugcuauccgggggauuuuauugacuacgaagaacugcgggagcagcuuuccagcgucucuuccuucgaacgcuuugagaucuuccccaagaccagcucuuggccuaaucacgauuccaacaagggagugacagccgcuuguccccaugccggcgcgaaaucuuuuuauaagaaucugaucuggcucguuaaaaagggcaacagcuacccuaaacuguccaagagcuauauuaaugacaaggggaaagaagugcuuguccuguggggaauccaccaccccuccaccucugauggccaacagagccucuaccagaacgccgacgcuuacguguucguggggacauccagauauagcaagaaauuuaagccugagauugccauccggccgaaaguccgcgaucaggagggaagaaugaauuacuauuggacccugguugaacccggcgacaagauuacguucgaggcuacagggaaccugguggugccucgguacgccuuugcgauggaacgcaacgccggaucuggcaucauuaucuccgauacccccguccaugacugcaauacaaccugucaaaccccuaaaggcgcuaucaacacaagccuccccuuccagaauauucacccgaucacgauugggaagugcccuaaguaugugaaaucuaccaagcugagacuugccacaggacugcggaacguucccagcauccagucccgcggccucuuuggggcuauugccggauucaucgagggcggguggaccggaaugguggacggcugguacggcuaucaucaccagaaugaacaagggucuggauacgccgcugaucugaaaagcacacagaacgcgaucgacgagauuaccaauaaggucaacuccgugaucgagaaaaugaauacgcaguuuacagccguuggcaaggaguucaaccaccuugagaagagaauugaaaaucugaacaaaaagguggaugacggguuccucgauaucuggaccuacaaugcugagcugcugguccuccuggaaaacgagcggacccuugacuaucaugauagcaaugugaaaaaccuguacgagaagguccgcucucagcucaaaaacaaugccaaggaaauuggaaacggcuguuuugaguucuaucacaagugcgacaauacauguauggaauccgugaaaaacgggaccuacgauuauccuaaguacagcaaagaggccaagcugaauagagaagagaucgacggcguuaaacuugagucuacacggaucuaucaaauucuggcuaucuacuccacgguggccagcucccucguccuggugguuucucugggagcgauuagcuuuuggaugugcuccaacggcucucuccagugccgcaucuguauuuga

SEQ ID NO: 196349 - RNA, 1701 nt, Artificial Sequence; identical to SEQ ID NO: 196293
  derived and/or modified CDS sequence (opt5) from hemagglutinin__InfluenzaA__ADD74598

SEQ ID NO: 196350 - RNA, 1701 nt, Artificial Sequence; identical to SEQ ID NO: 196293
  derived and/or modified CDS sequence (opt5) from hemagglutinin__InfluenzaA__ADD74608

SEQ ID NO: 196351 - RNA, 1701 nt, Artificial Sequence; identical to SEQ ID NO: 195905
  derived and/or modified CDS sequence (opt5) from hemagglutinin__InfluenzaA__ADD74618

SEQ ID NO: 196352 - RNA, 1701 nt, Artificial Sequence
  derived and/or modified CDS sequence (opt5) from hemagglutinin__InfluenzaA__ADD74628
augaaggccauccuggugguccuccuguacaccuucgcuacagccaacgcggacacgcuuugcauuggcuaucacgcuaauaacagcaccgauacaguugacaccauccuggagaaaaaugugacagugacccauuccgucaaccuccuggaagauaagcacaaugggaaacuuuguaagcugagaggaguggcuccccuccaucugggcaaaugcaacauugccggguggauccugggaaauccugagugugaaucucucagcacagccuccucuuggagcuacauuguugagaccuccucuagcgacaacggcacgugcuauccgggggauuuuaucgacuacgaagaacugcgggagcagcuuuccagcgugucuuccuucgaacgcuuugagaucuuccccaagaccagcucuuggccuaaucacgauuccaacaagggagucacagccgcuuguccccaugccggcgcgaaaucuuuuuauaagaaucugauuuggcucgugaaaaagggcaacagcuacccuaaacuguccaagagcuauaucaaugacaaggggaaagaaauucuuguucuguggggaauccaccaccccuccaccucugccgaucaacagagccucuaccagaacgcugacgccuacguguucgucggcacauccagauauagcaagaaauuuaagccugagauugcuauccggccgaaagugcgcgaucaggaggggagaaugaauuacuauuggacccugguggaacccggagacaagauuacguucgaggccacaggcaaccuggucguuccucgguacgcguuugccauggaaaagaacgcugggucuggaaucaucauuuccgauacccccgugcaugacugcaauacaaccugucaaaccccuaagggcgccaucaacacaagccuccccuuccagaauauucacccgaucacgauuggcaagugcccuaaauaugugaagucuaccaaacugcgccuugcuacagggcugagaaacguccccagcauccagucccggggacucuuuggcgccaucgccggguucauugagggaggcuggaccgggaugguggacggaugguacggcuaucaucaccagaaugaacaaggcucuggguacgcugcggaucugaaaagcacacagaacgccaucgacgagauuaccaauaaaguuaacuccgugaucgagaagaugaauacgcaguuuacagcugucggaaaggaguucaaccaccuugagaaacgcauugaaaaucugaacaagaaaguggaugacggcuuccucgauaucuggaccuacaaugccgagcugcugguucuccuggaaaacgagagaacccuugacuaucaugauagcaaugugaagaaccuguacgagaaaguccggucucagcucaagaacaaugccaaggaaaucgggaacggauguuuugaguucuaucacaaaugcgacaauacauguauggaauccgugaagaacggcaccuacgauuauccuaaauacagcgaggaagcuaagcugaaucgcgaggagauugacggggucaaacuugaaucuacaagaaucuaucaaauucuggccaucuacuccacgguggcgagcucccucguucugguggucucucugggcgcuauuagcuuuuggaugugcuccaacggaucucuccagugccggaucuguauuuga

SEQ ID NO: 196353 - RNA, 1701 nt, Artificial Sequence; identical to SEQ ID NO: 195842
  derived and/or modified CDS sequence (opt5) from hemagglutinin__InfluenzaA__ADD74648

SEQ ID NO: 196354 - RNA, 1701 nt, Artificial Sequence
  derived and/or modified CDS sequence (opt5) from hemagglutinin__InfluenzaA__ADD74658
augaaggccauccuggugguccuccuguacaccuucgcuacagccaacgcggacacgcuuugcauuggcuaucacgcuaauaacagcaccgauacaguugacaccgugcuggagaaaaaugugacagucacccauuccgugaaccuccuggaagauaagcacaaugggaaacuuuguaagcugagaggaguugcuccccuccaucugggcaaaugcaacaucgccggguggauucugggaaauccugagugugaaucucucagcacagccuccucuuggagcuacaucguggagaccuccucuagcgacaacggcacgugcuauccgggggauuuuauugacuacgaagaacugcgggagcagcuuuccagcgucucuuccuucgaacgcuuugagaucuuccccaagaccagcucuuggccuaaucacgauuccaacaagggagugacagccgcuuguccccaugccggcgcgaaaucuuuuuauaagaaucugaucuggcucguuaaaaagggcaacagcuacccuaaacuguccaagagcuauauuaaugacaaggggaaagaagugcuuguccuguggggaauccaccaccccuccaccucugccgaucaacagagccucuaccagaacgcugacuccuacguguucgugggcacaagcagauauucuaagaaauuuaagccugagauugccauccggccgaaaguccgcgaucaggaggggagaaugaauuacuauuggacccugguugaacccggagacaagauuacguucgaggcuacaggcaaccugguggugccucgguacgccuuugcgauggaacgcaacgccggguccggaaucauuaucagcgauacccccguccaugacugcaauacaaccugucaaaccccugagggcgcuaucaacacaucucuccccuuccagaauauucacccgaucacgauuggcaaaugcccuaaguauguuaagagcaccaaacugagacuugccacagggcugcggaacgugcccuccauccagucucgcggacucuuuggcgcuauugccggguucaucgaaggaggcuggaccgggaugguggacggaugguacggcuaucaucaccagaaugagcaaggcagcggguacgccgcugaucugaaguccacacagaacgcgaucgacgagauuaccaauaaagucaacagcgugaucgaaaagaugaauacgcaguuuacagccguuggaaaagaguucaaccaccuugaaaagagaauugagaaucugaacaagaaaguggaugacggcuuccucgauaucuggaccuacaaugcugaacugcugguccuccuggagaacgagcggacccuugacuaucaugauucuaaugugaagaaccuguacgaaaaaguccgcucccagcucaagaacaaugccaaagagauugggaacggauguuuugaguucuaucacaagugcgacaauacauguauggagagcgugaagaacggcaccuacgauuauccuaaauacucugaagaggccaagcugaauagagaggaaaucgacgggguuaaacuugaguccacacggaucuaucaaauucuggcuaucuacagcacgguggccuccucucucguccuggugguuagccugggcgcgauuuccuuuuggaugugcucuaacggaagccuccagugccgcaucuguauuuga

SEQ ID NO: 196355 - RNA, 1701 nt, Artificial Sequence; identical to SEQ ID NO: 196293
  derived and/or modified CDS sequence (opt5) from hemagglutinin__InfluenzaA__ADD74668

SEQ ID NO: 196356 - RNA, 1701 nt, Artificial Sequence; identical to SEQ ID NO: 196333
  derived and/or modified CDS sequence (opt5) from hemagglutinin__InfluenzaA__ADD74678

SEQ ID NO: 196357 - RNA, 1701 nt, Artificial Sequence; identical to SEQ ID NO: 196293
  derived and/or modified CDS sequence (opt5) from hemagglutinin__InfluenzaA__ADD74688

SEQ ID NO: 196358 - RNA, 1701 nt, Artificial Sequence
  derived and/or modified CDS sequence (opt5) from hemagglutinin__InfluenzaA__ADD74698
augaaggccauccuggugguccuccuguacaccuucgcuacagccaacgcggacacgcuuugcauuggcuaucacgcuaauaacagcaccgauacaguugacaccgugcuggagaaaaaugugacagucacccauuccgugaaccuccuggaagauaagcacaaugggaaacuuuguaagcugagaggaguugcuccccuccaucugggcaaaugcaacaucgccggguggauucugggaaauccugagugugaaucucucagcacagccuccucuuggagcuacaucguggagaccuccucuagcgacaacggcacgugcuauccgggggauuuuauuaauuacgaagaacugcgggagcagcuuuccagcgucucuuccuucgaacgcuuugagaucuuccccaagaccagcucuuggccuaaccacgacuccaauaagggagugacagccgcuuguccccaugccggcgcgaaaucuuuuuauaagaaccugaucuggcucguuaaaaagggcaauagcuacccuaaacuguccaagagcuauauuaacgauaaggggaaagaagugcuuguccuguggggaauccaccaccccuccaccucugccgaccaacagagccucuaccagaaugcugaugccuacguguucgugggcacauccagauauagcaagaaauuuaagccugagauugcuauccggccgaaaguccgcgaccaggaggggagaaugaacuacuauuggacccugguugaacccggagauaagauuacguucgaggccacaggcaaccugguggugccucgguacgcguuugccauggaacgcaaugcugggucuggaaucauuaucuccgacacccccguccaugauugcaacacaaccugucaaaccccuaaaggcgccaucaauacaagccuccccuuccagaacauucacccgaucacgauuggcaagugcccuaaguaugugaaaucuaccaagcugagacuugcuacagggcugcggaauguucccagcauccagucccgcggacucuuuggcgccauugccggguucaucgagggaggcuggaccgggaugguggacggaugguacggcuaucaucaccagaacgaacaaggcucuggguacgcugcggaccugaaaagcacacagaaugccaucgauaagauuaccaacaaagucaauuccgugaucgagaagaugaacacgcaguuuacagcuguuggaaaggaguucaaucaccuugagaaaagaauugagaaccugaauaagaaaguggacgauggcuuccucgacaucuggaccuacaacgccgaacugcugguccuccuggagaaugaacggacccuugauuaucaugacagcaacgugaagaaccuguacgagaaaguccgcaaucagcucaagaacaaugccaaggagauugggaacggauguuuugaguucuaucacaaaugcgauaauacauguauggaaucugugaagaacggcaccuacgacuauccuaaauacuccgaagaggcuaagcugaauagagaagagaucgaugggguuaaacuugagagcacacggaucuaucaaauucuggccaucuacucuacgguggcguccagccucguccuggugguuucccugggcgcuauuucuuuuuggaugugcagcaacggaucccuccagugccgcaucuguauuuga

SEQ ID NO: 196359 - RNA, 1701 nt, Artificial Sequence; identical to SEQ ID NO: 196293
  derived and/or modified CDS sequence (opt5) from hemagglutinin__InfluenzaA__ADD74708

SEQ ID NO: 196360 - RNA, 1701 nt, Artificial Sequence
  derived and/or modified CDS sequence (opt5) from hemagglutinin__InfluenzaA__ADD74728
augaaggccauccuggugguccuccuguacaccuucgcuacagccaacgcggacacgcuuugcauuggcuaucacgcuaauaacagcaccgauacaguugacaccgugcuggagaaaaaugugacagucacccauuccgugaaccuccuggaagauaagcacaaugggaaacuuuguaagcugagaggaguugcuccccuccaucugggcaaaugcaacaucgccggguggauucugggaaauccugagugugaaucucucagcacagccuccucuuggagcuacaucguggagaccuccucuagcgacaacggcacgugcuauccgggggauuuuauugacuacgaagaacugcgggagcagcuuuccagcgucucuuccuucgaacgcuuugagaucuuccccaagaccagcucuuggccugaucacgacuccaauaagggagugacagccgcuuguccccaugccggcgcgaaaucuuuuuauaagaaccugaucuggcucguuaaaaagggcaauagcuacccuaaacuguccaagagcuauauuaacgauaaggggaaagaagugcuuguccuguggggaauccaccaccccuccaccucugccgaccaacagagccucuaccagaaugcugaugccuacguguucgugggcacauccagauauagcaagaaauuuaagccugagauugcuauccggccgaaaguccgcgaccaggaggggagaaugaacuacuauuggacccugguugaacccggagauaagauuacguucgaggccacaggcaaucugguggugccucgguacgcguuugccauggaacgcaacgcugggucuggaaucauuaucuccgacacccccguccaugacugcaacacaaccugucaaaccccuaaaggcgccaucaauacaagccuccccuuccagaacauucacccgaucacgauuggcaagugcccuaaguaugugaaaucuaccaagcugagacuugcuacagggcugcggaauguucccagcauccagucccgcggacucuuuggcgccauugccggguucaucgagggaggcuggaccgggaugguggauggaugguacggcuaucaucaccagaacgaacaaggcucuggguacgcugcggaccugaaaagcacacagaaugccaucgauaagauuaccaacaaagucaauuccgugaucgagaagaugaacacgcaguuuacagcuguuggaaaggaguucaaucaccuugagaaaagaauugagaaccugaauaagaaaguggacgauggcuuccucgacaucuggaccuacaacgccgaacugcugguccuccuggagaaugaacggacccuugauuaucaugacagcaacgugaagaaucuguacgagaaaguccgcucucagcucaagaacaacgccaaggagauugggaauggauguuuugaguucuaucacaaaugcgauaacacauguauggaauccgugaagaauggcaccuacgacuauccuaaauacagcgaagaggcuaagcugaacagagaagagaucgaugggguuaaacuugagucuacacggaucuaucaaauucuggccaucuacuccacgguggcgagcuccgucgugcucguugugucucugggcgcuauuagcuuuuggaugugcuccaauggaucucugcagugccgcaucuguauuuga

SEQ ID NO: 196361 - RNA, 1701 nt, Artificial Sequence
  derived and/or modified CDS sequence (opt5) from hemagglutinin__InfluenzaA__ADD74738
augaaggccauccuggugguccuccuguacaccuucgcuacagccaacgcggacacgcuuugcauuggcuaucacgcuaauaacagcaccgauacaguugacaccgugcuggagaaaaaugugacagucacccauuccgugaaccuccuggaagauaagcacaaugggaaacuuuguaagcugagaggaguugcuccccuccaucugggcaaaugcaacaucgccggguggauucugggaaauccugagugugaaucucucagcacagcccgguccuggucuuacaucguggagaccagcuccucugacaacggcacgugcuauccgggggauuuuauugacuacgaagaacugcgcgagcagcuuagcuccgucagcucuuucgaaagauuugagaucuuccccaagaccuccagcuggccuaaucacgauucuaacaagggagugacagccgcuuguccccaugccggcgcgaaauccuuuuauaagaaucugaucuggcucguuaaaaagggcaacagcuacccuaaacugucuaaguccuauauuaaugacaaggggaaagaagugcuuguccuguggggaauccaccaccccagcaccuccgccgaucaacagucucucuaccagaacgcugacgccuacguguucgugggcacaagcggguauuccaagaaauuuaagccugagauugcuauccggccgaaaguccgcgaucaggagggaagaaugaauuacuauuggacccugguugaacccggcgacaagauuacguucgaggccacagggaaccugguggugccucgguacgcguuugccauggaacgcaacgcuggaagcggcaucauuaucucugauacccccguccaugacugcaauacaaccugucaaaccccuaaaggcgccaucaacacaucccuccccuuccagaauauucacccgaucacgauugggaagugcccuaaguaugugaaaagcaccaagcugagacuugcuacaggacugcggaacguucccucuauccagagccgcggccucuuuggggccauugccggauucaucgagggcggguggaccggaaugguggacggcugguacggcuaucaucaccagaaugaacaaggguccggauacgcugcggaucugaaaucuacacagaacgccaucgacaagauuaccaauaaagucaacagcgugaucgagaagaugaauacgcaguuuacagcuguuggcaaggaguucaaccaccuugagaaaagaauugagaaucugaacaagaaaguggaugacggguuccucgauaucuggaccuacaaugccgaacugcugguccuccuggagaacgaacggacccuugacuaucaugauuccaaugugaagaaccuguacgagaaaguccgcagccagcucaagaacaaugccaaggagauuggaaacggcuguuuugaguucuaucacaaaugcgacaauacauguauggaaucugugaagaacgggaccuacgauuauccuaaauacuccgaagaggcuaagcugaauagagaagagaucgacggcguuaaacuugagagcacacggaucuaucaaauucuggccaucuacucuacgguggcguccagccucguccuggugguuucccugggagcuauuucuuuuuggaugugcagcaacggcucccuccagugccgcaucuguauuuga

SEQ ID NO: 196362 - RNA, 1701 nt, Artificial Sequence; identical to SEQ ID NO: 195905
  derived and/or modified CDS sequence (opt5) from hemagglutinin__InfluenzaA__ADD74748

SEQ ID NO: 196363 - RNA, 1701 nt, Artificial Sequence; identical to SEQ ID NO: 195905
  derived and/or modified CDS sequence (opt5) from hemagglutinin__InfluenzaA__ADD74758

SEQ ID NO: 196364 - RNA, 1701 nt, Artificial Sequence
  derived and/or modified CDS sequence (opt5) from hemagglutinin__InfluenzaA__ADD74768
augaaggccauccuggugguccuccuguacaccuucgcuacagccaacgcggacacgcuuugcauuggcuaucacgcuaauaacagcaccgauacaguugacaccgugcuggagaaaaaugugacagucacccauuccgugaaccuccuggaagauaagcacaaugggaaacuuuguaagcugagaggaguugcuccccuccaucugggcaaaugcaacaucgccggguggauucugggaaauccugagugugaaucucucagcacagccuccucuuggagcuacaucguggagaccuccucuagcgacaacggcacgugcuauccgggggauuuuauugacuacgaagaacugcgggagcagcuuuccagcgucucuuccuucgaacgcuuugagaucuuccccaagaccagcucuuggccuaaucacgauuccaacaagggagugacagccgcuuguccccaugccggcgcgaaaucuuuuuauaagaaucugaucuggcucguuaaaaagggcaacagcuacccuaaacuguccaagagcuauauuaaugacaaggggaaagaagugcuuguccuguggggaauccaccaccccuccaccucugccgaucaacagagccucuaccagaacgcugacgccuacguguucgugggcacauccagauauagcaagaaauuuaagccugagauugcuauccggccgaaaguccgcgaucaggaggggagaaugucuuacuauuggacccugguugaacccggagacaagauuacguucgaggccacaggcaaucugguggugccucgguacgcguuugccauggaacgcaacgcuggguccggaaucauuaucagcgauacccccguccaugacugcaacacaaccugucaaaccccuaaaggcgccaucaauacaucucuccccuuccagaacauucacccgaucacgauuggcaagugcccuaaguaugugaaaagcaccaagcugagacuugcuacagggcugcggaauguucccuccauccagucucgcggacucuuuggcgccauugccggguucaucgagggaggcuggaccgggaugguggacggaugguacggcuaucaucaccagaacgaacaaggcagcggguacgcugcggaucugaaauccacacagaaugccaucgacaagauuaccaacaaagucaauagcgugaucgagaagaugaacacgcaguuuacagcuguuggaaaggaguucaaucaccuugagaaaagaauugagaaccugaauaagaaaguggaugacggcuuccucgauaucuggaccuacaacgccgaacugcugguccuccuggagaaugaacggacccuugacuaucaugauucuaacgugaagaaucuguacgagaaaguccgcucccagcucaagaacaacgccaaggagauugggaauggauguuuugaguucuaucacaaaugcgacaacacauguauggaaagcgugaagaauggcaccuacgauuauccuaaauacucugaagaggcuaagcugaacagagaagagaucgacgggguuaaacuugaguccacacggaucuaucaaauucuggccaucuacagcacgguggcguccucucucguccuggugguuagccugggcgcuauuuccuuuuggaugugcucuaauggaagccuccagugccgcaucuguauuuga

SEQ ID NO: 196365 - RNA, 1701 nt, Artificial Sequence; identical to SEQ ID NO: 195905
  derived and/or modified CDS sequence (opt5) from hemagglutinin__InfluenzaA__ADD74778

SEQ ID NO: 196366 - RNA, 1701 nt, Artificial Sequence; identical to SEQ ID NO: 196293
  derived and/or modified CDS sequence (opt5) from hemagglutinin__InfluenzaA__ADD74788

SEQ ID NO: 196367 - RNA, 1701 nt, Artificial Sequence; identical to SEQ ID NO: 196293
  derived and/or modified CDS sequence (opt5) from hemagglutinin__InfluenzaA__ADD74798

SEQ ID NO: 196368 - RNA, 1701 nt, Artificial Sequence
  derived and/or modified CDS sequence (opt5) from hemagglutinin__InfluenzaA__ADD74808
augaaggccauccuggugguccuccuguacaccuucgcuacagccaacgcggacacgcuuugcauuggcuaucacgcuaauaacagcaccgauacaguugacaccgugcuggagaaaaaugugacagucacccauuccgugaacauccucgaagauaagcacaaugggaaacuguguaaacuuagaggaguugcuccccugcaucucggcaagugcaacauugccggguggauccugggaaauccugagugugaaucucugagcacagccuccucuuggagcuacauuguggagaccuccucuagcgacaacggcacgugcuauccgggggauuuuaucgacuacgaagaacuccgggagcagcuguccagcgucucuuccuucgaacgcuuugagaucuuccccaagaccagcucuuggccuaaucacgauuccaacaagggagugacagccgcuuguccccaugccggcgcgaaaucuuuuuauaagaaucuuauuuggcugguuaaaaagggcaacagcuacccuaaacucuccaagagcuauaucaaugacaaggggaaagaagugcugguccuuuggggcauucaccaccccuccaccucugccgaucaacagagccuguaccagaacgcugacgccuacguguucgugggauccagcagauauucuaagaaauuuaagccugagaucgcuauucggccgaaaguccgcgaucaggaggggagaaugaauuacuauuggacacucguugaacccggagacaagaucaccuucgaggccacgggcaaccugguggugccucgguacgcguuugccauggaacgcaacgcuggguccggaauuaucaucagcgauacacccguccaugacugcaauaccacaugucaaaccccuaaaggcgccauuaacaccucucugcccuuccagaauauccacccgauuacaaucggcaagugcccuaaguaugugaaaagcacgaagcucagacuggcuaccgggcuucggaacguucccuccauucagucucgcggacuguuuggcgccaucgccggguucaucgagggaggcuggacagggaugguggacggaugguacggcuaucaucaccagaaugaacaaggcagcggguacgcugcggaucucaaauccacccagaacgccauugacgagaucacaaauaaggucaacagcgugauugagaaaaugaauacccaguuuacggcuguuggaaaggaguucaaccaccuggagaagagaaucgaaaaucuuaacaaaaagguggaugacggcuuccuggauauuuggacauacaaugccgagcuccugguccugcucgaaaacgagcggacccuggacuaucaugauucuaaugugaaaaaccuuuacgagaagguccgcucccagcugaaaaacaaugccaaggaaguggggaacggauguuuugaguucuaucacaagugcgacaauaccuguauggaaagcguuaaaaacggcacauacgauuauccuaaguacucugaggaagcuaaacucaauagagaggagaucgacggggugaagcuggaauccacccggaucuaucaaauucuugccaucuacagcacagcggcuuccucucugguccucgugguuagccugggcgccauuuccuuuuggaugugcucuaacggaagccugcagugccgcaucuguauuuga

SEQ ID NO: 196369 - RNA, 1701 nt, Artificial Sequence
  derived and/or modified CDS sequence (opt5) from hemagglutinin__InfluenzaA__ADD74818
augaaggccauccuggugguccuccuguacaccuucgcuacagccaacgcggacacgcuuugcauuggcuaucacgcuaauaacagcaccgauacaguugacaccgugcuggagaaaaaugugacagucacccauuccgugaacauccucgaagauaagcacaaugggaaacuguguaaacuuagaggaguugcuccccugcaucucggcaagugcaacauugccggguggauccugggaaauccugagugugaaucucugagcacagccuccucuuggagcuacauuguggagaccuccucuagcgacaacggcacgugcuauccgggggauuuuaucgacuacgaagaacuccgggagcagcuguccagcgucucuuccuucgaacgcuuugagaucuuccccaagaccagcucuuggccuaaucacgauuccaacaagggagugacagccgcuuguccccaugccggcgcgaaaucuuuuuauaagaaucuuauuuggcugguuaaaaagggcaacagcuacccuaaacucuccaagagcuauaucaaugacaaggggaaagaagugcugguccuuuggggcauucaccaccccuccaccucugccgaucaacagagccuguaccagaacgcugacgccuacguguucgugggaacauccagauauagcaagaaauuuaagccugagaucgcuauucggccgaaaguccgcgaucaggaggggagaaugaauuaccauuggacccucguugaacccggagacaagaucacguucgaggccacaggcaaccugguggugccucgguaugcguuugccauggaacgcaacgcugggucuggaauuaucaucuccgauacccccguccacgacugcaauacaaccugucaaaccccuaaaggcgccauuaacacaagccugcccuuccagaauauccauccgauuacgaucggcaagugcccuaaguacgugaaaucuaccaagcucagacuggcuacagggcuucggaacguucccagcauucagucccgcggacuguuuggcgccaucgccggguucaucgagggaggcuggaccgggaugguggacggaugguauggcuaccaccaccagaaugaacaaggcucuggguaugcugcggaucucaaaagcacacagaacgccauugacgagaucaccaauaaggucaacuccgugauugagaaaaugaauacgcaguuuacagcuguuggaaaggaguucaaccaucuggagaagagaaucgaaaaucuuaacaaaaagguggaugacggcuuccuggauauuuggaccuacaaugccgagcuccugguccugcucgaaaacgagcggacccuggacuaccacgauagcaaugugaaaaaccuuuaugagaagguccgcucucagcugaaaaacaaugccaaggaaaucgggaacggauguuuugaguucuaccauaagugcgacaauacauguauggaauccgugaaaaacggcaccuaugauuacccuaaguauagcgaggaagcuaaacucaauagagaggagaucgacgggguuaagcuggaaucuacacggauuuaccaaauccuugccauuuauuccacgguggcgagcucccugguccucgugguuucucugggcgcuaucagcuuuuggaugugcuccaacggaucucugcagugccgcauuuguaucuga

SEQ ID NO: 196370 - RNA, 1701 nt, Artificial Sequence
  derived and/or modified CDS sequence (opt5) from hemagglutinin__InfluenzaA__ADD74838
augaaggccauccuggugguccuccuguacaccuucgcuacagccaacgcggacacgcuuugcauuggcuaucacgcuaauaacagcaccgauacaguugacaccgugcuggagaaaaaugugacagucacccauuccgugaaccuccuggaagauaagcacaaugggaaacuuuguaagcugagaggaguugcuccccuccaucugggcaaaugcaacaucgccggguggauucugggaaauccugagugugaaucucucagcacagccuccucuuggagcuacaucguggagaccuccucuagcgacaacggcacgugcuauccgggggauuuuauuaauuacgaagaacugcgggagcagcuuuccagcgucucuuccuucgaacgcuuugagaucuuccccaagaccagcucuuggccuaaccacgacuccaauaagggagugacagccgcuuguccccaugccggcgcgaaauccuuuuauaagaaccugaucuggcucguuaaaaagggcaauucuuacccuaaacuguccaagagcuauauuaacgauaaggggaaagaagugcuuguccuguggggaauccaccaccccuccaccucugccgaccaacagagccucuaccagaaugcugaugccuacguguucgugggcacauccagauauagcaagaaauuuaagccugagauugcuauccggccgaaaguccgcgaccaggaggggagaaugaacuacuauuggacccugguugaacccggagauaagauuacguucgaggccacaggcaaccugguggugccucgguacgcguuugccauggaacgcaaugcugggucuggaaucauuaucuccgacacccccguccaugauugcaacacaaccugucaaaccccuaaaggcgccaucaauacaagccuccccuuccagaacgugcacccgauuacgaucggcaagugcccuaaguauguuaaaucuaccaagcugagacuugcuacagggcugcggaaugugcccagcauucagucccgcggacucuuuggcgccaucgccggguucauugagggaggcuggaccgggauggucgacggaugguacggcuaucaucaccagaacgaacaaggcucuggguacgcugcggaccugaaaagcacacagaaugccaucgauaagaucaccaacaaagugaauagcguuauugagaagaugaacacgcaguuuacagcugugggaaaggaguucaaucaccuugagaaaagaaucgagaaccugaauaagaaagucgacgauggcuuccucgacauuuggaccuacaacgccgaacugcuggugcuccuggagaaugaacggacccuugauuaucaugacagcaacgucaagaaccuguacgagaaagugcgcucucagcucaagaauaacgccaaggagaucgggaauggauguuuugaguucuaucacaaaugcgauaacacauguauggaauccguuaagaauggcaccuacgacuauccuaaauacagcgaagaggcuaagcugaacagagaagagauugauggggugaaacuugagucuacacggaucuaucaaauccuggccauuuacuccacggucgcgagcucccucgugcugguugugucucugggcgcuaucagcuuuuggaugugcuccaauggaucucuccagugccgcauuuguaucuga

SEQ ID NO: 196371 - RNA, 1701 nt, Artificial Sequence
  derived and/or modified CDS sequence (opt5) from hemagglutinin__InfluenzaA__ADD74848
augaaggccauccuggugguccuccuguacaccuucgcuacagccaacgcggacacgcuuugcauuggcuaucacgcuaauaacagcaccgauacaguugacaccgugcuggagaaaaaugugacagucacccauuccgugaaccuccuggaagauaagcacaaugggaaacuuuguaagcugagaggaguugcuccccuccaucugggcaaaugcaacaucgccggguggauucugggaaauccugagugugaaucucucagcacagccuccucuuggagcuacaucguggagaccuccucuagcgacaacggcacgugcuauccgggggauuuuauugacuacgaagaacugcgggagcagcuuuccagcgucucuuccuucgaacgcuuugagaucuuccccaagaccagcucuuggccuaaucacgauuccaacaagggagugacagccgcuuguccccaugccggcgcgaaaucuuuuuauaagaaucugaucuggcucguuaaaaagggcaacagcuacccuaaacuguccaagagcuauauuaaugacaaggggaaagaagugcuuguccuguggggaauccaccaccccuccaccucugccgaucaacagagccucuaccagaacgcugacgccuacguguucgugggcacauccagauauagcaagaaauuuaagccugagauugcuauccggccgaaaguccgcgaucaggaggggagaaugaauuacuauuggacccugguugaacccggagacaagauuacguucgaggccacaggcaaccugguggugccucgguacgcguuugccauggaacgcaacgcugggucuggaaucauuaucuccgauacccccguccaugacugcaauacaaccugucaaaccccuaaaggcgccaucaacacaagccuccccuuccagaauauucacccgaucacgauuggcaagugcccuaaguaugugaaaucuaccaagcugagacuugcuacagggcugcggaacguucccagcauccagucccgcggacucuuuggcgccauugccggguucaucgagggaggcuggaccgggaugguggacggaugguacggcuaucaucaccagaaugaacaaggcucuggguacgcugcggaucugaaaagcacacagaacgccaucgacaagauuaccaauaaagucaacuccgugaucgagaagaugaauacgcaguuuacagcuguuggaaaggaguucaaccaccuugagaaaagaauugagaaucugaacaagaaaguggaugacggcuuccucgauaucuggaccuacaaugccgaacugcugguccuccuggagaacgaacggacccuugacuaucaugauagcaaugugaagaaccuguacgagaaaguccgcucucagcucaagaacaaugccaaggagauugggaacggauguuuugaguucuaucacaaaugcgacaauacauguauggaauccgugaagaacggcaccuacgauuauccuaaauacagcgaagaggcuaagcugaauagagaagagaucgacgggguuaaacuugagucuacacggaucuaucaaauucuggccaucuacuccacgguggcgagcucccucguccugauugugucucugggcgcuaucagcuuuuggaugugcuccaacggaucucuccagugccgcauuuguaucuga

SEQ ID NO: 196372 - RNA, 1701 nt, Artificial Sequence
  derived and/or modified CDS sequence (opt5) from hemagglutinin__InfluenzaA__ADD74858
augaaggccauccuggugguccuccuguacaccuucgcuacagccaacgcggacacgcuuugcauuggcuaucacgcuaauaacagcaccgauacaguugacaccgugcuggagaaaaaugugacagucacccauuccgugaaccuccuggaagauaagcacaaugggaaacuuuguaagcugagaggaguugcuccccuccaucugggcaaaugcaacaucgccggguggauucugggaaauccugagugugaaucucucagcacagccuccucuuggagcuacaucguggagaccuccucuagcgacaacggcacgugcuauccgggggauuuuauuaauuacgaagaacugcgggagcagcuuuccagcgucucuuccuucgaacgcuuugagaucuuccccaagaccagcucuuggccuaaccacgacuccaauaagggagugacagccgcuuguccccaugccggcaccaagagcuuuuauaaaaaccugaucuggcucguuaaaaagggcaauucuuacccuaaacuguccaagagcuauauuaacgauaaggggaaagaagugcuuguccuguggggaauccaccaccccuccacaucugcggaccaacagagccucuaccagaaugccgaugcuuacguguucgugggcaccuccagauauagcaagaaauuuaagccugagauugccauccggccgaaaguccgcgaccaggaggggagaaugaacuacuauuggacgcugguugaacccggagauaagauuacauucgaggcuaccggcaaccugguggugccucgguacgccuuugcgauggaacgcaaugccgggucuggaaucauuaucuccgacacacccguccaugauugcaacaccaccugucaaacaccuaaaggcgcuaucaauacgagccuccccuuccagaacauucacccgaucaccauuggcaagugcccuaaguaugugaaaucuacaaagcugagacuugccaccgggcugcggaauguucccagcauccagucccgcggacucuuuggcgcuauugccggguucaucgagggaggcuggacagggaugguggacggaugguacggcuaucaucaccagaacgaacaaggcucuggguacgccgcugaccugaaaagcacccagaaugcgaucgauaagauuacgaacaaagucaauuccgugaucgagaagaugaacacacaguuuaccgccguuggaaaggaguucaaucaccuugagaaaagaauugagaaccugaauaagaaaguggacgauggcuuccucgacaucuggaccuacaacgcugaacugcugguccuccuggagaaugaacggacacuugauuaucaugacagcaacgugaagaaccuguacgagaaaguccgcucucagcucaagaauaacgccaaggagauugggaauggauguuuugaguucuaucacaaaugcgauaacaccuguauggaauccgugaagaauggcacauacgacuauccuaaauacagcgaagaggccaagcugaacagagaagagaucgaugggguuaaacuugagucuacgcggaucuaucaaauucuggcuaucuacuccaccguggccagcucccucguccuggugguuucucugggcgcgauuagcuuuuggaugugcuccaauggaucucuccagugccgcaucuguauuuga

SEQ ID NO: 196373 - RNA, 1701 nt, Artificial Sequence; identical to SEQ ID NO: 196293
  derived and/or modified CDS sequence (opt5) from hemagglutinin__InfluenzaA__ADD74868

SEQ ID NO: 196374 - RNA, 1701 nt, Artificial Sequence; identical to SEQ ID NO: 196293
  derived and/or modified CDS sequence (opt5) from hemagglutinin__InfluenzaA__ADD74878

SEQ ID NO: 196375 - RNA, 1701 nt, Artificial Sequence
  derived and/or modified CDS sequence (opt5) from hemagglutinin__InfluenzaA__ADD74888
augaaggccauccuggugguccuccuguacaccuucgcuacagccaacgcggacacgcuuugcauuggcuaucacgcuaauaacagcaccgauacaguugacaccgugcuggagaagaaugugacagucacccauuccguggaucuccuggaagacaagcacaacgggaaacuuuguaagcugagaggaguugcuccccuccaucugggcaaaugcaauaucgccggguggauucugggaaacccugagugugaaucucucagcacagccuccucuuggagcuacaucguggagaccuccucuagcgauaauggcacgugcuauccgggggacuuuauugauuacgaagaacugcgggagcagcuuuccagcgucucuuccuucgaacgcuuugagaucuuccccaagaccaacagcuggccuaaucacgacucuaacaagggagugacagccgcuuguccccaugccggcgcgaaauccuuuuauaagaaucugaucuggcucguuaaaaagggcaacagcuacccuaaacugucuaaguccuauauuaaugauaaggggaaagaagugcuuguccuguggggaauccaccaccccagcaccuccgccgaccaacagucucucuaccagaacgcugaugccuacguguucgugggcacaagcagauauuccaagaaauuuaagccugagauugcuauccggccgaaaguccgcgaccaggaggggagaaugaauuacuauuggacccugguugaacccggagauaagauuacguucgaggccacaggcaaccugguggugccucgguacgcguuugccauggaacgcaacgcugggagcggaaucauuaucucugacacccccguccaugacugcaauacaaccugucaaaccccuaaaggcgccaucaacacaucccuccccuuccagaauauucacccgaucacgauuggcaagugcccuaaguaugugaaaagcaccaagcugagacuugcuacagggcugcggaacguucccucuauccagagccgcggacucuuuggcgccauugccggguucaucgagggaggcuggaccgggaugguggauggaugguacggcuaucaucaccagaaugaacaaggcuccggguacgcugcggaccugaaaucuacacagaacgccaucgaugagauuaccaauaaggucaacagcgugaucgagaaaaugaauacgcaguuuacagcuguuggaaaggaguucaaccaccuugagaagagaauugaaaaucugaacaaaaagguggacgauggcuuccucgacaucuggaccuacaaugccgagcugcugguccuccuggaaaacgagcggacccuugauuaucaugacuccaaugugaaaaaccuguacgagaagguccgcagccagcucaaaaacaaugccaaggaaauugggaacggauguuuugaguucuaucacaagugcgauaauacauguauggaaucugugaaaaacggcaccuacgacuauccuaaguacuccgaggaagcuaaacugaauagagaggagaucgaugggguuaaacuugaaagcacacggaucuaucaaauucuggccaucuacucuacgguggcguccagccucguccuggugguuucccugggcgcuauuucuuuuuggaugugcagcaacggaucccuccagugccgcaucuguauuuga

SEQ ID NO: 196376 - RNA, 1701 nt, Artificial Sequence
  derived and/or modified CDS sequence (opt5) from hemagglutinin__InfluenzaA__ADD74898
augaaggccauccuggugguccuccuguacaccuucacaacggcuaacgccgacacccuuugcauuggcuaucacgcgaauaacagcacagauaccguugacacagugcuggagaaaaaugugaccgucacacauuccgugaaccuccuggaagauaagcacaaugggaaacuuuguaagcugagaggaguugcuccccuccaucugggcaaaugcaacaucgccggguggauucugggaaauccugagugugaaucucucagcaccgccuccucuuggagcuacaucguggagacguccucuagcgacaacgggaccugcuauccgggcgauuuuauuaauuacgaagaacugcgggagcagcuuuccagcgucucuuccuucgaacgcuuugagaucuuccccaagacaagcucuuggccuaaccacgacuccaauaagggagugaccgcugccuguccccaugcuggcgccaagagcuuuuauaaaaaccugaucuggcucguuaaaaagggcaauucuuacccuaaacuguccaagagcuauauuaacgauaaggggaaagaagugcuuguccuguggggaauccaccaccccuccacaucugcggaccaacagagccucuaccagaaugccgaugcuuacguguucgugggcaccuccagauauagcaagaaauuuaagccugagauugccauccggccgaaaguccgcgaccaggaggggagaaugaacuacuauuggacgcugguugaacccggagauaagauuacauucgaggcuaccggcaaccugguggugccucgguacgccuuugcgauggaacgcaaugccgggucuggaaucauuaucuccgacacacccguccaugauugcaacaccaccugucaaacaccuaaaggcgcuaucaauacgagccuccccuuccagaacauucacccgaucaccauuggcaagugcccuaaguaugugaaaucuacaaagcugagacuugccaccgggcugcggaauguucccagcauccagucccgcggacucuuuggcgcuauugccggguucaucgagggaggcuggacagggaugguggacggaugguacggcuaucaucaccagaacgaacaaggcucuggguacgccgcugaccugaaaagcacccagaaugcgaucgauaagauuacgaacaaagucaauuccgugaucgagaagaugaacacacaguuuaccgccguuggaaaggaguucaaucaccuugagaaaagaauugagaaccugaauaagaaaguggacgauggcuuccucgacaucuggaccuacaacgcugaacugcugguccuccuggagaaugaacggacacuugauuaucaugacagcaacgugaagaaccuguacgagaaaguccgcucucagcucaagaauaacgccaaggagauugggaauggauguuuugaguucuaucacaaaugcgauaacaccuguauggaauccgugaagaauggcacauacgacuauccuaaauacagcgaagaggccaagcugaacagagaagagaucgaugggguuaaacuugagucuacgcggaucuaucaaauucuggcuaucuacuccaccguggccagcucccucguccuggugguuucucugggcgcgauuagcuuuuggaugugcuccaauggaucucuccagugccgcaucuguauuuga

SEQ ID NO: 196377 - RNA, 1701 nt, Artificial Sequence
  derived and/or modified CDS sequence (opt5) from hemagglutinin__InfluenzaA__ADD74908
augaaggccauccuggugguccuccuguacaccuucgcuacagccaacgcggacacgcuuugcauuggcuaucacgcuaauaacagcaccgauacaguugacaccgugcuggagaagaaugugacagucacccauuccgugaaccuccuggaagauaagcacaaugggaaacuuuguaagcugagaggaguugcuccccuccaucugggcaaaugcaacaucgccggguggauucugggaaauccugagugugaaucucucagcacagccuccucuuggagcuacaucguggagaccuccucuagcgacaacggcacgugcuauccgggggauuuuauugacuacgaagaacugcgggagcagcuuuccagcgucucuuccuucgaacgcuuugagaucuuccccaagaccagcucuuggccuaaucacgauuccaacaagggagugacagccgcuuguccccaugccggcgcgaaaucuuuuuauaagaaucugaucuggcucguuaaaaagggcaacagcuacccuaaacuguccaagagcuauauuaaugacaaggggaaagaagugcuuguccuguggggaauccaccaccccuccaccucugccgaucaacagagccucuaccagaacgcugacgccuacguguucgugggcacauccagauauagcaagaaauuuaagccugagauugcuauccggccgaaaguccgcgaucaggaggggagaaugaauuacuauuggacccugguugaacccggagacaagauuacguucgaggccacaggcaaccugguggugccucgguacgcguuuaccauggaacgcaacgccgggucuggaaucauuaucuccgauacacccguccaugacugcaauaccaccugucaaacaccuaaaggcgcuaucaacacgagccuccccuuccagaauauucacccgaucaccauuggcaagugcccuaaguaugugaaaucuacaaagcugagacuugccaccgggcugcggaacguucccagcauccagucccgcggacucuuuggcgcuauugccggguucaucgagggaggcuggacagggaugguggacggaugguacggcuaucaucaccagaaugaacaaggcucuggguacgccgcugaucugaaaagcacccagaacgcgaucgacgagauuacgaauaaggucaacuccgugaucgagaaaaugaauacacaguuuaccgccguuggaaaggaguucaaccaccuugagaagagaauugaaaaucugaacaaaaagguggaugacggcuuccucgauaucuggaccuacaaugcugagcugcugguccuccuggaaaacgagcggacacuugacuaucaugauagcaaugugaaaaaccuguacgagaagguccgcucucagcucaaaaacaaugccaaggaaauugggaacggauguuuugaguucuaucacaagugcgacaauaccuguauggaauccgugaaaaacggcacauacgauuauccuaaguacagcgaggaagccaaacugaauagagaggagaucgacgggguuaaacuugaaucuacgcggaucuaucaaauucuggcuaucuacuccaccguggccagcucccucguccuggugguuucucugggcgcgauuagcuuuuggaugugcuccaacggaucucuccagugccgcaucuguauuuga

SEQ ID NO: 196378 - RNA, 1701 nt, Artificial Sequence; identical to SEQ ID NO: 196371
  derived and/or modified CDS sequence (opt5) from hemagglutinin__InfluenzaA__ADD74918

SEQ ID NO: 196379 - RNA, 1701 nt, Artificial Sequence; identical to SEQ ID NO: 196293
  derived and/or modified CDS sequence (opt5) from hemagglutinin__InfluenzaA__ADD74928

SEQ ID NO: 196380 - RNA, 1701 nt, Artificial Sequence; identical to SEQ ID NO: 196371
  derived and/or modified CDS sequence (opt5) from hemagglutinin__InfluenzaA__ADD74938

SEQ ID NO: 196381 - RNA, 1701 nt, Artificial Sequence
  derived and/or modified CDS sequence (opt5) from hemagglutinin__InfluenzaA__ADD74958
augaaggccauccuggugguccuccuguacaccuucgcuacagccaacgcggacacgcuuugcauuggcuaucacgcuaauaacagcaccgauacaguugacaccgugcuggagaaaaaugugacagucacccauuccgugaaccuccuggaaaauaagcacaacgggaaacuuuguaagcugagaggaguugcuccccuccaucugggcaaaugcaauaucgccggguggauucugggaaacccugagugugaaucucucagcacagccuccucuuggagcuacaucguggagaccuccucuagcgauaauggcacgugcuauccgggggacuuuauuaacuacgaagaacugcgggagcagcuuuccagcgucucuuccuucgaacgcuuugagaucuuccccaagaccagcucuuggccuaaucacgauuccaacaagggagugacagccgcuuguccccaugccggcgcgaaaucuuuuuauaagaaucugaucuggcucguuaaaaagggcaacagcuacccuaaacuguccaagagcuauauuaaugacaaggggaaagaagugcuuguccuguggggaauccaccaccccuccaccucugccgaucaacagagccucuaccagaacgcugacgccuacguguucgugggcacauccagauauagcaagaaauuuaagccugagauugcuauccggccgaaaguccgcgaucaggaggggagaaugaacuacuauuggacccugguugaacccggagacaagauuacguucgaggccacaggcaaucugguggugccucgguacgcguuugccauggaacgcaacgcugggucuggaaucauuaucuccgauacccccguccaugacugcaauacaaccugucaaaccccuaaaggcgccaucaacacaagccuccccuuccagaauauucacccgaucacgauuggcaagugcccuaaguaugugaaaucuaccaagcugagacuugcuacagggcugcggaacguucccagcauccagucccgcggacucuuuggcgccauugccggguucaucgagggaggcuggaccgggaugguggauggaugguacggcuaucaucaccagaaugaacaaggcucuggguacgcugcggaccugaaaagcacacagaacgccaucgacaagauuaccaauaaagucaacuccgugaucgagaagaugaauacgcaguuuacagcuguuggaaaggaguucaaccaccuugagaaaagaauugagaaucugaacaagaaaguggaugacggcuuccucgauaucuggaccuacaaugccgaacugcugguccuccuggagaacgaacggacccuugacuaucaugauagcaacgugaagaaucuguacgagaaaguccgcucucagcucaagaacaaugccaaggagauugggaacggauguuuugaguucuaucacaaaugcgacaauacauguauggaauccgugaagaacggcaccuacgauuauccuaaauacagcgaagaggcuaagcugaauagagaagagaucgacgggguuaaacuugagucuacacggaucuaucaaauucuggccaucuacuccacgguggcgagcucccucguccuggugguuucucugggcgcuauuagcuuuuggaugugcuccaacggaucucuccagugccgcaucuguauuuga

SEQ ID NO: 196382 - RNA, 1701 nt, Artificial Sequence; identical to SEQ ID NO: 195905
  derived and/or modified CDS sequence (opt5) from hemagglutinin__InfluenzaA__ADD74968

SEQ ID NO: 196383 - RNA, 1701 nt, Artificial Sequence
  derived and/or modified CDS sequence (opt5) from hemagglutinin__InfluenzaA__ADD74998
augaaggccauccuggugguccuccuguacaccuucgcuacagccaacgcggacacgcuuugcauuggcuaucacgcuaauaacagcaccgauacaguugacaccgugcuggagaaaaaugugacagucacccauuccgugaaccuccuggaagauaagcacaaugggaaacuuuguaagcugagaggaguugcuccccuccaucugggcaaaugcaacaucgccggguggauucugggaaauccugagugugaaucucucagcacagccuccucuuggagcuacaucguggagaccuccucuagcgacaacggcacgugcuauccgggggauuuuauugacuacgaagaacugcgggagcagcuuuccagcgucucuuccuucgaacgcuuugagaucuuccccaagaccagcucuuggccuaaucacgauuccaacaagggagugacagccgcuuguccccaugccggcgcgaaaucuuuuuauaagaaucugaucuggcucguuaaaaagggcaacagcuacccuaaacuguccaagagcuauauuaaugacaaggggaaagaagugcuuguccuguggggaauccaccaccccuccaccucugccgaucaacagagccucuaccagaacgcugacgccuacguguucgugggcacauccagauauagcaagaaauuuaagccugagauugcuauccggccgaaaguccgcgaucaggaggggagaaugaauuacuauuggacccugguugaacccggagacaagauuacguucgaggccacaggcaaccugguggugccucgguacgcguuugccauggaacgcaacgcugggucuggaaucauuaucuccgauacccccguccaugacugcaauacaaccugucaaaccccuaaaggcgccaucaacacaagccuccccuuccagaauauucacccgaucacgauuggcaagugcccuaaguaugugaaaucuaccaagcugagacuugcuacagggcugcggaacguucccagcauccagucccgcggacucuuuggcgccauugccggguucaucgagggaggcuggaccgggaugguggacggaugguacggcuaucaucaccagaaugaaagaggcucuggguacgcugcggaucugaaaagcacacaaaacgccaucgacaagauuaccaauaaagucaacuccgugaucgagaagaugaauacgcaguuuacagcuguuggaaaggaguucaaccaccuugaaaaacggauugagaaucugaacaagaaaguggaugacggcuuccucgauaucuggaccuacaaugccgaacugcugguccuccuggagaacgaacgcacccuugacuaucaugauagcaaugugaagaaccuguacgagaaagucagaucucagcucaagaacaaugccaaggagauugggaacggauguuuugaguucuaucacaaaugcgacaauacauguauggaguccgugaagaacggcaccuacgauuauccuaaauacagcgaagaggcuaagcugaaucgggaagagaucgacgggguuaaacuugagucuacacgcaucuaucagauucuggccaucuacuccacgguggcgagcucccucguccuggugguuucucugggcgcuauuagcuuuuggaugugcuccaacggaucucuccaaugcagaaucuguauuuga

SEQ ID NO: 196384 - RNA, 1701 nt, Artificial Sequence; identical to SEQ ID NO: 195905
  derived and/or modified CDS sequence (opt5) from hemagglutinin__InfluenzaA__ADD75008

SEQ ID NO: 196385 - RNA, 1701 nt, Artificial Sequence; identical to SEQ ID NO: 195905
  derived and/or modified CDS sequence (opt5) from hemagglutinin__InfluenzaA__ADD75018

SEQ ID NO: 196386 - RNA, 1701 nt, Artificial Sequence; identical to SEQ ID NO: 195905
  derived and/or modified CDS sequence (opt5) from hemagglutinin__InfluenzaA__ADD75028

SEQ ID NO: 196387 - RNA, 1701 nt, Artificial Sequence; identical to SEQ ID NO: 195842
  derived and/or modified CDS sequence (opt5) from hemagglutinin__InfluenzaA__ADD75058

SEQ ID NO: 196388 - RNA, 1701 nt, Artificial Sequence; identical to SEQ ID NO: 196161
  derived and/or modified CDS sequence (opt5) from hemagglutinin__InfluenzaA__ADD75088

SEQ ID NO: 196389 - RNA, 1701 nt, Artificial Sequence; identical to SEQ ID NO: 194741
  derived and/or modified CDS sequence (opt5) from hemagglutinin__InfluenzaA__ADD75098

SEQ ID NO: 196390 - RNA, 1701 nt, Artificial Sequence
  derived and/or modified CDS sequence (opt5) from hemagglutinin__InfluenzaA__ADD75108
augaaggccauccuggugguccuccuguacaccuucgcuacagccaacgcggacacgcuuugcauuggcuaucacgcuaauaacagcaccgauacaguugacaccgugcuggagaaaaaugugacagucacccauuccgugaaccuccuggaagauaagcacaaugggaaacuuuguaagcugagaggaguugcuccccuccaucugggcaaaugcaacaucgccggguggauucugggaaauccugagugugaaucucucagcacagccuccucuuggagcuacaucguggagaccuccucuagcgacaacggcacgugcuauccgggggauuuuauugacuacgaagaacugcgggagcagcuuuccagcgucucuuccuucgaacgcuuugagaucuuccccaagaccagcucuuggccuaaucacgauuccaacaagggagugacagccgcuuguccccaugccggcgcgaaaucuuuuuauaagaaucugaucuggcucguuaaaaagggcaacagcuacccuaaacuguccaagagcuauauuaaugacaaggggaaagaagugcuuguccuguggggaauccaccaccccuccaccucugccgaucaacagagccucuaccagaacgcugacgccuacguguucgugggcacauccagauauagcaagaaauuuaagccugagauugcuauccggccgaaaguccgcgaucaggaggggagaaugaauuacuauuggacccugguugaacccggagacaagauuacguucgaggccacaggcaaccugguggugccucgguacgcguuugccauggaacgcaacgcugggucuggaaucauuaucuccgauacccccguccaugacugcaauacaaccugucaaaccccuaaaggcgccaucaacacaagccuccccuuccagaauauucacccgaucacgauuggcaagugcccuaaguaugugaaaucuaccaagcugagacuugcuacagggcugcggaacauccccagcauucagucccgcggacucuuuggcgccaucgccggguucaucgagggaggcuggaccgggaugguugacggaugguacggcuaucaucaccagaaugaacaaggcucuggguacgcugcggaucugaaaagcacacagaacgccauugacaagaucaccaauaaagugaacuccgucauugagaagaugaauacgcaguuuacagcugugggaaaggaguucaaccaccuugagaaaagaaucgagaaucugaacaagaaaguugaugacggcuuccucgauauuuggaccuacaaugccgaacugcuggugcuccuggagaacgaacggacccuugacuaucaugauagcaaugucaagaaccuguacgagaaagugcgcucucagcucaagaacaaugccaaggagaucgggaacggauguuuugaguucuaucacaaaugcgacaauacauguauggaauccgucaagaacggcaccuacgauuauccuaaauacagcgaagaggcuaagcugaauagagaagagaucgacggggugaaacuugagucuacacggauuuaucaaauccuggccauuuacuccacgguugcgagcucccucgugcuggucgugucucugggcgcuaucagcuuuuggaugugcuccaacggaucucuccagugccgcauuuguaucuga

SEQ ID NO: 196391 - RNA, 1701 nt, Artificial Sequence; identical to SEQ ID NO: 194741
  derived and/or modified CDS sequence (opt5) from hemagglutinin__InfluenzaA__ADD75118

SEQ ID NO: 196392 - RNA, 1701 nt, Artificial Sequence; identical to SEQ ID NO: 195188
  derived and/or modified CDS sequence (opt5) from hemagglutinin__InfluenzaA__ADD75128

SEQ ID NO: 196393 - RNA, 1701 nt, Artificial Sequence; identical to SEQ ID NO: 194741
  derived and/or modified CDS sequence (opt5) from hemagglutinin__InfluenzaA__ADD75138

SEQ ID NO: 196394 - RNA, 1701 nt, Artificial Sequence; identical to SEQ ID NO: 195905
  derived and/or modified CDS sequence (opt5) from hemagglutinin__InfluenzaA__ADD75148

SEQ ID NO: 196395 - RNA, 1701 nt, Artificial Sequence; identical to SEQ ID NO: 194741
  derived and/or modified CDS sequence (opt5) from hemagglutinin__InfluenzaA__ADD75158

SEQ ID NO: 196396 - RNA, 1701 nt, Artificial Sequence
  derived and/or modified CDS sequence (opt5) from hemagglutinin__InfluenzaA__ADD84494
augaaggccauccuggugguccuccuguacaccuucgcuacagccaacgcggacacgcuuugcauuggcuaucacgcuaauaacagcaccgauacaguugacaccgugcuggagaagaaugugacagucacccauuccgugaaccuccuggaagauaagcacaaugggaaacuuuguaagcugagaggaguugcuccccuccaucugggcaaaugcaacaucgccggguggauucugggaaauccugagugugaaucucucagcacagccuccucuuggagcuacaucguggagaccuccucuagcgacaacggcacgugcuauccgggggauuuuauugacuacgaagaacugcgggagcagcuuuccagcgucucuuccuucgaacgcuuugagaucuuccccaagaucagcucuuggccuaaucacgaucccaacaagggagugaccgccgcuuguccucaugccggcgcgaaauccuuuuauaagaaucugauuuggcucguuaaaaagggcaacagcuaccccaaacugucuaaguccuauaucaaugacaaggggaaagaagugcuuguccuguggggcauucaccacccuagcacauccgccgaucaacagucucucuaccagaacgcugacgccuacguguucgugggaaccagcagauauuccaagaaauuuaagccggagaucgcuauucggcccaaaguccgcgaucaggaggggagaaugaauuacuauuggacacugguugaaccuggagacaagaucaccuucgaggccacgggcaaccugguggugccccgguacgcguuugccauggaacgcaacgcugggagcggaauuaucaucucugauacaccuguccauggcugcaauaccacaugucaaacccccaaaggcgccauuaacaccucccucccguuccagaauauccacccuauuacaaucgggaagugccccaaguaugugaaaagcacgaagcugagacuugcuaccggacugcggaacguuccuucuauucagagccgcggccucuuuggggccaucgccggauucaucgagggcggguggacaggaaugguggacggcugguacggcuaucaucaccagaaugaacaaggguccggauacgcugcggaccugaaaucuacccagaacgccauugaugagaucacaaauaaggucaacagcgugauugagaaaaugaauacccaguuuacggcuguuggcaaggaguucaaccaccuugagaagagaaucgaaaaucugaacaaaaagguggacgauggguuccucgacauuuggacauacaaugccgagcugcugguccuccuggaaaacgagcggacccuugauuaucaugacuccaaugugaaaaaccuguacgagaagguccgcagccagcucaaaaacaaugccaaggaaaucggaaacggcuguuuugaguucuaucacaagugcgauaauaccuguauggaaucugugaaaaacgggacauacgacuaucccaaguacuccgaggaagcuaaacugaauagagaggagaucgauggcguuaaacuugaaagcacccggauuuaucaaauccuggccauuuacucuacaguggcguccagccucguccuggugguuucccugggagcuaucucuuuuuggaugugcagcaacggcucccuccagugccgcauuuguaucuga

SEQ ID NO: 196397 - RNA, 1701 nt, Artificial Sequence
  derived and/or modified CDS sequence (opt5) from hemagglutinin__InfluenzaA__ADD84495
augaaggccauccuggugguccuccuguacaccuucgcuacagccaacgcggacacgcuuugcauuggcuaucacgcuaauaacagcaccgauacaguugacaccgugcuggagaagaaugugacagucacccauuccgugaaccuccuggaagauaagcacaaugggaaacuuuguaagcugagaggaguugcuccccuccaucugggcaaaugcaacaucgccggguggauucugggaaauccugagugugaaucucucagcacagccuccucuuggagcuacaucguggagaccuccucuagcgacaacggcacgugcuauccgggggauuuuauugacuacgaagaacugcgggagcagcuuuccagcgucucuuccuucgaacgcuuugagaucuuccccaagaucagcucuuggccuaaucacgaucccaacaagggagugaccgccgcuuguccucaugccggcgcgaaauccuuuuauaagaaucugauuuggcucguuaaaaagggcaacagcuaccccaaacugucuaaguccuauaucaaugacaaggggaaagaagugcuuguccuguggggcauucaccacccuagcacauccgccgaucaacagucucucuaccagaacgcugacgccuacguguucgugggaaccagcagauauuccaagaaauuuaagccggagaucgcuauucggcccaaaguccgcgaucaggaggggagaaugaauuacuauuggacacugguugaaccuggagacaagaucaccuucgaggccacgggcaaccugguggugccccgguacgcguuugccauggaacgcaacgcugggagcggaauuaucaucucugauacaccuguccaugacugcaauaccacaugucaaacccccaaaggcgccauuaacaccucccucccguuccagaauauccacccuauuacaaucggcaagugccccaaguaugugaaaagcacgaagcugagacuugcuaccgggcugcggaacguuccuucuauucagagccgcggacucuuuggcgccaucgccggguucaucgagggaggcuggacagggaugguggacggaugguacggcuaucaucaccagaaugaacaaggcuccggguacgcugcggaucugaaaucuacccagaacgccauugacgagaucacaaauaaggucaacagcgugauugagaaaaugaauacccaguuuacggcuguuggaaaggaguucaaccaccuugagaagagaaucgaaaaucugaacaaaaagguggaugacggcuuccucgauauuuggacauacaaugccgagcugcugguccuccuggaaaacgagcggacccuugacuaucaugauuccaaugugaaaaaccuguacgagaagguccgcagccagcucaaaaacaaugccaaggaaaucgggaacggauguuuugaguucuaucacaagugcgacaauaccuguauggaaucugugaaaaacggcacauacgauuaucccaaguacuccgaggaagcuaaacugaauagagaggagaucgacgggguuaaacuugaaagcacccggauuuaucaaauccuggccauuuacucuacaguggcguccagccucguccuggugguuucccugggcgcuaucucuuuuuggaugugcagcaacggaucccuccagugccgcauuuguaucuga

SEQ ID NO: 196398 - RNA, 1701 nt, Artificial Sequence
  derived and/or modified CDS sequence (opt5) from hemagglutinin__InfluenzaA__ADD84496
augaaggccauccuggugguccuccuguacaccuucgcuacagccaacgcggacacgcuuugcauuggcuaucacgcuaauaacagcaccgauacaguugacaccgugcuggagaagaaugugacagucacccauuccgugaaccuccuggaagauaagcacaaugggaaacuuuguaagcugagaggaguugcuccccuccaucugggcaaaugcaacaucgccggguggauucugggaaauccugagugugaaucucucagcacagccuccucuuggagcuacaucguggagaccuccucuagcgacaacggcacgugcuauccgggggauuuuauugacuacgaagaacugcgggagcagcuuuccagcgucucuuccuucgaacgcuuugagaucuuccccaagaucagcucuuggccuaaucacgaucccaacaagggagugaccgccgcuuguccucaugccggcgcgaaauccuuuuauaagaaucugauuuggcucguuaaaaagggcaacagcuaccccaaacugucuaaguccuauaucaaugacaaggggaaagaagugcuuguccuguggggcauucaccacccuagcacauccgccgaucaacagucucucuaccagaacgcugacgccuacguguucgugggaagcuccagauauagcaagaaauuuaagccggagaucgcuauucggcccaaaguccgcgaucaggaggggagaaugaauuacuauuggacccugguugaaccuggagacaagaucacauucgaggccaccggcaaccugguggugccccgguacgcguuugccauggaacgcaacgcugggucuggaauuaucaucuccgauacgccuguccaugacugcaauacaaccugucaaacacccaaaggcgccauuaacaccagccucccguuccagaauauccacccuauuaccaucggcaagugccccaaguaugugaaaucuacaaagcugagacuugcuacggggcugcggaacguuccuagcauucagucccgcggacucuuuggcgccaucgccggguucaucgagggaggcuggaccgggaugguggacggaugguacggcuaucaucaccagaaugaacaaggcucuggguacgcugcggaucugaaaagcacacagaacgccauugacgagaucaccaauaaggucaacuccgugauugagaaaaugaauacacaguuuaccgcuguuggaaaggaguucaaccaccuugagaagagaaucgaaaaucugaacaaaaagguggaugacggcuuccucgauauuuggacguacaaugccgagcugcugguccuccuggaaaacgagcggacacuugacuaucaugauagcaaugugaaaaaccuguacgagaagguccgcucucagcucaaaaacaaugccaaggaaaucgggaacggauguuuugaguucuaucacaagugcgacaauaccuguauggaauccgugaaaaacggcaccuacgauuaucccaaguacagcgaggaagcuaaacugaauagagaggagaucgacgggguuaaacuugaaucuacacggauuuaucaaauccuggccauuuacuccaccguggcgagcucccucguccuggugguuucucugggcgcuaucagcuuuuggaugugcuccaacggaucucuccagugccgcauuuguaucuga

SEQ ID NO: 196399 - RNA, 1701 nt, Artificial Sequence; identical to SEQ ID NO: 196397
  derived and/or modified CDS sequence (opt5) from hemagglutinin__InfluenzaA__ADD84497

SEQ ID NO: 196400 - RNA, 1701 nt, Artificial Sequence
  derived and/or modified CDS sequence (opt5) from hemagglutinin__InfluenzaA__ADD84498
augaaggccauccuggugguccuccuguacaccuucgcuacagccaacgcggacacgcuuugcauuggcuaucacgcuaauaacagcaccgauacaguugugaccgugcuggagaagaaugucacagugacccauuccguuaaccuccuggaagacaagcacaaugggaaacuuuguaagcugagaggaguggcuccccuccaucugggcaaaugcaacaucgccggguggauucugggaaauccugagugugaaucucucagcacagccuccucuuggagcuacaucgucgagaccuccucuagcgauaacggcacgugcuauccgggggacuuuauugauuacgaagaacugcgggagcagcuuuccagcgugucuuccuucgaacgcuuugagaucuuccccaagaucagcucuuggccuaaucacgaccccaacaagggaguuaccgccgcuuguccucaugccggcgcgaaauccuuuuauaagaaucugauuuggcucgugaaaaagggcaacagcuaccccaaacugucuaaguccuauaucaaugauaaggggaaagaaguccuugugcuguggggcauucaccacccuagcacauccgccgaccaacagucucucuaccagaacgcugaugccuacguguucgucggaagcuccagauauagcaagaaauuuaagccggagaucgcuauucggcccaaaguucgcgaccaggaggggagaaugaauuacuauuggacccugguggaaccuggagauaagaucacauucgaggccaccggcaaccugguggucccccgguacgcguuugccauggaacgcaacgcugggucuggaauuaucaucuccgacacgccugugcaugauugcaauacaaccugucaaacacccaaaggcgccauuaacaccagccucccguuccagaauauccacccuauuaccaucggcaagugccccaaguauguuaaaucuacaaagcugagacuugcuacggggcugcggaacgugccuagcauucagucccgcggacucuuuggcgccaucgccggguucaucgagggaggcuggaccgggauggucgacggaugguacggcuaucaucaccagaaugaacaaggcucuggguacgcugcggaccugaaaagcacacagaacgccauugaugagaucaccaauaaggugaacuccguuauugagaaaaugaauacacaguuuaccgcugugggaaaggaguucaaccaccuugagaagagaaucgaaaaucugaacaaaaaggucgacgauggcuuccucgacauuuggacguacaaugccgagcugcuggugcuccuggaaaacgagcggacacuugauuaucaugacagcaaugucaaaaaccuguacgagaaggugcgcucucagcucaaaaacaaugccaaggaaaucgggaacggauguuuugaguucuaucacaagugcgauaauaccuguauggaauccguuaaaaacggcaccuacgacuaucccaaguacagcgaggaagcuaaacugaauagagaggagaucgauggggugaaacuugaaucuacacggauuuaucaaauccuggccauuuacuccaccgucgcgagcucccucgugcugguugugucucugggcgcuaucagcuuuuggaugugcuccaacggaucucuccagugccgcauuuguaucuga

SEQ ID NO: 196401 - RNA, 1701 nt, Artificial Sequence; identical to SEQ ID NO: 196397
  derived and/or modified CDS sequence (opt5) from hemagglutinin__InfluenzaA__ADD84499

SEQ ID NO: 196402 - RNA, 1701 nt, Artificial Sequence
  derived and/or modified CDS sequence (opt5) from hemagglutinin__InfluenzaA__ADD92535
augaaggccauccuggugguccuccuguacaccuucgcuacagccaacgcggacacgcuuugcauuggcuaucacgcuaauaacagcaccgauacaguugacaccgugcuggagaaaaaugugacagucacccauuccgugaaccuccuggaagauaagcacaaugggaaacuuuguaagcugagaggaguugcuccccuccaucugggcaaaugcaacaucgccggguggauucugggaaauccugagugugaaucucucagcacagccuccucuuggagcuacaucguggagaccuccucuagcgacaacggcacgugcuauccgggggauuuuauugacuacgaagaacugcgggagcagcuuuccagcgucucuuccuucgaacgcuuugagaucuuccccaagaccagcucuuggccuaaucacgauuccaacaagggagugacagccgcuuguccccaugccggcgcgaaaucuuuuuauaagaaucugaucuggcucguuaaaaagggcaacagcuacccuaaacuguccaagagcuauauuaaugacaaggggaaagaagugcuuguccuguggggaauccaccaccccuccaccucugccgaucaacagagccucuaccagaacgcugacgccuacguguucgugggcacauccagauauagcaagaaauuuaagccugagauugcuauccggccgaaaguccgcgauagagaggggcggaugaauuacuauuggacccugguugaacccggagacaagauuacguucgaggccacaggcaaccugguggugccucgcuacgcguuugccauggaaagaaacgcugggucuggaaucauuaucuccgauacccccguccaugacugcaauacaaccugucagaccccuaaaggcgccaucaacacaagccuccccuuccaaaauauucacccgaucacgauuggcaagugcccuaaguaugugaaaucuaccaagcugcggcuugcuacagggcugcgcaacguucccagcauccaguccagaggacucuuuggcgccauugccggguucaucgagggaggcuggaccgggaugguggacggaugguacggcuaucaucaccagaaugaacagggcucuggguacgcugcggaucugaaaagcacacaaaacgccaucgacgagauuaccaaucgggucaacuccgugaucgagaagaugaauacgcaguuuacagcuguuggaaaagaguucaaccaccuugagaagcgcauugaaaaucugaacaagaaaguggauggcggguuccucgacaucuggaccuacaaugccgagcugcugguccuccuggaaaacgagagaacccuugauuaucaugacagcaaugugaagaaccuguacgagaaaguccggucucagcucaagaacaaugccaaagaaauuggaaacggcuguuuugaguucuaucacaagugcgauaauacauguauggaauccgugaagaacgggaccuacgacuauccuaaauacagcgaggaagcuaagcugaaucgcgaggagaucgauggcguuaaacuugaaucuacaagaaucuaucagauucuggccaucuacuccacgguggcgagcucccucguccuggugguuucucugggagcuauuagcuuuuggaugugcuccaacggcucucuccaaugccggaucuguauuuga

SEQ ID NO: 196403 - RNA, 1701 nt, Artificial Sequence; identical to SEQ ID NO: 196329
  derived and/or modified CDS sequence (opt5) from hemagglutinin__InfluenzaA__ADD96766

SEQ ID NO: 196404 - RNA, 1701 nt, Artificial Sequence; identical to SEQ ID NO: 194921
  derived and/or modified CDS sequence (opt5) from hemagglutinin__InfluenzaA__ADD96776

SEQ ID NO: 196405 - RNA, 1701 nt, Artificial Sequence; identical to SEQ ID NO: 194921
  derived and/or modified CDS sequence (opt5) from hemagglutinin__InfluenzaA__ADD96786

SEQ ID NO: 196406 - RNA, 1701 nt, Artificial Sequence; identical to SEQ ID NO: 196226
  derived and/or modified CDS sequence (opt5) from hemagglutinin__InfluenzaA__ADD96796

SEQ ID NO: 196407 - RNA, 1701 nt, Artificial Sequence
  derived and/or modified CDS sequence (opt5) from hemagglutinin__InfluenzaA__ADD96806
augaaggccauccuggugguccuccuguacacccuugcuacagccaacgcggacacgcugugcauuggcuaucacgcuaauaacagcaccgauacaguugacaccgugcucgagaaaaaugugacagucacccauuccgugaaccugcuugaagauaagcacaaugggaaacuguguaagcucagaggaguugcuccccugcaucugggcaaaugcaacaucgccggguggauucucggaaauccugagugugaaucucugagcacagccuccucuuggagcuacaucguggagaccuccucuagcgacaacggcacgugcuauccgggggauuucauugacuacgaggaacuucgggagcagcuguccagcgucucuuccuuugaacgcuucgagaucuuucccaagaccagcucuuggccuaaucacgauuccaacaagggagugacagccgcuuguccccaugccggcgcgaaaucuuucuauaagaaucucaucuggcugguuaaaaagggcaacagcuacccuaaacuuuccaagagcuauauuaaugacaaggggaaagaagugcugguccucuggggaauccaccaccccuccaccucugccgaucaacagagccuguaccagaacgcugacgccuacguguuugugggcacauccagauauagcaagaaauucaagccugagauugcuauccggccgaaaguccgcgaucaggaggggagaaugaauuacuauuggacccugguugaacccggagacaagauuacguuugaggccacaggcaaccucguggugccucgguacgcguucgccauggaacgcaacgcugggucuggaaucauuaucuccgauacccccguccaugacugcaauacaaccugucaaaccccuaaaggcgccaucaacacaagccugcccuuucagaauauucacccgaucacgauuggcaagugcccuaaguaugugaaaucuaccaaacuuagacuggcuacagggcuccggaacguucccagcauccagucccgcggacuguucggcgccauugccggguuuaucgagggaggcuggaccgggaugguggacggaugguacggcuaucaucaccagaaugaacaaggcucuggguacgcugcggaucuuaagagcacacagaacgccaucgacgagauuaccaauaaggucaacuccgugaucgagaaaaugaauacgcaguucacagcuguuggaaaggaauuuaaccaccuggagaagagaauugaaaaucucaacaaaaagguggaugacggcuuccuggauaucuggaccuacaaugccgagcugcucguccugcuugaaaacgagcggacccuggacuaucaugauagcaaugugaaaaaccucuacgagaagguccgcucucagcugaaaaacaaugccaaggaaauugggaacggauguuucgaguuuuaucacaagugcgacaauacauguauggaauccgugaaaaacggcaccuacgauuauccuaaguacagcgaggaagcuaaacuuaauagagaggagaucgacgggguuaagcuggaaucuacacggaucuaucaaauucucgccaucuacuccacgguggcgagcucccugguccuggugguuucucucggcgcuauuagcuucuggaugugcuccaacggaucucugcagugccgcaucuguauuuga

SEQ ID NO: 196408 - RNA, 1701 nt, Artificial Sequence; identical to SEQ ID NO: 195905
  derived and/or modified CDS sequence (opt5) from hemagglutinin__InfluenzaA__ADD96816

SEQ ID NO: 196409 - RNA, 1701 nt, Artificial Sequence
  derived and/or modified CDS sequence (opt5) from hemagglutinin__InfluenzaA__ADD96826
augaaggccauccuggugguccuccuguacaccuucgcuacagccaacgcggacacgcuuugcauuggcuaucacgcuaauaacagcaccgauacaguugacaccgugcuggagaagaaugugacagucacccauuccgugaaccuccuggaagauaagcacaaugggaaacuuuguaagcugagaggaguugcuccccuccaucugggcaaaugcaacaucgccggguggauucugggaaauccugagugugaaucucucagcacagccuccucuuggagcuacaucguggagaccuccucuagcgacaacggcacgugcuauccgggggauuuuauugacuacgaagaacugcgggagcagcuuuccagcgucucuuccuucgaacgcuuugagaucuuccccaagaccagcucuuggccuaaucacgauuccaacaagggagugacagccgcuuguccccaugccggcgcgaaaucuuuuuauaagaaucugaucuggcucguuaaaaagggcaacagcuacccuaaacuguccaagagcuauauuaaugacaaggggaaagaagugcuuguccuguggggaauccaccaccccuccaccucugccgaucaacagagccucuaccagaacgcugacgccuacguguucgugggcacauccagauauagcaagaaauuuaagccugagauugcuauccggccgaaagucauggaucaggaggggcgcaugaauuacuauuggacccugguugaacccggagacaagauuacguucgaggccacaggcaaccugguggugccuagauacgcguuugccauggaacggaacgcugggucuggaaucauuaucuccgauacccccguccaugacugcaauacaaccugucaaaccccuaaaggcgccaucaacacaagccuccccuuccagaauauucacccgaucacgauuggcaagugcccuaaguaugugaaaucuaccaagcugcgccuugcuacagggcugagaaacguucccagcauccagucccggggacucuuuggcgccauugccggguucaucgagggaggcuggaccgggaugguggacggaugguacggcuaucaucaccagaaugaacaaggcucuggguacgcugcggaucugaaaagcacacagaacgccaucgacgagauuaccaauaaggucaacuccgugaucgagaaaaugaauacgcaguuugcugccguuggaaaggaguucaaccaccuugagaagcgcauugaaaaucugaacaaaaagguggaugacggcuuccucgauaucuggacauacaaugccgagcugcugguccuccuggaaaacgagagaacccuugacuaucaugauagcaaugugaaaaaccuguacgagaagguccggucucagcucaaaaacaaugcuaaggaaauugggaacggauguuuugaguucuaucacaagugcgacaauaccuguauggaauccgugaaaaacggcacauacgauuauccuaaguacagcgaggaagccaaacugaaucgcgaggagaucgacgggguuaaacuugaaucuaccagaaucuaucaaauucuggcgaucuacuccacaguggcuagcucccucguccuggugguuucucugggcgccauuagcuuuuggaugugcuccaacggaucucuccagugccggaucuguauuuga

SEQ ID NO: 196410 - RNA, 1701 nt, Artificial Sequence; identical to SEQ ID NO: 194741
  derived and/or modified CDS sequence (opt5) from hemagglutinin__InfluenzaA__ADD96836

SEQ ID NO: 196411 - RNA, 1701 nt, Artificial Sequence; identical to SEQ ID NO: 194741
  derived and/or modified CDS sequence (opt5) from hemagglutinin__InfluenzaA__ADD96846

SEQ ID NO: 196412 - RNA, 1701 nt, Artificial Sequence; identical to SEQ ID NO: 196293
  derived and/or modified CDS sequence (opt5) from hemagglutinin__InfluenzaA__ADD96856

SEQ ID NO: 196413 - RNA, 1701 nt, Artificial Sequence; identical to SEQ ID NO: 195094
  derived and/or modified CDS sequence (opt5) from hemagglutinin__InfluenzaA__ADD96886

SEQ ID NO: 196414 - RNA, 1701 nt, Artificial Sequence; identical to SEQ ID NO: 196368
  derived and/or modified CDS sequence (opt5) from hemagglutinin__InfluenzaA__ADD96896

SEQ ID NO: 196415 - RNA, 1701 nt, Artificial Sequence; identical to SEQ ID NO: 195905
  derived and/or modified CDS sequence (opt5) from hemagglutinin__InfluenzaA__ADD96906

SEQ ID NO: 196416 - RNA, 1701 nt, Artificial Sequence; identical to SEQ ID NO: 195905
  derived and/or modified CDS sequence (opt5) from hemagglutinin__InfluenzaA__ADD96916

SEQ ID NO: 196417 - RNA, 1701 nt, Artificial Sequence; identical to SEQ ID NO: 195905
  derived and/or modified CDS sequence (opt5) from hemagglutinin__InfluenzaA__ADD96926

SEQ ID NO: 196418 - RNA, 1701 nt, Artificial Sequence
  derived and/or modified CDS sequence (opt5) from hemagglutinin__InfluenzaA__ADD96936
augaaggccauccuggugguccuccuguacaccuucgcuacagccaacgcggacacgcuuugcauuggcuaucacgcuaauaacagcaccgauacaguugacaccgugcuggagaaaaaugugacagucacccauuccgugaacauccucgaagauaagcacaaugggaaacuguguaaacuuagaggaguugcuccccugcaucucggcaagugcaacauugccggguggauccugggaaauccugagugugaaucucugagcacagccuccucuuggagcuacauuguggagaccuccucuagcgacaacggcacgugcuauccgggggauuuuaucgacuacgaagaacuccgggagcagcuguccagcgucucuuccuucgaacgcuuugagaucuuccccaagaccagcucuuggccuaaucacgauuccaacaagggagugacagccgcuuguccccaugccggcgcgaaaucuuuuuauaagaaucuuauuuggcugaucaaaaagggcaacagcuacccuaaacucuccaagagcuauauuaaugacaaggggaaagaaguucuggugcuuuggggaauccaccaccccuccaccucugccgaucaacagagccuguaccagaacgcugacgccuacgucuucgugggcacauccagauauagcaagaaauuuaagccugagauugcuauccggccgaaagugcgcgaucaggaggggagaaugaauuacuauuggacccucgucgaacccggagacaagauuacguucgaggccacaggcaaccugguugugccucgguacgcguuugccauggaacgcaacgcugggucuggaaucaucauuuccgauacccccgugcaugacugcaauacaaccugucaaaccccuaaaggcgccaucaacacaagccugcccuuccagaauauucacccgaucacgauuggcaagugcccuaaguaugucaaaucuaccaagcucagacuggcuacagggcuucggaacgugcccagcauccagucccgcggacuguuuggcgccaucgccggguucauugagggaggcuggaccgggaugguugacggaugguacggcuaucaucaccagaaugaacaaggcucuggguacgcugcggaucucaaaagcacacagaacgccaucgacgagauuaccaauaaggugaacuccgucaucgagaaaaugaauacgcaguuuacagcugugggaaaggaguucaaccaccuggagaagagaauugaaaaucuuaacaaaaagguugaugacggcuuccuggauaucuggaccuacaaugccgagcuccuggugcugcucgaaaacgagcggacccuggacuaucaugauagcaaugucaaaaaccuuuacgagaaggugcgcucucagcugaaaaacaaugccaaggaaaucgggaacggauguuuugaguucuaucacaagugcgacaauacauguauggaauccgucaaaaacggcaccuacgauuauccuaaguacagcgaggaagcuaaacucaauagagaggagauugacggggugaagcuggaaucuacacggaucuaucaaauucuugccaucuacuccacgguugcgagcucccuggugcucgucgugucucugggcgcuauuagcuuuuggaugugcuccaacggaucucugcagugccgcaucuguauuuga

SEQ ID NO: 196419 - RNA, 1701 nt, Artificial Sequence
  derived and/or modified CDS sequence (opt5) from hemagglutinin__InfluenzaA__ADD96946
augaaggccauccuggugguccuccuguacaccuucgcuacagccaacgcggacacgcuuugcauuggcuaucacgcuaauaacagcaccgauacaguugacaccgugcuggagaaaaaugugacagucacccauuccgugaaccuccuggaagauaagcacaaugggaaacuuuguaagcugagaggaguugcgccccuccaucugggcaaaugcaacaucgccggguggauucugggaaauccugagugugaaucucucagcacagcuuccucuuggagcuacaucguggagaccuccucuagcgacaacggcacgugcuauccgggggauuuuauugacuacgaagaacugcgggagcagcuuuccagcgucucuuccuucaagcgcuuugaaaucuuccccaagaccagcucuuggccuaaucacgauuccaacaaaggagugacagccgcuuguccccaugccggcgccaagagcuuuuauaaaaaucugaucuggcucguuaagaaaggcaacucuuacccuaagcuguccaagagcuauauuaaugacaaagggaaggaggugcuuguccuguggggaauccaccaccccuccaccucugccgaucaacagagccucuaccagaacgcugacgccuacguguucgugggcacauccagauauagcaaaaaguuuaaaccugaaauugcuauccggccgaagguccgcgaucaggaggggagaaugaauuacuauuggacccugguugagcccggagacaaaauuacguucgaagccacaggcaaccugguggugccucgguacgcguuugccauggagcgcaacgcugggucuggaaucauuaucuccgauacccccguccaugacugcaauacaaccugucaaaccccuaagggcgccaucaacacaagccuccccuuccagaauauucacccgaucacgauuggcgaaugcccuaaguaugugaaaucuaccaagcugagacuugcuacagggcugcggaacguucccagcauccagucccgcggacucuuuggcgccauugccggguucaucgagggaggcuggaccgggaugguggacggaugguacggcuaucaucaccagaaugaacaaggcucuggguacgcugcggaucugaaaagcacacagaacgccaucgacaagauuaccaauaaagucaacuccgugaucgagaagaugaauacgcaguuuacagcuguuggaaaggaguucaaccaccuugagaaaagaauugagaaucugaacaagaaaguggaugacggcuuccucgauaucuggaccuacaaugccgaacugcugguccuccuggagaacgaacggacccuugacuaucaugauagcaaugugaagaaccuguacgagaaaguccgcucucagcucaagaacaaugccaaggagauugggaacggauguuuugaguucuaucacaaaugcgacaauacauguauggaauccgugaagaacggcaccuacgauuauccuaaauacagcgaagaggcuaagcugaauagagaagagaucgacgggguuaaacuugagucuacacggaucuaucaaauucuggccaucuacuccacgguggcgagcucccucguccuggugguuucucugggcgcuauuagcuuuuggaugugcuccaacggaucucuccagugccgcaucuguauuuga

SEQ ID NO: 196420 - RNA, 1701 nt, Artificial Sequence
  derived and/or modified CDS sequence (opt5) from hemagglutinin__InfluenzaA__ADD96956
augaaggccauccuggugguccuccuguacaccuucgcuacagccaacgcggacacgcuuugcauuggcuaucacgcuaauaacagcaccgauacaguugacaccgugcuggagaaaaaugugacagucacccauuccgugaaccuccuggaagauaagcacaaugggaaacuuuguaagcugagaggaguugcuccccuccaucugggcaaaugcaacaucgccggguggauucugggaaauccugagugugaaucucucagcacagccuccucuuggagcuacaucguggagaccuccucuagcgacaacggcacgugcuauccgggggauuuuauugacuacgaagaacugcgggagcagcuuuccagcgucucuuccuucgaacgcuuugagaucuuccccaagaccagcucuuggccuaaucacgauuccaacaagggagugacagccgcuuguccccaugccggcgcgaaaucuuuuuauaagaaucugaucuggcucguuaaaaagggcaacagcuacccuaaacuguccaagagcuauauuaaugacaaggggaaagaagugcuuguccuguggggaauccaccaccccuccaccucugccgaucaacagagccucuaccagaacgcugacgccuacguguucgugggcacauccagauauagcaagaaauuuaagccugagauugcuauccggccgaaaguccgcgagcaggaagggagaaugaauuacuauuggacccugguuaagcccggagauaaaauuacguucgaggccacaggcaaccugguggugccucgguacgcguuugccauggaacgcaacgcugggucuggaaucauuaucuccgacacccccguccaugauugcaauacaaccugucaaaccccuaagggcgccaucaacacaagccuccccuuccagaauauucacucuaucacgauuggcaagugcccgaaauauguuaagagcaccaaacugagacuugcuacagggcugcggaacgugccuuccauccagucucgcggacucuuuggcgccauugccggguucaucgagggaggcuggaccgggaugguggacggaugguacggcuaucaucaccagaaugaacaaggcagcggguacgcugcggaccugaaguccacacagaacgccaucgaugagauuaccaauaaagucaacagcgugaucgagaagaugaauacgcaguuuacagcuguuggaaaggaguucaaccaccuugagaaaagaauugaaaaucugaacaagaaaguggacgauggcuuccucgacaucuggaccuacaaugccgagcugcugguccuccuggaaaacgagcggacccuugauuaucaugacucuaaugugaagaaccuguacgagaaaguccgcucccagcucaagaacaaugccaaggaaauugggaacggauguuuugaguucuaucacaaaugcgauaauacauguauggaaagcgugaagaacggcaccuacgacuaucccaaauacucugaggaagcuaagcugaauagagaggagaucgaugggguuaaacuugaauccacacggaucuaucaaauucuggccaucuacagcacgguggcguccucucucguccuggugguuagccugggcgcuauuuccuuuuggaugugcucuaacggaagccuccagugccgcaucuguauuuga

SEQ ID NO: 196421 - RNA, 1701 nt, Artificial Sequence; identical to SEQ ID NO: 194741
  derived and/or modified CDS sequence (opt5) from hemagglutinin__InfluenzaA__ADD96976

SEQ ID NO: 196422 - RNA, 1701 nt, Artificial Sequence; identical to SEQ ID NO: 194741
  derived and/or modified CDS sequence (opt5) from hemagglutinin__InfluenzaA__ADD96986

SEQ ID NO: 196423 - RNA, 1701 nt, Artificial Sequence
  derived and/or modified CDS sequence (opt5) from hemagglutinin__InfluenzaA__ADD97035
augaaggccauccuggugguccuccuguacaccuucgcuacagccaacgcggacacgcuuugcauuggcuaucacgcuaauaacagcaccgauacaguugacaccgugcuggagaaaaaugugacagucacccauuccgugaaccuccuggaagauaagcacaaugggaaacuuuguaagcugagaggaguugcuccccuccaucugggcaaaugcaacaucgccggguggauucugggaaauccugagugugaaucucucagcacagccuccucuuggagcuacaucguggagaccuccucuagcgacaacggcacgugcuauccgggggauuuuauugacuacgaagaacugcgggagcagcuuuccagcgucucuuccuucgaacgcuuugagaucuuccccaagaccagcucuuggccuaaucacgauuccaacaagggagugacagccgcuuguccccaugccggcgcgaaaucuuuuuauaagaaucugaucuggcucguuaaaaagggcaacagcuacccuaaacuguccaagagcuauauuaaugacaaggggaaagaagugcuuguccuguggggaauccaccaccccuccaccucugccgaucaacagagccucuaccagaacgcugacgccuacguguucgugggcacauccagauauagcaagaaauuuaagccugagauugcuauccggccgaaaguccgcgaucaggaggggagaaugaauuacuauuggacccugguugaacccggagacaagauuacguucgaggccacaggcaaccugguggugccucgguacgcguuugccauggaacgcaacgcugggucuggaaucauuaucuccgauacccccguccaugacugcaauacaaccugucaaaccccuaaaggcgccaucaacacaagccuccccuuccagaauauucacccgaucacgauuggcaagugcccuaaguaugugaaaucuaccaagcugagaauggcuacagggcuucggaacguucccagcauccagucccgcggacuguuuggcgccauugccggguucaucgagggaggcuggaccgggaugguggacggaugguacggcuaucaucaccagaaugaacaaggcucuggguacgcugcggaucucaaaagcacacagaacgccaucgacgagauuaccaauaaggucaacuccgugaucgagaaaaugaauacgcaguuuacagcuguuggaaaggaguucaaccaccuggagaagagaauugaaaaucuuaacaaaaagguggaugacggcuuccuggauaucuggaccuacaaugccgagcuccugguccugcucgaaaacgagcggacccuggacuaucaugauagcaaugugaaaaaccuuuacgagaagguccgcucucagcugaaaaacaaugccaaggaaauugggaacggauguuuugaguucuaucacaagugcgacaauacauguauggaauccgugaaaaacggcaccuacgauuauccuaaguacagcgaggaagcuaaacucaauagagaggagaucgacgggguuaagcuggaaucuacacggaucuaucaaauucuugccaucuacuccacgguggcgagcucccugguccucgugguuucucugggcgcuauuagcuuuuggaugugcuccaacggaucucugcagugccgcaucuguauuuga

SEQ ID NO: 196424 - RNA, 1701 nt, Artificial Sequence
  derived and/or modified CDS sequence (opt5) from hemagglutinin__InfluenzaA__ADD97045
augaaggccauccuggugguccuccuguacaccuucgcuacagccaacgcggacacgcuuugcauuggcuaucacgcuaauaacagcaccgauacaguugacaccgugcuggagaagaaugugacagucacccauuccgugaaccuccuggaagauaagcacaaugggaaacuuuguaagcugagaggaguugcuccccuccaucugggcaaaugcaacaucgccggguggauucugggaaauccugagugugaaucucucagcacagccuccucuuggagcuacaucguggagaccuccucuagcgacaacggcacgugcuauccgggggauuuuaccgacuacgaagaacugcgggagcagcuuuccagcgucucuuccuucgaacgcuuugagauuuuccccaagacaagcucuuggccuaaucacgauuccaacaagggagugaccgccgcuuguccccaugccggcgcgaaaucuuuuuauaagaaucugaucuggcucguuaaaaagggcaacagcuacccuaaacuguccaagagcuauaucaaugacaaggggaaagaagugcuuguccuguggggcauucaccaccccuccacaucugccgaucaacagagccucuaccagaacgcugacgccuacguguucgugggaaccuccagauauagcaagaaauuuaagccugagaucgcuauucggccgaaaguccgcgaucaggaggggagaaugaauuacuauuggacgcugguugaacccggagacaagaucacauucgaggccaccggcaaccugguggugccucgguacgcguuugccauggaacgcaacgcugggucuggaauuaucauuuccgauacacccguccaugacugcaauaccaccugucaaacaccuaaaggcgccaucaacacgagccuccccuuccagaauauccacccgauuaccaucggcaagugcccuaaguaugugaaaucuacaaagcugagacuugcuaccgggcugcggaacguucccagcauucagucccgcggacucuuuggcgccaucgccggguucauugagggaggcuggacagggaugguggacggaugguacggcuaucaucaccagaaugaacaaggcucuggguacgcugcggaucugaaaagcacccagaacgccaucgacgagaucacgaauaaggucaacuccgugauugagaaaaugaauacacaguuuaccgcuguuggaaaggaguucaaccaccuugagaagagaaucgaaaaucugaacaaaaagguggaugacggcuuccucgauauuuggaccuacaaugccgagcugcugguccuccuggaaaacgagcggacacuugacuaucaugauagcaaugugaaaaaccuguacgagaagguccgcucucagcucaaaaacaaugccaaggaaaucgggaacggauguuuugaguucuaucacaagugcgacaauaccuguauggaauccgugaaaaacggcacauacgauuauccuaaguacagcgaggaagcuaaacugaauagagaggagauugacgggguuaaacuugaaucuacgcggaucuaucaaauccuggccauuuacuccaccguggcgagcucccucguccuggugguuucucugggcgcuaucagcuuuuggaugugcuccaacggaucucuccagugccgcauuuguaucuga

SEQ ID NO: 196425 - RNA, 1701 nt, Artificial Sequence; identical to SEQ ID NO: 196424
  derived and/or modified CDS sequence (opt5) from hemagglutinin__InfluenzaA__ADD97055

SEQ ID NO: 196426 - RNA, 1701 nt, Artificial Sequence; identical to SEQ ID NO: 196424
  derived and/or modified CDS sequence (opt5) from hemagglutinin__InfluenzaA__ADD97123

SEQ ID NO: 196427 - RNA, 1701 nt, Artificial Sequence
  derived and/or modified CDS sequence (opt5) from hemagglutinin__InfluenzaA__ADD97161
augaaggccauccuggugguccuccuguacaccuucgcuacagccaacgcggacacgcuuugcauuggcuaucacgcuaauaacagcaccgauacaguugacaccgugcuggagaagaaugugacagucacccauuccgugaaccuccuggaagauaagcacaaugggaaacuuuguaagcugagaggaguugcuccccuccaucugggcaaaugcaacaucgccggguggauucugggaaauccugagugugaaucucucagcacagccuccucuuggagcuacaucguggagaccuccucuagcgacaacggcacgugcuauccgggggauuuuauugacuacgaagaacugcgggagcagcuuuccagcgucucuuccuucgaacgcuuugagaucuuccccaagaccagcucuuggccuaaucacgauuccaacaagggagugacagccgcuuguccccaugccggcgcgaaaucuuuuuauaagaaucugaucuggcucguuaaaaagggcaaaagcuacccuaagcuguccaagagcuauauuaacgacaaagggaagaaagugcuuguccuguggggaauccaccaccccuccaccucugccgaucaacagagccucuaccagaaugcugacgccuacguguucgugggcacauccagauauagcaagaaauuuaagccugaaauugcuauccggccgaaaguccgcgaucaggaggggagaaugaacuacuauuggacccugguugagcccggagacaagauuacguucgaagccacaggcaaucugguggugccucgguacgcguuugccauggagcgcaacgcugggucuggaaucauuaucuccgauacccccguccaugacugcaacacaaccugucaaaccccuaagggcgccaucaauacaagccuccccuuccagaacauucacccgaucacgauuggcaaaugcccuaaguaugugaaaucuaccaagcugagacuugcuacagggcugcggaauguucccagcauccagucccgcggacucuuuggcgccauugccggguucaucgaaggaggcuggaccgggaugguggacggaugguacggcuaucaucaccagaacgagcaaggcucuggguacgcugcggaucugaaaagcacacagaaugccaucgacgaaauuaccaacaaggucaauuccgugaucgagaagaugaacacgcaguuuacagcuguuggaaaagaguucaaucaccuugaaaagagaauugagaaccugaauaaaaagguggaugacggcuuccucgauaucuggaccuacaacgccgaacugcugguccuccuggagaaugaacggacccuugacuaucaugauagcaacgugaaaaaucuguacgagaagguccgcucucagcucaagaacaacgccaaagagauugggaauggauguuuugaguucuaucacaagugcgacaacacauguauggaguccgugaaaaauggcaccuacgauuauccuaaguacagcgaagaggcuaaacugaacagagaagagaucgacgggguuaaacuugagucuacacggaucuaucaaauucuggccaucuacuccacgguggcgagcucccucguccuggugguuucucugggcgcuauuagcuuuuggaugugcuccaauggaucucuccagugccgcaucuguauuuga

SEQ ID NO: 196428 - RNA, 1701 nt, Artificial Sequence
  derived and/or modified CDS sequence (opt5) from hemagglutinin__InfluenzaA__ADD97171
augaaggccauccuggugguccuccuguacaccuucgcuacagccaacgcggacacgcuuugcauuggcuaucacgcuaauaacagcaccgauacaguugacaccgugcuggagaagaaugugacagucacccauuccgugaaccuccuggaagauaagcacaaugggaaacuuuguaagcugagaggaguugcuccccuccaucugggcaaaugcaacaucgccggguggauucugggaaauccugagugugaaucucucagcacagccuccucuuggagcuacaucguggagaccuccucuagcgacaacggcacgugcuauccgggggauuuuauugacuacgaagaacugcgggagcagcuuuccagcgucucuuccuucgaacgcuuugagaucuuccccaagaccagcucuuggccuaaucacgauuccaacaagggagugacagccgcuuguccccaugccggcgcgaaaucuuuuuauaagaaucugaucuggcucguuaaaaagggcaacagcuacccuaaacuguccaagagcuauauuaaugacaaggggaaagaagugcuuguccuguggggaauccaccaccccuccaccucugccgaucaacagagccucuaccagaacgcugacgccuacguguucgugggcacauccagauauagcaagaaauuuaagccugagauugcuauccggccgaaaguccgcgaucaggaggggagaaugaauuacuauuggacccugguugaacccggagacaagauuacguucgaggccacaggcaaccugguggugccucgguacgcguuugccauggaacgcaacgcugggucuggaaucauuaucuccgauacccccguccaugacugcaauacaaccugucaaaccccuaaaggcgccaucaacacaagccuccccuuccagaauauucacccgaucacgauuggcaagugcccuaaguaugugaaaucuaccaagcugagacuugcuacagggcugcggaacguucccagcauccagucccgcggacucuuuggcgccauugccggguucaucgagggaggcuggaccgggaugguggacggaugguacggcuaucaucaccagaaugaacaaggcucuggguacgcugcggaucugaaaagcacacagaacgccaucgacgagauuaccaauaaggucaacuccgugaucgagaaaaugaauacgcaguuuacagcuguuggaaaggaguucaaccaccuugagaagagaauugaaaaucugaacaaaaagguggaugacggcuuccucgauaucuggaccuacaaugccgagcugcugguccuccuggaaaacgagcggacccuugacuaucaugauagcaaugugaaaaaccuguacgagaagguccgcucucagcucaaaaacaaugccaaggaaauugggaacggauguuuugaguucuaucacaagugcgacaauacauguauggaauccgugaaaaacggcaccuacgauuauccuaaguacagcgaggaagcuaaacugaauagagaggagaucgacgggguuaaacuugaaucuacacggaucuaucaaauucuggccaucuacuccacgguggcgagcucccucguccuggugguuucucugggcgcugugagcuuuuggaugugcuccaacggaucucuccagugccgcauuuguaucuga

SEQ ID NO: 196429 - RNA, 1701 nt, Artificial Sequence; identical to SEQ ID NO: 194741
  derived and/or modified CDS sequence (opt5) from hemagglutinin__InfluenzaA__ADD97181

SEQ ID NO: 196430 - RNA, 1701 nt, Artificial Sequence; identical to SEQ ID NO: 194741
  derived and/or modified CDS sequence (opt5) from hemagglutinin__InfluenzaA__ADD97201

SEQ ID NO: 196431 - RNA, 1701 nt, Artificial Sequence; identical to SEQ ID NO: 196424
  derived and/or modified CDS sequence (opt5) from hemagglutinin__InfluenzaA__ADD97211

SEQ ID NO: 196432 - RNA, 1701 nt, Artificial Sequence; identical to SEQ ID NO: 194741
  derived and/or modified CDS sequence (opt5) from hemagglutinin__InfluenzaA__ADD97231

SEQ ID NO: 196433 - RNA, 1701 nt, Artificial Sequence
  derived and/or modified CDS sequence (opt5) from hemagglutinin__InfluenzaA__ADD97241
augaaggccauccuggugguccuccuguacaccuucgcuacagccaacgcggacacgcuuugcauuggcuaucacgcuaauaacagcaccgauacaguugacaccgugcuggagaagaaugugacagucacccauuccgugaaccuccuggaagauaagcacaaugggaaacuuuguaagcugagaggaguugcuccccuccaucugggcaaaugcaacaucgccggguggauucugggaaauccugagugugaaucucucagcacagccuccucuuggagcuacaucguggagaccuccucuagcgacaacggcacgugcuauccgggggauuuuaccgacuacgaagaacugcgggagcagcuuuccagcgucucuuccuucgaacgcuuugagauuuuccccaagacaagcucuuggccuaaucacgauuccaacaagggagugaccgccgcuuguccccaugccggcgcgaaaucuuuuuauaagaaucugaucuggcucguuaaaaagggcaacagcuacccuaaacuguccaagagcuauaucaaugacaaggggaaagaagugcuuguccuguggggcauucaccaccccuccacaucugccgaucaacagagccucuaccagaacgcugacgccuacguguucgugggaaccuccagauauagcaagaaauuuaagccugagaucgcuauucggccgaaaguccgcgaucaggaggggagaaugaauuacuauuggacgcugguugaacccggagacaagaucacauucgaggccaccggcaaccugguggugccucgguacgcguuugccauggaacgcaacgcugggucuggaauuaucauuuccgauacacccguccauaauugcaacaccaccugucaaacaccuaaaggcgccaucaauacgagccuccccuuccagaacauccacccgauuaccaucggcaagugcccuaaguaugugaaaucuacaaagcugagacuugcuaccgggcugcggaauguucccagcauucagucccgcggacucuuuggcgccaucgccggguucauugagggaggcuggacagggaugguggacggaugguacggcuaucaucaccagaacgaacaaggcucuggguacgcugcggaccugaaaagcacccagaaugccaucgaugagaucacgaacaaggucaauuccgugauugagaaaaugaacacacaguuuaccgcuguuggaaaggaguucaaucaccuugagaagagaaucgaaaaccugaauaaaaagguggacgauggcuuccucgacauuuggaccuacaacgccgagcugcugguccuccuggaaaaugagcggacacuugauuaucaugacagcaacgugaaaaaccuguacgagaagguccgcucucagcucaaaaauaacgccaaggaaaucgggaauggauguuuugaguucuaucacaagugcgauaacaccuguauggaauccgugaaaaauggcacauacgacuauccuaaguacagcgaggaagcuaaacugaacagagaggagauugaugggguuaaacuugaaucuacgcggaucuaucaaauccuggccauuuacuccaccguggcgagcucccucguccuggugguuucucugggcgcuaucagcuuuuggaugugcuccaauggaucucuccagugccgcauuuguaucuga

SEQ ID NO: 196434 - RNA, 1701 nt, Artificial Sequence; identical to SEQ ID NO: 196424
  derived and/or modified CDS sequence (opt5) from hemagglutinin__InfluenzaA__ADD97251

SEQ ID NO: 196435 - RNA, 1701 nt, Artificial Sequence; identical to SEQ ID NO: 194741
  derived and/or modified CDS sequence (opt5) from hemagglutinin__InfluenzaA__ADD97261

SEQ ID NO: 196436 - RNA, 1701 nt, Artificial Sequence
  derived and/or modified CDS sequence (opt5) from hemagglutinin__InfluenzaA__ADD97271
augaaggccauccuggugguccuccuguacaccuucgcuacagccaacgcggacacgcuuugcauuggcuaucacgcuaauaacagcaccgauacaguugacaccgugcuggagaaaaaugugacagucacccauuccgugaaccuccuggaagauaagcacaaugggaaacuuuguaagcugagaggaguuacaccccuccaucugggcaaaugcaacaucgccggguggauucugggaaauccugagugugaaucucucagcaccgccuccucuuggagcuacaucguggagacguccucuagcgacaacgggaccugcuauccgggcgauuuuauugacuacgaagaacugcgggagcagcuuuccagcgucucuuccuucgaacgcuuugagaucuuccccaagacaagcucuuggccuaaucacgauuccaacaagggagugaccgcugccuguccccaugcuggcgccaagagcuuuuauaagaaucugaucuggcucguuaaaaagggcaacucuuacccuaaacuguccaagagcuauauuaaugacaaggggaaagaagugcuuguccuguggggaauccaccaccccuccacaucugcggaucaacagagccucuaccagaacgccgacgcuuacguguucgugggcaccuccagauauagcaagaaauuuaagccugagauugccauccggccgaaaguccgcgaucaggaggggagaaugaauuacuauuggacgcugguugaacccggagacaagauuacauucgaggcuaccggcaaccugguggugccucgguacgccuuugcgauggaacgcaacgccgggucuggaaucauuaucuccgauacacccguccaugacugcaauaccaccugucaaacaccuaaaggcgcuaucaacacgagccuccccuuccagaauauucacccgaucaccauuggcaagugcccuaaguaugugaaaucuacaaagcugagacuugccaccgggcugcggaacauccccagcauucagucccgcggacucuuuggcgcuaucgccggguucaucgagggaggcuggacagggaugguugacggaugguacggcuaucaucaccagaaugaacaaggcucuggguacgccgcugaucugaaaagcacccagaacgcgauugacgagaucacgaauaaggugaacuccgucauugagaaaaugaauacacaguuuaccgccgugggaaaggaguucaaccaccuugagaagagaaucgaaaaucugaacaaaaagguugaugacggcuuccucgauauuuggaccuacaaugcugagcugcuggugcuccuggaaaacgagcggacacuugacuaucaugauagcaaugucaaaaaccuguacgagaaggugcgcucucagcucaaaaacaaugccaaggaaaucgggaacggauguuuugaguucuaucacaagugcgacaauaccuguauggaauccgucaaaaacggcacauacgauuauccuaaguacagcgaggaagccaaacugaauagagaggagaucgacggggugaaacuugaaucuacgcggauuuaucaaauccuggcuauuuacuccaccguugccagcucccucgugcuggucgugucucugggcgcgaucagcuuuuggaugugcuccaacggaucucuccagugccgcauuuguaucuga

SEQ ID NO: 196437 - RNA, 1701 nt, Artificial Sequence; identical to SEQ ID NO: 196428
  derived and/or modified CDS sequence (opt5) from hemagglutinin__InfluenzaA__ADD97281

SEQ ID NO: 196438 - RNA, 1701 nt, Artificial Sequence; identical to SEQ ID NO: 194741
  derived and/or modified CDS sequence (opt5) from hemagglutinin__InfluenzaA__ADD97291

SEQ ID NO: 196439 - RNA, 1701 nt, Artificial Sequence
  derived and/or modified CDS sequence (opt5) from hemagglutinin__InfluenzaA__ADD97311
augaaggccauccuggugguccuccuguacaccuucgcuacagccaacgcggacacgcuuugcauuggcuaucacgcuaauaacagcaccgauacaguugacaccauccuggagaaaaaugugacagugacccauuccgucaaccuccuggaagauaagcacaaugggaaacuuuguaagcugagaggaguggcuccccuccaucugggcaaaugcaacauugccggguggauccugggaaauccugagugugaaucucucagcacagccuccucuuggagcuacauuguugagaccuccucuagcgacaacggcacgugcuauccgggggauuuuaucgacuacgaagaacugcgggagcagcuuuccagcgugucuuccuucgaacgcuuugagaucuuccccaagaccagcucuuggccuaaucacgauuccaacaagggagucacagccgcuuguccccaugccggcgcgaaaucuuuuuauaagaaucugauuuggcucgugaaaaagggcaacagcuacccuaaacuguccaagagcuauaucaaugacaaggggaaagaaauucuuguucuguggggaauccaccaccccuccaccauugccgaucaacagucucucuaccagaacgcugacgccuacguguucgucggcacaagcagauauuccaagaaauuuaagccugagaucgcuauucggccgaaagugcgcgaucaggaggggagaaugaaguacuauuggacccugguggaacccggagacaaaaucacguucgaggccacaggcaaucuggucguuccucgguacgcguuugccauggaacgcaacgcugggagcggaaucauuaucucugauacccccgugcauaacugcaauacaaccugucaaaccuccaagggcgccauuaacacaagccucccuuuccagaauauccaccccauuacgaucggcaagugcccgaaauaugugaagucuaccaaacugagacuugcuacagggcugcggaacgucccuagcauccagucccgcggacucuuuggcgccauugccggguucaucgagggaggcuggaccgggaugguggacggaugguacggcuaucaucaccagaaugaacaaggcucuggguacgcugcggaccuuaagagcacacagaacgccauugaugagaucaccaauaaaguuaacuccgugauugagaagaugaauacgcaguuuacagcugucggaaaggaguucaaccaccuggagaaaagaaucgaaaaucugaacaagaaaguggacgauggcuuccucgacaucuggaccuacaaugccgagcugcugguucuccuggaaaacgagcggacccuugauuaucaugacagcaaugugaagaaccuguacgagaaaguccgcucucagcucaagaacaaugccaaggaaauugggaacggauguuuugaguucuaucacaaaugcgauaauacauguauggaauccgugaagaacggcaccuacgacuaucccaaauacagcgaggaagcuaagcugaauagagaggagaucgauggggucaaacuugaaucuacacggauuuaucaaauccuggccauuuacuccacgguggcgagcucccucguucugguggucucucugggcgcuaucagcuuuuggaugugcuccaacggaucucuccagugccgcauuuguaucuga

SEQ ID NO: 196440 - RNA, 1701 nt, Artificial Sequence; identical to SEQ ID NO: 196424
  derived and/or modified CDS sequence (opt5) from hemagglutinin__InfluenzaA__ADD97321

SEQ ID NO: 196441 - RNA, 1701 nt, Artificial Sequence; identical to SEQ ID NO: 195905
  derived and/or modified CDS sequence (opt5) from hemagglutinin__InfluenzaA__ADD97331

SEQ ID NO: 196442 - RNA, 1701 nt, Artificial Sequence
  derived and/or modified CDS sequence (opt5) from hemagglutinin__InfluenzaA__ADD97341
augaaggccauccuggugguccuccuguacaccuucgcuacaguuaacgccgacacgcuuugcauuggcuaucacgcgaauaacagcaccgauacaguggacaccgugcuggagaaaaaugucacagugacccauuccguuaaccuccuggaagauaagcacaaugggaaacuuuguaagcugagaggaguggcuccccuccaucugggcaaaugcaacaucgccggguggauucugggaaauccugagugugaaucucucagcacagccuccucuuggagcuacaucgucgagaccuccucuagcgacaacggcacgugcuauccgggggauuuuauugacuacgaagaacugcgggagcagcuuuccagcgugucuuccuucgaacgcuuugagaucuuccccaagaccagcucuuggccuaaucacgauuccaacaagggaguuacagcugccuguccccaugcuggcgccaagagcuuuuauaagaaucugaucuggcucgugaaaaagggcaacucuuacccuaaacuguccaagagcuauauuaaugacaaggggaaagaaguccuugugcuguggggaauccaccaccccuccaccucuacagaucaacagagccucuaccagaacgcggacgccuacguguucgucggcaccuccagauauagcaagaaauuuaagccugagauugcuauccggccgaaaguucgcgaucaggaggggagaaugaauuacuauuggacgcugguggaacccggagacaagauuacauucgaggccaccggcaaccugguggucccucgguacgcuuuugccauggaacgcaacgcggggucuggaaucauuaucuccgauacacccgugcaugacugcaauaccaccugucaaacaccuaaaggcgccaucaacacgagccuccccuuccagaauauucacccgaucaccauuggcaagugcccuaaguauguuaaaucuacaaagcugagacuugcuaccgggcugcggaacauccccagcauucagucccgcggacucuuuggcgccaucgcuggguucaucgagggaggcuggacagggaugguggacggaugguacggcuaucaucaccagaaugaacaaggcucuggguacgccgccgaucugaaaagcacccagaacgcuauugacgagaucacgaauaaggucaacuccgugauugagaaaaugaauacacaguuuaccgcgguuggaaaggaguucaaccaccuugagaagagaaucgaaaaucugaacaaaaagguggaugacggcuuccucgauauuuggaccuacaaugccgagcugcugguccuccuggaaaacgagcggacacuugacuaucaugauagcaaugugaaaaaccuguacgagaagguccgcucucagcucaaaaacaaugcuaaggaaaucgggaacggauguuuugaguucuaucacaagugcgacaauaccuguauggaauccgugaaaaacggcacauacgauuauccuaaguacagcgaggaagccaaacugaauagagaggagaucgacgggguuaaacuugaaucuacgcggauuuaucaaauccuggccauuuacuccaccguggcuagcucccucguccuggugguuucucugggcgccaucagcuuuuggaugugcuccaacggaucucuccagugccgcauuuguaucuga

SEQ ID NO: 196443 - RNA, 1701 nt, Artificial Sequence; identical to SEQ ID NO: 195905
  derived and/or modified CDS sequence (opt5) from hemagglutinin__InfluenzaA__ADD97351

SEQ ID NO: 196444 - RNA, 1701 nt, Artificial Sequence; identical to SEQ ID NO: 195905
  derived and/or modified CDS sequence (opt5) from hemagglutinin__InfluenzaA__ADD97361

SEQ ID NO: 196445 - RNA, 1701 nt, Artificial Sequence
  derived and/or modified CDS sequence (opt5) from hemagglutinin__InfluenzaA__ADD97371
augaaggccauccuggugguccuccuguacaccuucgcuacagccaacgcggacacgcuuugcauuggcuaucacgcuaauaacagcaccgauacaguugacaccgugcuggagaaaaaugugacagucacccauuccgugaaccuccuggaagauaagcacaaugggaaacuuuguaagcugagaggaguugcuccccuccaucugggcaaaugcaacaucgccggguggauucugggaaauccugagugugaaucucucagcacagccuccucuuggagcuacaucguggagaccuccucuagcgacaacggcacgugcuauccgggggauuuuauugacuacgaagaacugcgggagcagcuuuccagcgucucuuccuucgaacgcuuugagaucuuccccaagaccagcucuuggccuaaucacgauuccaacaagggagugacagccgcuuguccccaugccggcgcgaaaucuuuuuauaagaaucugaucuggcucguuaaaaagggcaacagcuacccuaaacuguccaagagcuauauuaaugacaaggggaaagaagugcuuguccuguggggaauccaccaccccuccaccucugccgaucaacagagccucuaccagaacgcugacgccuacguguucgugggcacauccagauauagcaagaaauuuaagccugagauugcuauccggccgaaaguccgcgagcaggaagggagaaugaauuacuauuggacccugguugagcccggagauaagauuacguucgaagccacaggcaaccugguggugccucgguacgcguuugccauggagcgcaacgcugggucuggaaucauuaucuccgacacccccguccaugauugcaauacaaccugucaaaccccuaaaggcgccaucaacacaagccuccccuuccagaauauucacccgaucacgauuggcaagugcccuaaguaugugaaaucuaccaagcugagacuugcuacagggcugcggaacguucccagcauccagucccgcggacucuuuggcgccauugccggguucaucgaaggaggcuggaccgggaugguggacggaugguacggcuaucaucaccagaaugagcaaggcucuggguacgcugcggaccugaaaagcacacagaacgccaucgaugagauuaccaauaaggucaacuccgugaucgaaaagaugaauacgcaguuuacagcuguuggaaaggaguucaaccaccuugaaaagagaauugagaaucugaacaaaaagguggacgauggcuuccucgacaucuggaccuacaaugccgaacugcugguccuccuggagaacgagcggacccuugauuaucaugacagcaaugugaaaaaccuguacgaaaagguccgcucucagcucaaaaacaaugccaaggagauugggaacggauguuuugaguucuaucacaagugcgauaauacauguauggaguccgugaaaaacggcaccuacgacuauccuaaguacagcgaagaggcuaaacugaauagagaggaaaucgaugggguuaaacuugagucuacacggaucuaucaaauucuggccaucuacuccacgguggcgagcucccucguccuggugguuucucugggcgcuauuagcuuuuggaugugcuccaacggaucucuccagugccgcguguguaucuga

SEQ ID NO: 196446 - RNA, 1701 nt, Artificial Sequence; identical to SEQ ID NO: 195905
  derived and/or modified CDS sequence (opt5) from hemagglutinin__InfluenzaA__ADD97381

SEQ ID NO: 196447 - RNA, 1701 nt, Artificial Sequence; identical to SEQ ID NO: 194741
  derived and/or modified CDS sequence (opt5) from hemagglutinin__InfluenzaA__ADD97391

SEQ ID NO: 196448 - RNA, 1701 nt, Artificial Sequence; identical to SEQ ID NO: 195905
  derived and/or modified CDS sequence (opt5) from hemagglutinin__InfluenzaA__ADD97411

SEQ ID NO: 196449 - RNA, 1701 nt, Artificial Sequence; identical to SEQ ID NO: 195905
  derived and/or modified CDS sequence (opt5) from hemagglutinin__InfluenzaA__ADD97421

SEQ ID NO: 196450 - RNA, 1701 nt, Artificial Sequence; identical to SEQ ID NO: 194741
  derived and/or modified CDS sequence (opt5) from hemagglutinin__InfluenzaA__ADD97431

SEQ ID NO: 196451 - RNA, 1701 nt, Artificial Sequence
  derived and/or modified CDS sequence (opt5) from hemagglutinin__InfluenzaA__ADD97441
augaaggccauccuggugguccuccuguacaccuucgcuacagccaacgcggacacgcuuugcauuggcuaucacgcuaauaacagcaccgauacaguugacaccauccuggagaagaaugugacagugacccauuccgucaaccuccuggaagauaagcacaaugggaaacuuuguaagcugagaggaguggcuccccuccaucugggcaaaugcaacauugccggguggauccugggaaauccugagugugaaucucucagcacagccuccucuuggagcuacauuguugagaccuccucuagcgacaacggcacgugcuauccgggggauuuuaucgacuacgaagaacugcgggagcagcuuuccagcgugucuuccuucgaacgcuuugagaucuuccccaagaccagcucuuggccuaaucacgauuccaacaagggagucacagccgcuuguccccaugccggcgcgaaaucuuuuuauaagaaucugauuuggcucgugaaaaagggcaacagcuacccuaaacuguccaagagcuauaucaaugacaaggggaaagaaauucuuguucuguggggaauccaccaccccuccaccucugccgaucaacagagccucuaccagaacgcugacgccuacguguucgucggcacauccagauauagcaagaaauuuaagccugagauugcuauccggccgaaagugcgcgaucaggaggggagaaugaauuacuauuggacccugguggaacccggagacaagauuacguucgaggccacaggcaaccuggucguuccucgguacgcguuugccauggaacgcaacgcugggucuggaaucaucauuuccgauacccccgugcaugacugcaauacaaccugucaaaccccuaaaggcgccaucaacacaagccuccccuuccagaauauucacccgaucacgauuggcaagugcccuaaguaugugaaaucuaccaagcugagacuugcuacagggcugcggaacguccccagcauccagucccgcggacucuuuggcgccaucgccggguucauugagggaggcuggaccgggaugguggacggaugguacggcuaucaucaccagaaugaacaaggcucuggguacgcugcggaucugaaaagcacacagaacgccaucgacgagauuaccaauaagguuaacuccgugaucgagaaaaugaauacgcaguuuacagcugucggaaaggaguucaaccaccuugagaagagaauugaaaaucugaacaaaaagguggaugacggcuuccucgauaucuggaccuacaaugccgagcugcugguucuccuggaaaacgagcggacccuugacuaucaugauagcaaugugaaaaaccuguacgagaagguccgcucucagcucaaaaacaaugccaaggaaaucgggaacggauguuuugaguucuaucacaagugcgacaauacauguauggaauccgugaaaaacggcaccuacgauuauccuaaguacagcgaggaagcuaaacugaauagagaggagauugacggggucaaacuugaaucuacacggaucuaucaaauucuggccaucuacuccacgguggcgagcucccucguucugguggucucucugggcgcuauuagcuuuuggaugugcuccaacggaucucuccagugccgcaucuguauuuga

SEQ ID NO: 196452 - RNA, 1701 nt, Artificial Sequence; identical to SEQ ID NO: 196445
  derived and/or modified CDS sequence (opt5) from hemagglutinin__InfluenzaA__ADD97451

SEQ ID NO: 196453 - RNA, 1701 nt, Artificial Sequence; identical to SEQ ID NO: 196445
  derived and/or modified CDS sequence (opt5) from hemagglutinin__InfluenzaA__ADD97461

SEQ ID NO: 196454 - RNA, 1701 nt, Artificial Sequence; identical to SEQ ID NO: 196293
  derived and/or modified CDS sequence (opt5) from hemagglutinin__InfluenzaA__ADD97471

SEQ ID NO: 196455 - RNA, 1701 nt, Artificial Sequence; identical to SEQ ID NO: 196293
  derived and/or modified CDS sequence (opt5) from hemagglutinin__InfluenzaA__ADD97481

SEQ ID NO: 196456 - RNA, 1701 nt, Artificial Sequence
  derived and/or modified CDS sequence (opt5) from hemagglutinin__InfluenzaA__ADD97491
augaaggccauccuggugguccuccuguacaccuucgcuacagccaacgcggacacgcuuugcauuggcuaucacgcuaauaacagcaccgauacaguugacaccgugcuggagaaaaaugugacagucacccauuccgugaaccuccuggaagauaagcacaaugggaaacuuuguaagcugagaggagaggcuccccuccaucugggcaaaugcaacaucgccggguggauucugggaaauccugaaugugagucucucagcacagccuccucuuggagcuacaucguugaaaccuccucuagcgacaacggcacgugcuauccgggggauuuuauuaauuacgaggagcugcgggaacagcuuuccagcgugucuuccuucgagcgcuuugaaaucuuccccaagaccagcucuuggccuaaccacgacuccaauaagggagucacagccgcuuguccccaugccggcgcgaaauccuuuuauaagaaccugaucuggcucgugaaaaagggcaauucuuacccuaaacuguccaagagcuauauuaacgauaaggggaaagagguucuugugcuguggggaauccaccaccccuccaccucugccgaccaacagagccucuaccagaaugcugaugccuacgucuucgugggcacauccagauauagcaagaaauuuaagccugagauugcuauccggccgaaagugcgcgaccaggaagggagaaugaacuacuauuggacccuggucgagcccggagauaagauuacguucgaagccacaggcaaccugguugugccucgguacgcguuugccauggagcgcaaugcugggucuggaaucauuaucuccgacacccccgugcaugauugcaacacaaccugucaaaccccuaaaggcgccaucaauacaagccuccccuuccagaacauucacccgaucacgauuggcaagugcccuaaguaugucaaaucuaccaagcugagacuugcuacagggcugcggaaugugcccagcauccagucccgcggacucuuuggcgccauugccggguucaucgaaggaggcuggaccgggaugguugacggaugguacggcuaucaucaccagaacgagcaaggcucuggguacgcugcggaccugaaaagcacacagaaugccaucgauaagauuaccaacaaagugaauagcgucaucgagaagaugaacacgcaguuuacagcugugggaaaggaauuuaaucaccuugagaaaagaauugaaaaccugaauaagaaaguugacgauggcuuccucgacaucuggaccuacaacgccgagcugcuggugcuccuggaaaaugagcggacccuugauuaucaugacagcaacgucaagaaccuguacgagaaagugcgcucucagcucaagaauaacgccaaggaaauugggaauggauguuucgaguucuaucacaaaugcgauaacacauguauggaauccgucaagaauggcaccuacgacuauccuaaauacagcgaggaagcuaagcugaacagagaggagaucgauggggugaaacuugaaucuacacggaucuaucaaauucuggccaucuacuccacgguugcgagcucccucgugcuggucgugucucugggcgcuauuagcuuuuggaugugcuccaauggaucucuccagugccgcaucuguauuuga

SEQ ID NO: 196457 - RNA, 1701 nt, Artificial Sequence; identical to SEQ ID NO: 196456
  derived and/or modified CDS sequence (opt5) from hemagglutinin__InfluenzaA__ADD97501

SEQ ID NO: 196458 - RNA, 1701 nt, Artificial Sequence; identical to SEQ ID NO: 195094
  derived and/or modified CDS sequence (opt5) from hemagglutinin__InfluenzaA__ADD97511

SEQ ID NO: 196459 - RNA, 1701 nt, Artificial Sequence
  derived and/or modified CDS sequence (opt5) from hemagglutinin__InfluenzaA__ADD97531
augaaggccauccuggugguccuccuguacaccuucgcuacagccaacgcggacacgcuuugcauuggcuaucacgcuaauaacagcaccgauacaguugacaccauccuggagaaaaaugugacagugacccauuccgucaaccuccuggaagauaagcacaaugggaaacuuuguaagcugagaggaguggcuccccuccaucugggcaaaugcaacauugccggguggauccugggaaauccugagugugaaucucucagcacagccuccucuuggagcuacauuguugagaccuccucuagcgacaacggcacgugcuauccgggggauuuuaucgacuacgaagaacugcgggagcagcuuuccagcgugucuuccuucgaacgcuuugagaucuuccccaagaccagcucuuggccuaaucacgauuccaacaagggagucacagccgcuuguccccaugccggcgcgaaaucuuuuuauaagaaucugauuuggcucgugaaaaagggcaacagcuacccuaaacuguccaagagcuauaucaaugacaaggggaaagaaauucuuguucuguggggaauccaccaccccuccaccauugccgaucaacagucucucuaccagaacgcugacgccuacguguucgucggcacaagcagauauuccaagaaauuuaagccugagaucgcuauucggccgaaagugcgcgaucaggaggggagaaugaaguacuauuggacccugguggaacccggagacaaaaucacguucgaggccacaggcaaucuggucguuccucgguacgcguuugccauggaacgcaacgcugggagcggaaucauuaucucugauacccccgugcauaacugcaauacaaccugucaaaccccuaagggcgccauuaacacaucccuccccuuccagaauauccacccgauuacgaucggcaagugcccuaaauaugucaagagcaccaaacugagacuugcuacagggcugcggaacgugcccucuauccagagccgcggacucuuuggcgccauugccggguucaucgagggaggcuggaccgggaugguggacggaugguacggcuaucaucaccagaaugaacaaggcuccggguacgcugcggaccugaagucuacacagaacgccauugaugagaucaccaauaaaguuaacagcgugauugagaagaugaauacgcaguuuacagcugucggaaaggaguucaaccaccuugagaaaagaaucgaaaaucugaacaagaaaguggacgauggcuuccucgacaucuggaccuacaaugccgagcugcugguucuccuggaaaacgagcggacccuugauuaucaugacuccaaugugaagaaccuguacgagaaaguccgcagccagcucaagaacaaugccaaggaaauugggaacggauguuuugaguucuaucacaaaugcgauaauacauguauggaaucugugaagaacggcaccuacgacuauccuaaauacuccgaggaagcuaagcugaauagagaggagaucgauggggucaaacuugaaagcacacggauuuaucaaauccuggccauuuacucuacgguggcguccagccucguucugguggucucccugggcgcuaucucuuuuuggaugugcagcaacggaucccuccagugccgcauuuguaucuga

SEQ ID NO: 196460 - RNA, 1701 nt, Artificial Sequence
  derived and/or modified CDS sequence (opt5) from hemagglutinin__InfluenzaA__ADD97541
augaaggccauccuggugguccuccuguacaccuucgcuacagccaacgcggacacgcuuugcauuggcuaucacgcuaauaacagcaccgauacaguugacaccgugcuggagaaaaaugugacagucacccauuccgugaaccuccuggaagauaagcacaaugggaaacuuuguaagcugagaggaguugcuccccuccaucugggcaaaugcaacaucgccggguggauucugggaaauccugagugugaaucucucagcacagccuccucuuggagcuacaucguggagaccuccucuagcgacaacggcacgugcuauccgggggauuuuauugacuacgaagaacugcgggagcagcuuuccagcgucucuuccuucgaacgcuuugagaucuuccccaagaccagcucuuggccuaaucacgauuccaacaagggagugacagccgcuuguccccauaccggcgccaagagcuuuuauaagaaucugaucuggcucguuaaaaagggcaacucuuacccuaaacuguccaagagcuauauuaaugacaaggggaaagaagugcuuguccuguggggaauccaccaccccuccacaucuaccgaucaacagagccucuaccagaacgcggacgcccauguguucgugggcacguccagauacagcaagaaauuuaagccugagauugcuauccggccgaaaguccgcgaucaggaggggagaaugaauuauuacuggacacugguugaacccggagacaagauuaccuucgaggccacaggcaaccugguggugccucgguaugcuuuugccauggaacgcaacgcggggucuggaaucauuaucuccgauacccccguccacgacugcaauaccacaugucaaacgccuaaaggcgccaucaacaccagccuccccuuccagaauauucauccgaucacaauuggcaagugcccuaaguacgugaaaucuaccaagcugagacuugcuacagggcugcggaacauccccagcauucagucccgcggacucuuuggcgccaucgcuggguucaucgagggaggcuggaccgggaugguugacggaugguauggcuaccaccaccagaaugaacaaggcucuggguaugccgccgaucugaaaagcacgcagaacgcuauugacgagaucacaaauaaggugaacuccgucauugagaaaaugaauacccaguuuaccgcggugggaaaggaguucaaccaucuugagaagagaaucgaaaaucugaacaaaaagguugaugacggcuuccucgauauuuggacauacaaugccgagcugcuggugcuccuggaaaacgagcggacccuugacuaccacgauagcaaugucaaaaaccuguaugagaaggugcgcucucagcucaaaaacaaugcuaaggaaaucgggaacggauguuuugaguucuaccauaagugcgacaauacauguauggaauccgucaaaaacggcacguaugauuacccuaaguauagcgaggaagccaaacugaauagagaggagaucgacggggugaaacuugaaucuacccggauuuaccaaauccuggccauuuauuccacaguugcuagcucccucgugcuggucgugucucugggcgccaucagcuuuuggaugugcuccaacggaucucuccagugccgcauuuguaucuga

SEQ ID NO: 196461 - RNA, 1701 nt, Artificial Sequence; identical to SEQ ID NO: 196293
  derived and/or modified CDS sequence (opt5) from hemagglutinin__InfluenzaA__ADD97551

SEQ ID NO: 196462 - RNA, 1701 nt, Artificial Sequence; identical to SEQ ID NO: 195905
  derived and/or modified CDS sequence (opt5) from hemagglutinin__InfluenzaA__ADD97561

SEQ ID NO: 196463 - RNA, 1701 nt, Artificial Sequence
  derived and/or modified CDS sequence (opt5) from hemagglutinin__InfluenzaA__ADD97571
augaaggccauccuggugguccuccuguacaccuucgcuacagccaacgcggacacgcuuugcauuggcuaucacgcuaauaacagcaccgauacaguugacaccgugcuggagaaaaaugugacagucacccauuccgugaaccuccuggaagauaagcacaaugggaaacuuuguaagcugagaggaguugcuccccuccaucugggcaaaugcaacaucgccggguggauucugggaaauccugagugugaaucucucagcacagccuccucuuggagcuacaucguggagaccuccucuagcgacaacggcacgugcuauccgggggauuuuauuaauuacgaagaacugcgggagcagcuuuccagcgucucucuguucgaacgcuuugagaucuuccccaagaccuccagcuggccuaaccacgacucuaauaagggagugacagccgcuuguccccaugccggcgcgaaauccuuuuauaagaaccucaucuggcugguuaaaaagggcaauagcuacccuaaacuuucuaaguccuauauuaacgauaaggggaaagaagugcugguccucuggggaauccaccaccccagcaccuccgccgaccaacagucucuguaccagaaugcugaugccuacguguucgugggcacaagcagauauuccaagaaauuuaagccugagauugcuauccggccgaaaguccgcgaccaggaggggagaaugaacuacuauuggacccugguugaacccggagauaagauuacguucgaggccacaggcaaccucguggugccucgguacgcguuugccauggaacgcaaugcugggagcggaaucauuaucucugacacccccguccaugauugcaacacaaccugucaaaccccuaaaggcgccaucaauacaucccugcccuuccagaacauucacccgaucacgauuggcaagugcccuaaguaugugaaaagcaccaaacuuagacuggcuacagggcuccggaauguucccucuauccagagccgcggacuguuuggcgccauugccggguucaucgagggaggcuggaccgggaugguggacggaugguacggcuaucaucaccagaacgaacaaggcuccggguacgcugcggaccuuaaaucuacacagaaugccaucgauaagauuaccaacaaagucaauagcgugaucgagaagaugaacacgcaguuuacagcuguuggaaaggaguucaaucaccuggaaaagagaauugagaaccucaauaagaaaguggacgauggcuuccuggacaucuggaccuacaacgccgaacugcucguccugcuugagaaugaacggacccuggauuaucaugacuccaacgugaagaaccucuacgagaaaguccgcagccagcugaagaauaacgccaaggagauugggaauggauguuuugaguucuaucacaaaugcgauaacacauguauggagucugugaagaauggcaccuacgacuauccuaaauacuccgaagaggcuaaacuuaacagagaagagaucgaugggguuaagcuggagagcacacggaucuaucaaauucucgccaucuacucuacgguggcguccagccugguccuggugguuucccucggcgcuauuucuuuuuggaugugcagcaauggaucccugcagugccgcaucuguauuuga

SEQ ID NO: 196464 - RNA, 1701 nt, Artificial Sequence; identical to SEQ ID NO: 194741
  derived and/or modified CDS sequence (opt5) from hemagglutinin__InfluenzaA__ADD97581

SEQ ID NO: 196465 - RNA, 1701 nt, Artificial Sequence; identical to SEQ ID NO: 194741
  derived and/or modified CDS sequence (opt5) from hemagglutinin__InfluenzaA__ADD97591

SEQ ID NO: 196466 - RNA, 1701 nt, Artificial Sequence; identical to SEQ ID NO: 194741
  derived and/or modified CDS sequence (opt5) from hemagglutinin__InfluenzaA__ADD97688

SEQ ID NO: 196467 - RNA, 1701 nt, Artificial Sequence; identical to SEQ ID NO: 196293
  derived and/or modified CDS sequence (opt5) from hemagglutinin__InfluenzaA__ADD97698

SEQ ID NO: 196468 - RNA, 1701 nt, Artificial Sequence; identical to SEQ ID NO: 196293
  derived and/or modified CDS sequence (opt5) from hemagglutinin__InfluenzaA__ADD97888

SEQ ID NO: 196469 - RNA, 1701 nt, Artificial Sequence
  derived and/or modified CDS sequence (opt5) from hemagglutinin__InfluenzaA__ADD97898
augaaggccauccuggugguccuccuguacaccuucgcuacagccaacgcggacacgcuuugcauuggcuaucacgcuaauaacagcaccgauacaguugacaccgugcuggagaagaaugugacagucacccauuccgugaaccuccuggaagauaagcacaaugggaaacuuuguaagcugagaggaguugcuccccuccaucugggcaaaugcaacaucgccggguggauucugggaaauccugagugugaaucucucagcacagccuccucuuggagcuacaucguggagaccuccucuagcgacaacggcacgugcuauccgggggauuuuauugacuacgaagaacugcgggagcagcuuuccagcgucucuuccuucgaacgcuuugagaucuuccccaagaccagcucuuggccuaaucacgauuccaacaagggagugacagccgcuuguccccaugccggcgcgaaaucuuuuuauaagaaucugaucuggcucguuaaaaagggcaacagcuacccuaaacuguccaagagcuauauuaaugacaaggggaaagaagugcuuguccuguggggaauccaccaccccuccaccucuacagaucaacagagccucuaccagaacgccgacgcuuacguguucgugggcaccuccagauauagcaagaaauuuaagccugagauugccauccggccgaaaguccgcgaucaggaggggagaaugaauuacuauuggacgcugguugaacccggagacaagauuacauucgaggcuaccggcaaccugguggugccucgguacgccuuugcgauggaacgcaacgccgggucuggaaucauuaucuccgauacacccguccaugacugcaauaccaccugucaaacaccuaaaggcgcuaucaacacgagccuccccuuccagaauauucacccgaucaccauuggcaagugcccuaaguaugugaaaucuacaaagcugagacuugccaccgggcugcggaacauccccagcauucagucccgcggacucuuuggcgcuaucgccggguucaucgagggaggcuggacagggaugguugacggaugguacggcuaucaucaccagaaugaacaaggcucuggguacgccgcugaucugaaaagcacccagaacgcgauugacgagaucacgaauaaggugaacuccgucauugagaaaaugaauacacaguuuaccgccgugggaaaggaguucaaccaccuugagaagagaaucgaaaaucugaacaaaaagguugaugacggcuuccucgauauuuggaccuacaaugcugagcugcuggugcuccuggaaaacgagcggacacuugacuaucaugauagcaaugucaaaaaccuguacgagaaggugcgcucucagcucaaaaacaaugccaaggaaaucgggaacggauguuuugaguucuaucacaagugcgacaauaccuguauggaauccgucaaaaacggcacauacgauuauccuaaguacagcgaggaagccaaacugaauagagaggagaucgacggggugaaacuugaaucuacgcggauuuaucaaauccuggcuauuuacuccaccguugccagcucccucgugcuggucgugucucugggcgcgaucagcuuuuggaugugcuccaacggaucucuccagugccgcauuuguaucuga

SEQ ID NO: 196470 - RNA, 1701 nt, Artificial Sequence; identical to SEQ ID NO: 195094
  derived and/or modified CDS sequence (opt5) from hemagglutinin__InfluenzaA__ADD97908

SEQ ID NO: 196471 - RNA, 1701 nt, Artificial Sequence; identical to SEQ ID NO: 195905
  derived and/or modified CDS sequence (opt5) from hemagglutinin__InfluenzaA__ADD97918

SEQ ID NO: 196472 - RNA, 1701 nt, Artificial Sequence
  derived and/or modified CDS sequence (opt5) from hemagglutinin__InfluenzaA__ADD97928
augaaggccauccuggugguccuccuguacaccuucgcuacagccaacgcggacacgcuuugcauuggcuaucacgcuaauaacagcaccgauacaguugacaccgugcuggagaagaaugugacagucacccauuccgugaaccuccuggaagauaagcacaaugggaaacuuuguaagcugagaggaguugcuccccuccaucugggcaaaugcaacaucgccggguggauucugggaaauccugagugugaaucucucagcacagccuccucuuggagcuacaucguggagaccuccucuagcggcaacgggacgugcuauccgggagacuuuauugauuacgaagaacugcgggagcagcuuuccagcgucucuuccuucgaacgcuuugagaucuuccccaagaccagcucuuggccuaaucacgacuccaacaagggcgugacagccgcuuguccccaugccggcgcgaaaucuuuuuauaagaaucugaucuggcucguuaaaaaggggaacagcuacccuaaacuguccaagagcuauauuaaugauaagggaaaagaagugcuuguccuguggggcauccaccaccccuccaccucugccgaccaacagagccucuaccagaacgcugaugccuacguguucguggggacauccagauauagcaagaaauuuaagccugagauugcuauccggccgaaaguccgcgaccaggagggaagaaugaauuacuauuggacccugguugaacccggcgauaagauuacguucgaggccacagggaaccugguggugccucgguacgcguuugccauggaacgcaacgcuggaucuggcaucauuaucuccgacacccccguccaugauugcaauacaaccugucaaaccccuaaaggcgccaucaacacaagccuccccuuccagaauauucacccgaucacgauugggaagugcccuaaguaugugaaaucuaccaagcugagacuugcuacaggacugcggaacguucccagcauccagucccgcggccucuuuggggccauugccggauucaucgagggcggguggaccggaaugguggacggcugguacggcuaucaucaccagaaugaacaagggucuggauacgcugcggaccugaaaagcacacagaacgccaucgauggcauuaccaauaaggucaacuccgugaucgagaaaaugaauacgcaguuuacagcuguugggaaggaguucaaccaccuugaaaagagaauugagaaucugaacaaaaagguggacgauggauuccucgacaucuggaccuacaaugccgaacugcugguccuccuggagaacgaacggacccuugauuaucaugacagcaaugugaaaaaccuguacgagaagguccgcucucagcucaaaaacaaugccaaggagauuggcaacggguguuuugaguuccaccauaagugcgauaauacauguauggaguccgugaaaaacggcaccuaugacuacccuaaguauagcgaagaggcuaaacugaauagagaagagaucgauggaguuaaacuugagucuacacggaucuaccaaauucuggccaucuauuccacgguggcgagcucccucguccuggugguuucucugggcgcuauuagcuuuuggaugugcuccaacgggucucuccagugccgcaucuguauuuga

SEQ ID NO: 196473 - RNA, 1701 nt, Artificial Sequence
  derived and/or modified CDS sequence (opt5) from hemagglutinin__InfluenzaA__ADD97938
augaaggccauccuggugguccuccuguacaccuucgcuacagccaacgcggacacgcuuugcauuggcuaucacgcuaauaacagcaccgauacaguugacaccauccuggagaaaaaugugacagugacccauuccgucaaccuccuggaagauaagcacaaugggaaacuuuguaagcugagaggaguggcgccccuccaucugggcaaaugcaacauugccggguggauccugggaaauccugagugugaaucucucagcacagcuuccucuuggagcuacauuguugagaccuccucuagcgacaacggcacgugcuauccgggggauuuuaucgacuacgaagaacugcgggagcagcuuuccagcgugucuuccuucgaacgcuuugagaucuuccccaugaccagcucuuggccuaaucacgauuccaacaagggagucacagccgcuuguccccaugccggcgccaagagcuuuuauaaaaaucugauuuggcucgugaagaaaggcaacucuuacccuaagcuguccaaaagcuauaucaaugacaaggggaaggaaauucuuguucuguggggaauccaccaccccuccaccucugccgaucaacagagccucuaccagaacgcugacgccuacguguucgucggcacauccagauauagcaaaaaguuuaaaccugagauugcuauccggccgaaggugcgcgaucaggaggggagaaugaauuacuauuggacccugguggaacccggagacaaaauuacguucgaggccacaggcaaccuggucguuccucgguacgcguuugccauggaacgcaacgcugggucuggaaucaucauuuccgauacccccgugcaugacugcaauacaaccugucaaaccccuaagggcgccaucaacacaagccuccccuuccagaauauucacccgaucacgauuggcaaaugcccuaaguaugugaagucuaccaaacugagacuugcuacagggcugcggaacguccccagcauccagucccgcggacucuuuggcgccaucgccggguucauugagggaggcuggaccgggaugguggacggaugguacggcuaucaucaccagaaugaacaaggcucuggguacgcugcggaucuuaagagcacacagaacgccaucgacgagauuaccaauaaaguuaacuccgugaucgagaagaugaauacgcaguuuacagcugucggaaaagaguucaaccaccuggagaagagaauugaaaaucugaacaagaaaguggaugacggcuuccucgauaucuggaccuacaaugccgagcugcugguucuccuggaaaacgagcggacccuugacuaucaugauagcaaugugaagaaccuguacgagaaaguccgcucucagcucaagaacaaugccaaagaaaucgggaacggauguuuugaguucuaucacaagugcgacaauacauguauggaauccgugaagaacggcaccuacgauuauccuaaauacagcgaggaagcuaagcugaauagagaggagauugacggggucaaacuugaaucuacacggaucuaucaaauucuggccaucuacuccacgguggcgagcucccucguucugguggucucucugggcgcuauuagcuuuuggaugugcuccaacggaucucuccagugccgcaucuguauuuga

SEQ ID NO: 196474 - RNA, 1701 nt, Artificial Sequence
  derived and/or modified CDS sequence (opt5) from hemagglutinin__InfluenzaA__ADD97948
augaaggccauccugcucgugcugcuuuacaccuucgcuacagccaacgcggacacgcugugcauuggcuaucacgcuaauaacagcaccgauacagucgacaccguucucgagaaaaaugugacagugacccauuccgucaaccugcuugaagauaagcacaaugggaaacuguguaagcucagaggaguggcuccccugcaucugggcaaaugcaacaucgccggguggauucucggaaauccugagugugaaucucugagcacagccuccucuuggagcuacaucguugagaccuccucuagcgacaacggcacgugcuauccgggggauuuuauugacuacgaagaacuucgggagcagcuguccagcgugucuuccuucgaacgcuuugagauguuccccaagaccagcucuuggccuaaucacgauuccaacaagggagucacagccgcuuguccccaugccggcgcgaaaucuuuuuauaagaaucucaucuggcuggugaaaaagggcaacagcuacccuaaacuuuccaagagcuauaucaaugacaaggggaaagaaguucuggugcucuggggcauucaccaccccuccaccucugccgaucaacagagccuguaccagaacgcugacgccuacgucuucgugggaacauccagauauagcaagaaauuuaagccugagaucgcuauucggccgaaagugcgcgaucaggaggggagaaugaauuacuauuggacccuggucgaacccggagacaagaucacguucgaggccacaggcaaccucguugugccucgguacgcguuugccauggaacgcaacgcugggucuggaauuaucauuuccgauacccccgugcaugacugcaauacaaccugucaaaccccuaaaggcgccaucaacacaagccugcccuuccagaauauccacccgauuacgaucggcaagugcccuaaguaugucaaaucuaccaaacuuagacuggcuacagggcuccggaacgugcccagcauucagucccgcggacuguuuggcgccaucgccggguucauugagggaggcuggaccgggaugguugacggaugguacggcuaucaucaccagaaugaacaaggcucuggguacgcugcggaucuuaagagcacacagaacgccaucgacgagaucaccaauaaggugaacuccgucauugagaaaaugaauacgcaguuuacagcugugggaaaggaguucaaccaccuggagaagagaaucgaaaaucucaacaaaaagguugaugacggcuuccuggauauuuggaccuacaaugccgagcugcucgugcugcuugaaaacgagcggacccuggacuaucaugauagcaaugucaaaaaccucuacgagaaggugcgcucucagcugaaaaacaaugccaaggaaaucgggaacggauguuuugaguucuaucacaagugcgacaauacauguauggaauccgucaaaaacggcaccuacgauuauccuaaguacagcgaggaagcuaaacuuaauagagaggagauugacggggugaagcuggaaucuacacggaucuaucaaauccucgccauuuacuccacgguugcgagcucccuggugcuggucgugucucucggcgcuaucagcuuuuggaugugcuccaacggaucucugcagugccgcauuuguaucuga

SEQ ID NO: 196475 - RNA, 1701 nt, Artificial Sequence
  derived and/or modified CDS sequence (opt5) from hemagglutinin__InfluenzaA__ADD97958
augaaggccauccuggugguccuccuguacaccuucgcuacagccaacgcggacacgcuuugcauuggcuaucacgcuaauaacagcaccgauacaguugacaccgugcuggagaaaaaugugacagucacccauuccgugaaccuccuggaagauaagcacaaugggaaacuuuguaagcugagaggaguugcuccccuccaucugggcaaaugcaacaucgccggguggauucugggaaauccugagugugaaucucucagcacagccuccucuuggagcuacaucguggagaccuccucuagcgacaacggcacgugcuauccgggggauuuuauugacuacgaagaacugcgggagcagcuuuccagcgucucuuccuucgaacgcuuugagaucuuccccaagaccagcucuuggccuaaucacgauuccaacaagggagugacagccgcuuguccccaugccggcgcgaaaucuuuuuauaagaaucugaucuggcucguuaaaaagggcaacagcuacccuaaacuguccaagagcuauauuaaugacaaggggaaagaagugcuuguccuguggggaauccaccaccccuccaccucugccgaucaacagagccucuaccagaacgcugacgccuacguguucgugggcacauccagauauagcaagaaauuucagccugagauugcuauccggccgaagguccgcgaucaagaggggagaaugaauuacuauuggacccugcuggaacccggagacaaaauuacguucgaggccacaggcaaccucguugugccucgguacgcguuugccauggaacgcaacgcugggucuggaaucauuaucuccgauacccccgugcaugacugcaauacaaccugucagaccccuaagggcgccaucaacacaagccugcccuuccagaauauucacccgaucacgauuggcaaaugcccuaaguaugucaagucuaccaaacuuagacuggcuacagggcuccggaacgugcccagcauccagucccgcggacuguuuggcgccauugccggguucaucgagggaggcuggaccgggaugguugacggaugguacggcuaucaucaccaaaaugaacagggcucuggguacgcugcggaucuuaagagcacacagaacgccaucgacgagauuaccaauaaagugaacuccgucaucgagaagaugaauacgcaguuuacagcugugggaaaagaguucaaccaccuggagaagagaauugaaaaucucaacaagaaaguugaugacggcuuccuggauaucuggaccuacaaugccgagcugcucgugcugcuugaaaacgagcggacccuggacuaucaugauagcaaugucaagaaccucuacgagaaagugcgcucucaacugaagaacaaugccaaagaaauugggaacggauguuuugaguucuaucacaagugcgacaauacauguauggaauccgucaagaacggcaccuacgauuauccuaaauacagcgaggaagcuaaacuuaauagagaggagaucgacggggugaagcuggaaucuacacggaucuaucagauucucgccaucuacuccacgguugcgagcucccuggugcuggucgugucucucggcgcuauuagcuuuuggaugugcuccaacggaucucugcagugccgcaucuguauuuga

SEQ ID NO: 196476 - RNA, 1701 nt, Artificial Sequence; identical to SEQ ID NO: 194741
  derived and/or modified CDS sequence (opt5) from hemagglutinin__InfluenzaA__ADD97968

SEQ ID NO: 196477 - RNA, 1701 nt, Artificial Sequence; identical to SEQ ID NO: 196469
  derived and/or modified CDS sequence (opt5) from hemagglutinin__InfluenzaA__ADD97978

SEQ ID NO: 196478 - RNA, 1701 nt, Artificial Sequence; identical to SEQ ID NO: 196423
  derived and/or modified CDS sequence (opt5) from hemagglutinin__InfluenzaA__ADD97988

SEQ ID NO: 196479 - RNA, 1701 nt, Artificial Sequence
  derived and/or modified CDS sequence (opt5) from hemagglutinin__InfluenzaA__ADD97998
augaaggccauccuggugguccuccuguacaccuucgcuacagccaacgcggacacgcuuugcauuggcuaucacgcuaauaacagcaccgauacaguugacaccgugcuggagaaaaaugugacagucacccauuccgugaaccuccuggaagauaagcacaaugggaaacuuuguaagcugagaggaguugcuccccuccaucugggcaaaugcaacaucgccggguggauucugggaaauccugagugugaaucucucagcacagccuccucuuggagcuacaucguggagaccuccucuagcgacaacggcacgugcuauccgggggauuuuauugacuacgaagaacugcgggagcagcuuuccagcgucucuuccuucgaacgcuuugagaucuuccccaaggccagcucuuggccuaaucacgauuccaacaagggagugaccgcugccuguccccaugcgggcgccaagagcuuuuauaagaaucugaucuggcucguuaaaaagggcaacucuuacccuaaacuguccaagagcuauauuaaugacaaggggaaagaagugcuuguccuguggggaauccaccaccccuccacaucugcugaucaacagagccucuaccagaacgccgacgcuuacguguucgugggcaccuccagauauagcaagaaauuuaagccugagauugccauccggccgaaaguccgcgaucaggaggggagaaugaauuacuauuggacacugguugaacccggagacaagauuaccuucgaggcgacgggcaaccugguggugccucgguacgccuuugaaauggagcgcaacgcugggucuggaaucauuaucuccgauacacccguccaugacugcaauaccacaugucaaaccccuaaaggcgccaucaacaccagccuccccuuccagaauauucacccgaucacaauuggcaagugcccuaaguaugugaaaucuacgaagcugagacuugcuaccgggcugcggaacguucccagcauccagucccgcggacucuuuggcgccauugccggguucaucgaaggaggcuggacagggaugguggacggaugguacggcuaucaucaccagaaugagcaaggcucuggguacgcugcggaucugaaaagcacccagaacgccaucgacgagauuacaaauaaggucaacuccgugaucgagaaaaugaauacccaguuuacggcuguuggaaaggaguucaaccaccuugaaaagagaauugagaaucugaacaaaaagguggaugacggcuuccucgauaucuggacauacaaugccgaacugcugguccuccuggagaacgagcggacccuugacuaucaugauagcaaugugaaaaaccuguacgaaaagguccgcucucagcucaaaaacaaugccaaggagauugggaacggauguuuugaguucuaucacaagugcgacaauaccuguauggaauccgugaaaaacggcacauacgauuauccuaaguacagcgaagaggcuaaacugaauagagaggaaaucgacgggguuaaacuugagucuacccggaucuaucaaauucuggccaucuacuccacaguggcgagcucccucguccuggugguuucucugggcgcuauuagcuuuuggaugugcuccaacggaucucuccagugccgcaucuguauuuga

SEQ ID NO: 196480 - RNA, 1701 nt, Artificial Sequence; identical to SEQ ID NO: 196293
  derived and/or modified CDS sequence (opt5) from hemagglutinin__InfluenzaA__ADD98008

SEQ ID NO: 196481 - RNA, 1701 nt, Artificial Sequence
  derived and/or modified CDS sequence (opt5) from hemagglutinin__InfluenzaA__ADD98018
augaaggccauccuggugguccuccuguacaccuucgcuacagccaacgcggacacgcuuugcauuggcuaucacgcuaauaacagcaccgauacaguugacaccgugcuggagaaaaaugugacagucacccauuccgugaaccuccuggaagauaagcacaaugggaaacuuuguaagcugagaggaguugcuccccuccaucugggcaaaugcaacaucgccggguggauucugggaaauccugagugugaaucucucagcacagccuccucuuggagcuacaucguggagaccuccucuagcgacaacggcacgugcuauccgggggauuuuauugacuacgaagaacugcgggagcagcuuuccagcgucucuuccuucgaacgcuuugagaucuuccccaagaccagcucuuggccuaaucacgauuccaacaagggagugacagccgcuuguccccaugccggcgcgaaaucuuuuuauaagaaucugaucuggcucguuaaaaagggcaacagcuacccuaaacuguccaagagcuauauuaaugacaaggggaaagaaauccuugugcuguggggcauucaccaccccuccaccucugccgaucaacagagccucuaccagaacgcugacgccuacgucuucgugggaacauccagauauagcaagaaauuuaagccugagaucgcuacccggccgaaagugcgcgagcaggaagggagaaugaauuacuauuggacgcuggucgagcccggagauaagauuacauucgaagccaccggcaaccugguugugccucgguacgcguuugccauggagcgcaacgcugggucuggaaucauuaucuccgacacacccgugcaugauugcaauaccaccugucaaacaccuaaaggcgccaucaacacgagccuccccuuccagaauauucacucuaucaccauuggcaagugcccgaaguaugucaaaagcacaaagcugagacuugcuaccgggcugcggaacgugccuuccauccagucucgcggacucuuuggcgccauugccggguucaucgaaggaggcuggacagggaugguugacggaugguacggcuaucaucaccagaaugagcaaggcagcggguacgcugcggaccugaaauccacccagaacgccaucgaugagauuacgaauaaggugaacagcgucaucgaaaagaugaauacacaguuuaccgcugugggaaaggaguucaaccaccuugaaaagagaauugagaaucugaacaaaaagguugacgauggcuuccucgacaucuggaccuacaaugccgaacugcuggugcuccuggagaacgagcggacacuugauuaucaugacucuaaugucaaaaaccuguacgaaaaggugcgcucccagcucaaaaacaaugccaaggagauugggaacggauguuuugaguucuaucacaagugcgauaauaccuguauggagagcgucaaaaacggcacauacgacuaucccaaguacucugaagaggcuaaacugaauagagaggaaaucgauggggugaaacuugaguccacgcggaucuaucaaauucuggccaucuacagcaccguugcguccucucucgugcuggucgugagccugggcgcuauuuccuuuuggaugugcucuaacggaagccuccagugccgcaucuguauuuga

SEQ ID NO: 196482 - RNA, 1701 nt, Artificial Sequence; identical to SEQ ID NO: 196445
  derived and/or modified CDS sequence (opt5) from hemagglutinin__InfluenzaA__ADD98028

SEQ ID NO: 196483 - RNA, 1701 nt, Artificial Sequence
  derived and/or modified CDS sequence (opt5) from hemagglutinin__InfluenzaA__ADD98038
augaaggccauccuggugguccuccuguacaccuucgcuacagccaacgcggacacgcuuugcauuggcuaucacgcuaauaacagcaccgauacaguugacaccgugcuggagaaaaaugugacagucacccauuccgugaaccuccuggaagauaagcacaaugggaaacuuuguaagcugagaggaguugcuccccuccaucugggcaaaugcaacaucgccggguggauucugggaaauccugagugugaaucuaucagcacagccuccucuuggagcuacauuguggagaccuccucuagcgacaacggcacgugcuauccgggggauuuuaucgacuacgaagaacuccgggagcagcuguccagcgucucuuccuucgaacgcuuugagaucuuccccaaggccagcucuuggccuaaucacgauuccaacaagggagugaccgcugccuguccccaugcgggcgccaagagcuuuuauaaaaaucuuauuuggcugguuaaaaagggcaacucuuacccuaaacucuccaagagcuauaucaaugacaaggggaaagaagugcugguccuuuggggcauucaccaccccuccacaucugcugaucaacagagccuguaccagaacgccgacgcuuacguguucgugggaaccuccagauauagcaagaaauuuaagccugagaucgccauucggccgaaaguccgcgaucaggaggggagaaugaauuacuauuggacacucguugaacccggagacaagaucaccuucgaggcgacgggcaaccugguggugccucgguacgccuuugaaauggagcgcaacgcugggucuggaauuaucaucuccgauacacccguccaugacugcaauaccacaugucaaaccccuaaaggcgccauuaacaccagccugcccuuccagaauauccacccgauuacaaucggcaagugcccuaaguaugugaaaucuacgaagcucagacuggcuaccgggcuucggaacguucccagcauucagucccgcggacuguuuggcgccaucgccggguucaucgaaggaggcuggacagggaugguggacggaugguacggcuaucaucaccagaaugagcaaggcucuggguacgcugcggaucucaaaagcacccagaacgccauugacgagaucacaaauaaggucaacuccgugauugagaaaaugaauacccaguuuacggcuguuggaaaggaguucaaccaccuggaaaagagaaucgagaaucuuaacaaaaagguggaugacggcuuccuggauauuuggacauacaaugccgaacuccugguccugcucgagaacgagcggacccuggacuaucaugauagcaaugugaaaaaccuuuacgaaaagguccgcucucagcugaaaaacaaugccaaggagaucgggaacggauguuuugaguucuaucacaagugcgacaauaccuguauggaauccgugaaaaacggcacauacgauuauccuaaguacagcgaagaggcuaaacucaauagagaggaaaucgacgggguuaagcuggagucuacccggauuuaucaaauccuugccauuuacuccacaguggcgagcucccugguccucgugguuucucugggcgcuaucagcuuuuggaugugcuccaacggaucucugcagugccgcauuuguaucuga

SEQ ID NO: 196484 - RNA, 1701 nt, Artificial Sequence; identical to SEQ ID NO: 196469
  derived and/or modified CDS sequence (opt5) from hemagglutinin__InfluenzaA__ADD98048

SEQ ID NO: 196485 - RNA, 1701 nt, Artificial Sequence; identical to SEQ ID NO: 194741
  derived and/or modified CDS sequence (opt5) from hemagglutinin__InfluenzaA__ADD98058

SEQ ID NO: 196486 - RNA, 1701 nt, Artificial Sequence; identical to SEQ ID NO: 194741
  derived and/or modified CDS sequence (opt5) from hemagglutinin__InfluenzaA__ADD98068

SEQ ID NO: 196487 - RNA, 1701 nt, Artificial Sequence; identical to SEQ ID NO: 194983
  derived and/or modified CDS sequence (opt5) from hemagglutinin__InfluenzaA__ADD98078

SEQ ID NO: 196488 - RNA, 1701 nt, Artificial Sequence
  derived and/or modified CDS sequence (opt5) from hemagglutinin__InfluenzaA__ADD98098
augaaggccauccuggugguccuccuguacaccuucgcuacagccaacgcggacacgcuuugcauuggcuaucacgcuaauaacagcaccgauacaguugacaccauccuggagaagaaugugacagugacccauuccgucaaccuccuggaagauaagcacaaugggaaacuuuguaagcugagaggaguggcuccccuccaucugggcaaaugcaacauugccggguggauccugggaaauccugagugugaaucucucagcacagccuccucuuggagcuacauuguugagaccuccucuagcgacaacggcacgugcuauccgggggauuuuaucgacuacgaagaacugcgggagcagcuuuccagcgugucuuccuucgaacgcuuugagaucuuccccaagaccagcucuuggccuaaucacgauuccaacaagggagucacagccgcuuguccccaugccggcgcgaaaucuuuuuauaagaaucugauuuggcucgugaaaaagggcaacagcuacccuaaacuguccaagagcuauaucaaugacaaggggaaagaaguucuugugcuguggggcauucaccaccccuccaccucuagcgaucaacagucccucuaccagaacgccgacgcuuacgucuucgugggaacaagcagauauucuaagaaauuuaagccugagaucgccauucggccgaaagugcgcgaucaggaggggagaaugaauuacuauuggacccuggucgaacccggagacaagaucacguucgaggcuacaggcaaccugguugugccucgguacgccuuugcgguggaacgcaacgccggguccggaauuaucaucagcgauacccccguccaugacugcaauacaaccugucaaaccccuaaaggcgcuauuaacacaucucuccccuuccagaauauccacccgauuacgaucggcaagugcccuaaguaugugaaaagcaccaagcugagacuugccacagggcugcggaacguucccuccauucagucucgcggacucuuuggcgcuaucgccggguucaucgagggaggcuggaccgggaugguggacggaugguacggcuaucaucaccagaaugaacaaggcagcggguacgccgcugaucugaaauccacacagaacgcgauugacgagaucaccaauaaggucaacagcgugauugagaaaaugaauacgcaguuuacagccguuggaaaggaguucaaccaccuugagaagagaaucgaaaaucugaacaaaaagguggaugacggcuuccucgauauuuggaccuacaaugcugagcugcugguccuccuggaaaacgagcggacccuugacuaucaugauucuaaugugaaaaaccuguacgagaagguccgcucccagcucaaaaacaaugccaaggaaaucgggaacggauguuuugaguucuaucacaagugcgacaauacauguauggaaagcgugaaaaacggcaccuacgauuauccuaaguacucugaggaagccaaacugaauagagaggagaucgacgggguuaaacuugaauccacacggauuuaucaaauccuggcuauuuacagcacgguggccuccucucucguccuggugguuagccugggcgcgaucuccuuuuggaugugcucuaacggaagccuccagugccgcauuuguaucuga

SEQ ID NO: 196489 - RNA, 1701 nt, Artificial Sequence; identical to SEQ ID NO: 196456
  derived and/or modified CDS sequence (opt5) from hemagglutinin__InfluenzaA__ADD98118

SEQ ID NO: 196490 - RNA, 1701 nt, Artificial Sequence; identical to SEQ ID NO: 196456
  derived and/or modified CDS sequence (opt5) from hemagglutinin__InfluenzaA__ADD98128

SEQ ID NO: 196491 - RNA, 1701 nt, Artificial Sequence
  derived and/or modified CDS sequence (opt5) from hemagglutinin__InfluenzaA__ADD98138
augaaggccauccuggugguccuccuguacaccuucgcuacagccaacgcggacacgcuuugcauuggcuaucacgcuaauaacagcaccgauacaguugacaccgugcuggagaaaaaugugacagucacccauuccgugaaccuccuggaagauaagcacaaugggaaacuuuguaagcugagaggaguugcuccccuccaucugggcaaaugcaacaucgccggguggauucugggaaauccugagugugaaucucucagcacagccuccucuuggagcuacaucguggagaccuccucuagcgacaacggcacgugcuauccgggggauuuuauuaauuacgaagaacugcgggagcagcuuuccagcgucucuuccuucgaacgcuuugagaucuuccccaagaccagcucuuggccuaaccacgacuccaauaagggagugacagccgcuuguccccaugccggcgcgaaaucuuuuuauaagaaccugaucuggcucguuaaaaagggcaauagcuacccuaaacuguccaagagcuauauuaacgauaaggggaaagaagugcuuguccuguggggaauccaccaccccuccaccucuacagaccaacagagccucuaccagaaugccgaugcuuacguguucgugggcaccuccagauauagcaagaaauuuaagccugagauugccauccggccgaaaguccgcgaccaggaggggagaaugaacuacuauuggacgcugguugaacccggagauaagauuacauucgaggcuaccggcaaccugguggugccucgguacgccuuugcgauggaacgcaauacagggucuggaaucauuaucuccgacacccccguccaugauugcaacaccacaugucaaacgccuaauggcgccaucaacaccagccuccccuuccagaauauucacccgaucacaauuggcaaaugcccuaaguaugugaagucuaccaaacugagacuugcuacagggcugcggaacguucccagcauccagucccgcggacucuuuggcgccauugcuggguucaucgagggaggcuggaccgggaugguggacggaugguacggcuaucaucaccagaaugaacaaggcucuggguacgccgccgaccuuaagagcacgcagaacgcuaucgauaaaauuacaaauaaggucaacuccgugaucgagaaaaugaauacccaguuuaccgcgguuggaaaggaguucaaccaccuugaaaagagaauugagaaucugaacaaaaagguggacgauggcuuccucgacaucuggacauacaaugccgaacugcugguccuccuggagaacgaacggacccuugauuaucaugacagcaacgugaaaaaucuguacgagaagguccgcucucagcucaaaaacaaugcuaaggagauugggaacggauguuuugaguucuaucacaagugcgauaauacauguauggaguccgugaaaaacggcacguacgacuauccuaaguacagcgaagaggccaaacugaauagagaagagaucgaugggguuaagcuggagucuacccggaucuaucaaauucuggccaucuacuccacaguggcuagcucccucguccuggugguuucucugggcgccauuagcuuuuggaugugcuccaacggaucucuccagugccgcaucuguauuuga

SEQ ID NO: 196492 - RNA, 1701 nt, Artificial Sequence
  derived and/or modified CDS sequence (opt5) from hemagglutinin__InfluenzaA__ADD98148
augaaggccauccuggugguccuccuguacaccuucgcuacagccaacgcggacacgcuuugcauuggcuaucacgcuaauaacagcaccgauacaguugacaccgugcuggagaaaaaugugacagucacccauuccgugaaccuccuggaagauaagcacaaugggaaacuuuguaagcugagaggaguugcuccccuccaucugggcaaaugcaacaucgccggguggauucugggaaauccugagugugaaucucucagcacagccuccucuuggagcuacaucguggagaccuccucuagcgacaacggcacgugcuauccgggggauuuuauugacuacgaagaacugcgggagcagcuuuccagcgucucuuccuucgaacgcuuugagaucuuccccaagaccagcucuuggccuaaucacgauuccaacaagggagugacagccgcuuguccccaugccggcgcgaaaucuuuuuauaagaaucugaucuggcucguuaaaaagggcaacagcuacccuaaacuguccaagagcuauauuaaugacaaggggaaagaagugcuuguccuguggggaauccaccaccccuccaccucugccgaucaacagagccucuaccagaacgcugacgccuacguguucgugggcacauccagauauagcaagaaauuuaagccugagauugcuauccggccgaaaguccgcgaucaggaggggagaaugaauuacuauuggacccugguugaacccggagacaagauuacguucgaggccacaggcaaccugguggugccucgguacgcguuugccauggaacgcaacgcugggucuggaaucuucauuuccgauacccccguccaugacugcaauacaaccugucaaaccccuaaaggcgccaucaacacaagccuccccuuucagaauauccacccgauuacgaucggcaagugcccuaaguaugugaaaucuaccaagcugagacuugcuacagggcugcggaacguucccagcauucagucccgcggacucuucggcgccaucgccggguuuauugagggaggcuggaccgggaugguggacggaugguacggcuaucaucaccagaaugaacaaggcucuggguacgcugcggaucugaaaagcacacagaacgccaucgacaagaucaccaauaaagucaacuccgugauugagaagaugaauacgcaguucacagcuguuggaaaggaguucaaccaccuugagaaaagaaucgagaaucugaacaagaaaguggaugacggcuuucucgauauuuggaccuacaaugccgaacugcugguccuccuggagaacgaacggacccuugacuaucaugauagcaaugugaagaaccuguacgagaaaguccgcucucagcucaagaacaaugccaaggagaucgggaacggauguuucgaauuuuaucacaaaugcgacaauacauguauggaguccgugaagaacggcaccuacgauuauccuaaauacagcgaagaggcuaagcugaauagagaagagauugacgggguuaaacuugagucuacacggaucuaucaaauccuggccauuuacuccacgguggcgagcucccucguccuggugguuucucugggcgcuaucagcuucuggaugugcuccaacggaucucuccagugccgcauuuguaucuga

SEQ ID NO: 196493 - RNA, 1701 nt, Artificial Sequence
  derived and/or modified CDS sequence (opt5) from hemagglutinin__InfluenzaA__ADD98158
augaaggccauccuggugguccuccuguacaccuucgcuacagccaacgcggacacgcuuugcauuggcuaucacgcuaauaacagcaccgauacaguugacaccgugcuggagaaaaaugugacagucacccauuccgugaaccuccuggaagauaagcacaaugggaaacuuugugagcugagaggaguugcgccccuccaucugggcaagugcaacaucgccggguggauucugggaaauccugaaugugagucucucagcacagcuuccucuuggagcuacaucguggaaaccuccucuagcgacaacggcacgugcuauccgggggauuuuauugacuacgaggagcugcgggaacagcuuuccagcgucucuuccuucgagcgcuuugaaaucuuccccaaaaccagcucuuggccuaaucacgauuccaacaagggagugacagccgcuuguccccaugccggcgccaagagcuuuuauaaaaaucugaucuggcucguuaagaaaggcaacucuuacccuaagcuguccaaaagcuauauuaaugacaaggggaaggaggugcuuguccuguggggaauccaccaccccuccaccucugccgaucaacagagccucuaccagaacgcugacgccuacguguucgugggcacauccagauauagcaaaaaguuuaaaccugagauugcuauccggccgaagguccgcgaucaggaagggagaaugaauuacuauuggacccugguugagcccggagacaaaauuacguucgaagccacaggcaaccuggugaucccucgguacgcguuugccauggagcgcaacgcugggucuggaauuaucaucuccgauacccccgugcaugacugcaauacaaccugucaaaccccuaagggcgccauuaacacaagccuccccuuccagaauauccacccgauuacgaucggcaaaugcccuaaguaugucaagucuaccaaacugagacuugcuacagggcugcggaacgugcccagcauucagucccgcggacucuuuggcgccaucgccggguucaucgaaggaggcuggaccgggaugguugacggaugguacggcuaucaucaccagaaugagcaaggcucuggguacgcugcggaucuuaagagcacacagaacgccauugacaaaaucaccaauaaggugaacuccgucauugagaaaaugaauacgcaguuuacagcugugggaaaggaguucaaccaccuugaaaagagaaucgaaaaucugaacaaaaagguugaugacggcuuccucgauauuuggaccuacaaugccgagcugcuggugcuccuggaaaacgagcggacccuugacuaucaugauagcaaugucaaaaaccuguacgagaaggugcgcucucagcucaaaaacaaugccaaggaaaucgggaacggauguuuugaguucuaucacaagugcgacaauacauguauggaauccgucaaaaacggcaccuacgauuauccuaaguacagcgaggaagcuaaacugaauagagaggagaucgacggggugaagcuggaaucuacacggauuuaucaaauccuggccauuuacuccacgguugcgagcucccucgugcuggucgugucucugggcgcuaucagcuuuuggaugugcuccaacggaucucuccagugccgcauuuguaucuga

SEQ ID NO: 196494 - RNA, 1701 nt, Artificial Sequence
  derived and/or modified CDS sequence (opt5) from hemagglutinin__InfluenzaA__ADD98168
augaaggccauccuggugguccuccuguacaccuucgcuacagccaacgcggacacgcuuugcauuggcuaucacgcuaauaacagcaccgauacaguugacaccgugcuggagaaaaaugugacagucacccauuccaucaacauucucgaagauaagcacaaugggaaacuguguaaacuuagaggaguggcuccccugcaucucggcaagugcaacaucgccggguggauucugggaaauccugagugugaaucucugagcacagccuccucuuggagcuacaucguugagaccuccucuagcgacaacggcacgugcuauccgggggauuuuaucgacuacgaagaacuccgggagcagcuguccagcgugucuuccuucgaacgcuuugagauuuuccccaagaccagcucuuggccuaaucacgauuccaacaagggagucacagccgcuuguccccaugccggcgcgaaaucuuuuuauaagaaucuuaucuggcuggugaaaaagggcaacagcuacccuaaacucuccaagagcuauauuaaugacaaggggaaagaaguucuggugcuuuggggaauccaccaccccuccaccucugccgaucaacagagccuguaccagaacgcugacgccuacgucuucgugggcacauccagauauagcaagaaauuuaagccugagauugcuauccggccgaaagugcgcgaucaggaggggagaaugaauuacuauuggacccucgucgaacccggagacaagauuacguucgaggccacaggcaaccugguugugccuaaauacgcguuugccauggaacggaacgcugggucuggaaucaucauuuccgauacccccgugcaugacugcaauacaaccugucaaaccccuaagggcgccaucaacacaagccugcccuuccagaauauucacccgaucacgauuggcaagugcccuaaauaugucaagucuaccaaacuccgccuggcuacagggcuuagaaacgugcccagcauccagucccggggacuguuuggcgccaucgccggguucauugagggaggcuggaccgggaugguugacggaugguacggcuaucaucaccagaaugaacaaggcucuggguacgcugcggaucucaagagcacacagaacgccaucgacgagauuaccaauaaagugaacuccgucaucgagaagaugaauacgcaguuuacagcugugggaaaggaguucaaccaccuggagaaacgcauugaaaaucuuaacaagaaaguugaugacggcuuccuggauaucuggaccuacaaugccgagcuccuggugcugcucgaaaacgagagaacccuggacuaucaugauagcaaugucaagaaccuuuacgagaaagugcggucucagcugaagaacaaugccaaggaaaucgggaacggauguuuugaguucuaucacaaaugcgacaauacauguauggaauccgucaagaacggcaccuacgauuauccuaaauacagcgaggaagcuaagcucaaucgcgaggagauugacggggugaaacuggaaucuacaagaaucuaucaaauucuugccaucuacuccacgguugcgagcucccuggugcucgucgugucucugggcgcuauuagcuuuuggaugugcuccaacggaucucugcagugccggaucuguauuuga

SEQ ID NO: 196495 - RNA, 1701 nt, Artificial Sequence; identical to SEQ ID NO: 195913
  derived and/or modified CDS sequence (opt5) from hemagglutinin__InfluenzaA__ADD98188

SEQ ID NO: 196496 - RNA, 1701 nt, Artificial Sequence
  derived and/or modified CDS sequence (opt5) from hemagglutinin__InfluenzaA__ADD98198
augaaggccauccuggugguccuccuguacaccuucgcuacagccaacgcggacacgcuuugcauuggcuaucacgcuaauaacagcaccgauacaguugacaccgugcuggagaaaaaugugacagucacccauuccgugaaccuccuggaagauaagcacaaugggaaacuuuguaagcugagaggaguugcuccccuccaucugggcaaaugcaacaucgccggguggauucugggaaauccugagugugaaucucucagcacagccuccucuuggagcuacaucguggagaccuccucuagcgacaacggcacgugcuauccgggggauuuuauugacuacgaagaacugcgggagcagcuuuccagcgucucuuccuucgaacgcuuugagaucuuccccaagaccagcucuuggccuaaucacgauuccaacaagggagugacagccgcuuguccccaugccggcgcgaaaucuuuuuauaagaaucugaucuggcucguuaaaaagggcaacagcuacccuaaacuguccaagagcuauauuaaugacaaggggaaagaagugcuuguccuguggggaauccaccaccccuccaccucugccgaucaacagagccucuaccagaacgcugacgccuacguguucgugggcacauccagauauagcaagaaauuuaagccugagauugcuauccggccgaaaguccgcgaucaggaggggagaaugaauuacuauuggacccugguugaacccggagacaagauuacguucgaggccacaggcaaccugguggugccucgguacgcguuugccauggaacgcaacgcugggucuggaaucauuaucuccgauacccccguccaugacugcaauacaaccugucaaaccccuaaaggcgccaucaacacaagccuccccuuccagaauauucacccgaucacgauuggcaagugcccuaaguaugugaaaucuaccaagaugagacuggcuacagggcuucggaacguucccagcauccagucccgcggacuguuuggcgccauugccggguucaucgagggaggcuggaccgggaugguggacggaugguacggcuaucaucaccagaaugaacaaggcucuggguacgcugcggaucucaaaagcacacagaacgccaucgacgagauuaccaauaaggucaacuccgugaucgagaaaaugaauacgcaguuuacagcuguuggaaaggaguucaaccaccuggagaagagaauugaaaaucuuaacaaaaagguggaugacggcuuccuggauaucuggaccuacaaugccgagcuccugguccugcucgaaaacgagcggacccuggacuaucaugauagcaaugugaaaaaccuuuacgagaagguccgcucucagcugaaaaacaaugccaaggaaauugggaacggauguuuugaguucuaucacaagugcgacaauacauguauggaauccgugaaaaacggcaccuacgauuauccuaaguacagcgaggaagcuaaacucaauagagaggagaucgacgggguuaagcuggaaucuacacggaucuaucaaauucuugccaucuacuccacgguggcgagcucccugguccucgugguuucucugggcgcuauuagcuuuuggaugugcuccaacggaucucugcagugccgcaucuguauuuga

SEQ ID NO: 196497 - RNA, 1701 nt, Artificial Sequence; identical to SEQ ID NO: 194741
  derived and/or modified CDS sequence (opt5) from hemagglutinin__InfluenzaA__ADD98208

SEQ ID NO: 196498 - RNA, 1701 nt, Artificial Sequence; identical to SEQ ID NO: 194921
  derived and/or modified CDS sequence (opt5) from hemagglutinin__InfluenzaA__ADE20321

SEQ ID NO: 196499 - RNA, 1701 nt, Artificial Sequence; identical to SEQ ID NO: 194921
  derived and/or modified CDS sequence (opt5) from hemagglutinin__InfluenzaA__ADE20331

SEQ ID NO: 196500 - RNA, 1701 nt, Artificial Sequence; identical to SEQ ID NO: 194921
  derived and/or modified CDS sequence (opt5) from hemagglutinin__InfluenzaA__ADE20341

SEQ ID NO: 196501 - RNA, 1701 nt, Artificial Sequence; identical to SEQ ID NO: 196329
  derived and/or modified CDS sequence (opt5) from hemagglutinin__InfluenzaA__ADE20351

SEQ ID NO: 196502 - RNA, 1701 nt, Artificial Sequence; identical to SEQ ID NO: 194921
  derived and/or modified CDS sequence (opt5) from hemagglutinin__InfluenzaA__ADE20375

SEQ ID NO: 196503 - RNA, 1701 nt, Artificial Sequence; identical to SEQ ID NO: 196329
  derived and/or modified CDS sequence (opt5) from hemagglutinin__InfluenzaA__ADE20388

SEQ ID NO: 196504 - RNA, 1701 nt, Artificial Sequence; identical to SEQ ID NO: 194921
  derived and/or modified CDS sequence (opt5) from hemagglutinin__InfluenzaA__ADE20628

SEQ ID NO: 196505 - RNA, 1701 nt, Artificial Sequence; identical to SEQ ID NO: 196329
  derived and/or modified CDS sequence (opt5) from hemagglutinin__InfluenzaA__ADE20638

SEQ ID NO: 196506 - RNA, 1701 nt, Artificial Sequence; identical to SEQ ID NO: 194921
  derived and/or modified CDS sequence (opt5) from hemagglutinin__InfluenzaA__ADE20648

SEQ ID NO: 196507 - RNA, 1701 nt, Artificial Sequence; identical to SEQ ID NO: 194921
  derived and/or modified CDS sequence (opt5) from hemagglutinin__InfluenzaA__ADE20658

SEQ ID NO: 196508 - RNA, 1701 nt, Artificial Sequence; identical to SEQ ID NO: 196329
  derived and/or modified CDS sequence (opt5) from hemagglutinin__InfluenzaA__ADE20668

SEQ ID NO: 196509 - RNA, 1701 nt, Artificial Sequence; identical to SEQ ID NO: 196329
  derived and/or modified CDS sequence (opt5) from hemagglutinin__InfluenzaA__ADE20678

SEQ ID NO: 196510 - RNA, 1701 nt, Artificial Sequence; identical to SEQ ID NO: 194921
  derived and/or modified CDS sequence (opt5) from hemagglutinin__InfluenzaA__ADE20688

SEQ ID NO: 196511 - RNA, 1701 nt, Artificial Sequence; identical to SEQ ID NO: 194921
  derived and/or modified CDS sequence (opt5) from hemagglutinin__InfluenzaA__ADE20708

SEQ ID NO: 196512 - RNA, 1701 nt, Artificial Sequence; identical to SEQ ID NO: 194921
  derived and/or modified CDS sequence (opt5) from hemagglutinin__InfluenzaA__ADE20718

SEQ ID NO: 196513 - RNA, 1701 nt, Artificial Sequence
  derived and/or modified CDS sequence (opt5) from hemagglutinin__InfluenzaA__ADE20728
augaaggccauccuggugguccuccuguacaccuucgcuacagccaacgcggacacgcuuugcauuggcuaucacgcuaauaacagcaccgauacaguugacaccgugcuggagaaaaaugugacagucacccauuccgugaacauccucgaagauaagcacaaugggaaacuguguaaacuuaagggaguugcgccccugcaucucggcaagugcaacauugccggguggauccugggaaauccugagugugaaucucugagcacagcuuccucuuggagcuacauuguggagaccuccucuagcgacaacggcacgugcuauccgggggauuuuaucgacuacgaagaacucagagagcagcuguccagcgucucuuccuucgaacgguuugagaucuuccccaagaccagcucuuggccuaaucacgauuccaacaaaggagugacagccgcuuguccccaugccggcgccaagagcuuuuauaaaaaucuuauuuggcugguuaagaaaggcaacucuuacccuaagcucuccaagagcuauaucaaugacaaagggaaggaagugcugguccuuuggggcauucaccaccccuccaccucugccgaucaacagagccuguaccagaacgcugacgccuacguguucgugggauccagcaaauauucuaagaaauuuaagccugagaucgcuauucgcccgaaagucagagaucaggaggggcggaugaauuacuauuggacacucguugaacccggagacaagaucaccuucgaggccacgggcaaccugguggugccucgcuacgcguuugccauggaaagaaacgcuggguccggaauuaucaucagcgauacacccguccaugacugcaauaccacaugucaaaccccuaagggcgccauuaacaccucucugcccuuccagaauauccacccgauuacaaucggcaaaugcccuaaguaugugaaaagcacgaagcuccggcuggcuaccgggcuucgcaacguucccuccauucagucuagaggacuguuuggcgccaucgccggguucaucgagggaggcuggacagggaugguggacggaugguacggcuaucaucaccagaaugaacaaggcagcggguacgcugcggaucucaaauccacccagaacgccauugacgagaucacaaauaaggucaacagcgugauugagaagaugaauacccaguuuacggcuguuggaaaagaguucaaccaccuggagaagcggaucgaaaaucuuaacaaaaagguggaugacggcuuccuggauauuuggacauacaaugccgagcuccugguccugcucgaaaacgagcgcacccuggacuaucaugauucuaaugugaaaaaccuuuacgagaaggucagaucccagcugaagaacaaugccaaagaaaucgggaacggauguuuugaguucuaucacaagugcgacaauaccuguauggaaagcgugaaaaacggcacauacgauuauccuaaguacucugaggaagcuaaacucaaucgggaggagaucgacgggguuaagcuggaauccacccgcauuuaucaaauccuugccauuuacagcacaguggcguccucucugguccucgugguuagccugggcgcuaucuccuuuuggaugugcucuaacggaagccugcagugcagaauuuguaucuga

SEQ ID NO: 196514 - RNA, 1701 nt, Artificial Sequence; identical to SEQ ID NO: 194921
  derived and/or modified CDS sequence (opt5) from hemagglutinin__InfluenzaA__ADE20738

SEQ ID NO: 196515 - RNA, 1701 nt, Artificial Sequence; identical to SEQ ID NO: 194921
  derived and/or modified CDS sequence (opt5) from hemagglutinin__InfluenzaA__ADE20748

SEQ ID NO: 196516 - RNA, 1701 nt, Artificial Sequence; identical to SEQ ID NO: 196513
  derived and/or modified CDS sequence (opt5) from hemagglutinin__InfluenzaA__ADE20758

SEQ ID NO: 196517 - RNA, 1701 nt, Artificial Sequence; identical to SEQ ID NO: 194921
  derived and/or modified CDS sequence (opt5) from hemagglutinin__InfluenzaA__ADE20768

SEQ ID NO: 196518 - RNA, 1701 nt, Artificial Sequence
  derived and/or modified CDS sequence (opt5) from hemagglutinin__InfluenzaA__ADE20778
augaaggccauccuggugguccuccuguacaccuucgcuacagccaacgcggacacgcuuugcauuggcuaucacgcuaauaacagcaccgauacaguugacaccgugcuggagaaaaaugugacagucacccauuccgugaacauccucgaagauaagcacaaugggaaacuguguaaacuuaagggaguugcgccccugcaucucggcaagugcaacauugccggguggauccugggaaauccugagugugaaucucugagcacagcuuccucuuggagcuacauuguggagaccuccucuagcgacaacggcacgugcuauccgggggauuuuaucgacuacgaagaacucagagagcagcuguccagcgucucuuccuucgaacgguuugagaucuuccccaagaccagcucuuggccuaaucacgauuccaacaaaggagugacagccgcuuguccccaugccggcgccaagagcuuuuauaaaaaucuuauuuggcugguuaagaaaggcaacucuuacccuaagcucuccaagagcuauaucaaugacaaagggaagaaagugcugguccuuuggggcauucaccaccccuccaccucugccgaucaacagagccuguaccagaacgcugacgccuacguguucgugggauccagcaaguauucuaaaaaguuuaaaccugaaaucgcuauucgcccgaaggucagagaucaggaggggcggaugaauuacuauuggacacucguugagcccggagacaagaucaccuucgaagccacgggcaaccugguggugccucgcuacgcguuugccauggagagaaacgcuggguccggaauuaucaucagcgauacacccguccaugacugcaauaccacaugucaaaccccuaaaggcgccauuaacaccucucugcccuuccagaauauccacccgauuacaaucggcaagugcccuaaauauguuaagagcacgaaacuccggcuggcuaccgggcuucgcaacgugcccuccauucagucuagaggacuguuuggcgccaucgccggguucaucgaaggaggcuggacagggaugguggacggaugguacggcuaucaucaccagaaugagcaaggcagcggguacgcugcggaucucaaguccacccagaacgccauugacgaaaucacaaauaaggucaacagcgugauugagaaaaugaauacccaguuuacggcuguuggaaaggaguucaaccaccuggaaaaacggaucgagaaucuuaacaagaaaguggaugacggcuuccuggauauuuggacauacaaugccgaacuccugguccugcucgagaacgaacgcacccuggacuaucaugauucuaaugugaagaaccuuuacgagaaggucagaucccagcugaaaaacaaugccaaggagaucgggaacggauguuuugaguucuaucacaaaugcgacaauaccuguauggagagcgugaagaacggcacauacgauuauccuaaauacucugaagaggcuaagcucaaucgggaagagaucgacgggguuaagcuggaguccacccgcauuuaucaaauccuugccauuuacagcacaguggcguccucucugguccucgugguuagccugggcgcuaucuccuuuuggaugugcucuaacggaagccugcagugcagaauuuguaucuga

SEQ ID NO: 196519 - RNA, 1701 nt, Artificial Sequence; identical to SEQ ID NO: 195905
  derived and/or modified CDS sequence (opt5) from hemagglutinin__InfluenzaA__ADE20788

SEQ ID NO: 196520 - RNA, 1701 nt, Artificial Sequence
  derived and/or modified CDS sequence (opt5) from hemagglutinin__InfluenzaA__ADE20808
augaaggccauccuggugguccuccuguacaccuucgcuacagccaacgcggacacgcuuugcauuggcuaucacgcuaauaacagcaccgauacaguugacaccgugcuggagaaaaaugugacagucacccauuccgugaaccuccuggaagauaagcacaaugggaaacuuuguaagcugagaggaguugcuccccuccaucugggcaaaugcaacaucgccggguggauucugggaaauccugagugugaaucucucagcacagccuccucuuggagcuacaucguggagaccuccucuagcgacaacggcacgugcuauccgggggauuuuauugacuacgaagaacugcgggagcagcuuuccagcgucucuuccuucgaacgcuuugagaucuuccccaagaccagcucuuggccuaaucacgauuccaacaagggagugacagccgcuuguccccaugccggcgcgaaaucuuuuuauaagaaucugaucuggcucguuaaaaagggcaacagcuacccuaaacuguccaagagcuauauuaaugacaaggaaaaagaggugcuuguccugugggggauccaccaccccuccaccucugccgaucaacagagccucuaccagaacgcugacgccuacguguucgugggaacauccagauauagcaagaaauuuaagccugagauugcuauccggccgaaaguccgcgaucaggaaggcagaaugaauuacuauuggacccugguugagcccggggacaagauuacguucgaagccacaggaaaccugguggugccucgguacgcguuugccauggagcgcaacgcuggcucugggaucauuaucuccgauacccccguccaugacugcaauacaaccugucaaaccccuaaaggagccaucaacacaagccuccccuuccagaauauucacccgaucacgauuggcaagugcccuaaguaugugaaaucuaccaagcugagacuugcuacaggccugcggaacguucccagcauccagucccgcgggcucuuuggagccauugccggcuucaucgaagggggauggaccggcaugguggacgggugguacggauaucaucaccagaaugagcaaggcucuggcuacgcugcggaucugaaaagcacacagaacgccaucgacaagauuaccaauaaagucaacuccgugaucgagaagaugaauacgcaguuuacagcuguugggaaggaguucaaccaccuugagaaaagaauugaaaaucugaacaagaaaguggaugacggauuccucgauaucuggaccuacaaugccgagcugcugguccuccuggaaaacgagcggacccuugacuaucaugauagcaaugugaagaaccuguacgagaaaguccgcucucagcucaagaacaaugccaaggaaauuggcaacggguguuuugaguucuaucacaaaugcgacaauacauguauggaauccgugaagaacggaaccuacgauuauccuaaauacagcgaggaagcuaagcugaauagagaggagaucgacggcguuaaacuugaaucuacacggaucuaucaaauucuggccaucuacuccacgguggcgagcucccucguccuggugguuucucugggggcuauuagcuuuuggaugugcuccaacggcucucuccagugccgcaucuguauuuga

SEQ ID NO: 196521 - RNA, 1701 nt, Artificial Sequence; identical to SEQ ID NO: 195905
  derived and/or modified CDS sequence (opt5) from hemagglutinin__InfluenzaA__ADE20818

SEQ ID NO: 196522 - RNA, 1701 nt, Artificial Sequence; identical to SEQ ID NO: 196463
  derived and/or modified CDS sequence (opt5) from hemagglutinin__InfluenzaA__ADE20828

SEQ ID NO: 196523 - RNA, 1701 nt, Artificial Sequence
  derived and/or modified CDS sequence (opt5) from hemagglutinin__InfluenzaA__ADE20848
augaaggccauccuggugguccuccuguacaccuucgcuacagccaacgcggacacgcuuugcauuggcuaucacgcuaauaacagcaccgauacaguugacaccgugcuggagaaaaaugugacagucacccauuccgugaaccuccuggaagauaagcacaaugggaaacuuuguaagcugagaggaguugcuccccuccaucugggcaaaugcaacaucgccggguggauucugggaaauccugagugugaaucucucagcacagccuccucuuggagcuacaucguggagaccuccucuagcgacaacggcacgugcuauccgggggauuuuauuaauuacgaagaacugcgggagcagcuuuccagcgucucuuccuucgaacgcuuugagaucuuccccaagaccagcucuuggccuaaccacgacuccaauaagggagugacagccgcuuguccccaugccggcgcgaaauccuuuuauaagaaccugaucuggcucguuaaaaagggcaauucuuacccuaaacuguccaagagcuauauuaacgauaaggggaaagaagugcuuguccuguggggaauccaccaccccuccaccucugccgaccaacagagccucuaccagaaugcugaugccuacguguucgugggcacauccagauauagcaagaaauuuaagccugagauugcuauccggccgaaaguccgcgaccaggaggggagaaugaacuacuauuggacccugguugaacccggagauaagauuacguucgaggccacaggcaaccugguggugccucgguacgcguuugccauggaacgcaaugcugggucuggaaucauuaucuccgacacccccguccaugauugcaacacaaccugucaaaccccuaaaggcgccaucaauacaagccuccccuuccagaacauucacccgaucacgauuggcaagugcccuaaguaugugaaaucuaccaagcugagacuugcuacagggcugcggaauguucccagcauccagucccgcggacucuuuggcgccauugccggguucaucgagggaggcuggaccgggaugaucgacggaugguacggcuaucaucaccagaacgaacaaggcucuggguacgcugcggaccugaaaagcacacagaaugccauugauaagaucaccaacaaagugaauagcgucauugagaagaugaacacgcaguuuacagcugugggaaaggaguucaaucaccuugagaaaagaaucgagaaccugaauaagaaaguugacgauggcuuccucgacauuuggaccuacaacgccgaacugcuggugcuccuggagaaugaacggacccuugauuaucaugacagcaacgucaagaaccuguacgagaaagugcgcucucagcucaagaauaacgccaaggagaucgggaauggauguuuugaguucuaucacaaaugcgauaacacauguauggaauccgucaagaauggcaccuacgacuauccuaaauacagcgaagaggcuaagcugaacagagaagagaucgauggggugaaacuugagucuacacggauuuaucaaauccuggccauuuacuccacgguugcgagcucccucgugcuggucgugucucugggcgcuaucagcuuuuggaugugcuccaauggaucucuccagugccgcauuuguaucuga

SEQ ID NO: 196524 - RNA, 1701 nt, Artificial Sequence; identical to SEQ ID NO: 195905
  derived and/or modified CDS sequence (opt5) from hemagglutinin__InfluenzaA__ADE20858

SEQ ID NO: 196525 - RNA, 1701 nt, Artificial Sequence
  derived and/or modified CDS sequence (opt5) from hemagglutinin__InfluenzaA__ADE20868
augaaggccauccuggugguccuccuguacaccuucgcuacagccaacgcggacacgcuuugcauuggcuaucacgcuaauaacagcaccgauacaguugacaccgugcuggagaagaaugugacagucacccauuccgugaaccuccuggaagggaagcacaauggaaaacuuuguaagcugagaggcguugcuccccuccaucuggggaaaugcaacaucgccggauggauucugggcaauccugagugugaaucucucacaaccgccagcuccuggucuuacaucguggagacgagcuccucugauaacgggaccugcuauccgggagacuuuauugauuacgaagaacugcgggagcagcuuagcuccgucagcucuuucgaacgcuuugagauguuccccaagacauccagcuggccuaaucacgacucuaacaagggcgugaccgccgcuuguccccaugccggcgcgaaauccuuuuauaagaaucugaucuggcucguuaaaaaggggaacagcuacccuaaacugucuaaguccuauaucaaugauaagggaaaagaagugcuuguccuguggggcauucaccaccccagcacauccgccgaccaacagucucucuaccagaacgcugaugccuacguguucguggggaccagcagauauuccaagaaauuuaagccugagaucgcuauucggccgaaaguccgcgaccaggagggaagaaugaauuacuauuggacgcugguugaacccggcgauaagaucacauucgaggccaccgggaaccugguggugccucgguacgcguuugccauggaacgcaacgcuggaagcggcauuaucauuucugacacacccguccaugauugcaauaccaccugucaaacaccuaaaggcgccaucaacacgucccuccccuuccagaauauccacccgauuaccaucgggaagugcccuaaguaugugaaaagcacaaagcugagacuugcuaccggacugcggaacguucccucuauucagagccgcggccucuuuggggccaucgccggauucauugagggcggguggacaggaaugguggacggcugguacggcuaucaucaccagaaugaacaaggguccggauacgcugcggaccugaaaucuacccagaacgccaucgaugagaucacgaauaaggucaacagcgugauugagaaaaugaauacacaguuuaccgcuguuggcaaggaguucaaccaccuugagaagagaaucgaaaaucugaacaaaaagguggacgauggguuccucgacauuuggaccuacaaugccgagcugcugguccuccuggaaaacgagcggacacuugauuaucaugacuccaaugugaaaaaccuguacgagaagguccgcagccagcucaaaaacaaugccaaggaaaucggaaacggcuguuuugaguucuaucacaagugcgauaauaccuguauggaaucugugaaaaacgggacauacgacuauccuaaguacuccgaggaagcuaaacugaauagagaggagauugauggcguuaaacuugaaagcacgcggaucuaucaaauccuggccauuuacucuaccguggcguccagccucguccuggugguuucccugggagcuaucucuuuuuggaugugcagcaacggcucccuccagugccgcauuuguaucuga

SEQ ID NO: 196526 - RNA, 1701 nt, Artificial Sequence; identical to SEQ ID NO: 196459
  derived and/or modified CDS sequence (opt5) from hemagglutinin__InfluenzaA__ADE20878

SEQ ID NO: 196527 - RNA, 1701 nt, Artificial Sequence; identical to SEQ ID NO: 195843
  derived and/or modified CDS sequence (opt5) from hemagglutinin__InfluenzaA__ADE20888

SEQ ID NO: 196528 - RNA, 1701 nt, Artificial Sequence
  derived and/or modified CDS sequence (opt5) from hemagglutinin__InfluenzaA__ADE20898
augaaggccauccuggugguccuccuguacaccuucgcuacagccaacgcggacacgcuuugcauuggcuaucacgcuaauaacagcaccgauacaguugacaccauccuggagaagaaugugacagugacccauuccgucaaccuccuggaagauaagcacaaugggaaacuuuguaagcugagaggaguggcuccccuccaucugggcaaaugcaacauugccggguggauccugggaaauccugagugugaaucucucagcacagccuccucuuggagcuacauuguugagaccuccucuagcgacaacggcacgugcuauccgggggauuuuaucgacuacgaagaacugcgggagcagcuuuccagcgugucuuccuucgaacgcuuugagaucuuccccaagaccagcucuuggccuaaucacgauuccaacaagggagucacagccgcuuguccccaugccggcgcgaaaucuuuuuauaagaaucugauuuggcucgugaaaaagggcaacagcuacccuaaacuguccaagagcuauaucaaugacaaggggaaagaaauucuuguucuguggggaauccaccaccccuccaccucugccgaucaacagagccucuaccagaacgcugacgccuacguguucgucggcacauccagauauagcaagaaauuuaagccugagauugcuauccggccgaaagugcgcgaucaggaggggagaaugaauuacuauuggacccugguggaacccggagacaagauuacguucgaggccacaggcaaccuggucguuccucgguacgcguuugccauggaacgcaacgcugggucuggaaucaucauuuccgauacccccgugcaugacugcaauacaaccugucaaaccccuaaaggcgccaucaacacaagccuccccuuccagaauauucacccgaucacgauuggcaagugcccuaaguaugugaaaucuaccaagcugagacuugcuacagggcugcggaacguccccagcauccagucccgcggacucuuuggcgccaucgccggguucauugagggaggcuggaccgggaugguggacggaugguacggcuaucaucaccagaaugaacaaggcucuggguacgcugcggaucugaaaagcacacagaacgccaucgacgagauuaccaauaagguuaacuccgugaucgagaaaaugaauacgcaguuuacagcugucggaaaggaguucaaccaccuugagaagagaauugaaaaucugaacaaaaagguggaugacggcuuccucgauaucuggaccuacaaugccgagcugcugguucuccuggaaaacgagcggacccuugacuaucaugauagcaaugugaaaaaccuguacgagaagguccgcucucagcucaaaaacaaugccaaggaaaucgggaacggauguuuugaguucuaucacaagugcgacaauacauguauggaaggcgugaaaaacgggaccuacgauuauccuaaguacuccgaggaagcuaaacugaauagagaggagauugacggcgucaaacuugaaagcacacggaucuaucaaauucuggccaucuacucuacgguggcguccagccucguucugguggucucccugggagcuauuucuuuuuggaugugcagcaacggcucccuccagugccgcaucuguauuuga

SEQ ID NO: 196529 - RNA, 1701 nt, Artificial Sequence; identical to SEQ ID NO: 196492
  derived and/or modified CDS sequence (opt5) from hemagglutinin__InfluenzaA__ADE20908

SEQ ID NO: 196530 - RNA, 1701 nt, Artificial Sequence
  derived and/or modified CDS sequence (opt5) from hemagglutinin__InfluenzaA__ADE20918
augaaggccauccuggugguccuccuguacaccuucgcuacagccaacgcggacacgcuuugcauuggcuaucacgcuaauaacagcaccgauacaguugacaccgugcuggagaaaaaugugacagucacccauuccgugaacauccucgaagauaagcacaaugggaaacuguguaaacuuagaggaguugcuccccugcaucucggcaagugcaacauugccggguggauccugggaaauccugagugugaaucucugagcacagccuccucuuggagcuacauuguggagaccuccucuagcgacaacggcacgugcuauccgggggauuuuaucgacuacgaagaacuccgggagcagcuguccagcgucucuuccuucgaacgcuuugagaucuuccccaagaccagcucuuggccuaaucacgauuccaacaagggagugacagccgcuuguccccaugccggcgcgaaaucuuuuuauaagaaucuuauuuggcugguuaaaaagggcaacagcuacccuaaacucuccaagagcuauaucaaugacaaggggaaagaagugcugguccuuuggggcauucaccaccccuccaccucugccgaucaacagagccuguaccagaacgcugacgccuacguguucgugggaacauccagauauagcaagaaauuuaagccugagaucgcuauucggccgaaaguccgcgaucaggaggggagaaugaauuacuauuggauccucguugaacccggagacaagauuaccuucgaggccacgggcaaccugguggugccucgguacgcguuugccauggaacgcaacgcugggucuggaaucaucauuuccgauacacccguccaugacugcaauaccacaugucaaaccccuaaaggcgccaucaacaccagccugcccuuccagaauauucacccgaucacaauuggcaagugcccuaaguaugugaaaucuacgaagcucagacuggcuaccgggcuucggaacguucccagcauccagucccgcggacuguuuggcgccaucgccggguucauugagggaggcuggacagggaugguggacggaugguacggcuaucaucaccagaaugaacaaggcucuggguacgcugcggaucucaaaagcacccagaacgccaucgacgagauuacaaauaaggucaacuccgugaucgagaaaaugaauacccaguuuacggcuguuggaaaggaguucaaccaccuggagaagagaauugaaaaucuuaacaaaaagguggaugacggcuuccuggauaucuggacauacaaugccgagcuccugguccugcucgaaaacgagcggacccuggacuaucaugauagcaaugugaaaaaccuuuacgagaagguccgcucucagcugaaaaacaaugccaaggaaaucgggaacggauguuuugaguucuaucacaagugcgacaauaccuguauggaauccgugaaaaacggcacauacgauuauccuaaguacagcgaggaagcuaaacucaauagagaggagauugacgggguuaagcuggaaucuacccggaucuaucaaauucuugccaucuacuccacaguggcgagcucccugguccucgugguuucucugggcgcuauuagcuuuuggaugugcuccaacggaucucugcagugccgcaucuguauuuga

SEQ ID NO: 196531 - RNA, 1701 nt, Artificial Sequence; identical to SEQ ID NO: 195094
  derived and/or modified CDS sequence (opt5) from hemagglutinin__InfluenzaA__ADE20928

SEQ ID NO: 196532 - RNA, 1701 nt, Artificial Sequence
  derived and/or modified CDS sequence (opt5) from hemagglutinin__InfluenzaA__ADE20948
augaaggccauccuggugguccuccuguacaccuucgcuacagccaacgcggacacgcuuugcauuggcuaucacgcuaauaacagcaccgauacaguugacaccgugcuggagaaaaaugugacagucacccauuccgugaaccuccuggaagauaagcacaaugggaaacuuuguaagcugagaggaguugcuccccuccaucugggcaaaugcaacaucgccggguggauucugggaaauccugagugugaaucucucagcacagccuccucuuggagcuacaucguggagaccuccucuagcgacaacggcacgugcuauccgggggauuuuauuaauuacgaagaacugcgggagcagcuuuccagcgucucuuccuucgaacgcuuugagaucuuccccaagaccagcucuuggccuaaccacgacuccaauaagggagugacagccgcuuguccccaugccggcgcgaaaucuuuuuauaagaaccugaucuggcucguuaaaaagggcaauagcuacccuaaacuguccaagagcuauauuaacgauaaggggaaagaagugcuuguccuguggggaauccaccaccccuccaccucugccgaccaacagagccucuaccagaaugcugauuccuacguguucgugggcacaagcagauauucuaagaaauuuaagccugagauugccauccggccgaaaguccgcgaccaggaggggagaaugaacuacuauuggacccugguugaacccggagauaagauuacguucgaggcuacaggcaaccugguggugccucgguacgccuuugcgauggaacgcaaugccggguccggaaucauuaucagcgacacccccguccaugauugcaacacaaccugucaaaccccuaaaggcgcuaucaauacaucucuccccuuccagaacauucacccgaucacgauuggcaagugcccuaaguaugugaaaagcaccaagcugagacuugccacagggcugcggaauguucccuccauccagucucgcggacucuuuggcgcuauugccggguucaucgagggaggcuggaccgggaugguggacggaugguacggcuaucaucaccagaacgaacaaggcagcggguacgccgcugaccugaaauccacacagaaugcgaucgauaagauuaccaacaaagucaauagcgugaucgagaagaugaacacgcaguuuacagccguuggaaaggaguucaaucaccuugagaaaagaauugagaaccugaauaagaaaguggacgauggcuuccucgacaucuggaccuacaacgcugaacugcugguccuccuggagaaugaacggacccuugauuaucaugacucuaacgugaagaaccuguacgagaaaguccgcucccagcucaagaauaacgccaaggagauugggaauggauguuuugaguucuaucacaaaugcgauaacacauguauggaaagcgugaagaauggcaccuacgacuauccuaaauacucugaagaggccaagcugaacagagaagagaucgaugggguuaaacuugaguccacacggaucuaucaaauucuggcuaucuacagcacgguggccuccucucucguccuggugguuagccugggcgcgauuuccuuuuggaugugcucuaauggaagccuccagugccgcaucuguauuuga

SEQ ID NO: 196533 - RNA, 1701 nt, Artificial Sequence
  derived and/or modified CDS sequence (opt5) from hemagglutinin__InfluenzaA__ADE20968
augaaggccauccuggugguccuccuguacaccuucgcuacagccaacgcggacacgcuuugcauuggcuaucacgcuaauaacagcaccgauacaguugacaccgugcuggagaaaaaugugacagucacccauuccgugaaccuccuggaagauaagcacaaugggaaacuuuguaagcugagaggagaggcuccccuccaucugggcaaaugcaacaucgccggguggauucugggaaauccugaaugugagucucucagcacagccuccucuuggagcuacaucguugaaaccuccucuagcgacaacggcacgugcuauccgggggauuuuauuaauuacgaggagcugcgggaacagcuuuccagcgugucuuccuucgagcgcuuugaaaucuuccccaagaccagcucuuggccuaaccacgacuccaauaagggagucacagccgcuuguccccauagcggcgccaaaucuuuuuauaagaaccugaucuggcucgugaaaaagggcaauuccuacccuaaacugagcaaguccuauauuaacgauaaggggaaagagguucuugugcuguggggaauccaccaccccucuaccagcgcggaccaacagucccucuaccagaaugccgaugcuuacgucuucgugggcacaagcagauauucuaagaaauuuaagccugagauugccauccggccgaaagugcgcgaccaggaagggagaaugaacuacuauuggacccuggucgagcccggagauaagauuacguucgaagcuacaggcaaccugguugugccucgguacgccuuugcgauggagcgcaaugccggguccggaaucauuaucagcgacacccccgugcaugauugcaacacaaccugucaaaccccuaaaggcgcuaucaauacaucucuccccuuccagaacauucacccgaucacgauuggcaagugcccuaaguaugucaaaagcaccaagcugagacuugccacagggcugcggaaugugcccuccauccagucucgcggacucuuuggcgcuauugccggguucaucgaaggaggcuggaccgggaugguugacggaugguacggcuaucaucaccagaacgagcaaggcagcggguacgccgcugaccugaaauccacacagaaugcgaucgauaagauuaccaacaaagugaauagcgucaucgagaagaugaacacgcaguuuacagccgugggaaaggaauuuaaucaccuugagaaaagaauugaaaaccugaauaagaaaguugacgauggcuuccucgacaucuggaccuacaacgcugagcugcuggugcuccuggaaaaugagcggacccuugauuaucaugacucuaacgucaagaaccuguacgagaaagugcgcucccagcucaagaauaacgccaaggaaauugggaauggauguuucgaguucuaucacaaaugcgauaacacauguauggaaagcgucaagaauggcaccuacgacuauccuaaauacucugaggaagccaagcugaacagagaggagaucgauggggugaaacuugaauccacacggaucuaucaaauucuggcuaucuacagcacgguugccuccucucucgugcuggucgugagccugggcgcgauuuccuuuuggaugugcucuaauggaagccuccagugccgcaucuguauuuga

SEQ ID NO: 196534 - RNA, 1701 nt, Artificial Sequence; identical to SEQ ID NO: 195905
  derived and/or modified CDS sequence (opt5) from hemagglutinin__InfluenzaA__ADE20978

SEQ ID NO: 196535 - RNA, 1701 nt, Artificial Sequence
  derived and/or modified CDS sequence (opt5) from hemagglutinin__InfluenzaA__ADE20988
augaaggccauccuggugguccuccuguacaccuucgcuacagccaacgcggacacgcuuugcauuggcuaucacgcuaauaacagcaccgauacaguugacaccgugcuggagaaaaaugugacagucacccauuccgugaaccuccuggaagauaagcacaaugggaaacuuuguaagcugagaggaguugcuccccuccaucugggcaaaugcaacaucgccggguggauucugggaaauccugagugugaaucucucagcacagccuccucuuggagcuacaucguggagaccuccucuagcgacaacggcacgugcuauccgggggauuuuauugacuacgaagaacugcgggagcagcuuuccagcgucucuuccuucgaacgcuuugagaucuuccccaagaccagcucuuggccuaaucacgauuccaacaagggagugacagccgcuuguccccaugccggcgcgaaaucuuuuuauaagaaucugaucuggcucguuaaaaagggcaacagcuacccuaaacuguccaagagcuauauuaaugacaaggggaaagaagugcuuguccuguggggaauccaccaccccuccaccucuacagaucaacagagccucuaccagaacgccgacgcuuacguguucgugggcaccuccagauauagcaagaaauuuaagccugagauugccauccggccgaaaguccgcgaucaggaggggagaaugaauuacuauuggacgcugguugaacccggagacaagauuacauucgaggcuaccggcaaccugguggugccucgguacgccuuugcgauggaacgcaacgccgggucuggaaucauuaucuccgauacacccguccaugacugcaauaccaccugucaaacaccuaaaggcgcuaucaacacgagccuccccuuccagaauauucacccgaucaccauuggcaagugcccuaaguaugugaaaucuacaaagcugagacuugccaccgggcugcggaacauccccagcauucagucccgcggacucuuuggcgcuaucgccggguucaucgagggaggcuggacagggaugguugacggaugguacggcuaucaucaccagaaugaacaaggcucuggguacgccgcugaucugaaaagcacccagaacgcgauugacgagaucacgaauaaggugaacuccgucauugagaaaaugaauacacaguuuaccgccgugggaaaggaguucaaccaccuugagaagagaaucgaaaaucugaacaaaaagguugaugacggcuuccucgauauuuggaccuacaaugcugagcugcuggugcuccuggaaaacgagcggacacuugacuaucaugauagcaaugucaaaaaccuguacgagaaggugcgcucucagcucaaaaacaaugccaaggaaaucgggaacggauguuuugaguucuaucacaagugcgacaauaccuguauggaauccgucaaaaacggcacauacgauuauccuaaguacagcgaggaagccaaacugaagagagaggagaucgacggggugaaacuugaaucuacgcggauuuaucaaauccuggcuauuuacuccaccguugccagcucccucgugcuggucgugucucugggcgcgaucagcuuuuggaugugcuccaauggaucucuccagugccgcauuuguaucuga

SEQ ID NO: 196536 - RNA, 1701 nt, Artificial Sequence; identical to SEQ ID NO: 195905
  derived and/or modified CDS sequence (opt5) from hemagglutinin__InfluenzaA__ADE20998

SEQ ID NO: 196537 - RNA, 1701 nt, Artificial Sequence; identical to SEQ ID NO: 196069
  derived and/or modified CDS sequence (opt5) from hemagglutinin__InfluenzaA__ADE21008

SEQ ID NO: 196538 - RNA, 1701 nt, Artificial Sequence
  derived and/or modified CDS sequence (opt5) from hemagglutinin__InfluenzaA__ADE21018
augaaggccauccuggugguccuccuguacaccuucgcuacagccaacgcggacacgcuuugcauuggcuaucacgcuaauaacagcaccgauacaguugacaccgugcuggagaaaaaugugacagucacccauuccgugaaccuccuggaagauaagcacaaugggaaacuuuguaagcugagaggaguugcuccccuccaucugggcaaaugcaacaucgccggguggauucugggaaauccugagugugaaucucucagcacagccuccucuuggagcuacaucguggagaccuccucuagcgacaacggcacgugcuauccgggggauuuuauugacuacgaagaacugcgggagcagcuuuccagcgucucuuccuucgaacgcuuugagaucuuccccaagaccagcucuuggccuaaucacgauuccaacaagggagugacaaccgccuguccccaugcuggcgccaagagcuuuuauaagaaucugaucuggcucguuaaaaagggcaacucuuacccuaaacuguccaagagcuauauuaaugacaaggggaaagaagugcuuguccuguggggaauccaccaccccuccacaucuaccgaucaacagagccucuaccagaacgcggacgccuacguguucgugggcacguccagauauagcaagaaauuuaagccugagauugcuauccggccgaaaguccgcgaucaggaggggagaaugaauuacuauuggacacugguugaacccggagacaagauuaccuucgaggccacaggcaaccugguggugccucgguacgcuuuugccauggaacgcaacgcggggucuggaaucauuaucuccgauacccccguccaugacugcaauaccacaugucaaacgccuaaaggcgccaucaacaccagccuccccuuccagaauauucacccgaucacaauuggcaagugcccuaaguaugugaaaucuaccaagcugagacuugcuacagggcugcggaacauccccagcauucagucccgcggacucuuuggcgccaucgcuggguucaucgagggaggcuggaccgggaugguugacggaugguacggcuaucaucaccagaaugaacaaggcucuggguacgccgccgaucugaaaagcacgcagaacgcuauugacgagaucacaaauaaggugaacuccgucauugagaaaaugaauacccaguuuaccgcggugggaaaggaguucaaccaccuugagaagagaaucgaaaaucugaacaaaaagguugaugacggcuuccucgauauuuggacauacaaugccgagcugcuggugcuccuggaaaacgagcggacccuugacuaucaugauagcaaugucaaaaaccuguacgagaaggugcgcucucagcucaaaaacaaugcuaaggaaaucgggaacggauguuuugaguucuaucacaagugcgacaauacauguauggaauccgucaaaaacggcacguacgauuauccuaaguacagcgaggaagccaaacugaauagagaggagaucgacggggugaaacuugaaucuacccggauuuaucaaauccuggccauuuacuccacaguugcuagcucccucgugcuggucgugucucugggcgccaucagcuuuuggaugugcuccaacggaucucuccagugccgcauuuguaucuga

SEQ ID NO: 196539 - RNA, 1701 nt, Artificial Sequence; identical to SEQ ID NO: 196479
  derived and/or modified CDS sequence (opt5) from hemagglutinin__InfluenzaA__ADE21028

SEQ ID NO: 196540 - RNA, 1701 nt, Artificial Sequence; identical to SEQ ID NO: 196469
  derived and/or modified CDS sequence (opt5) from hemagglutinin__InfluenzaA__ADE21038

SEQ ID NO: 196541 - RNA, 1701 nt, Artificial Sequence; identical to SEQ ID NO: 196492
  derived and/or modified CDS sequence (opt5) from hemagglutinin__InfluenzaA__ADE21048

SEQ ID NO: 196542 - RNA, 1701 nt, Artificial Sequence
  derived and/or modified CDS sequence (opt5) from hemagglutinin__InfluenzaA__ADE21058
augaaggccauccuggugguccuccuguacaccuucgcuacagccaacgcggacacgcuuugcauuggcuaucacgcuaauaacagcaccgauacaguugacaccgugcuggagaaaaaugugacagucacccauuccgugaaccuccuggaagauaagcacaaugggaaacuuuguaagcugagaggaguugcuccccuccaucugggcaaaugcaacaucgccggguggauucugggaaauccugagugugaaucucucagcacagccuccucuuggagcuacaucguggagaccuccucuagcgacaacggcacgugcuauccgggggauuuuauugacuacgaagaacugcgggagcagcuuuccagcgucucuuccuucgaacgcuuugagaucuuccccaagaccagcucuuggccuaaucacgauuccaacaagggagugacagccgcuuguccccaugccggcgcgaaaucuuuuuauaagaaucugaucuggcucguuaaaaagggcaacagcuacccuaaacuguccaagagcuauauuaaugacaaggggaaagaagugcuuguccuguggggaauccaccaccccuccaccucugccgaucaacagagccucuaccagaacgcugacgccuacguguucgugggcacauccagauauagcaagaaauuuaagccugagauugcuauccggccgaaaguccgcgaucaggaggggagaauuaauuacuauuggacccugguugaacccggagacaagaucacguucgaggccacaggcaaccugguggugccucgguacgcguuugccauggaacgcaacgcugggucuggaauuaucaucuccgauacccccgcccaugacugcaauacaaccugucaaaccccuaaaggcgcuauuaacacaagccuccccuuccagaauauccacccgauuacgaucggcaagugcccuaaguaugucaaaucuaccaagcugagacuugccacagggcugcggaacgugcccagcauucagucccgcggacucuuuggcgccaucgcuggguucaucgagggaggcuggaccgggaugguugacggaugguacggcuaucaucaccagaaugaacaaggcucuggguacgcggccgaucugaaaagcacacagaacgcuauugacaagaucaccaauaaagugaacuccgucauugagaagaugaauacgcaguuuacagccgugggaaaggaguucaaccaccuugagaaaagaaucgagaaucugaacaagaaaguugaugacggcuuccucgauauuuggaccuacaaugccgaacugcuggugcuccuggagaacgaacggacccuugacuaucaugauagcaaugucaagaaccuguacgagaaagugcgcucucagcucaagaacaaugcuaaggagaucgggaacggauguuuugaguucuaucacaaaugcgacaauacauguauggaauccgucaagaacggcaccuacgauuauccuaaauacagcgaagaggccaagcugaauagagaagagaucgacggggugaaacuugagucuacacggauuuaucaaauccuggcgauuuacuccacgguugcuagcucccucgugcuggucgugucucugggcgccaucagcuuuuggaugugcuccaacggaucucuccagugccgcauuuguaucuga

SEQ ID NO: 196543 - RNA, 1701 nt, Artificial Sequence
  derived and/or modified CDS sequence (opt5) from hemagglutinin__InfluenzaA__ADE21068
augaaggccauccuggugguccuccuguacaccuucgcuacagccaacgcggacacgcuuugcauuggcuaucacgcuaauaacagcaccgauacaguugacaccgugcuggagaaaaaugugacagucacccauuccgugaaccuccuggaagauaagcacaaugggaaacuuuguaagcugagaggaguugcuccccuccaucugggcaaaugcaacaucgccggguggauucugggaaauccugagugugaaucucucagcacagccuccucuuggagcuacaucguggagaccuccucuagcgacaacggcacgugcuauccgggggauuuuauugacuacgaagaacugcgggagcagcuuuccagcgucucuuccuucgaacgcuuugagaucuuccccaagaccagcucuuggccuaaucacgauuccaacaagggagugacagccgcuuguccccaugccggcgcgaaaucuuuuuauaagaaucugaucuggcucguuaaaaagggcaacagcuacccuaaacuguccaagagcuauauuaaugacaaggggaaagaagugcuuguccuguggggaauccaccaccccuccaccucugccgaucaacagagccucuaccagaacgcugacgccuacguguucgugggcacauccagauauagcaagaaauuuaagccugagauugcuauccggccgaaaguccgcgagcaggaagggagaaugaauuacuauuggacccugguugagcccggagauaagauuacguucgaagccacaggcaaccugguggugccucgguacgcguuugccauggagcgcaacgcugggucuggaaucauuaucuccgacacccccguccaugauugcaauacaaccugucaaaccccuaaaggcgccaucaacacaagccuccccuuccagaauauucacucuaucacgauuggcaagugcccgaaguaugugaaaagcaccaagcugagacuugcuacagggcugcggaacguuccuuccauccagucucgcggacucuuuggcgccauugccggguucaucgaaggaggcuggaccgggaugguggacggaugguacggcuaucaucaccagaaugagcaaggcagcggguacgcugcggaccugaaauccacacagaacgccaucgaugagauuaccaauaaggucaacagcgugaucgaaaagaugaauacgcaguuuacagcuguuggaaaggaguucaaccaccuugaaaagagaauugagaaucugaacaaaaagguggacgauggcuuccucgacaucuggaccuacaaugccgaacugcugguccuccuggagaacgagcggacccuugauuaucaugacucuaaugugaaaaaccuguacgaaaagguccgcucccagcucaaaaacaaugccaaggagacagggaacggauguuuugaguucuaucacaagugcgauaauaccuguauggagagcgugaaaaacggcacauacgacuaucccaaguacucugaagaggcuaaacugaauagagaggaaauugaugggguuaaacuugaguccacgcggaucuaucaaauccuggccauuuacagcaccguggcguccucucucguccuggugguuagccugggcgcuaucuccuuuuggaugugcucuaacggaagccuccagugccgcauuuguaucuga

SEQ ID NO: 196544 - RNA, 1698 nt, Artificial Sequence
  derived and/or modified CDS sequence (opt5) from hemagglutinin__InfluenzaA__ADE28761
augaaggugaaacugcucguccugcuuugcaccuucacagccacguacgcugacaccaucuguauuggcuaucacgccaacaauagcacagauaccguugacacagugcuggagaagaacgugaccgucacacauuccgugaaucuccuggaaaacucucacaaugggaaacuuugccugcucaagggaaucgcgccccugcagcugggcaacuguagcguugcuggguggauucucggaaauccugagugcgaacugcuuaucuccaaagagucuuggagcuacauuguggaaaagccgaaccccgagaauggcaccuguuauccugggcauuuugccgauuacgaggaacugagagagcaacucuccucugucagcuccuucgaacgguuugagaucuuccccaaggagagcucuuggccuaaccacacggugaccggaguuuccgccagcugcucucauaauggcgaauccagcuuuuaucgcaaccugcuuuggcugacaggcaaaaaugggcucuaccccaaccugucuaaguccuaugcuaauaacaaagagaaggaagugcugguccucuggggagugcaccacccuccgaacaucggcaaucagaaaacccuguaccauacagagaacgccuacgugagcgucguuuccucucacuauagcagaaaguucacccccgaaauugcuaagcggccuaaagugcgcgaccaggaggggagaaucaauuacuauuggacgcuucuggagcccggagauacaauuaucuuugaagccaacggcaaucucauugcgccucgguacgccuucgcucugucccgcggguuuggaagcggcaucauuaacucuaaugcccccauggacaagugugaugcuaaaugccagaccccgcaaggcgccaucaacuccagccuuccuuuccagaaugugcaucccgucacaaucggggaguguccuaaguaugugagaucugcgaaacugcggaugguuaccggacuccgcaacauucccagcauccaguccagaggccuguuuggggccauugcuggauucaucgaaggcggguggaccggaaugguggacggcugguacggcuaucaccaccagaaugagcaagggucuggauacgccgcugaucaaaagagcacacagaacgccauuaauggcaucacgaacaaagucaauuccgugaucgaaaagaugaacacccaguuuacagccguugggaaggaguucaacaaacuggagcggcgcauggaaaaucucaacaagaaaguggacgauggauucauugacaucuggaccuacaaugcugagcugcuuguccugcucgaaaacgagagaacacuggauuuucaugaaagcaaugugaagaaccuuuaugagaaagucaagucucagcugaagaauaacgcgaaagagauuggcaaugggugcuucgaauuuuaccacaaguguaacgacgagugcauggaauccgugaaaaauggcaccuaugacuaccccaaguauagcgaggagucuaaacucaaccgggaaaagaucgauggaguuaagcuggaguccauggaaguguaccagauucuggccaucuauagcacggucgcuuccucucucgugcugcuuguuagccugggcgccaucuccuucuggaugugcucuaaugggagccuccagugucgcauuugcaucuga

SEQ ID NO: 196545 - RNA, 1701 nt, Artificial Sequence; identical to SEQ ID NO: 194921
  derived and/or modified CDS sequence (opt5) from hemagglutinin__InfluenzaA__ADE28780

SEQ ID NO: 196546 - RNA, 1701 nt, Artificial Sequence; identical to SEQ ID NO: 196329
  derived and/or modified CDS sequence (opt5) from hemagglutinin__InfluenzaA__ADE28790

SEQ ID NO: 196547 - RNA, 1701 nt, Artificial Sequence; identical to SEQ ID NO: 196513
  derived and/or modified CDS sequence (opt5) from hemagglutinin__InfluenzaA__ADE28800

SEQ ID NO: 196548 - RNA, 1701 nt, Artificial Sequence; identical to SEQ ID NO: 195905
  derived and/or modified CDS sequence (opt5) from hemagglutinin__InfluenzaA__ADE28810

SEQ ID NO: 196549 - RNA, 1701 nt, Artificial Sequence
  derived and/or modified CDS sequence (opt5) from hemagglutinin__InfluenzaA__ADE28820
augaaggccauccuggugguccuccuguacaccuucgcuacagccaacgcggacacgcuuugcauuggcuaucacgcuaauaacagcaccgauacaguugacaccgugcuggagaaaaaugugacagucacccauuccgugaaccuccuggaagauaagcacaaugggaaacuuuguaagcugagaggaguugcuccccuccaucugggcaaaugcaacaucgccggguggauucugggaucuccugagugugaaagccucuccacagccucuagcugguccuacaucguggagaccucuagcuccgacaauggcacgugcuauccgggggauuuuauugacuacgaagaacugcgggagcagcuuagcucugucuccagcuucgaacgcuuugagaucuuccccaagaccucuuccuggccuaaccacgauagcaauaagggagugacagccgcuuguccccaugccggcgcgaaaucuuuuuauaagaaccugaucuggcucguuaaaaagggcaauuccuacccuaaacugagcaaguccuauauuaacgacaaggggaaagaagugcuuguccuguggggaauccaccaccccucuaccagcgccgaucaacagucccucuaccagaaugcugacgccuacguguucgugggcacaagcagauauucuaagaaauuuaagccugagauugcuauccggccgaaaguccgcgaucaggaggggagaaugaacuacuauuggacccugguugaacccggagacaagauuacguucgaggccacaggcaaucugguggugccucgguacgcguuugccauggaacgcaacgcuggguccggaaucauuaucagcgauacccccguccaugacugcaacacaaccugucaaaccccuaaaggcgccaucaauacaucucuccccuuccagaacauucacccgaucacgauuggcaagugcccuaaguaugugaaaagcaccaagcugagacuugcuacagggcugcggaauguucccuccauccagucucgcggacucuuuggcgccauugccggguucaucgagggaggcuggaccgggaugguggacggaugguacggcuaucaucaccagaacgaacaaggcagcggguacgcugcggaucugaaauccacacagaaugccaucgacaagauuaccaacaaagucaauagcgugaucgagaagaugaacacgcaguuuacagcuguuggaaaggaguucaaucaccuugagaaaagaauugagaaccugaauaagaaaguggaugacggcuuccucgauaucuggaccuacaacgccgaacugcugguccuccuggagaaugaacggacccuugacuaucaugauucuaacgugaagaaucuguacgagaaaguccgcucccagcucaagaacaacgccaaggagauugggaauggauguuuugaguucuaucacaaaugcgacaacacauguauggaaagcgugaagaauggcaccuacgauuauccuaaauacucugaagaggcuaagcugaacagagaagagaucgacgggguuaaacuugaguccacacggaucuaucaaauucuggccaucuacagcacgguggcguccucucucguccuggugguuagccugggcgcuauuuccuuuuggaugugcucuaauggaagccuccagugccgcaucuguauuuga

SEQ ID NO: 196550 - RNA, 1701 nt, Artificial Sequence; identical to SEQ ID NO: 194921
  derived and/or modified CDS sequence (opt5) from hemagglutinin__InfluenzaA__ADE28830

SEQ ID NO: 196551 - RNA, 1701 nt, Artificial Sequence; identical to SEQ ID NO: 194921
  derived and/or modified CDS sequence (opt5) from hemagglutinin__InfluenzaA__ADE28840

SEQ ID NO: 196552 - RNA, 1701 nt, Artificial Sequence; identical to SEQ ID NO: 194921
  derived and/or modified CDS sequence (opt5) from hemagglutinin__InfluenzaA__ADE28850

SEQ ID NO: 196553 - RNA, 1701 nt, Artificial Sequence; identical to SEQ ID NO: 194921
  derived and/or modified CDS sequence (opt5) from hemagglutinin__InfluenzaA__ADE28881

SEQ ID NO: 196554 - RNA, 1701 nt, Artificial Sequence; identical to SEQ ID NO: 194921
  derived and/or modified CDS sequence (opt5) from hemagglutinin__InfluenzaA__ADE28891

SEQ ID NO: 196555 - RNA, 1701 nt, Artificial Sequence; identical to SEQ ID NO: 196424
  derived and/or modified CDS sequence (opt5) from hemagglutinin__InfluenzaA__ADE28911

SEQ ID NO: 196556 - RNA, 1701 nt, Artificial Sequence; identical to SEQ ID NO: 195905
  derived and/or modified CDS sequence (opt5) from hemagglutinin__InfluenzaA__ADE28921

SEQ ID NO: 196557 - RNA, 1701 nt, Artificial Sequence; identical to SEQ ID NO: 195905
  derived and/or modified CDS sequence (opt5) from hemagglutinin__InfluenzaA__ADE28931

SEQ ID NO: 196558 - RNA, 1701 nt, Artificial Sequence; identical to SEQ ID NO: 195094
  derived and/or modified CDS sequence (opt5) from hemagglutinin__InfluenzaA__ADE28951

SEQ ID NO: 196559 - RNA, 1701 nt, Artificial Sequence
  derived and/or modified CDS sequence (opt5) from hemagglutinin__InfluenzaA__ADE28961
augaaggccauccuggugguccuccuguacaccuucgcuacagccaacgcggacacgcuuugcauuggcuaucacgcuaauaacagcaccgauacaguugacaccgugcuggagaagaaugugacagucacccauuccgugaaccuccuggaagauaagcacaaugggaaacuuuguaagcugagaggaguugcuccccuccaucugggcaaaugcaacguggccggguggauccugggaaauccugagugugaaucucucagcacagccuccucuuggagcuacauugucgagaccuccucuagcgacaacggcacgugcuauccgggggauuuuaucgacuacgaagaacugcgggagcagcuuuccagcgugucuuccuucgaacgcuuugagauuuuccccaagaccagcucuuggccuaaucacgauuccaacaagggaguuacagccgcuuguccccaugccggcgcgaaaucuuuuuauaagaaucugaucuggcucgugaaaaagggcaacagcuacccuaaacuguccaagagcuauaucaaugacaaggggaaagaaguccuugugcuguggggcauucaccaccccuccaccucugccgaucaacagagccucuaccagaacgcugacgccuacguguucgucggaacauccagauauagcaagaaauuuaagccugagaucgcuauucggccgaaaguucgcgaucaggaggggagaaugaauuacuauuggacccugguggaacccggagacaagaucacguucgaggccacaggcaaccugguggucccucgguacgcguuugccauggaacgcaacgcugggucuggaauuaucauuuccgauacccccgugcaugacugcaauacaaccugucaaaccccuaaaggcgccaucaacacaagccuccccuuccagaauauccacccgauuacgaucggcaagugcccuaaguauguuaaaucuaccaagcugagacuugcuacagggcugcggaacgugcccagcauucagucccgcggacucuuuggcgccaucgccggguucauugagggaggcuggaccgggauggucgacggaugguacggcuaucaucaccagaaugaacaaggcucuggguacgcugcggaucugaaaagcacacagaacgccaucgacgagaucaccaauaaggugaacuccguuauugagaaaaugaauacgcaguuuacagcugugggaaaggaguucaaccaccuugagaagagaaucgaaaaucugaacaaaaaggucgaugacggcuuccucgauauuuggaccuacaaugccgagcugcuggugcuccuggaaaacgagcggacccuugacuaucaugauagcaaugucaaaaaccuguacgagaaggugcgcucucagcucaaaaacaaugccaaggaaaucgggaacggauguuuugaguucuaucacaagugcgacaauacauguauggaauccguuaaaaacggcaccuacgauuauccuaaguacagcgaggaagcuaaacugaauagagaggagauugacggggugaaacuugaaucuacacggaucuaucaaauccuggccauuuacuccacggucgcgagcucccucgugcugguugugucucugggcgcuaucagcuuuuggaugugcuccaacggaucucuccagugccgcauuuguaucuga

SEQ ID NO: 196560 - RNA, 1701 nt, Artificial Sequence; identical to SEQ ID NO: 196445
  derived and/or modified CDS sequence (opt5) from hemagglutinin__InfluenzaA__ADE28971

SEQ ID NO: 196561 - RNA, 1701 nt, Artificial Sequence
  derived and/or modified CDS sequence (opt5) from hemagglutinin__InfluenzaA__ADE28981
augaaggccauccuggugguccuccuguacaccuucgcuacagccaacgcggacacgcuuugcauuggcuaucacgcuaauaacagcaccgagacaguugauaccgugcuggagaaaaaugugacagucacccauuccgugaaccuccuggaagacaagcacaaugggaaacuuuguaagcugagaggaguugcuccccuccaucugggcaaaugcaacaucgccggguggauucugggaaauccugaaugugagucucucagcacagccuccucuuggagcuacaucguggaaaccuccucuagcgauaacggcacgugcuauccgggggacuuuauugauuacgaggagcugcgggaacagcuuuccagcgucucuuccuucgagcgcuuugaaaucuuccccaagaccagcucuuggccuaaucacgacuccaacaagggagugacagccgcuuguccccaugccggcgcgaaaucuuuuuauaagaaucugaucuggcucguuaaaaagggcaacagcuacccuaaacuguccaagagcuauauuaaugauaaggggaaagaggugcuuguccuguggggaauccaccaccccuccaccucugccgaccaacagagccucuaccagaacgcugaugccuacguguucgugggcacauccagauauagcaagaaauuuaagccugagauugcuauccggccgaaaguccgcgaccaggaagggagaaugaauuacuauuggacccugguugagcccggagauaagauuacguucgaagccacaggcaaccugguggugccucgguacgcguuugccauggagcgcaacgcugggucuggaaucauuaucuccgacacccccguccaugauugcaauacaaccugucaaaccccuaaaggcgccaucaacacaagccuccccuuccagaauauucacccgaucacgauuggcaagugcccuaaguaugugaaaucuaccaagcugagacuugcuacagggcugcggaacguucccagcauccagucccgcggacucuuuggcgccauugccggguucaucgaaggaggcuggaccgggaugguggacggaugguacggcuaucaucaccagaaugagcaaggcucuggguacgcugcggaccugaaaagcacacagaacgccaucgauaagauuaccaauaaagucaacuccgugaucgagaagaugaauacgcaguuuacagcuguuggaaaggaauuuaaccaccuugagaaaagaauugaaaaucugaacaagaaaguggacgauggcuuccucgacaucuggaccuacaaugccgagcugcugguccuccuggaaaacgagcggacccuugauuaucaugacagcaaugugaagaaccuguacgagaaaguccgcucucagcucaagaacaaugccaaggaaauugggaacggauguuucgaguucuaucacaaaugcgauaauacauguauggaauccgugaagaacggcaccuacgacuauccuaaauacagcgaggaagcuaagcugaauagagaggagaucgaugggguuaaacuugaaucuacacggaucuaucaaauucuggccaucuacuccacgguggcgagcucccucguccuggugguuucucugggcgcuauuagcuuuuggaugugcuccaacggaucucuccagugccgcaucuguauuuga

SEQ ID NO: 196562 - RNA, 1701 nt, Artificial Sequence; identical to SEQ ID NO: 195905
  derived and/or modified CDS sequence (opt5) from hemagglutinin__InfluenzaA__ADE28991

SEQ ID NO: 196563 - RNA, 1701 nt, Artificial Sequence
  derived and/or modified CDS sequence (opt5) from hemagglutinin__InfluenzaA__ADE29001
augaaggccauccuggugguccuccuguacaccuucgcuacagccaacgcggacacgcuuugcauuggcuaucacgcuaauaacagcaccgauacaguugacaccgugcuggagagaaaugugacagucacccauuccgugaaccuccuggaagauaagcacaaugggaaacuuuguaagcugaagggaguugcuccccuccaucugggcaaaugcaacaucgccggguggauucugggaaauccugagugugaaucucucagcacagccuccucuuggagcuacaucguggagaccuccucuagcgacaacggcacgugcuauccgggggauuuuauugacuacgaagaacugcgggagcagcuuuccagcgucucuuccuucgaacgcuuugagaucuuccccaagaccagcucuuggccuaaucacgauuccaacaagggagugacagccgcuuguccccaugccggcgcgaaaucuuuuuauaagaaucugaucuggcucguuaaaaagggcaacagcuacccuaaacuguccaagagcuauauuaaugacaaggggaaagaagugcuuguccuguggggaauccaccaccccuccaccucugccgaucaacagagccucuaccagaacgcugacgccuacguguucgugggcacauccagauauagcaagaaauuuaagccugagauugcuauccggccgaaaguccgcgaucaggaggggagaaugaauuacuauuggacccugguugaacccggagacaagauuacguucgaggccacaggcaaccugguggugccucgguacgcguuugccauggaacgcaacgcugggucuggaaucauuaucuccgauacccccguccaugacugcaauacaaccugucaaaccccuaaaggcgccaucaacacaagccuccccuuccagaauauucacccgaucacgauuggcaagugcccuaaguaugugaaaucuaccaagcugagacuugcuacagggcugcggaacguucccagcauccagucccgcggacucuuuggcgccauugccggguucaucgagggaggcuggaccgggaugguggacggaugguacggcuaucaucaccagaaugaacaaggcucuggguacgcugcggaucugaaaagcacacagaacgccaucgacgagauuaccaauaaggucaacuccgugaucgagaaaaugaauacgcaguuuacagcuguuggaaaggaguucaaccaccuugagaagagaauugaaaaucugaacaaaaagguggaugacggcuuccucgauaucuggaccuacaaugccgagcugcugguccuccuggaaaacgagcggacccuugacuaucaugauagcaaugugaaaaaccuguacgagaagguccgcucucagcucaaaaacaaugccaaggaaauugggaacggauguuuugaguucuaucacaagugcgacaauacauguauggaauccgugaaaaacggcaccuacgauuauccuaaguacagcgaggaagcuaaacugaauagagaggagaucgacgggguuaaacuugaaucuacacggaucuaucaaauucuggccaucuacuccacgguggcgagcucccucguccuggugguuucucugggcgcuauuagcuuuuggaugugcuccaacggaucucuccagugccgcaucuguauuuga

SEQ ID NO: 196564 - RNA, 1701 nt, Artificial Sequence; identical to SEQ ID NO: 194983
  derived and/or modified CDS sequence (opt5) from hemagglutinin__InfluenzaA__ADE29011

SEQ ID NO: 196565 - RNA, 1701 nt, Artificial Sequence
  derived and/or modified CDS sequence (opt5) from hemagglutinin__InfluenzaA__ADE29021
augaaggccauccuggugguccuccuguacaccuucgcuacagccaacgcggacacgcuuugcauuggcuaucacgcuaauaacagcaccgauacaguugacaccgugcuggagaaaaaugugacagucacccauuccgugaaccuccuggaagauaagcacaaugggaaacuuuguaagcugagaggaguugcuccccuccaucugggcaaaugcaacaucgccggguggauucugggaaauccugagugugaaucucucagcacagccuccucuuggagcuacaucguggagaccuccggcucugacaacgggacgugcuauccgggagauuuuauugacuacgaagaacugcgggagcagcuuagcuccgucagcucuuucgaacgcuuugagaucuuccccaagaccuccagcuggccuaaucacgauucuaacaagggcgugacagccgcuuguccccaugccggcgcgaaauccuuuuauaagaaucugaucuggcucguuaaaaaggggaacagcuacccuaaacugucuaaguccuauauuaaugacaagggaaaagaagugcuuguccuguggggcauccaccaccccagcaccuccacagaucaacagucucucuaccagaacgccgacgcuuacgugagcguggggaccuccagauauagcaagaaauucaagccugagauugccauccggccgaaaguccgcgaucaggagggaagaaugaauuacuauuggacgcugguugaacccggcgacaagauuacauuugaggcuaccgggaaccugguggugccucgguacgccuucgcgauggaacgcaacgccggaucuggcaucauuaucuccgauacacccguccaugacugcaauaccaccugucaaacaccuaaaggcgcuaucaacacgagccuccccuuucagaauauucacccgaucaccauugggaagugcccuaaguaugugaaaucuacaaagcugagacuugccaccggacugcggaacguucccagcauccagucccgcggccucuucggggcuauugccggauuuaucgagggcggguggacaggaaugguggacggcugguacggcuaucaucaccagaaugaacaagggucuggauacgccgcugaucugaaaagcacccagaacgcgaucgacaagauuacgaauaaagucaacuccgugaucgagaagaugaauacacaguucaccgccguuggcaaggaguuuaaccaccuugagaaaagaauugagaaucugaacaagaaaguggaugacggguuccucgauaucuggaccuacaaugcugaacugcugguccuccuggagaacgaacggacacuugacuaucaugauagcaaugugaagaaccuguacgagaaaguccgcucucagcucaagaacaaugccaaggagauuggaaacggcuguuucgaauuuuaucacaaaugcgacaauaccuguauggaguccgugaagaacgggacauacgauuauccuaaauacagcgaagaggccaagcugaauagagaagagaucgacggcguuaaacuugagucuacgcggaucuaucaaauucuggcuaucuacuccaccguggccagcucccucguccuggugguuucucugggagcgauuagcuucuggaugugcuccaacggcucucuccagugccgcaucuguauuuga

SEQ ID NO: 196566 - RNA, 1701 nt, Artificial Sequence; identical to SEQ ID NO: 196390
  derived and/or modified CDS sequence (opt5) from hemagglutinin__InfluenzaA__ADE29031

SEQ ID NO: 196567 - RNA, 1701 nt, Artificial Sequence
  derived and/or modified CDS sequence (opt5) from hemagglutinin__InfluenzaA__ADE29041
augaaggccauccuggugguccuccuguacaccuucgcuacagccaacgcggacacgcuuugcauuggcuaucacgcuaauaacagcaccgauacaguugacaccgugcuggagaaaaaugugacagucacccauuccgugaaccuccuggaagauaagcacaaugggaaacuuuguaagcugagaggaguugcuccccuccaucugggcaaaugcaacaucgccggguggauucugggaaauccugagugugaaucucucagcacagccuccucuuggagcuacaucguggagaccuccucuagcgacaacggcacgugcuauccgggggauuuuauugacuacgaagaacugcgggagcagcuuuccagcgucucuuccuucgaacgcuuugagaucuuccccaagaccagcucuuggccuaaucacgauuccaacaagggagugacagccgcuuguccccaugccggcgcgaaaucuuuuuauaagaaucugaucuggcucguuaaaaagggcaacagcuacccuaaacuguccaagagcuauauuaaugacaaggggaaagaagugcuuguccuguggggaauccaccaccccuccaccucugccgaucaacagagccucuaccagaacgcugacgccuacguguucgugggcacauccagauauagcaagaaauuuaagccugagauugcuauccggccgaaaguccgcgaucaggaggggagaaugaauuacuauuggacccugguugaacccggagacaagauuacguucgaggccacaggcaaccugguggugccucgguacgcguuugccauggaaaagaacgcugggucuggaaucauuaucuccgauacccccguccaugacugcaauacaaccugucaaaccccuaagggcgccaucaacacaagccuccccuuccagaauauucacccgaucacgauuggcaagugcccuaaauaugugaagucuaccaaacugcgccuugcuacagggcugagaaacguucccagcauccagucccggggacucuuuggcgccauugccggguucaucgagggaggcuggaccgggaugguggacggaugguacggcuaucaucaccagaaugaacaaggcucuggguacgcugcggaucugaaaagcacacagaacgccaucgacgagauuaccaauaaagucaacuccgugaucgagaagaugaauacgcaguuuacagcuguuggaaaggaguucaaccaccuugagaaacgcauugaaaaucugaacaagaaaguggaugacggcuuccucgauaucuggaccuacaaugccgagcugcugguccuccuggaaaacgagagaacccuugacuaucaugauagcaaugugaagaaccuguacgagaaaguccggucucagcucaagaacaaugccaaggaaauugggaacggauguuuugaguucuaucacaaaugcgacaauacauguauggaauccgugaagaacggcaccuacgauuauccuaaauacagcgaggaagcuaagcugaaucgcgaggagaucgacgggguuaaacuugaaucuacaagaaucuaucaaauucuggccaucuacuccacgguggcgagcucccucguccuggugguuucucugggcgcuauuagcuuuuggaugugcuccaacggaucucuccagugccggaucuguauuuga

SEQ ID NO: 196568 - RNA, 1701 nt, Artificial Sequence; identical to SEQ ID NO: 196390
  derived and/or modified CDS sequence (opt5) from hemagglutinin__InfluenzaA__ADE29051

SEQ ID NO: 196569 - RNA, 1701 nt, Artificial Sequence
  derived and/or modified CDS sequence (opt5) from hemagglutinin__InfluenzaA__ADE29085
augaaggccauccuggugguccuccuguacaccuucgcuacagccaacgcggacacgcuuugcauuggcuaucacgcuaauaacagcaccgauacaguugacaccgugcuggagaaaaaugugacagucacccauuccgugaaccuccuggaagauaagcacaaugggaaacuuuguaagcugagaggaguugcuccccuccaucugggcaaaugcaacaucgccggguggauucugggaaauccugagugugaaucucucagcacagccuccucuuggagcuacaucguggagaccccguccucugacaacggcacgugcuaucccggggauuuuauugacuacgaagaacugcgggagcagcuuagcuccgucagcucuuucgaacgcuuugagaucuucccuaagaccuccagcuggcccaaucacgauucuaacaagggagugacagccgcuuguccucaugccgaagcgaaauccuuuuauaagaaucugaucuggcucguuaaaaagggcaacagcuaccccaaacugucuaaguccuauauuaaugacaagggcaaagaggugcuuguccugugggggauccaccacccuagcaccuccgccgaucaacagucucucuaccagaacgcugacgccuacguguucgugggaagcuccagauauagcaagacauuuaaaccggagauugcuauccggcccaagguccgcgauagagaaggccggaugaauuacuauuggacccugguugagccuggggacaaaauuacguucgaagccacaggaaaccugguggugccccgcuacgcguuugccauggagagaaacgcuggcucugggaucauuaucuccgauaccccuguccaugacugcaauacaaccugucagacccccaagggagccaucaacacaagccucccguuccaaaauauucacccuaucacgauuggcaaaugccccaaguaugugaagucuaccaaacugcggcuugcuacaggccugcgcaacaucccuagcauucaguccagagggcucuuuggagccaucgccggcuucaucgaagggggauggaccggcaugguugacgggugguacggauaucaucaccagaaugagcagggcucuggcuacgcugcggaucuuaagagcacacaaaacgccauugacgagaucaccaauaaagugaacuccgucauugaaaagaugaauacgcaguuuacagcuguggggaaagaguucaaccaccuggaaaagcggaucgagaaucugaacaagaaaguugaugacggauuccucgauauuuggaccuacaaugccgaacugcuggugcuccuggagaacgagcgcacccuugacuaucaugauagcaaugucaagaaccuguacgaaaaagugagaucucagcucaagaacaaugccaaagagaucggcaacggguguuuugaguucuaucacaagugcgacaauacauguauggaguccgucaagaacggaaccuacgauuaucccaaauacagcgaagaggcuaagcugaaucgggaggaaaucgacggcgugaaacuugagucuacacgcauuuaucagauccuggccauuuacuccacgguugcgagcucccucgugcuggucgugucucugggggcuaucagcuuuuggaugugcuccaacggcucucuccaaugcagaauuuguaucuga

SEQ ID NO: 196570 - RNA, 1701 nt, Artificial Sequence
  derived and/or modified CDS sequence (opt5) from hemagglutinin__InfluenzaA__ADE29095
augaaggccauccuggugguccuccuguacaccuucgcuacagccaacgcggacacgcuuugcauuggcuaucacgcuaauaacagcaccgauacaguugacaccgugcuggagaaaaaugugacagucacccauuccgugaaccuccuggaagauaagcacaaugggaaacuuuguaagcugagaggaguugcuccccuccaucugggcaaaugcaacaucgccggguggauucugggaaauccugagugugaaucucucagcacagccuccucuuggagcuacaucguggagaccccguccucugacaacggcacgugcuaucccggggauuuuauugacuacgaagaacugcgggagcagcuuagcuccgucagcucuuucgaacgcuuugagaucuucccuaagaccuccagcuggcccaaucacgauucuaacaagggagugacagccgcuuguccucaugccggcgcgaaauccuuuuauaagaaucugaucuggcucguuaaaaagggcaacagcuaccccaaacugucuaaguccuauauuaaugacaaggggaaagaagugcuuguccuguggggaauccaccacccuagcaccuccgccgaucaacagucucucuaccagaacgcugacgccuacguguucgugggcagcuccagauauagcaagacauuuaaaccggagauugcuauccggcccaagguccgcgauagagaggggcggaugaauuacuauuggacccugguugaaccuggagacaaaauuacguucgaggccacaggcaaccugguggugccccgcuacgcguuugccauggaaagaaacgcugggucuggaaucauuaucuccgauaccccuguccaugacugcaauacaaccugucagacccccaagggcgccaucaacacaagccucccguuccaaaauauucacccuaucacgauuggcaaaugccccaaguaugugaagucuaccaaacugcggcuugcuacagggcugcgcaacaucccuagcauucaguccagaggacucuuuggcgccaucgccggguucaucgagggaggcuggaccgggaugguugacggaugguacggcuaucaucaccagaaugaacagggcucuggguacgcugcggaucuuaagagcacacaaaacgccauugacgagaucaccaauaaagugaacuccgucauugagaagaugaauacgcaguuuacagcugugggaaaagaguucaaccaccuggagaagcggaucgaaaaucugaacaagaaaguugaugacggcuuccucgauauuuggaccuacaaugccgagcugcuggugcuccuggaaaacgagcgcacccuugacuaucaugauagcaaugucaagaaccuguacgagaaagugagaucucagcucaagaacaaugccaaagaaaucgggaacggauguuuugaguucuaucacaagugcgacaauacauguauggaauccgucaagaacggcaccuacgauuaucccaaauacagcgaggaagcuaagcugaaucgggaggagaucgacggggugaaacuugaaucuacacgcauuuaucagauccuggccauuuacuccacgguugcgagcucccucgugcuggucgugucucugggcgcuaucagcuuuuggaugugcuccaacggaucucuccaaugcagaauuuguaucuga

SEQ ID NO: 196571 - RNA, 1701 nt, Artificial Sequence; identical to SEQ ID NO: 195660
  derived and/or modified CDS sequence (opt5) from hemagglutinin__InfluenzaA__ADE34191

SEQ ID NO: 196572 - RNA, 1701 nt, Artificial Sequence; identical to SEQ ID NO: 195660
  derived and/or modified CDS sequence (opt5) from hemagglutinin__InfluenzaA__ADE34202

SEQ ID NO: 196573 - RNA, 1701 nt, Artificial Sequence
  derived and/or modified CDS sequence (opt5) from hemagglutinin__InfluenzaA__ADE34213
augaagaccaucauugcccugagcuacauccucugccugguguucgcucagaaacuucccggcaacgacaauuccacagccacgcugugucucgggcaccaugcggucccuaacggaaccauuguuaagacaaucaccaaugaucaaauugaggugacaaacgcuaccgaacuggugcagucuagcuccacaggcgagaucugcgacucuccgcaccagauccuugauggggaaaauuguacccugauugacgcccuccugggagauccccagugcgacggcuuucaaaacaaaaagugggaucuguucgucgagagacggaaagccuauagcaauuguuacccuuaugacgugcccgauuacgcuucccuccgcucucugguugccagcuccgggacgcuugaauuuaacaaugagagcuucaacuggaccggagugacacagaauggcaccucuuccgcuugcaucagacggagcaacaauuccuuuuucucucgccugaacuggcucacacaucugaaguuuaaguauccugcccuuaaugucaccaugcccaacaacgagcaguucgacaaacuguacauuuggggcgugcaccauccugggacggauaaugaccagaucuuucucuaugcgcaagccagcggaagaauuacaguuucuaccaagcggucccagcagacagugaucccgaacauuggcagccgccccagaguccggaauaucccuucccgcaucucuauuuacuggaccaucgugaaacccggggauauucugcugaucaacagcaccggaaaucucauugcuccuagaggcuacuucaagauccgguccgggaaaagcucuaucaugcgcuccgacgcccccauuggaaaguguaacagcgaaugcaucacaccgaauggcucuauuccuaacgacaagcccuuucagaaugugaacagaaucacguauggcgcuuguccucgguacgucaaacaaaauacccugaaacuugccacagggaugcgcaacguucccgagaagcagaccagaggaauuuucggcgcgaucgccggguuuaucgaaaauggaugggagggcaugguggaugggugguauggauuccggcaccagaacagcgagggcagaggccaagcugccgaccugaaguccacacaggcugccauugaucagaucaaugggaaacucaaccgccugauuggaaagaccaacgaaaaauuccaccagaucgagaaggaauuuucugagguggaaggccggauucaagaccuugagaaguacgucgaggauacgaaaaucgaccuguggagcuauaaugccgaacuccugguggcucuggagaaccagcauacaauugaucucaccgacuccgaaaugaauaagcuguucgagaaaaccaagaaacagcuuagagaaaacgcggaggauauggggaauggaugcuuuaagaucuaccacaagugugacaacgccugcaucggcagcauucgcaaugggacauaugaucaugacguuuaccgggacgaggcucugaacaauagauuccagaucaaaggcguggaacucaagucuggauacaaagauuggauucuguggaucuccuuugccauuagcugcuuccuucugugugucgcccuccugggcuuuaucaugugggcuugccaaaaggggaacauccgcuguaauauuugcaucuga

SEQ ID NO: 196574 - RNA, 1701 nt, Artificial Sequence; identical to SEQ ID NO: 195660
  derived and/or modified CDS sequence (opt5) from hemagglutinin__InfluenzaA__ADE34224

SEQ ID NO: 196575 - RNA, 1701 nt, Artificial Sequence
  derived and/or modified CDS sequence (opt5) from hemagglutinin__InfluenzaA__ADE34235
augaagaccaucauugcccugagcuacauccucugccugguguucgcucagaaacuucccggcaacgacaauuccacagccacgcugugucucgggcaccaugcggucccuaacggaaccauuguuaagacaaucaccaaugaucaaauugaggugacaaacgcuaccgaacuggugcagucuagcuccacaggcgagaucugcgacucuccgcaccagauccuugaugggaaaaauuguacccugauugacgcccuccugggagauccccagugcgacggcuuucaaaacaagaaaugggaucuguucgucgaaagaagcaaggccuauuccaauuguuacccuuaugacgugcccgauuacgcuucucuccggagccugguugccuccagcgggacgcuugaguuuaacaaugaaucuuucaacuggaccggagugacacaggacggcaccuccagcgcuugcauccgcagaucuaaaaauuccuuuuucagccggcugaacuggcucacacaucugaauuuuaaauauccugcccuuaacgucaccaugcccaauaacgagcaguucgauaagcuguacauuuggggcgugcaccauccugggacggacaaagaucagaucuuucucuaugcgcaagccucuggacgcacaaccguuuccacaaagagaagccagcagaccgcuauuccgaacaucggcucccggccccgcgugagaaauauuccuucucggaucagcaucuacuggaccauugucaaacccggggacauccugcugauuaacuccacaggaaaucucaucgccccucgcggcuacuucaagauuagaagcgggaagucuuccaucaugcggagcgacgcucccaucggaaaauguaacucugagugcauuacgccgaauggcagcaucccuaacgauaagcccuuucagaaugugaaccgcauuaccuauggcgccuguccuagauacgugaaacaaaauacacugaaacuugcgaccgggaugcggaacguccccgaaaagcagacacgcggaaucuucggcgccauugcuggguuuaucgagaauggaugggaaggcaugguugacgggugguauggauucagacaccagaacuccgagggccggggccaagccgcugaucugaagucuacccaggccgccaucgaccagauuaaugggaaacucaacagacugaucggaaagacgaaugagaaguuccaccagauugaaaaagaguuuagcgaaguggagggccgcauccaagaucuugaaaaguacguggaggacacaaaaauugaucugugguccuauaacgcugagcuccuggucgcgcuggaaaaccagcauaccaucgaccucaccgauagcgagaugaauaagcuguucgaaaagacaaagaagcagcuucgggagaacgccgaagacauggggaauggaugcuuuaaaauuuaccacaagugugauaacgcuugcaucggcucuaucagaaaugggaccuaugaccaugacguguaccgcgaugaggcccugaacaaucgguuccagauuaaaggcguugagcucaaguccggauacaaagacuggauccuguggauuagcuuugccaucucuugcuuccuucuguguguggcucuccugggcuuuauuaugugggccugccaaaaggggaacaucagauguaauaucugcauuuga

SEQ ID NO: 196576 - RNA, 1701 nt, Artificial Sequence; identical to SEQ ID NO: 195660
  derived and/or modified CDS sequence (opt5) from hemagglutinin__InfluenzaA__ADE34246

SEQ ID NO: 196577 - RNA, 1701 nt, Artificial Sequence; identical to SEQ ID NO: 195685
  derived and/or modified CDS sequence (opt5) from hemagglutinin__InfluenzaA__ADE34257

SEQ ID NO: 196578 - RNA, 1701 nt, Artificial Sequence
  derived and/or modified CDS sequence (opt5) from hemagglutinin__InfluenzaA__ADE34268
augaagaccaucauugcccugagcuacauccucugccugguguucgcucagaaacuucccggcaacgacaauuccacagccacgcugugucucgggcaccaugcggucccuaacggaaccauuguuaagacaaucaccaaugaucaaauugaggugacaaacgcuaccgaacuggugcagucuagcuccacaggcgagaucugcgacucuccgcaccagauccuugaugggaaaaauuguacccugauugacgcccuccugggagauccccagugcgacggcuuucaaaacaagaaaugggaucuguucgucgaaagaagcaaggccuauuccaauuguuacccuuaugaggugcccgacuacgcuucucuccggagccugguugccuccagcgggacgcuugaauuuaacaaugagucuuucaacuggaccggagugacacaggauggcaccuccagcgcuugcauccgcagaucuaaaaauuccuuuuucagccggcugaacuggcucacacaucugaauuuuaaguauccugcccuuaacgucaccaugcccaauaacgagcaguucgacaagcuguacauuuggggcgugcaccauccugggacggauaaagaccagaucuuucucuaugcgcaagccucuggacgcauuacaguuuccaccaagagaagccagcagacagcuaucccgaacauuggcucccggccccgcgugagaaauaucccuucucggaucagcauuuacuggaccaucgucaaacccggggauauucugcugaucaacuccaccggaaaucucauugccccucgcggcuacuucaagaucagaagcgggaagucuuccaucaugcggagcgacgcucccauuggaaaauguaacucugaaugcaucacaccgaauggcagcauuccuaacgacaagcccuuucagaaugugaaccgcaucacguauggcgccuguccuagauacgugaaacaaaauacccugaaacuugcgacagggaugcggaacguccccgagaagcagacccgcggaauuuucggcgccaucgcuggguuuaucgaaaauggaugggagggcaugguugaugggugguauggauucagacaccagaacuccgagggccggggccaagccgcugaccugaagucuacacaggccgccauugaucagaucaaugggaaacucaacagacugauuggaaagaccaaugaaaaguuccaccagaucgagaaagaauuuagcgagguggaaggccgcauucaagaccuugagaaguacguggaggauacgaaaaucgaccugugguccuauaacgcugaacuccuggucgcgcuggagaaccagcauacaauugaucucaccgacagcgaaaugaauaagcuguucgagaaaaccaagaagcagcuucgggaaaacgccgaggauauggggaauggaugcuuuaaaaucuaccacaagugugacaacgcuugcaucggcucuauuagaaaugggacauaugaucaugacguguaccgcgacgaggcccugaacaaucgguuccagaucaaaggcguugaacucaaguccggauacaaagauuggauucuguggaucagcuuugccauuucuugcuuccuucuguguguggcucuccugggcuuuaucaugugggccugccaaaaggggaacaucagauguaauauuugcaucuga

SEQ ID NO: 196579 - RNA, 1701 nt, Artificial Sequence
  derived and/or modified CDS sequence (opt5) from hemagglutinin__InfluenzaA__ADE45499
augaaggccauccuggugguccuccuguacaccuucgcuacagccaacgcggacacgcuuugcauuggcuaucacgcuaauaacagcaccgauacaguugacaccgugcuggagaaaaaugugacagucacccauuccgugaaccuccuggaagauaagcacaaugggaaacuuuguaagcugagaggaguugcuccccuccaucugggcaaaugcaacaucgccggguggauucugggaaauccugagugugaaucucucagcacagccuccucuuggagcuacaucguggagaccuccucuagcgacaacggcacgugcuauccgggggauuuuauugacuacgaagaacugcgggagcagcuuuccagcgucucuuccuucaagcgcuuugaaaucuuccccaagaccagcucuuggccuaaucacgaucccaacaaaggagugacagccgcuuguccucaugccggcgcgaaguccuuuuauaaaaaucugaucuggcucguuaagaaaggcaacagcuaccccaagcugucuaaguccuauauuaaugacaaagggaaggaggugcuuguccuguggggaauccaccacccuagcaccuccgccgaucaacagucucucuaccagaacgcugacgccuacguguucgugggcacaagcagauauuccaaaaaguuuaaaccggaaauugcuauccggcccaagguccgcgaucaggaggggagaaugaauuacuauuggacccugguugagccuggagacaaaauuacguucgaagccacaggcaaccugguggugccccgguacgcguuugccauggagcgcaacgcugggagcggaaucauuaucucugauaccccuguccaugacugcaauacaaccugucaaacccccaagggcgccaucaacacaucccucccguuccagaauauucacccuaucacgauuggcaagugccccaaauaugugaaaagcaccaaacugagacuugcuacagggcugcggaacguuccuucuauccagagccgcggacucuuuggcgccauugccggguucaucgaaggaggcuggaccgggaugguggacggaugguacggcuaucaucaccagaaugagcaaggcuccggguacgcugcggaucugaagucuacacagaacgccaucgacgaaauuaccaauaaagucaacagcgugaucgagaagaugaauacgcaguuuacagcuguuggaaaggaguucaaccaccuugaaaagagaauugagaaucugaacaagaaaguggaugacggcuuccucgauaucuggaccuacaaugccgaacugcugguccuccuggagaacgaacggacccuugacuaucaugauuccaaugugaagaaccuguacgagaaaguccgcagccagcucaagaacaaugccaaggagauugggaacggauguuuugaguucuaucacaaaugcgacaauacauguauggagucugugaagaacggcaccuacgauuaucccaaauacuccgaagaggcuaagcugaauagagaagagaucgacgggguuaaacuugagagcacacggaucuaucaaauucuggccaucuacucuacgguggcguccagccucguccuggugguuucccugggcgcuauuucuuuuuggaugugcagcaacggaucccuccagugccgcaucuguauuuga

SEQ ID NO: 196580 - RNA, 1701 nt, Artificial Sequence; identical to SEQ ID NO: 195539
  derived and/or modified CDS sequence (opt5) from hemagglutinin__InfluenzaA__ADE45501

SEQ ID NO: 196581 - RNA, 1701 nt, Artificial Sequence
  derived and/or modified CDS sequence (opt5) from hemagglutinin__InfluenzaA__ADE45503
augaaggccauccuggugguccuccuguacaccuucgcuacagccaacgcggacacgcuuugcauuggcuaucacgcuaauaacagcaccgauacaguugacaccgugcuggagaagaaugugacagucacccauuccgugaaccuccuggaagauaagcacaaugggaaacuuuguaagcugagaggaguugcuccccuccaucugggcaaaugcaacaucgccggguggauucugggaaauccugagugugaaucucucagcacagccuccucuuggagcuacaucguggagaccuccucuagcgacaacggcacgugcuauccgggggauuuuauugacuacgaagaacugcgggagcagcuuuccagcgucucuuccuucgaacgcuuugagaucuuccccaagaccagcucuuggccuaaucacgaucccaacaagggagugacagccgcuuguccucaugccggcgcgaaauccuuuuauaagaaucugaucuggcucguuaaaaagggcaacagcuaccccaaacugucuaaguccuauauuaaugacaaggggaaagaagugcuuguccuguggggaauccaccacccuagcaccuccgccgaucaacagucucucuaccagaacgcugacgccuacguguucgugggcacaagcagauauuccaagaaauuuaagccggagauugcuauccggcccaaaguccgcgaucaggaggggagaaugaauuacuauuggacccugguugaaccuggagacaagauuacguucgaggccacaggcaaccugguggugccccgguacgcguuugccauggaacgcaacgcugggagcggaaucauuaucucugauaccccuguccaugacugcaauacaaccugucaaacccccaaaggcgccaucaacacaucccucccguuccagaauauucacccuaucacgauuggcaagugccccaaguaugugaaaagcaccaagcugagacuugcuacagggcugcggaacguuccuucuauccagagccgcggacucuuuggcgccauugccggguucaucgagggaggcuggaccgggaugguggacggaugguacggcuaucaucaccagaaugaacaaggcuccggguacgcugcggaucugaaaucuacacagaacgccaucgacgagauuaccaauaaggucaacagcgugaucgagaaaaugaauacgcaguuuacagcuguuggaaaggaguucaaccaccuugagaagagaauugaaaaucugaacaaaaagguggaugacggcuuccucgauaucuggaccuacaaugccgagcugcugguccuccuggaaaacgagcggacccuugacuaucaugauuccaaugugaaaaaccuguacgagaagguccgcagccagcucaaaaacaaugccaaggaaauugggaacggauguuuugaguucuaucacaagugcgacaauacauguauggaaucugugaaaaacggcaccuacgauuaucccaaguacuccgaggaagcuaaacugaauagagaggagaucgacgggguuaaacuugaaagcacacggguguaucaaauccuggccauuuacucuacggucgcguccagccucgugcugguugugucccugggcgcuaucucuuuuuggaugugcagcaacggaucccuccagugccgcauuuguaucuga

SEQ ID NO: 196582 - RNA, 1701 nt, Artificial Sequence; identical to SEQ ID NO: 194741
  derived and/or modified CDS sequence (opt5) from hemagglutinin__InfluenzaA__ADE45505

SEQ ID NO: 196583 - RNA, 1701 nt, Artificial Sequence; identical to SEQ ID NO: 195094
  derived and/or modified CDS sequence (opt5) from hemagglutinin__InfluenzaA__ADE45507

SEQ ID NO: 196584 - RNA, 1701 nt, Artificial Sequence; identical to SEQ ID NO: 195094
  derived and/or modified CDS sequence (opt5) from hemagglutinin__InfluenzaA__ADE45509

SEQ ID NO: 196585 - RNA, 1701 nt, Artificial Sequence; identical to SEQ ID NO: 195539
  derived and/or modified CDS sequence (opt5) from hemagglutinin__InfluenzaA__ADE45511

SEQ ID NO: 196586 - RNA, 1701 nt, Artificial Sequence
  derived and/or modified CDS sequence (opt5) from hemagglutinin__InfluenzaA__ADE45513
augaaggccauccuggugguccuccuguacaccuucgcuacagccaacgcggacacgcuuugcauuggcuaucacgcuaauaacagcaccgauacaguugacaccgugcuggagaagaaugugacagucacccauuccgugaaccuccuggaagauaagcacaaugggaaacuuuguaagcugagaggaguugccccucuccaucugggcaaaugcaacaucgccggguggauucugggaaauccugagugugaaucucucagcacagcuuccucuuggagcuacaucguggagaccuccucuagcgacaacggcacgugcuauccgggggauuuuauugacuacgaagaacugcgggagcagcuuuccagcgucucuuccuucgaacgcuuugagaucuuccccaagaccagcucuuggccuaaucacgaucccaacaagggagugacagccgcuuguccucaugccggcgcgaaauccuuuuauaagaaucugaucuggcucguuaaaaagggcaacagcuaccccaaacugucuaaguccuauauuaaugacaaggggaaagaagugcuuguccuguggggaauccaccacccuagcaccuccgccgaucaacagucucucuaccagaacgcugacgccuacgcuuucgugggcacaagcagauauuccaagaaauuuaagccggagauugccauccggcccaaagugcgcgaucaggaggggagaauuaauuacuauuggacccuggucgaaccuggagacaagaucauuuucgaggcgacgggcaaccugguugugccccgguacgccuuugcuauggaacgcaacgccgggagcggaaucaucauuucugauacacccgcucaugacugcaauaccacaugucaaacccccaaaggcgccaucaacaccucccucccguuccagaauauucacccuaucacaauuggcaagugccccaaguaugugaaaagcacgaagcugagacuugccaccgggcugcggaacgucccuucuauccagagccgcggacucuuuggcgcuaucgcgggguucauugagggaggcuggacagggaugguggacggaugguacggcuaucaucaccagaaugaacaaggcuccggguacgccgcugaucugaaaucuacccagaacgccaucgacgagauuacaaauaagguuaacagcgugaucgagaaaaugaauacccaguuuacggccgucggaaaggaguucaaccaccuugagaagagaauugaaaaucugaacaaaaagguggaugacggcuuccucgauaucuggacauacaaugcugagcugcugguucuccuggaaaacgagcggacccuugacuaucaugauuccaaugugaaaaaccuguacgagaagguccgcagccagcucaaaaacaaugccaaggaaaucgggaacggauguuuugaguucuaucacaagugcgacaauaccuguauggaaucugugaaaaacggcacauacgauuaucccaaguacuccgaggaagcgaaacugaauagagaggagauugacggggucaaacuugaaagcacccggaucuaucaaauucuggcuaucuacucuacaguggccuccagccucguucugguggucucccugggcgccauuucuuuuuggaugugcagcaacggaucccuccagugccgcaucuguauuuga

SEQ ID NO: 196587 - RNA, 1701 nt, Artificial Sequence
  derived and/or modified CDS sequence (opt5) from hemagglutinin__InfluenzaA__ADE75388
augaaggccauccuggugguccuccuguacaccuucgcuacagccaacgcggacacgcuuugcauuggcuaucacgcuaauaacagcaccgauacaguugacaccgugcuggagaaaaaugugacagucacccauuccgugaaccuccuggaagauaagcacaaugggaaacuuuguaagcugagaggaguugcuccccuccaucugggcaaaugcaacaucgccggguggauucugggaaauccugagugugaaucucucagcacagccuccucuuggagcuacaucguggagaccuccucuagcgaaaacggcacgugcuauccgggggacuuuauugauuacgaggagcugcgggaacagcuuuccagcgucucuuccuucgagcgcuuugaaaucuuccccaagaccagcucuuggccuaaucacgacuccaacaagggagugacagccgcuuguccccaugccggcgcgaaaucuuuuuauaagaaucugaucuggcucguuaaaaagggcaacagcuacccuaaacuguccaagagcuauauuaaugauaaggggaaagaggugcuuguccuguggggaauccaccaccccuccaccucugccgaccaacagagccucuaccagaacgcugaugccuacguguucgugggcacauccagauauagcaagaaauuuaagccugagauugcuauccggccgaaaguccgcgaccaggaagggagaaugaauuacuauuggacccugguugagcccggagauaagauuacguucgaagccacaggcaaccugguggugccucgguacgcguuugccauggagcgcaacgcugggucuggaaucauuaucuccgacacccccguccaugauugcaauacaaccugucaaaccccuaaaggcgccaucaacacaagccuccccuuccagaauauucacccgaucacgauuggcaagugcccuaaguaugugaaaucuaccaagcugagacuugcuacagggcugcggaacguucccagcauccagucccgcggacucuuuggcgccauugccggguucaucgaaggaggcuggaccgggaugguggacggaugguacggcuaucaucaccagaaugagcaaggcucuggguacgcugcggaccugaaaagcacacagaacgccaucgaugagauuaccaauaaggucaacuccgugaucgaaaagaugaauacgcaguuuacagcuguuggaaaggaguucaaccaccuugaaaagagaauugagaaucugaacaaaaagguggacgauggcuuccucgacaucuggaccuacaaugccgaacugcugguccuccuggagaacgagcggacccuugauuaucaugacagcaaugugaaaaaccuguacgaaaagguccgcucucagcucaaaaacaaugccaaggagauugggaacggauguuuugaguucuaucacaagugcgauaauacauguauggaauccgugaaaaacggcaccuacgacuauccuaaguacagcgaagaggcuaaacugaauagagaggaaaucgaugggguuaaacuugagucuacacggaucuaucaaauucuggccaucuacuccacgguggcgagcucccucguccuggugguuucucugggcgcuauuagcuuuuggaugugcuccaacggaucucuccagugccgcaucuguauuuga

SEQ ID NO: 196588 - RNA, 1701 nt, Artificial Sequence; identical to SEQ ID NO: 194741
  derived and/or modified CDS sequence (opt5) from hemagglutinin__InfluenzaA__ADE75390

SEQ ID NO: 196589 - RNA, 1701 nt, Artificial Sequence; identical to SEQ ID NO: 194741
  derived and/or modified CDS sequence (opt5) from hemagglutinin__InfluenzaA__ADF10067

SEQ ID NO: 196590 - RNA, 1701 nt, Artificial Sequence; identical to SEQ ID NO: 194741
  derived and/or modified CDS sequence (opt5) from hemagglutinin__InfluenzaA__ADF10077

SEQ ID NO: 196591 - RNA, 1701 nt, Artificial Sequence
  derived and/or modified CDS sequence (opt5) from hemagglutinin__InfluenzaA__ADF10087
augaaggccauccuggugguccuccuguacaccuucgcuacagccaacgcggacacgcuuugcauuggcuaucacgcuaauaacagcaccgauacaguugacaccgugcuggagaaaaaugugacagucacccauuccgugaaccuccuggaagauaagcacaaugggaaacuuuguaagcugagaggaguugcuccccuccaucugggcaaaugcaacaucgccggguggauucugggaaauccugagugugaaucucucagcacagccuccucuuggagcuacaucguggagaccuccucuagcgacaacggcacgugcuauccgggggauuuuauugacuacgaagaacugcgggagcagcuuuccagcgucucuuccuucgaacgcuuugagaucuuccccaagaccagcucuuggccuaaucacgauuccaacaagggagugacagccgcuuguccccaugccggcgcgaaaucuuuuuauaagaaucugaucuggcucguuaaaaagggcaacagcuacccuaaacuguccaagagcuauauuaaugacaaggggaaagaagugcuuguccuguggggaauccaccaccccuccaccucugccgaucaacagagccucuaccagaacgcugacgccuacguguucgugggcacauccagauauagcaagaaauuuaagccugagauugcuauccggccgaaaguccgcgaucaggaggggagaaugaauuacuauuggacccugguugaacccggagacaagauuacguucgaggccacaggcaaccugguggugccucgguacgcguuugccaugaaacgcaacgcugggucuggaaucauuaucuccgauacccccguccaugacugcaauacaaccugucaaaccccuaagggcgccaucaacacaagccuccccuuccagaauauucacccgaucacgauuggcaagugcccuaaauaugugaagucuaccaaacugagacuugcuacagggcugcggaacguucccagcauccagucccgcggacucuuuggcgccauugccggguucaucgaaggaggcuggaccgggaugguggacggaugguacggcuaucaucaccagaaugagcaaggcucuggguacgcugcggaucugaaaagcacacagaacgccaucgacgaaauuaccaauaaagucaacuccgugaucgagaagaugaauacgcaguuuacagcuguuggaaaggaguucaaccaccuugaaaagagaauugagaaucugaacaagaaaguggaugacggcuuccucgauaucuggaccuacaaugccgaacugcugguccuccuggagaacgaacggacccuugacuaucaugauagcaaugugaagaaccuguacgagaaaguccgcaaccagcucaagaauaacgccaaggagauugggaauggauguuuugaguucuaucacaaaugcgacaacacauguauggagucugugaagaauggcaccuacgauuauccuaaauacuccgaagaggcuaagcugaacagagaagagaucgacgggguuaaacuugagagcacacggaucuaucaaauucuggccaucuacucuacgguggcguccagccucguccuggugguuucccugggcgcuauuucuuuuuggaugugcagcaauggaucccuccagugccgcaucuguauuuga

SEQ ID NO: 196592 - RNA, 1701 nt, Artificial Sequence
  derived and/or modified CDS sequence (opt5) from hemagglutinin__InfluenzaA__ADF10097
auggaggccauccuggugguccuccuguacaccuucgcuacagccaacgcggacacgcuuugcauuggcuaucacgcuaauaacagcaccgauacaguugacaccgugcuggaaaagaaugugacagucacccauuccgugaaccuccuggaggauaaacacaaugggaaacuuuguaaacugagaggaguugcgccccuccaucugggcaagugcaacaucgccggguggauucugggaaauccugaaugugagucucucagcacagcuuccucuuggagcuacaucguggaaaccuccucuagcgacaacggcacgugcuauccgggggauuuuauugacuacgaggagcugcgggaacagcuuuccagcgucucuuccuucgagcgcuuugaaaucuuccccaaaaccagcucuuggccuaaucacgauuccaacaagggagugacagccgcuuguccccaugccggcgccaagagcuuuuauaaaaaucugaucuggcucguuaagaaaggcaacucuuacccuaagcuguccaaaagcuauauuaaugacaaggggaaggaggugcuuguccuguggggaauccaccaccccuccaccucugccgaucaacagagccucuaccagaacgcugacgccuacguguucgugggcuccagcaaauauucuaagaaauuuaagccugagauugcuaucagaccgaaaguccgggaucaggaagggcgcaugaauuacuauuggacacugguugagcccggagacaagauuaccuucgaagccacgggcaaccugguggugccuagauacgcguuugccauggagcggaacgcuggguccggaaucauuaucagcgauacacccguccaugacugcaauaccacaugucaaaccccuaaaggcgccaucaacaccucucuccccuuccacaauauucauccgaucacaauuggcaagugcccuaaguaugugaaaagcacgaagcugcgccuugcuaccgggcugagaaacguucccuccauccagucucggggacucuuuggcgccauugccggguucaucgaaggaggcuggacagggaugguggacggaugguacggcuaucaccaccagaaugagcagggcagcggguacgcugcggaucugaaauccacccaaaacgccaucgacgagauuacaaauaaggucaacagcgugaucgaaaagaugaauacccaguuuacggcuguuggaaaggaguucaaccaucuugaaaagcgcauugagaaucugaacaaaaagguggaugacggcuuccucgauaucuggacauacaaugccgaacugcugguccuccuggagaacgagagaacccuugacuaucacgauucuaaugugaaaaaccuguacgaaaagguccggucccagcucaaaaacaaugccaaggagauugggaacggauguuuugaguucuaucauaagugcgacaauaccuguauggaaagcgugaaaaacggcacauacgauuauccuaaguacucugaagaggcuaaacugaaucgcgaggaaaucgacgggguuaaacuugaguccaccaagaucuaucagauucuggccaucuacagcacaguggcguccucucucguccuggugguuagccugggcgcuauuuccuuuuggaugugcucuaacggaagccuccaaugcagaaucuguauuuga

SEQ ID NO: 196593 - RNA, 1701 nt, Artificial Sequence
  derived and/or modified CDS sequence (opt5) from hemagglutinin__InfluenzaA__ADF10107
auggaggccauccuggugguccuccuguacaccuucgcuacagccaacgcggacacgcuuugcauuggcuaucacgcuaauaacagcaccgauacaguugacaccgugcuggaaaagaaugugacagucacccauuccgugaaccuccuggaggauaaacacaaugggaaacuuuguaaacugagaggaguugcgccccuccaucugggcaagugcaacaucgccggguggauucugggaaauccugaaugugagucucucagcacagcuuccucuuggagcuacaucguggaaaccuccucuagcgacaacggcacgugcuauccgggggauuuuauugacuacgaggagcugcgggaacagcuuuccagcgucucuuccuucgagcgcuuugaaaucuuccccaaaaccagcucuuggccuaaucacgauuccaacaagggagugacagccgcuuguccccaugccggcgccaagagcuuuuauaaaaaucugaucuggcucguuaagaaaggcaacucuuacccuaagcuguccaaaagcuauauuaaugacaaggggaaggaggugcuuguccuguggggaauccaccacccuccuaccuccgccgaucaacagucucucuaccagaacgcugacgccuacguguucgugggcagcuccaaauauagcaagaaauuuaagccggagauugcuaucagacccaaaguccgggaucaggaagggcgcaugaauuacuauuggacacugguugagccuggagacaagauuaccuucgaagccacgggcaaccugguggugcccagauacgcguuugccauggagcggaacgcugggucuggaaucauuaucuccgauacacccgcccaugacugcaauaccacaugucaaacccccaaaggcgcuaucaacaccagccucccguuccacaauauucauccuaucacaauuggcaagugccccaaguaugucaaaucuacgaagcugcgccuugccaccgggcugagaaacgugccuagcauccagucccggggacucuuuggcgccauugcuggguucaucgaaggaggcuggacagggaugguugacggaugguacggcuaucaccaccagaaugagcagggcucuggguacgcggccgaucugaaaagcacccaaaacgcuaucgacgagauuacaaauaaggugaacuccgucaucgaaaagaugaauacccaguuuacggccgugggaaaggaguucaaccaucuugaaaagcgcauugagaaucugaacaaaaagguugaugacggcuuccucgauaucuggacauacaaugccgaacugcuggugcuccuggagaacgagagaacccuugacuaucacgauagcaaugucaaaaaccuguacgaaaaggugcggucucagcucaaaaacaaugcuaaggagauugggaacggauguuuugaguucuaucauaagugcgacaauaccuguauggaauccgucaaaaacggcacauacgauuaucccaaguacagcgaagaggccaaacugaaucgcgaggaaaucgacggggugaaacuugagucuaccaagaucuaucagauucuggcgaucuacuccacaguugcuagcucccucgugcuggucgugucucugggcgccauuagcuuuuggaugugcuccaacggaucucuccaaugcagaaucuguauuuga

SEQ ID NO: 196594 - RNA, 1701 nt, Artificial Sequence; identical to SEQ ID NO: 194741
  derived and/or modified CDS sequence (opt5) from hemagglutinin__InfluenzaA__ADF10117

SEQ ID NO: 196595 - RNA, 1701 nt, Artificial Sequence; identical to SEQ ID NO: 196445
  derived and/or modified CDS sequence (opt5) from hemagglutinin__InfluenzaA__ADF10127

SEQ ID NO: 196596 - RNA, 1701 nt, Artificial Sequence; identical to SEQ ID NO: 194741
  derived and/or modified CDS sequence (opt5) from hemagglutinin__InfluenzaA__ADF10137

SEQ ID NO: 196597 - RNA, 1701 nt, Artificial Sequence
  derived and/or modified CDS sequence (opt5) from hemagglutinin__InfluenzaA__ADF10154
augaaggccauccuggugguccuccuguacaccuucgcuacagccaacgcggacacgcuuugcauuggcuaucacgcuaauaacagcaccgauacaguugacaccgugcuggagaaaaaugugacagucacccauuccgugaaccuccuggaagauaagcacaaugggaaacuuuguaagcugagaggaguugcuccccuccaucugggcaaaugcaacaucgccggguggauucugggaaauccugagugugaaucucucagcacagccuccucuuggagcuacaucguggagaccuccucuagcgacaacggcacgugcuauccgggggauuuuauugacuacgaagaacugcgggagcagcuuuccagcgucucuuccuucgaacgcuuugagaucuuccccaagaccagcucuuggccugaucacgacuccaauaagggagugacagccgcuuguccccaugccggcgcgaaaucuuuuuauaagaaccugaucuggcucguuaaaaagggcaauagcuacccuaaacuguccaagagcuauauuaacgauaaggggaaagaagugcuuguccuguggggaauccaccaccccuccaccucugccgaccaacagagccucuaccagaaugcugaugccuacguguucgugggcacauccagauauagcaagaaauuuaagccugagauugcuauccggccgaaaguccgcgagcaggaagggagaaugaacuacuauuggacccugguugagcccggagacaagauuacguucgaagccacaggcaaucugguggugccucgguacgcguuugccauggagcgcaacgcugggucuggaaucauuaucuccgauacccccguccaugacugcaacacaaccugucaaaccccuaaaggcgccaucaauacaagccuccccuuccagaacauucacccgaucacgauuggcaagugcccuaaguaugugaaaucuaccaagcugagacuugcuacagggcugcggaauguucccagcauccagucccgcggacucuuuggcgccauugccggguucaucgaaggaggcuggaccgggaugguggacggaugguacggcuaucaucaccagaacgagcaaggcucuggguacgcugcggaucugaaaagcacacagaaugccaucgacgagauuaccaacaaggucaauuccgugaucgagaaaaugaacacgcaguuuacagcuguuggaaaggaguucaaucaccuugaaaagagaauugagaaccugaauaaaaagguggaugacggcuuccucgauaucuggaccuacaacgccgaacugcugguccuccuggagaaugagcggacccuugacuaucaugauagcaacgugaaaaaucuguacgaacgcgucagaucucagcucaagaacaacgccaaagagauugggaauggauguuuugaguucuaucacaagugcgacaacacauguauggaauccgugaagaauggcaccuacgauuauccuaaauacagcgaagaggcuaagcugaaccgggaggaaaucgacgggguuaaacuugagucuacacgcaucuaucaaauucuggccaucuacuccacgguggcgagcucccucguccuggugguuucucugggcgcuauuagcuuuuggaugugcuccaauggaucucuccagugcagaaucuguauuuga

SEQ ID NO: 196598 - RNA, 1701 nt, Artificial Sequence
  derived and/or modified CDS sequence (opt5) from hemagglutinin__InfluenzaA__ADF10174
augaaggccauccuggugguccuccuguacaccuucgcuacagccaacgcggacacgcuuugcauuggcuaucacgcuaauaacagcaccgauacaguugacaccgugcuggagaaaaaugugacagucacccauuccgugaaccuccuggaagauaagcacaaugggaaacuuuguaagcugagaggaguugcuccccuccaucugggcaaaugcaacaucgccggguggauucugggaaauccugagugugaaucucucagcacagccuccucuuggagcuacaucguggagaccuccucuagcgacaacggcacgugcuauccgggggauuuuauugacuacgaagaacugcgggagcagcuuuccagcgucucuuccuucgaacgcuuugagaucuuccccaagaccagcucuuggccuaaucacgauuccaacaagggagugacagccgcuuguccccaugccggcgcgaaaucuuuuuauaagaaucugaucuggcucguuaaaaagggcaacagcuacccuaaacuguccaagagcuauauuaaugacaaggggaaagaagugcuuguccuguggggaauccaccaccccuccaccucugccgaucaacagagccucuaccagaacgcugacgccuacguguucgugggcacauccagauauagcaagaaauuuaagccugagauugcuauccggccgaaaguccgcgagcaggaagggagaaugaauuacuauuggacccugguugagcccggagauaagauuacguucgaagccacaggcaaccugguggugccucgguacgcguuugccauggagcgcaacgcugggucuggaaucauuaucuccgacacccccguccaugauugcaauacaaccugucaaaccccuaaaggcgccaucaacacaagccuccccuuccagaauauucacccgaucacgauuggcaagugcccuaaguaugugaaaucuaccaagcugagacuugcuacagggcugcggaacguucccagcauccagucccgcggacucuuuggcgccauugccggguucaucgaaggaggcuggaccgggaugguggacggaugguacggcuaucaucaccagaaugagcaaggcucuggguacgcugcggaccugaaaagcacacagaacgccaucgaugagauuaccaauaaggucaacuccgugaucgagaaaaugaauacgcaguuuacagcuguuggaaaggaguucaaccaccuugaaaagagaauugagaaucugaacaaaaagguggacgauggcuuccucgacaucuggaccuacaaugccgaacugcugguccuccuggagaacgagcggacccuugauuaucaugacagcaaugugaaaaaccuguacgaacgcgucagaucucagcucaagaacaaugccaaagagauugggaacggauguuuugaguucuaucacaagugcgauaauacauguauggaauccgugaagaacggcaccuacgacuauccuaaauacagcgaagaggcuaagcugaaucgggaggaaaucgaugggguuaaacuugagucuacacgcaucuaucaaauucuggccaucuacuccacgguggcgagcucccucguccuggugguuucucugggcgcuauuagcuuuuggaugugcuccaacggaucucuccagugcagaaucuguauuuga

SEQ ID NO: 196599 - RNA, 1701 nt, Artificial Sequence; identical to SEQ ID NO: 196598
  derived and/or modified CDS sequence (opt5) from hemagglutinin__InfluenzaA__ADF10190

SEQ ID NO: 196600 - RNA, 1701 nt, Artificial Sequence; identical to SEQ ID NO: 196445
  derived and/or modified CDS sequence (opt5) from hemagglutinin__InfluenzaA__ADF10237

SEQ ID NO: 196601 - RNA, 1701 nt, Artificial Sequence; identical to SEQ ID NO: 196598
  derived and/or modified CDS sequence (opt5) from hemagglutinin__InfluenzaA__ADF10262

SEQ ID NO: 196602 - RNA, 1701 nt, Artificial Sequence
  derived and/or modified CDS sequence (opt5) from hemagglutinin__InfluenzaA__ADF10288
augaaggccauccuggugguccuccuguacaccuucgcuacagccaacgcggacacgcuuugcauuggcuaucacgcuaauaacagcaccgauacaguugacaccgugcuggagaaaaaugugacagucacccauuccgugaaccuccuggaagauaagcacaaugggaaacuuuguaagcugagaggaguugcuccccuccaucugggcaaaugcaacaucgccggguggauucugggaaauccugagugugaaucucucagcacagccuccucuuggagcuacaucguggagaccuccucuagcgacaacggcacgugcuauccgggggauuuuauugacuacgaagaacugcgggagcagcuuuccagcgucucuuccuucgaacgcuuugagaucuuccccaagaccagcucuuggccuaaucacgauuccaacaagggagugacagccgcuuguccccaugccggcgcgaaaucuuuuuauaagaaucugaucuggcucguuaaaaagggcaacagcuacccuaaacuguccaagagcuauauuaaugacaaggggaaagaagugcuuguccuguggggaauccaccaccccuccaccucugccgaucaacagagccucuaccagaacgcugacgccuacguguucgugggcacauccagauauagcaagaaauuuaagccugagauugcuauccggccgaaaguccgcgagcaggaagggagaaugaauuacuauuggacccugguugagcccggagauaagauuacguucgaagccacaggcaaccugguggugccucgguacgcguuugccauggagcgcaacgcugggucuggaaucauuaucuccgacacccccguccaugauugcaauacaaccugucaaaccccuaaaggcgccaucaacacaagccuccccuuccagaauauucacccgaucacgauuggcaagugcccuaaguaugugaaaucuaccaagcugagacuugcuacagggcugcggaacguucccagcauccagucccgcggacucuuuggcgccauugccggguucaucgaaggaggcuggaccgggaugguggacggaugguacggcuaucaucaccagaaugagcaaggcucuggguacgcugcggaccugaaaagcacacagaacgccaucgaugagauuaccaauaaggucaacuccgugaucgagaaaaugaauacgcaguuuacagcuguuggaaaggaguucaaccaccuugaaaagagaauugagaaucugaacaaaaagguggacgauggcuuccucgacaucuggaccuacaaugccgaacugcugguccuccuggagaacgagcggacccuugauuaucaugacagcaaugugaaaaaccuguacgaacgcgucagaucucagcucaagaacaaugccaaagagauugggaacggauguuuugaguucuaucacaagugcgauaauacauguauggaauccgugaagaacggcaccuacgacuauccuaaauacagcgaagaggcuaagcugaaucgggaggaaaucgaugggguuaaacuugagucuacacgcaucuaucaaauucuggccaucuacuccacgguggcgagcucccucguccuggugguuucucugggcgcuauuagcuuuuggaugugcuccaacggaucucuccagugcagaguguguaucuga

SEQ ID NO: 196603 - RNA, 1701 nt, Artificial Sequence; identical to SEQ ID NO: 196445
  derived and/or modified CDS sequence (opt5) from hemagglutinin__InfluenzaA__ADF10302

SEQ ID NO: 196604 - RNA, 1701 nt, Artificial Sequence; identical to SEQ ID NO: 196445
  derived and/or modified CDS sequence (opt5) from hemagglutinin__InfluenzaA__ADF10335

SEQ ID NO: 196605 - RNA, 1701 nt, Artificial Sequence; identical to SEQ ID NO: 196445
  derived and/or modified CDS sequence (opt5) from hemagglutinin__InfluenzaA__ADF10359

SEQ ID NO: 196606 - RNA, 1701 nt, Artificial Sequence; identical to SEQ ID NO: 196598
  derived and/or modified CDS sequence (opt5) from hemagglutinin__InfluenzaA__ADF10369

SEQ ID NO: 196607 - RNA, 1701 nt, Artificial Sequence; identical to SEQ ID NO: 196598
  derived and/or modified CDS sequence (opt5) from hemagglutinin__InfluenzaA__ADF10390

SEQ ID NO: 196608 - RNA, 1701 nt, Artificial Sequence; identical to SEQ ID NO: 196445
  derived and/or modified CDS sequence (opt5) from hemagglutinin__InfluenzaA__ADF10528

SEQ ID NO: 196609 - RNA, 1701 nt, Artificial Sequence; identical to SEQ ID NO: 196598
  derived and/or modified CDS sequence (opt5) from hemagglutinin__InfluenzaA__ADF10598

SEQ ID NO: 196610 - RNA, 1701 nt, Artificial Sequence; identical to SEQ ID NO: 196598
  derived and/or modified CDS sequence (opt5) from hemagglutinin__InfluenzaA__ADF10670

SEQ ID NO: 196611 - RNA, 1701 nt, Artificial Sequence; identical to SEQ ID NO: 196598
  derived and/or modified CDS sequence (opt5) from hemagglutinin__InfluenzaA__ADF10724

SEQ ID NO: 196612 - RNA, 1701 nt, Artificial Sequence; identical to SEQ ID NO: 196445
  derived and/or modified CDS sequence (opt5) from hemagglutinin__InfluenzaA__ADF10757

SEQ ID NO: 196613 - RNA, 1701 nt, Artificial Sequence
  derived and/or modified CDS sequence (opt5) from hemagglutinin__InfluenzaA__ADF10828
augaaggccauccuggugguccuccuguacaccuucgcuacagccaacgcggacacgcuuugcauuggcuaucacgcuaauaacagcaccgauacaguugacaccgugcuggagaaaaaugugacagucacccauuccgugaaccuccuggaagauaagcacaaugggaaacuuuguaagcugagaggaguugcuccccuccaucugggcaaaugcaacaucgccggguggauucugggaaauccugagugugaaucucucagcacagccuccucuuggagcuacaucguggagaccuccucuagcgacaacggcacgugcuauccgggggauuuuauugacuacgaagaacugcgggagcagcuuuccagcgucucuuccuucgaacgcuuugagaucuuccccaagaccagcucuuggccuaaucacgauuccaacaagggagugacagccgcuuguccccaugccggcgcgaaaucuuuuuauaagaaucugaucuggcucguuaaaaagggcaacagcuacccuaaacuguccaagagcuauauuaaugacaaggggaaagaagugcuuguccuguggggaauccaccaccccuccaccucuacagaucaacagagccucuaccagaacgccgacgcuuacguguucgugggcaccuccagauauagcaagaaauuuaagccugagauugccauccggccgaaaguccgcgaucaggaggggagaaugaauuacuauuggacgcugguugaacccggagacaagauuacauucgaggcuaccggcaaccugguggugccucgguacgccuuugcgauggaacgcaacgccgggucuggaaucauuaucuccgauacacccguccaugacugcaauaccaccugucaaacaccuaaaggcgcuaucaacacgagccuccccuuccagaauauucacccgaucaccauuggcaagugcccuaaguaugugaaaucuacaaagcugagacuugccaccgggcugcggaacguucccagcauccagucccgcggacucuuuggcgcuauugccggguucaucgagggaggcuggacagggaugguggacggaugguacggcuaucaucaccagaaugaacaaggcucuggguacgccgcugaucugaaaagcacccagaacgcgaucgacaagauuacgaauaaagucaacuccgugaucgagaagaugaauacacaguuuaccgccguuggaaaggaguucaaccaccuugagaaaagaauugagaaucugaacaagaaaguggaugacggcuuccucgauaucuggaccuacaaugcugaacugcugguccuccuggagaacgaacggacacuugacuaucaugauagcaaugugaagaaccuguacgagaaaguccgcucucagcucaagaacaaugccaaggagauugggaacggauguuuugaguucuaucacaaaugcgacaauaccuguauggaauccgugaagaacggcacauacgauuauccuaaauacagcgaagaggccaagcugaauagagaagagaucgacgggguuaaacuugagucuacgcggaucuaucaaauucuggcuaucuacuccaccguggccagcucccucguccuggugguuucucugggcgcgauuagcuuuuggaugugcuccaacggaucucuccagugccgcaucuguauuuga

SEQ ID NO: 196614 - RNA, 1701 nt, Artificial Sequence; identical to SEQ ID NO: 194741
  derived and/or modified CDS sequence (opt5) from hemagglutinin__InfluenzaA__ADF10874

SEQ ID NO: 196615 - RNA, 1701 nt, Artificial Sequence; identical to SEQ ID NO: 195364
  derived and/or modified CDS sequence (opt5) from hemagglutinin__InfluenzaA__ADF10929

SEQ ID NO: 196616 - RNA, 1701 nt, Artificial Sequence; identical to SEQ ID NO: 195364
  derived and/or modified CDS sequence (opt5) from hemagglutinin__InfluenzaA__ADF10996

SEQ ID NO: 196617 - RNA, 1701 nt, Artificial Sequence; identical to SEQ ID NO: 194741
  derived and/or modified CDS sequence (opt5) from hemagglutinin__InfluenzaA__ADF27367

SEQ ID NO: 196618 - RNA, 1701 nt, Artificial Sequence; identical to SEQ ID NO: 194741
  derived and/or modified CDS sequence (opt5) from hemagglutinin__InfluenzaA__ADF27369

SEQ ID NO: 196619 - RNA, 1701 nt, Artificial Sequence
  derived and/or modified CDS sequence (opt5) from hemagglutinin__InfluenzaA__ADF27370
augaaggccauccuggugauucuccuguacaccuucgcuacagccaacgcggacacgcuuugcaucggcuaucacgcuaauaacagcaccgauacagucgacaccguucuggagaaaaaugugacagugacccauuccgucaaccuccuggaagauaagcacaaugggaaacuuuguaagcugagaggaguggcuccccuccaucugggcaaaugcaacauugccggguggauccugggaaauccugagugugaaucucucagcacagccuccucuuggagcuacauuguugagaccuccucuagcgacaacggcacgugcuauccgggggauuuuaucgacuacgaggaacugcgggagcagcuuuccagcgugucuuccuucgaacgcuuugagaucuuccccaagaccagcucuuggccuaaucacgauuccaacaagggagucacagccgcuuguccccaugccggcgcgaaaucuuuuuauaagaaucugauuuggcucgugaaaaagggcaacagcuacccuaaacuguccaagagcuauaucaaugacaaggggaaagaaguucuugugcuguggggcauucaccaccccuccaccucugccgaucaacagagccucuaccagaacgcugacgccuacguccuggugggaacauccagauauagcaagaaauucaagccugagaucgcuauucggccgaaagugcgcgaucaggaggggagaaugaauuacuauuggacccuggucgaacccggagacaagaucacguuugaggccacaggcaaccucguugugccucgguacgcguucgccauggaacgcaacgcugggucuggaauuaucaucuccgauacccccgugcaugacugcaauacaaccugucaaaccccuaaaggcgccauuaacacaagccugcccuuucagaauauccacccgauuacgaucggcaagugcccuaaguaugucaaaucuaccaaacuuagacuggcuacagggcuccggaacgugcccagcauucagucccgcggacuguucggcgccaucgccggguuuaucgagggaggcuggaccgggaugguugacggaugguacggcuaucaucaccagaaugaacaaggcucuggguacgcugcggaucuuaaaagcacacagaacgccauugacaagaucaccaauaaagugaacuccgucauugagaagaugaauacgcaguucacagcugugggaaaggaguuuaaccaccuggaaaagagaaucgagaaucucaacaagaaaguugaugacggcuuccuggauauuuggaccuacaaugccgaacugcucgugcugcuugagaacgaacggacccuggacuaucaugauagcaaugucaagaaccucuacgagaaagugcgcucucagcugaagaacaaugccaaggagaucgggaacggauguuucgaauuuuaucacaaaugcgacaauacauguauggaguccgucaagaacggcaccuacgauuauccuaaauacagcgaagaggcuaaacuuaauagagaagagaucgacggggugaagcuggagucuacacggauuuaucaaauccucgccauuuacuccacgguugcgagcucccuggugcuggucgugucucucggcgcuaucagcuucuggaugugcuccaacggaucucugcagugccgcauuuguaucuga

SEQ ID NO: 196620 - RNA, 1701 nt, Artificial Sequence; identical to SEQ ID NO: 195913
  derived and/or modified CDS sequence (opt5) from hemagglutinin__InfluenzaA__ADF27371

SEQ ID NO: 196621 - RNA, 1701 nt, Artificial Sequence
  derived and/or modified CDS sequence (opt5) from hemagglutinin__InfluenzaA__ADF27372
augaaggccauccuggugguccuccuguacaccuucgcuacagccaacgcggacacgcuuugcauuggcuaucacaccaauaacagcacagauaccguugacacagugcuggagaaaaaugugaccgucacacauuccgugaaccuccuggaagauaagcacaaugggaaacuuuguaagcugagaggaguugcuccccuccaucugggcaaaugcaacaucgccggguggauucugggaaauccugagugugaaucucucagcaccgccuccucuuggagcuacaucguggagacguccucuagcgacaacgggaccugcuauccgggcgauuuuauugacuacgaagaacugcgggagcagcuuuccagcgucucuuccuucgaacgcuuugagaucuuccccaagacaagcucuuggccuaaucacgauuccaacaagggagugaccgcugccuguccccaugcuggcgccaagagcuuuuauaaaaaucugaucuggcucguuaaaaagggcaacucuuacccuaaacuguccaagagcuauauuaaugacaaggggaaagaagugcuuguccuguggggaauccaccaccccuccacaucugcggaucaacagagccucuaccagaacgccgacgcuuacguguucgugggcaccuccagauauagcaagaaauuuaagccugagauugccauccggccgaaaguccgcgaucaggaggggagaaugaauuacuauuggacgcugguugaacccggagacaagauuacauucgaggcuaccggcaaccugguggugccucgguacgccuuugcgauggaacgcaacgccgggucuggaaucauuaucuccgauacacccguccaugacugcaauaccaccugucaaacaccuaaaggcgcuaucaacacgagccuccccuuccagaauauucacccgaucaccauuggcaagugcccuaaguaugugaaaucuacaaagcugagacuugccaccgggcugcggaacguucccagcauccagucccgcggacucuuuggcgcuauugccggguucaucgagggaggcuggacagggaugguggacggaugguacggcuaucaucaccagaaugaacaaggcucuggguacgccgcugaucugaaaagcacccagaacgcgaucgacaagauuacgaauaaagucaacuccgugaucgagaagaugaauacacaguuuaccgccguuggaaaggaguucaaccaccuugagaaaagaauugagaaucugaacaagaaaguggaugacggcuuccucgauaucuggaccuacaaugcugaacugcugguccuccuggagaacgaacggacacuugacuaucaugauagcaaugugaagaaccuguacgagaaaguccgcucucagcucaagaacaaugccaaggagauugggaacggauguuuugaguucuaucacaaaugcgacaauaccuguauggaauccgugaagaacggcacauacgauuauccuaaauacagcgaagaggccaagcugaauagagaagagaucgacgggguuaaacuugagucuacgcggaucuaucaaauucuggcuaucuacuccaccguggccagcucccucguccuggugguuucucugggcgcgauuagcuuuuggaugugcuccaacggaucucuccagugccgcaucuguauuuga

SEQ ID NO: 196622 - RNA, 1701 nt, Artificial Sequence
  derived and/or modified CDS sequence (opt5) from hemagglutinin__InfluenzaA__ADF27373
auggaggccauccuggugguccuccuguacaccuucgcuacagccaacgcggacacgcuuugcauuggcuaucacgcuaauaacagcaccgauacaguugacaccgugcuggaaaagaaugugacagucacccauuccgugaaccuccuggaggauaaacacaaugggaagcuguguaaacugagaggaguugcgccccuccaucugggcaagugcaacaucgccggguggauucugggaaauccugaaugugagucucucagcacagcuuccucuuggagcuacaucguggaaaccuccucuagcgacaacggcacgugcuauccgggggauuuuauugacuacgaggagcugaucgaacagcuuuccagcgucucuuccuucgagcgguuugaaaucuuccccaaaaccagcucuuggccuaaucacgauuccaacaagggagugacagccgcuuguccccaugccggcgccaagagcuuuuauaaaaaucugauuuggcucguuaagaaaggcaacucuuacccuaagcuguccaaaagcuauaucaaugacaaggggaaggaggugcuuguccuguggggcauucaccaccccuccaccucugccgaucaacagagccucuaccagaacgcugacgccuacguguucgugggauccagccgcuauucuaaaaaguuuaaaccugagaucgcuauuagaccgaagguccgggaucaggaagggcgcaugaauuacuauuggacacugguugagcccggagacaaaaucaccuucgaagccacgggcaaccugguggugccuagauacgcguuugccauggagcggaacgcuggguccggaauuaucaucagcgauacacccguccaugacugcaauaccacaugucaaaccccuaagggcgccauuaacaccucucuccccuuccacaauauccauccgauuacaaucggcaaaugcccuaaguauguuaagagcacgaaacugcgccuugcuaccgggcugagaaacgugcccuccauucagacacggggacucuuuggcgccaucgccggguucaucgaaggaggcuggaccgggaugguggacggaugguacggcuaucaccaccagaaugagcagggcucuggguacgcugcggaucuuaagagcacacaaaacgccauugacgagaucaccaauaaagucaacuccgugauugaaaagaugaauacgcaguuuacagcuguuggaaaagaguucaaccaucuugaaaagcgcaucgagaaucugaacaagaaaguggaugacggcuuccucgauauuuggaccuacaaugccgaacugcugguccuccuggagaacgagagaacccuugacuaucacgauagcaaugugaagaaccuguacgaaaaaguccggucucagcucaagaacaaugccaaagagaucgggaacggauguuuugaguucuaucauaagugcgacaauacauguauggaauccgugaagaacggcaccuacgauuauccuaaauacagcgaagaggcuaagcugaaucgcgaggaaaucgacgggguuaaacuugagucuacaagaauuuaucagauccuggccauuuacuccacgguggcgagcucccucguccuggugguuucucugggcgcuaucagcuuuuggaugugcuccaacggaucucuccaaugccggauuuguaucuga

SEQ ID NO: 196623 - RNA, 1701 nt, Artificial Sequence; identical to SEQ ID NO: 194983
  derived and/or modified CDS sequence (opt5) from hemagglutinin__InfluenzaA__ADF27374

SEQ ID NO: 196624 - RNA, 1701 nt, Artificial Sequence
  derived and/or modified CDS sequence (opt5) from hemagglutinin__InfluenzaA__ADF27375
auggaggccauccuggugguccuccuguacaccuucgcuacagccaacgcggacacgcuuugcauuggcuaucacgcuaauaacagcaccgauacaguugacaccgugcuggaaaagaaugugacagucacccauuccgugaaccuccuggaggauaaacacaaugggaaacuuuguaagcugagaggaguugcgccccuccaucugggcaagugcaacaucgccggguggauucugggaaauccugaaugugagucucucagcacagcuuccucuuggagcuacaucguggaaaccuccucuagcgacaacggcacgugcuauccgggggauuuuauugacuacgaggagcugcgggaacagcuuuccagcgucucuuccuucgagcgcuuugaaaucuuccccaaaaccagcucuuggccuaaucacgauuccaacaagggagugacagccgcuuguccccaugccggcgccaagagcuuuuauaaaaaucugaucuggcucguuaagaaaggcaacucuuacccuaagcuguccaaaagcuauauuaaugacaaggggaaggaggugcuuguccuguggggaauccaccaccccuccaccucugccgaucaacagagccucuaccagaacgcugacgccuacguguucgugggcuccagcagauauucuaaaaaguuuaaaccugagauugcuauccggccgaagguccgcgaucaggaagggagaaugaauuacuauuggacacugguugagcccggagacaaaauuaccuucgaagccacgggcaaccugguggugccucgguacgcguuugccauggagcgcaacgcuggguccggaaucauuaucagcgauacacccguccaugacugcaauaccacaugucaaaccccuaagggcgccaucaacaccucucuccccuuccacaauauucauccgaucacaauuggcaaaugcccuaaguauguuaagagcacgaaacugagacuugcuaccgggcugcggaacgugcccuccauccagucucgcggacucuuuggcgccauugccggguucaucgaaggaggcuggacagggaugguggacggaugguacggcuaucaccaccagaaugagcagggcagcggguacgcugcggaucaaaaguccacccagaacgccaucgacgagauuacaaauaaaaucaacagcgucauugaaaagaugaauacccaguuuacggcugugggaaaagaguucaaccaucuggaaaagagaaucgagaaucuuaacaagaaaguugaugacggcuuccuggauauuuggacauacaaugccgaacuccuggugcugcucgagaacgagcggacccuggacuaucacgauucuaaugucaagaaccuuuacgaaaaagugcgcucccagcugaagaacaaugccaaagagaucgggaacggauguuuugaguucuaucauaagugcgacaauaccuguauggaaagcgucaagaacggcacauacgauuauccuaaauacucugaagaggcuaagcucaauagagaggaaaucgacggggugaaacuggaguccacccggauuuaucaaauccuugccauuuacagcacaguugcguccucucuggugcucgucgugagccugggcgcuaucuccuuuuggaugugcucuaacggaagccugcagugccgcauuuguaucuga

SEQ ID NO: 196625 - RNA, 1701 nt, Artificial Sequence
  derived and/or modified CDS sequence (opt5) from hemagglutinin__InfluenzaA__ADF27376
augaaggccauccuggugguccuccuguacaccuucguuacagcuaacgccgacacgcuuugcauuggcuaucacgcgaauaacagcaccgauacaguggacaccgugcuggagaaaaaugucacagugacccauuccguuaaccuccuggaagauaagcacaaugggaaacuuuguaagcugagaggaguggcuccccuccaucugggcaaaugcaacaucgccggguggauucugggaaauccugagugugaaucucucagcacagccuccucuuggagcuacaucgucgagaccuccaacucugacaauggcacgugcuauccgggggauuuuauugacuacgaagaacugcgggagcagcuuagcuccgugagcucuuucgaacgcuuugagaucuuccccaagaccuccagcuggccuaaccacgauucuaauaagggaguuacagcugccuguccccaugcuggcgccaaauccuuuuauaagaaccugaucuggcucgugaaaaagggcaauagcuacccuaaacugucuaaguccuauauuaacgacaaggggaaagaaguccuugugcuguggggaauccaccaccccagcaccuccgcggaucaacagucucucuaccagaaugccgacgcuuacguguucgucggcacaagcagauauuccaagaaauuuaagccugagauugagauccggccgaaaguucgcgaucaggaagggagaaugaacuacuauuggacccugguggagcccggagacaagauuacguucgaagccacaggcaaccugguggucccucgguacgcuuuugccauggagcgcaaugcggggagcggaaucauuaucucugauacccccgugcaugacugcaacacaaccugucaaaccccuaaaggcgccaucaauacaucccuccccuuccagaacauucacccgaucacgauuggcaagugcccuaaguauguuaaaagcaccaagcugagacuugcuacagggcugcggaaugugcccucuauccagagccgcggacucuuuggcgccauugcuggguucaucgaaggaggcuggaccgggauggucgacggaugguacggcuaucaucaccagaacgagcaaggcuccggguacgccgccgaucugaaaucuacacagaaugcuaucgacaagauuaccaacaaagugaauagcguuaucgagaagaugaacacgcaguuuacagcggugggaaaggaguucaaucaccuugagaaaagaauugaaaaccugaauaagaaagucgaugacggcuuccucgauaucuggaccuacaacgccgagcugcuggugcuccuggaaaaugagcggacccuugacuaucaugauuccaacgucaagaaccuguacgagaaagugcgcagccagcucaagaauaacgcuaaggaaauugggaauggauguuuugaguucuaucacaaaugcgacaacacauguauggaaucuguuaagaauggcaccuacgauuauccuaaauacuccgaggaagccaagcugaacagagaggagaucgacggggugaaacuugaaagcacacggaucuaucaaauucuggccaucuacucuacggucgcuuccagccucgugcugguugugucccugggcgccauuucuuuuuggaugugcagcaauggaucccuccagugccgcaucuguauuuga

SEQ ID NO: 196626 - RNA, 1701 nt, Artificial Sequence
  derived and/or modified CDS sequence (opt5) from hemagglutinin__InfluenzaA__ADF27378
augaaggccauccuggugguccuccuguacaccuucguuacagcuaacgccgacacgcuuugcauuggcuaucacgcgaauaacagcaccgauacaguggacaccgugcuggagaaaaaugucacagugacccauuccguuaaccuccuggaagauaagcacaaugggaaacuuuguaagcugagaggaguggcuccccuccaucugggcaaaugcaacaucgccggguggauucugggaaauccugagugugaaucucucagcacagccuccucuuggagcuacaucgucgagaccuccaacucugacaauggcacgugcuauccgggggauuuuauugacuacgaagaacugcgggagcagcuuagcuccgugagcucuuucgaacgcuuugagaucuuccccaagaccuccagcuggccuaaccacgauucuaauaagggaguuacagcugccuguccccaugcuggcgccaaauccuuuuauaagaaccugaucuggcucgugaaaaagggcaauagcuacccuaaacugucuaaguccuauauuaacgacaaggggaaagaaguccuugugcuguggggaauccaccaccccagcaccuccgcggaucaacagucucucuaccagaaugccgacgcuuacguguucgucggcacaagcagauauuccaagaaauuuaagccugagauugccauccggccgaaaguucgcgaucaggaggggagaaugaacuacuauuggacccugguggaacccggagacaagauuacguucgaggcuacaggcaaccugguggucccucgguacgccuuugcgauggaacgcaaugccgggagcggaaucauuaucucugauacccccgugcaugacugcaacacaaccugucaaaccccuaaaggcgcuaucaauacaucccuccccuuccagaacauucacccgaucacgauuggcaagugcccuaaguauguuaaaagcaccaagcugagacuugccacagggcugcggaaugugcccucuauccagagccgcggacucuuuggcgcuauugccggguucaucgagggaggcuggaccgggauggucgacggaugguacggcuaucaucaccagaacgaacaaggcuccggguacgccgcugaucugaaaucuacacagaaugcgaucgacaagauuaccaacaaagugaauagcguuaucgagaagaugaacacgcaguuuacagccgugggaaaggaguucaaucaccuugagaaaagaauugagaaccugaauaagaaagucgaugacggcuuccucgauaucuggaccuacaacgcugaacugcuggugcuccuggagaaugaacggacccuugacuaucaugauuccaacgucaagaaccuguacgagaaagugcgcagccagcucaagaauaacgccaaggagauugggaauggauguuuugaguucuaucacaaaugcgacaacacauguauggaaucuguuaagaauggcaccuacgauuauccuaaauacuccgaagaggccaagcugaacagagaagagaucgacggggugaaacuugagagcacacggaucuaucaaauucuggcuaucuacucuacggucgccuccagccucgugcugguugugucccugggcgcgauuucuuuuuggaugugcagcaauggaucccuccagugccgcaucuguauuuga

SEQ ID NO: 196627 - RNA, 1701 nt, Artificial Sequence
  derived and/or modified CDS sequence (opt5) from hemagglutinin__InfluenzaA__ADF27389
augaaggccauccuggugguccuccuguacaccuucgcuacagccaacgcggacacgcuuugcauuggcuaucacgcuaauaacagcaccgauacaguugacaccgugcuggagaagaaugugacagucacccauuccgugaaccuccuggaagauaagcacaaugggaaacuuuguaagcugagaggaguugcuccccuccaucugggcaaaugcaacaucgccggguggauucugggaaauccugagugugaaucucucagcacagccuccucuuggagcuacaucguggagaccuccucuagcgacaacggcacgugcuauccgggggauuuuauugacuacgaagaacugcgggagcagcuuuccagcgucucuuccuucgaacgcuuugagaucuuccccaagaccagcucuuggccuaaucacgauuccaacaagggagugacagccgcuuguccccaugccggcgcgaaaucuuuuuauaagaaucugaucuggcucguuaaaaagggcaacagcuacccuaaacuguccaagagcuauauuaaugacaaggggaaagaagugcuuguccuguggggaauccaccaccccuccaccucugccgaucaacagagccucuaccagaacgcugacgccuacguguucgugggcacauccagauauagcaagaaauuuaagccugagauugcuauccggccgaaaguccgcgaucaggaggggagaaugaauuacuauuggacccugguugaacccggagacaagauuacguucgaggccacaggcaaccugguggugccucgguacgcguuugccauggaacgcaacgcugggucuggaaucauuaccuccgauacacccguccaugacugcaauaccaccugucaaacaccuaaaggcgccaucaacacgagccuccccuuccagaauauccacccgauuaccaucggcaagugcccuaaguaugugaaaucuacaaagcugagacuugcuaccgggcugcggaacguucccagcauucagucccgcggacucuuuggcgccaucgccggguucauugagggaggcuggacagggaugguggacggaugguacggcuaucaucaccagaaugaacaaggcucuggguacgcugcggaucugaaaagcacccagaacgccaucgacgagaucacgaauaaggucaacuccgugauugagaaaaugaauacacaguuuaccgcuguuggaaaggaguucaaccaccuugagaagagaaucgaaaaucugaacaaaaagguggaugacggcuuccucgauauuuggaccuacaaugccgagcugcugguccuccuggaaaacgagcggacacuugacuaucaugauagcaaugugaaaaaccuguacgagaagguccgcucucagcucaaaaacaaugccaaggaaaucgggaacggauguuuugaguucuaucacaagugcgacaauaccuguauggaauccgugaaaaacggcacauacgauuauccuaaguacagcgaggaagcuaaacugaauagagaggagauugacgggguuaaacuugaaucuacgcggaucuaucaaauccuggccauuuacuccaccguggcgagcucccucguccuggugguuucucugggcgcuaucagcuuuuggaugugcuccaacggaucucuccagugccgcauuuguaucuga

SEQ ID NO: 196628 - RNA, 1701 nt, Artificial Sequence
  derived and/or modified CDS sequence (opt5) from hemagglutinin__InfluenzaA__ADF27399
augaaggccauccuggugguccuccuguacaccuucgcuacagccaacgcggacacgcuuugcauuggcuaucacgcuaauaacagcaccgauacaguugacaccgugcuggagaaaaaugugacagucacccauuccgugaaccuccuggaagauaagcacaaugggaaacuuuguaagcugagaggaguugcuccccuccaucugggcaaaugcaacaucgccggguggauucugggaaauccugagugugaaucucucagcacagccuccucuuggagcuacaucguggagaccuccucuagcgacaacggcacgugcuauccgggggauuuuauugacuacgaagaacugcgggagcagcuuuccagcgucucuuccuucgaacgcuuugagaucuuccccaagaccagcucuuggccuaaucacgauuccaacaagggagugacagccgcuuguccccaugccggcgcgaaaucuuuuuauaagaaucugaucuggcucguuaaaaagggcaacagcuacccuaaacuguccaagagcuauauuaaugacaaggggaaagaagugcuuguccuguggggaauccaccaccccuccaccucugccgaucaacagagccucuaccagaacgcugacgccuacguguucgugggcacauccagauauagcaagaaauuuaagccugagauugcuauccggccgaaaguccgcgaucaggaggggagaaugaauuacuauuggacccugguugaacccggagacaagauuacguucgaggccacaggcaaccugguggugccucgguacgcguuugccauggaacgcaacgcugggucuggaaucauuaucuccgauacccccguccaugacugcaauacaaccugucaaaccccuaaaggcgccaucaacacaagccuccccuuccagaauauucacccgaucacgauuggcgagugcccuaaguaugugaagucuaccaaacugagacuugcuacagggcugcggaacguucccagcauccagucccgcggacucuuuggcgccauugccggguucaucgaaggaggcuggaccgggaugguggacggaugguacggcuaucaucaccagaaugagcaaggcucuggguacgcugcggaucuuaagagcacacagaacgccaucgacgagauuaccaauaaagucaacuccgugaucgaaaagaugaauacgcaguuuacagcuguuggaaaagaguucaaccaccuggaaaagagaauugagaaucugaacaagaaaguggaugacggcuuccucgauaucuggaccuacaaugccgaacugcugguccuccuggagaacgagcggacccuugacuaucaugauagcaaugugaagaaccuguacgaaaaaguccgcucucagcucaagaacaaugccaaagagauugggaacggauguuuugaguucuaucacaagugcgacaauacauguauggaguccgugaagaacggcaccuacgauuauccuaaauacagcgaagaggcuaagcugaauagagaggaaaucgacgggguuaaacuugagucuacacggaucuaucaaauucuggccaucuacuccacgguggcgagcucccucguccuggugguuucucugggcgcuauuagcuuuuggaugugcuccaacggaucucuccagugccgcaucuguauuuga

SEQ ID NO: 196629 - RNA, 1701 nt, Artificial Sequence; identical to SEQ ID NO: 195905
  derived and/or modified CDS sequence (opt5) from hemagglutinin__InfluenzaA__ADF27409

SEQ ID NO: 196630 - RNA, 1701 nt, Artificial Sequence; identical to SEQ ID NO: 196613
  derived and/or modified CDS sequence (opt5) from hemagglutinin__InfluenzaA__ADF27419

SEQ ID NO: 196631 - RNA, 1701 nt, Artificial Sequence
  derived and/or modified CDS sequence (opt5) from hemagglutinin__InfluenzaA__ADF27429
augaaggccauccuggugguccuccuguacaccuucgcuacagccaacgcggacacgcuuugcauuggcuaucacgcuaauaacagcaccgauacaguugacaccgugcuggagaaaaaugugacagucacccauuccgugaaccuccuggaagauaagcacaaugggaaacuuuguaagcugagaggaguugcuccccuccaucugggcaaaugcaacaucgccggguggauucugggaaauccugagugugaaucucucagcacagccuccucuuggagcuacaucguggagaccuccucuagcgacaacggcacgugcuauccgggggauuuuauugacuacgaggaacugcgggagcagcuuuccagcgucucuuccuucgaacgcuuugagaucuuccccaagaccagcucuuggccuaaucacgauuccaacaagggagugacagccgcuuguccccaugccggcgcgaaaucuuuuuauaagaaucugaucuggcucguuaaaaagggcaacagcuacccuaaacuguccaaguucuauauuaaugacaaggggaaagaagugcuuguccuguggggaauccaccaccccagcaccuccgccgaucaacagucucucuaccagaacgcugacgccuacguguuugugggcacaagcagauauuccaagaaauucaagccugagauugcuauccggccgaaaguccgcgaucaggaggggagaaugaauuacuauuggacccugguugaacccggagacaagauuacguuugaggccacaggcaaccugguggugccucgguacgcguucgccauggaacgcaacgcugggagcggaaucauuaucucugauacccccguccaugacugcaauacaaccugucaaaccccuaaaggcgccaucaacacaucccuccccuuucagaauauucacccgaucacgauuggcaagugcccuaaguaugugaaaagcaccaagcugagacuugcuacagggcugcggaacguucccucuauccagagccgcggacucuucggcgccauugccggguuuaucgagggaggcuggaccgggaugguggacggaugguacggcuaucaucaccagaaugaacaaggcuccggguacgcugcggaucugaaaucuacacagaacgccaucgacaagauuaccaauaaagucaacagcgugaucgagaagaugaauacgcaguucacagcuguuggaaaggaguucaaccaccuugaaaagagaauugagaaucugaacaagaaaguggaugacggcuuucucgauaucuggaccuacaaugccgaacugcugguccuccuggagaacgaacggacccuugacuaucaugauuccaaugugaagaaccuguacgagaaaguccgcagccagcucaagaacaaugccaaggagauugggaacggauguuucgaauuuuaucacaaaugcgacaauacauguaugaagucugugaaaaacggcaccuacgauuauccuaaguacuccgaggaagcuaaacugaauagagaggaaaucgacgggguuaaacuugagagcacacggaucuaucaaauucuggccaucuacucuacgguggcguccagccucguccuggugguuucccugggcgcuauuucuuucuggaugugcagcaacggaucccuccagugccgcaucuguauuuga

SEQ ID NO: 196632 - RNA, 1701 nt, Artificial Sequence; identical to SEQ ID NO: 194741
  derived and/or modified CDS sequence (opt5) from hemagglutinin__InfluenzaA__ADF27439

SEQ ID NO: 196633 - RNA, 1701 nt, Artificial Sequence
  derived and/or modified CDS sequence (opt5) from hemagglutinin__InfluenzaA__ADF27449
augaaggccauccuggugguccuccuguacaccuucgcuacaguuaacgccgacacgcuuugcauuggcuaucacgcgaauaacagcaccgauacaguggacaccgugcuggagaaaaaugucacagugacccauuccguuaaccuccuggaagauaagcacaaugggaaacuuuguaagcugagaggaguggcuccccuccaucugggcaaaugcaacaucgccggguggauucugggaaauccugagugugaaucucucagcacagccuccucuuggagcuacaucgucgagaccuccucuagcgacaacggcacgugcuauccgggggauuuuauugacuacgaagaacugcgggagcagcuuuccagcgugucuuccuucgaacgcuuugagaucuuccccaagaccagcucuuggccuaaucacgauuccaacaagggaguuacagcugccuguccccaugcuggcgccaagagcuuuuauaagaaucugaucuggcucgugaaaaagggcaacucuuacccuaaacuguccaagagcuauauuaaugacaaggggaaagaaguccuugugcuguggggaauccaccaccccuccaccucugcggaucaacagagccucuaccagaacgccgacgcuuacguguucgucggcacauccagauauagcaagaaauuuaagccugagauugccauccggccgaaaguucgcgaucaggaggggagaaugaauuacuauuggacccugguggaacccggagacaagauuacguucgaggcuacaggcaaccugguggucccucgguacgccuuugcgauggaacgcaacgccgggucuggaaucauuaucuccgauacccccgugcaugacugcaauacaaccugucaaaccccuaaaggcgcuaucaacacaagccuccccuuccagaauauucacccgaucacgauuggcaagugcccuaaguauguuaaaucuaccaagcugagacuugccacagggcugcggaacauccccagcauucagucccgcggacucuuuggcgcuaucgccggguucaucgagggaggcuggaccgggaugguggacggaugguacggcuaucaucaccagaaugaacaaggcucuggguacgccgcugaucugaaaagcacacagaacgcgauugacgagaucaccaauaaggucaacuccgugauugagaaaaugaauacgcaguuuacagccguuggaaaggaguucaaccaccuugagaagagaaucgaaaaucugaacaaaaagguggaugacggcuuccucgauauuuggaccuacaaugcugagcugcugguccuccuggaaaacgagcggacccuugacuaucaugauagcaaugugaaaaaccuguacgagaagguccgcucucagcucaaaaacaaugccaaggaaaucgggaacggauguuuugaguucuaucacaagugcgacaauacauguauggaauccgugaaaaacggcaccuacgauuauccuaaguacagcgaggaagccaaacugaauagagaggagaucgacgggguuaaacuugaaucuacacggauuuaucaaauccuggcuauuuacuccacgguggccagcucccucguccuggugguuucucugggcgcgaucagcuuuuggaugugcuccaacggaucucuccagugccgcauuuguaucuga

SEQ ID NO: 196634 - RNA, 1701 nt, Artificial Sequence; identical to SEQ ID NO: 195901
  derived and/or modified CDS sequence (opt5) from hemagglutinin__InfluenzaA__ADF27459

SEQ ID NO: 196635 - RNA, 1701 nt, Artificial Sequence; identical to SEQ ID NO: 194741
  derived and/or modified CDS sequence (opt5) from hemagglutinin__InfluenzaA__ADF27469
